(19) United States
(12) Patent Application Publication
(10) Pub. No.: US 2021/0283215 A1
(43) Pub. Date: Sep. 16, 2021

(54) BACTERIOTHERAPY AGAINST PROPRIONIBACTERIUM ACNES FOR THE TREATMENT OF ACNE

(71) Applicant: The Regents of the University of California, Oakland, CA (US)

(72) Inventors: Richard L. Gallo, San Diego, CA (US); Teruaki Nakatsuji, San Diego, CA (US); Alan O'Neill, San Diego, CA (US)

(21) Appl. No.: 17/275,851

(22) PCT Filed: Sep. 13, 2019
(86) PCT No.: PCT/US2019/051156

§ 371 Date: Mar. 12, 2021

Related U.S. Application Data
(60) Provisional application No. 62/730,999, filed on Sep. 13, 2018.

(51) Int. Cl. A61K 38/16; A61K 9/00; A61K 35/741; A61P 17/10; A61P 31/04; A61P 31/02; A61K 9/06

(52) U.S. Cl. CPC A61K 38/164; A61K 9/0014; A61K 35/741; A61K 9/06; A61P 31/04; A61P 31/02; A61P 17/10

(57) ABSTRACT

The disclosure relates to composition and methods to treat dermatological diseases and disorders and to composition useful for treating acne.

### CROSS REFERENCE TO RELATED APPLICATIONS

[0001] This application claims priority under 35 U.S.C. § 119 from Provisional Application Ser. No. 62/730,999, filed Sep. 13, 2018, the disclosures of which are incorporated herein by reference.

### STATEMENT AS TO FEDERALLY SPONSORED RESEARCH

[0002] This invention was made with Government support under Grant Nos. AI118816, AR067547, AI117673-02, AR06781, and AI052453 awarded by the National Institutes of Health. The Government has certain rights in the invention.

### INCORPORATION BY REFERENCE OF SEQUENCE LISTING

[0003] The instant application contains a Sequence Listing which has been submitted electronically in ASCII format and is hereby incorporated by reference in its entirety. Said ASCII copy, created on Sep. 13, 2019, is named 00015-354WO1_SL.txt and is 12,125,812 bytes in size.

### TECHNICAL FIELD

[0004] The disclosure relates to composition and methods to treat dermatological diseases and disorders and to composition and formulations to treat acne.

### BACKGROUND

[0005] The human skin harbors diverse microbial communities which constitute important element of innate immune barrier to defend the host from pathogens.

### SUMMARY

[0006] The disclosure provides a topical probiotic composition comprising, consisting essentially of or consisting of a microorganism selected from the group consisting of S. capitis N030_E12, S. epidermidis AMT5_C5, S. epidermidis N009_G7, S. epidermidis N018_F3 and any combination thereof.

[0007] The disclosure also provides a postbiotic composition comprising a fermentation extract of a probiotic composition comprising, consisting essentially of or consisting of a microorganism selected from the group consisting of S. capitis N030_E12, S. epidermidis AMT5_C5, S. epidermidis N009_G7, S. epidermidis N018_F3 and any combination thereof.

[0008] The disclosure also provides a pharmaceutical composition comprising a probiotic of postbiotic of the disclosure and a pharmaceutically acceptable carrier.

[0009] The disclosure also provides a method of treating a dermatological disorder associated with C. acnes (P. acnes) comprising administering an effective amount of a composition of or pharmaceutical composition of the disclosure that inhibits C. acnes growth, viability or activity. In one embodiment, the dermatological disorders is selected from the group consisting of acne, chronic blepharitis and endophthalmitis. In another or further embodiment, the administering is by topical application.

[0010] The disclosure also provides a topical composition consisting of one or more bacteria selected from S. capitis N030_E12, S. epidermidis AMT5_C5, S. epidermidis N009_G7, S. epidermidis N018_F3 and a carrier. In one embodiment, the topical composition comprises a lotion, tincture, cream or ointment.

[0011] The disclosure also provides a composition comprising a cell-free fermentation extract obtain from S. capitis N030_E12, S. epidermidis AMT5_C5, S. epidermidis N009_G7, S. epidermidis N018_F3 or any combination thereof.

[0012] The disclosure provides strains of CoNS that are potent inhibitors of Propionibacterium acnes (P. acnes), a Gram positive anaerobic bacterium that mostly resides in the hair follicles of the skin. The disclosure provides 14 strains of CoNS that produce potent antimicrobial activity against P. acnes (Table 1). These CoNS strains were screened and isolated from human skin and were from diverse species, including Staphylococcus epidermidis, Staphylococcus hominis, Staphylococcus warneri, Staphylococcus capitis and Staphylococcus lugdinensis. These anti-P. acnes CoNS strains can be used for bacterial therapy targeting P. acnes to treat patients with inflammatory acnes.

[0013] The disclosure provides methods and compositions useful for treating acne and C. acnes infection.

[0014] The disclosure provides a topical probiotic composition comprising, consisting essentially of or consisting of a microorganism selected from the group consisting of S. capitis N030_E12, S. epidermidis AMT5_C5, S. epidermidis N009_G7, S. epidermidis N018_F3 and any combination thereof.

[0015] The disclosure also provides a postbiotic composition comprising a fermentation extract of a probiotic composition comprising, consisting essentially of or consisting of a microorganism selected from the group consisting of S. capitis N030_E12, S. epidermidis AMT5_C5, S. epidermidis N009_G7, S. epidermidis N018_F3 and any combination thereof.

[0016] The disclosure also provides pharmaceutical composition of either of the above in combination with a pharmaceutically acceptable carrier.

[0017] The disclosure provides composition comprising a thickened topical formulation of one or more probiotic bacterial strains and optionally, a prebiotic compound, a protectant, humectant, emollient, abrasive, salt, and/or surfactant; wherein the one or more probiotic bacterial strain comprises one or more bacterial strains are selected from the group consisting of S. capitis, S. epidermidis and any combination thereof; wherein the composition is formulated for the topical treatment of disorders of dysbiosis of the skin, scalp, or mucosae; and wherein the composition inhibits the growth of C. acnes. In one embodiment, the one or more probiotic bacterial strain are selected from the group consisting of S. capitis N030_E12, S. epidermidis and any combination thereof. In another or further embodiment, the one or more probiotic bacterial of S. epidermidis are selected from the group consisting of S. epidermidis AMT5_C5, S. epidermidis N009_G7, S. epidermidis N018_F3 and any combination thereof. In still another embodiment, the one or more probiotic bacterial strains comprises S. capitis N030_E12, S. epidermidis AMT5_C5, S. epidermidis N009_G7, S. epidermidis N018_F3 and any combination thereof. IN another embodiment, each probiotic bacterial strain inhibits C. acnes growth. In still another or further embodiment, the one or more probiotic bacterial strains is provided in a live form. In yet another embodiment, the one or more probiotic bacterial strains is provided in a lyophilized or freeze-dried or spray dried form. In a further embodiment, the probiotic bacterium can be reconstituted into a live form.

[0018] The disclosure also provides a method of treating skin or mucosal infections, atopic dermatitis, psoriasis, mastitis, acne, or other disorders related to skin dysbiosis in humans or other mammals by applying to the skin or mucosa an effective amount of the composition of composition or formulation described herein to a subject in need thereof. In one embodiment, the composition is applied topically. In another or further embodiment, the composition is formulated as a cream, ointment, unguent, spray, powder, oil, thickened formulation or poultice.

[0019] The disclosure also provides a method of treating a dermatological disorder associated with C. acnes comprising administering an effective amount of a composition as described herein or pharmaceutical composition thereof which inhibits C. acnes growth, viability or activity. In one embodiment, the dermatological disorders is selected from the group consisting of acne, chronic blepharitis and endophthalmitis. In another or further embodiment, the administering is by topical application.

[0020] The disclosure also provides a topical composition consisting of one or more bacteria selected from S. capitis N030_E12, S. epidermidis AMT5_C5, S. epidermidis N009_G7, S. epidermidis N018_F3 and a carrier. In one embodiment, the carrier forms a lotion, tincture, cream or ointment.

[0021] The disclosure also provides a composition comprising a cell-free fermentation extract obtain a culture of S. capitis N030_E12, S. epidermidis AMT5_C5, S. epidermidis N009_G7, S. epidermidis N018_F3 or any combination thereof. The disclosure also provides a pharmaceutical composition comprising a cell-free fermentation extract obtain a culture of S. capitis N030_E12, S. epidermidis AMT5_C5, S. epidermidis N009_G7, S. epidermidis N018_F3 or any combination thereof and a pharmaceutically acceptable carrier.

[0022] The disclosure also provides a formulation for topical application comprising a cell-free fermentation extract obtain a culture of S. capitis N030_E12, S. epidermidis AMT5_C5, S. epidermidis N009_G7, S. epidermidis N018_F3 or any combination thereof and a pharmaceutically acceptable carrier. In one embodiment, the composition or formulation comprises a plurality of phenol soluble modulin peptides (PSMs). In another or further embodiment, the PSM is a PSM selected from the group consisting of PSMβ1, PSMβ3, PSMβ4, PSMβ6 and any combination thereof. In another embodiment, the composition or formulation comprises PSMβ1, 3, 4 and 6. In a further embodiment, the formulation comprises a cream, ointment, unguent, spray, powder, oil, thickened formulation or poultice.

[0023] The disclosure provides a method of treating a dermatological disorder associated with C. acnes comprising administering an effective amount of a composition or formulation of the disclosure which inhibits C. acnes growth, viability or activity.

[0024] The disclosure also provides a method of diagnosing a skin disease or disorder comprising measuring the amount of PSMβ in a sample from the skin of a subject, wherein the measurement determines the level of PSM selected from the group consisting of PSMβ1, PSMβ3, PSMβ4, PSMβ6 and any combination thereof and comparing the levels to a normal control level of PSMβ1, PSMβ3, PSMβ4, PSMβ6 and any combination thereof, wherein a level that is lower in the sample is indicative of a skin disease or disorder. In one embodiment, the skin disease or disorder is a C. acnes infection.

[0025] The details of one or more embodiments of the invention are set forth in the accompanying drawings and the description below. Other features, objects, and advantages of the invention will be apparent from the description and drawings, and from the claims.

### DESCRIPTION OF DRAWINGS

[0026] FIG. 1A-B shows domain architecture of predicted NRPS cluster in S. capitis N030_E12. A. Several genes contain domains involved in synthesis of antimicrobial peptides. AMP-binding domains suggest acyl CoA synthetase activity upstream of an acyl carrier protein (ACP). The condensation domain is found in many multi-domain enzymes that synthesize peptide antibiotics, catalyzing a condensation reaction to form peptide bonds in non-ribosomal peptide biosynthesis. Nicotinamide adenine dinucleotide (NAD)-binding domain is also present which contains the short chain dehydrogenases/reductases (SDR) superfamily domain. B. Results of sequence comparison of the S. capitis gene containing a condensation domain against known reference genes using Natural Product Domain Seeker (NaPDos)—a bioinformatic tool for the rapid detection and analysis of secondary metabolite genes in bacteria, revealing similarity with known antimicrobial products.

[0027] FIG. 2A-B shows domain architecture of predicted trans-AT PKS cluster in S. epidermidis strains. A. Polyketide synthases (PKS) polymerize simple fatty acids into a large variety of natural products, called polyketides. Notable domains within the PKS enzymes include dehydratase (DH) and ketoreductase (KR). B. Results of sequence comparison of the S. epidermidis PKS_KS-containing gene against known reference genes using NaPDos revealing similarity with known antimicrobial products.

[0028] FIG. 3 shows growth inhibition of C. acnes in sterile supernatant of multiple different C. acnes strains. Growth of lesional acne-associated strains (C. acnes 25 and 26) and a health-associated strain (C. acnes 27) was measured by OD₆₀₀ after 72 hours growth in 100% sterile supernatant of indicated C. acnes strains grown for 7 days in RCM medium. Supernatant of health-associated strains C. acnes_UCSD_HI12 and C. acnes_UCSD_HI30 (single locus sequence type D1 and A5, respectively) were potent inhibitors of C. acnes growth and chosen as attractive candidates for acne biotherapy (indicated by arrows and boxes).

[0029] FIG. 4 shows antimicrobial activity of 24 stains of coagulase negative staphylococcus isolated from the normal human skin against 2 strains of Proprionibacterium acnes (ATCC6919 and ATCC29322). Anti-P. acnes activity of each CoNS clone was measured by Radial Diffusion Assay. Briefly, 5 μl of overnight culture of each CoNS clone (white spot in each square) was spotted on a Bullucella Broth agar plate containing indicated strain of P. acnes. The agar plate was incubated under an anaerobic condition at 37° C. for 72 hours to let P. acnes grow. The black area represents zone of growth inhibition of P. acnes (see arrows). Each number represents key # of CoNS strains listed in Table A.

[0030] FIG. 5A-F shows function screening method and results to identify antimicrobial CoNS species that target C. acnes. (A) Schematic for the high-throughput antimicrobial functional screen, outlining the collection and selection of CoNS strains from two distinct healthy skin sites and assays to detect antimicrobial activity against C. acnes via coculture on agar or growth in sterile conditioned supernatant of CoNS. (B,C) Growth of C. acnes after 24 h incubation in 50% sterile filtered supernatant of the CoNS strain library (B) or growth of C. acnes with CoNS coculture in agar (C). The most potent antimicrobial CoNS isolate was selected and identified as S. capitis E12 (red), whilst S. hominus A9 (blue) did not exhibit activity against C. acnes. (D) Table showing the inhibitory activity of S. capitis E12 and S. hominus A9, against several skin commensal and pathogen strains, including several strains of C. acnes isolated from healthy and acne skin, as measured by size of zone inhibition by antimicrobial agar assay (+ small, ++ medium, +++ large). (E) Growth of C. acnes C2 after 24 h incubation in media alone or increasing concentrations of sterile supernatant of S. capitis E12 or S. hominus A9. (F) Survival of several species of staphylococci and C. acnes after 24 h post-treatment with increasing concentrations of sterile S. capitis E12 supernatant, as measured by the number of surviving CFU plated onto the appropriate selective agar.

[0031] FIG. 6A-H shows purification and identification of S. capitis E12 antimicrobial peptides. (A,B) 60% ammonium sulphate precipitated supernatant of S. capitis E12 was loaded onto a HLB column and eluted by 80% acetonitrile. The HLB eluant was loaded onto a C8 cartridge and eluted by 50% acetonitrile. Fractions were measured for activity against C. acnes by agar assay (A) and liquid culture (B). (C) Silver stain of the total protein content of S. capitis treated or untreated supernatant and the SPE flow-through and eluted fractions. (D) HPLC purification of S. capitis supernatant identified several peptide peaks, of which a single fraction (21) was identified as having anti-C. acnes activity (E). Fraction 21 was pooled from five separate HPLC runs and purified by second step HPLC resulting in two fractions (15 and 16) with anti-C. acnes activity (G). MS was performed for active fractions 15 and 16 including four non-active fractions as controls and identified four distinct PSMβ peptides as likely candidates for antimicrobial peptides. (H) Results of the top 8 peptide hits from MS detection of HPLC purified active fractions (15 and 16) and control non-active fractions (13, 14, 17 and 18) revealing peptides corresponding to ‘antibacterial protein’ and later confirmed as PSMβ peptides.

[0032] FIG. 7A-D shows whole genome sequencing of S. capitis E12 reveals sequence and predicted properties of the PSMβ peptides. (A) Schematic highlighting the S. capitis E12 genetic cluster containing six gene-encoding PSMβ peptides (PSMβ1-6). (B) Multiple sequence alignment (ClustalW) of all six PSMβ peptides, including the predicted charge for each peptide (SEQ ID NOs:9437, 9439, 9441, 9443, 9445, 9447). (C) Absence of antimicrobial activity against C. acnes during live coculture or sterile supernatant exposure with ATCC S. capitis strains 35661 and 27840 that lack PSMβ genes. (D) Representative helical wheel plot (Heliquest) of PSMβ1 indicating a predicted amphipathic structure.

[0033] FIG. 8A-F shows preclinical efficacy of PSMβ peptides and extract as a therapeutic for acne vulgaris. (A) Inhibition of C. acnes C2 after 72 h culture in the presence of S. capitis E12 extract or with synthetic peptides PSMβ1, PSMβ4, PSMβ6 individually or in combination of all three (B) Growth of C. acnes C2 cultured for 72 h in the presence of S. capitis extract or with several different antibiotics. (C) Cytotoxicity of NHEKs treated with S. capitis E12, S. epidermidis C5, S. epidermidis 1457 and S. capitis 35561 supernatant for 24 h, presented as the percentage of maximal LDH release. (D) Visual representation of erythema on the back skin of SKH1 mouse after inoculation with 1×10⁷ CFU of S. capitis E12, S. epidermidis C5, S. epidermidis 1457 and S. capitis 35661 for 24 h. (E) Total number of surviving CFU of C. acnes C2 on ex vivo pig skin explants 24 h post-treatment with S. capitis E12 extract (10 mg/mL) or PBS control. (F) Total number of surviving CFU of C. acnes C2 on SKH1 mouse back skin 24 h post-treatment with S. capitis E12 extract (10 mg/mL) or PBS control.

[0034] FIG. 9A-C shows characterization of the biological nature of the S. capitis active molecule(s). (A) Growth of C. acnes C2 was measured in liquid culture with or without S. capitis E12 supernatant untreated, boiled at 90° C. for 15 mins or separated through 10 kDa or 3 kDa MWCO columns into retained or flow-through fractions. (B) S. capitis E12 and control S. hominus A9 supernatant was subjected to papain or proteinase K proteolytic digestion (200 μg/ml) for 45 min at 37° C. and inoculated onto C. acnes-containing agar to measure antimicrobial activity. (C) CoNS supernatant was subjected to precipitation in different saturation amounts of ammonium sulphate, and antimicrobial activity of each precipitate was measured by growth of C. acnes C2 72 h post-treatment.

[0035] FIG. 10A-B shows PSMβ peptides are extracted by n-Butanol treatment of S. capitis E12 superntant. (A) Antimicrobial activity against C. acnes C2 is retained and enhanced after butanol extraction of PSMβ from sterile supernatant of S. capitis E12 and not with the lantibiotic-producing S. hominus A9. (B) Silver stain of the total protein content of S. capitis E12 supernatant before and after butanol extraction showing enrichment of small PSMβ peptides.

[0036] FIG. 11 shows PSMβ does no synergize with host LL-37 antimicrobial peptide. Assessment of synergistic antimicrobial activity against C. acnes C2 from of S. capitis E12 extract and human LL-37 antimicrobial peptide, at indicated concentrations.

### DETAILED DESCRIPTION

[0037] As used herein and in the appended claims, the singular forms “a,” “an,” and “the” include plural referents unless the context clearly dictates otherwise. Thus, for example, reference to “an agent” includes a plurality of such agents and reference to “the microorganism” includes reference to one or more microorganisms and equivalents thereof known to those skilled in the art, and so forth.

[0038] Also, the use of “or” means “and/or” unless stated otherwise. Similarly, “comprise,” “comprises,” “comprising” “include,” “includes,” and “including” are interchangeable and not intended to be limiting.

[0039] It is to be further understood that where descriptions of various embodiments use the term “comprising,” those skilled in the art would understand that in some specific instances, an embodiment can be alternatively described using language “consisting essentially of” or “consisting of.”

[0040] Unless defined otherwise, all technical and scientific terms used herein have the same meaning as commonly understood to one of ordinary skill in the art to which this disclosure belongs. Any methods and reagents similar or equivalent to those described herein can be used in the practice of the disclosed methods and compositions.

[0041] Cutibacterium acnes (C. acnes; formerly Propionibacterium acnes; C. acnes and P. acnes are used interchangeably herein) is a slow-growing, aerotolerant anaerobic, Gram-positive bacterium linked to skin acne; it can also cause chronic blepharitis and endophthalmitis, the latter particularly following intraocular surgery. Although P. acnes is a member of the normal skin commensal bacterial flora, it plays a critical role in the development of inflammatory acne when the microorganism overgrows within the pilosebaceous unit. Inflammatory acne is the most common disease of human skin afflicting up to 80% of individuals through their lives.

[0042] As mentioned C. acnes plays a critical role in the development of inflammatory acne when the microorganism overgrows within the pilosebaceous unit. Inflammatory acne is the most common disease of human skin afflicting up to 80% of individuals through their lives. Acne has many different symptoms including comedones, papules, pustules, nodules, cysts and pilosebaceous inflammation. Among these, inflammatory lesions of acne are of serious concern to patients because they may lead to acne scarring, thereby inducing adverse psychological effects. The genome of the bacterium has been sequenced and a study has shown several genes can generate enzymes for degrading skin and proteins that may be immunogenic (activating the immune system). This bacterium is largely commensal and part of the skin flora present on most healthy adult human skin. Typically, the organism is just barely detectable on the skin of healthy preadolescents. It lives primarily on, among other things, fatty acids in sebum secreted by sebaceous glands in the follicles. It may also be found throughout the gastrointestinal tract.

[0043] Reduction in P. acnes survival correlates with clinical improvement of acne in patients. Systemic antibiotics have been used to treat acne for several decades and are still widely prescribed for acne patients. Topical antibiotics are also helpful, and the oxidizing agent benzoyl peroxide (BPO) has been one of the most frequently used topical medications for acne treatment. Topical drug therapies are often used as the first line treatment for patients suffering from mild to moderate acne. However, current antibiotic treatments have major drawbacks. Systemic antibiotics non-specifically disrupts microbial ecosystem and promote antibiotic resistance. Topical antibiotics are very poor at killing P. acnes on the skin surface.

[0044] The disclosure demonstrates that coagulase-negative Staphylococci (CoNS) species that normally reside on skin such as S. epidermidis and S. capitis protect against C. acnes by producing factors that inhibit C. acnes. The disclosure thus provides prebiotics, probiotics and postbiotics that can be used to treat C. acnes infection and/or inhibit C. acnes growth.

[0045] The disclosure shows, for example, that S. capitis E12 constitutively produces antimicrobial peptides in sufficient quantities to kill C. acnes. Strikingly, incubation of a 0.6× concentration of S. capitis E12 supernatant with a strain of C. acnes that is associated with acne resulted in greater than 4 log reduction in survival of the disease-associated bacterium, and complete sterilization of the culture after 24 h. Another attractive feature was that C. acnes C2 did not show acquisition of resistance up to 20 generations. The potency and poor capacity to induce resistance from the agents including, for example, PSMs, produced by S. capitis E12 is consistent with the mode of action of the αhelix, amphipathic structure of these peptides. Such a structure is common among many antimicrobial peptides, and enables insertion into and destabilization of bacterial membranes. Such a mechanism of direct membrane disruption is ideal for an antimicrobial that works on an epithelial surface.

[0046] While the S. capitis genome contains a cluster of up to six PSM-encoding genes, PSMβ1, 3, 4 and 6 were readily detected by MS analysis of the purified active fractions. Antimicrobial assays with synthetic peptides PSMβ1, 4 and 6 revealed greater activity against C. acnes when the bacteria were treated with a combination of all three. Likewise, the expected overall charge of each PSMβ is subtly different, thus likely impacting binding capacity to a hydrophobic column as well as interaction with the bacterial membrane. Individually, the synthetic PSM peptides were far less potent than the extract. It is contemplated that PSMβ2 and PSMβ5 may also be secreted by S. capitis but eluted in different fractions that were not biologically active by themselves but would increase the activity of PSMβ1, 3, 4 and 6. The R class PSMs have been found in other staphylococci and typically number between two and four. However, their exact role has remained elusive and unlike the smaller PSMα, are not thought to be involved in virulence. S. aureus contains two (PSMs (PSMβ1/2), but neither are reported to be antimicrobial. Other studies have shown other synthetic PSMβ peptides to be inhibitory against S. aureus in vitro but not known to be active against C. acnes. Therefore, adopting the present screening approach identified activity that would not have been detectable by using a genetic screening approach alone. The optimum killing efficacy and specificity of the combination, rather than individual peptides, suggests that a therapeutic approach combining multiple PSMs or the live organism itself may be most effective. The disclosure thus shows that the skin microbiome is a valuable resource for discovering new antimicrobials that can be remarkably selective against specific pathogens and valuable in combating skin disease such as acne vulgaris.

[0047] The term “contacting” refers to exposing the skin to a topical prebiotic, probiotic and/or postbiotic composition such that the composition can kill or inhibit C. acnes on the skin.

[0048] As used herein, the term “fermentation extract” means a product of fermenting a probiotic commensal skin bacteria in a culture and under appropriate fermentation conditions. For example, culturing S. capitis N030_E12, S. epidermidis AMT5_C5, S. epidermidis N009_G7 and/or S. epidermidis N018_F3 can produce factors useful for inhibiting C. acnes growth and survival. An extract from S. capitis N030_E12, S. epidermidis AMT5_C5, S. epidermidis N009_G7 and/or S. epidermidis N018_F3 can be applied to the skin to inhibit C. acnes growth and/or infection, and/or treat acnes vulgaris. In some embodiments, the fermentation extract comprises one or more of PSM selected from the group consisting of PSMβ-1, -2, -3, -4, -5, -6 and any combination thereof.

[0049] The terms “inhibiting” or “inhibiting effective amount” refers to the amount of prebiotic, probiotic and/or postbiotic skin composition comprising, consisting essentially of or consisting of one or more probiotic microorganism and/or fermented medium or extract and/or fermentation by-products (e.g., PSMβs) and/or synthetic molecules that is sufficient to cause, for example, inhibition of C. acnes growth, proliferation or presence on the skin. The term “inhibiting” also includes preventing or ameliorating a sign or symptoms of a disorder (e.g., acne, sore, and the like).

[0050] The term “phenol soluble modulin” or “PSM” refers to a family of protein toxins that are soluble in phenols and that are produced by staphylococcus bacteria. The protein sequences of the PSMs vary. In the present disclosure a set of PSMs are identified that inhibit the growth and viability of C. acnes. These PSMs are identified in FIG. 7B (e.g., PSMβ1-6). PSMs of the disclosure can be synthesized using a peptide synthesizer or purified from fermentation extracts of cultures using for example, S. capitis E12. Alternatively, the disclosure provides the coding sequences for the PSMs of the disclosure. Such coding sequences can be used to generate PSMs by recombinant molecular biology techniques. For example, one of skill in the art can insert the coding sequence of one or more PSMs into an expression vector and then transfect or transform a suitable host cell (e.g., a bacterial cell), with the vector such that that recombinant bacteria cell expressed the one or more PSMs. Such recombinant bacteria cells can be used in a probiotic of the disclosure or can be used to produce a postbiotic (e.g., an extract) suitable for the methods described herein in the treatment of acne.

[0051] As used herein, the term “postbiotic”, “postbiotic composition” or “topical postbiotic composition” or “postbiotic skin composition” refer to the non-viable bacterial products or metabolic byproducts from the probiotic organism comprising a probiotic commensal skin bacteria fermentation extract and a pharmaceutical carrier. In certain embodiments, the postbiotic comprises at least 2, at least 3, at least 4 of PSMβ1, 3, 4, and/or 6.

[0052] As used herein, “polynucleotide” refers to a polymer of deoxyribonucleotides or ribonucleotides, in the form of a separate fragment or as a component of a larger genetic construct (e.g., by operably linking a promoter to a polynucleotide encoding a peptide of the disclosure). Numerous genetic constructs (e.g., plasmids and other expression vectors) are known in the art and can be used to produce the peptides of the disclosure in cell-free systems or prokaryotic or eukaryotic (e.g., yeast, insect, or mammalian) cells. By taking into account the degeneracy of the genetic code, one of ordinary skill in the art can readily synthesize polynucleotides encoding the peptides of the disclosure. The polynucleotides of the disclosure (those set forth in the accompanying sequence listing) can readily be used in conventional molecular biology including for the generation of probes, primers and expression constructs.

[0053] As used herein a “prebiotic” is a compound or agent that stimulate the growth and or activity of an S. epidermidis and/or S. capitis organism of the disclosure. For example, a subject afflicted with acne or a C. acnes infection can apply a prebiotic to, e.g., their skin such that the prebiotic stimulates the growth and activity of an S. epidermidis and/or S. capitis of the disclosure. The stimulated growth and activity of the S. epidermidis and/or S. capitis would thus produce an inhibitory effect on the C. acnes infection thereby treating the acne. A prebiotic compound can comprise a polysaccharide, hydrolysate, salt, herbal extract, or any other compound sufficient to foster the growth of an associated probiotic strain (e.g., S. capitis N030_E12, S. epidermidis AMT5_C5, S. epidermidis N009_G7, S. lugdnensis N028_E7, and/or S. epidermidis N018_F3) when used in combination with that strain, such as yeast hydrolysate in concentrations of less than about 40% (w/w), microcrystalline cellulose in concentrations of less than about 10% (w/w), and/or sucrose in concentrations of less than about 10% (w/w). Other examples of prebiotics that may be adapted for use with cutaneous bacteria include inulin, glucooligosaccharides, isomaltooligosaccharides, lactosucrose, polydextrose, soybean oligosaccharides, and xylooligosaccharides, and those disclosed in Gibson, G. R. and Roberfroid, M, (Eds.) Handbook of Prebiotics, CRC press (2008); Roberfroid, M., J. Nutr. 137(3):830S-837 (2007) and Slavin, J. Nutrients 5(4):1417-1435 (2013), each of which is incorporated herein by reference in its entirety.

[0054] As used herein, the term “probiotic”, “probiotic composition” or “topical probiotic composition” or “probiotic skin composition” comprises a probiotic commensal skin bacteria, an attenuated or engineered microorganism that expresses an agent (e.g., at least two or more of the PSMβ described herein) that inhibits C. acnes growth or infection, and a pharmaceutical carrier that maintain the viability of the commensal skin bacteria. In some embodiments, the probiotic comprises a suitable pharmaceutically acceptable carrier for formulation component and contains a probiotic commensal bacteria of the disclosure at a purification of at least 50-80%, 85%, 87%, 90%, 92%, 95%, 98% or 100%.

[0055] In some embodiments, a probiotic composition described herein comprise, consists essential of or consists of a probiotic organism. In further embodiments, the probiotic organism is a bacterium. In further embodiments, the bacterium comprises a component of the normal skin flora. In further embodiments, the bacterium comprises, consists essential of or consists of a strain of Staphylococcus hominis. In other embodiments, the bacterium comprises, consists essential of or consists of a strain of Staphylococcus epidermidis. In yet another embodiment, the bacterium comprises, consists essential of or consists of Staphylococcus capitis. In still another embodiment, the bacterium comprises, consists essential of or consists of Staphylococcus lugdnensis. In other embodiments, the probiotic comprises, consists essential of or consists of a mixture of strains. In some embodiments, the mixture of strains comprises, consists essential of or consists of multiple strains of S. hominis. In other embodiments, the mixture of strains comprises, consists essential of or consists of multiple strains of S. epidermidis. In other embodiments, the mixture of strains comprises, consists essential of or consists of multiple strains of S. capitis. In other embodiments, the mixture of strains comprises, consists essential of or consists of multiple strains of S. lugdnensis and/or one or more strains of S. capitis and/or one or more strains of S. lugdnensis. In other embodiments, the mixture of strains comprises, consists essential of or consists of one or more strains of S. hominis and one or more strains of S. epidermidis. In some embodiments, the composition comprises, consists essential of or consists of one or more strains in addition to S. hominis, S. epidermidis, S. capitis and/or S. lugdnensis. In some further embodiments, the additional strain or strains comprise one or more strains from the genus Staphylococcus, Lactobacillus or Lactococcus. Specific probiotic formulations may comprise, consists essential of or consists of S. capitis N030_E12, S. epidermidis AMT5_C5, S. epidermidis N009_G7, S. lugdnensis N028_E7, and/or S. epidermidis N018_F3. Such formulations typically comprise sufficient quantities of bacterial cells as to provide a final density of 10³-10⁶ CFU/cm² when applied to the skin of a subject. Such formulations may comprise concentrations of from about 10⁴ to about 10⁷ CFU/g, or alternatively, from 10 to about 10⁵ CFU/g, or alternatively, from about 10⁵ to about 10⁹ CFU/g. Such formulations may comprise multiple strains of S. hominis, S. epidermidis, S. capitis, and/or S. lugdnensis, and may further comprise Lactococcus lactis, Lactobacillus plantarum, Lactobacillus rhamnosus, Lactobacillus acidophilus, and/or other such species or strains as are known in the art to form a part of the normal healthy cutaneous or mucosal flora. In some embodiments, S. hominis (e.g., strains -A12, -C2, -D12, and/or -G1 as set forth in Table A) comprise 100% of the bacterial cells in a formulation. In some further embodiments, an S. hominis stain comprises 90-100%, 85-95%, 70-80%, 75-85%, 60-70%, 65-75%, 50-60%, 55-65%, 40-50%, 45-55%, 30-40%, 35-45%, 20-30%, 25-35%, 10-20%, 15-20%, 1-10%, 5-15%, or less than 1% of the bacterial cells in a given formulation, wherein the remainder of the colony forming units are provided by S. epidermidis, S. capitis, and/or S. lugdnensis, or Lactococcus lactis, Lactobacillus plantarum, Lactobacillus rhamnosus, Lactobacillus acidophilus, and/or other such strains as are known in the art to form a part of the normal healthy cutaneous or mucosal flora. In some embodiments, S. epidermidis strains (e.g., -N018-F3, -G6, -C5 and/or -N038F6 as set forth in Table A) comprise 100% of the bacterial cells in a formulation. In some further embodiments, S. epidermidis comprises 90-100%, 85-95%, 70-80%, 75-85%, 60-70%, 65-75%, 50-60%, 55-65%, 40-50%, 45-55%, 30-40%, 35-45%, 20-30%, 25-35%, 10-20%, 15-20%, 1-10%, 5-15%, or less than 1% of the bacterial cells in a given formulation, wherein the remainder of the colony forming units are provided by S. hominis, S. capitis, and/or S. lugdnensis, or Lactococcus lactis, Lactobacillus plantarum, Lactobacillus rhamnosus, Lactobacillus acidophilus, and/or other such strains as are known in the art to form a part of the normal healthy cutaneous or mucosal flora. In some embodiments, S. capitis strain N030-H8 comprise 100% of the bacterial cells in a formulation. In some further embodiments, S. capitis comprises 90-100%, 85-95%, 70-80%, 75-85%, 60-70%, 65-75%, 50-60%, 55-65%, 40-50%, 45-55%, 30-40%, 35-45%, 20-30%, 25-35%, 10-20%, 15-20%, 1-10%, 5-15%, or less than 1% of the bacterial cells in a given formulation, wherein the remainder of the colony forming units are provided by S. hominis, S. epidermidis, and/or S. lugdnensis, or Lactococcus lactis, Lactobacillus plantarum, Lactobacillus rhamnosus, Lactobacillus acidophilus, and/or other such strains as are known in the art to form a part of the normal healthy cutaneous or mucosal flora.

[0056] In some embodiments, bacteria other than S. hominis, S. epidermidis, S. capitis and/or S. lugdnensis comprise about 50% or less of the bacterial cells in the formulation. In some embodiments said bacteria comprise less than 50%, less than 40%, less than 30%, less than 20%, less than 10%, less than 5%, or less than 1% of the bacterial cells within a given formulation. In some embodiments, bacteria other than S. hominis, S. epidermidis, S. capitis and/or S. lugdnensis may comprise Lactococcus lactis, Lactobacillus plantarum, Lactobacillus rhamnosus, Lactobacillus acidophilus, and/or other such species or strains as are known in the art to form a part of the normal healthy cutaneous or mucosal flora. In some embodiments, the formulations can comprise a combination of 2 or 4 of the strains S. hominis, S. epidermidis, S. capitis and/or S. lugdnensis in any percentage from about 1%-99% of a particular strain (e.g., about 25% S. hominis, 25% S. epidermidis, 25% S. capitis and 25% S. lugdnensis). Any percentage or ratio of any 2 or more (e.g., 2, 3, 4) of the strains showing positive inhibition of C. acnes are contemplated herein. In some embodiments, the formulations comprise about 50% S. capitis of the strains listed above and about 50% S. epidermidis of the strains listed above. In some embodiments, the formulations comprise about 40% S. capitis of the strains listed above and about 60% S. epidermidis of the strains listed above. In some embodiments, the formulations comprise about 70% S. capitis of the strains listed above and about 30% S. epidermidis. In some embodiments, the formulations comprise about 30% S. capitis of the strains listed above and about 70% S. epidermidis of the strains listed above. In some embodiments, the formulations comprise about 80% S. capitis of the strains listed above and about 20% S. epidermidis of the strains listed above. In some embodiments, the formulations comprise about 20% S. capitis of the strains listed above and about 80% S. epidermidis of the strains listed above. In some embodiments, the formulations comprise about 90% S. capitis of the strains listed above and about 10% S. epidermidis of the strains listed above. In some embodiments, the formulations comprise greater than about 90% S. capitis of the strains listed above and less than about 10% S. epidermidis of the strains listed above. In some embodiments, the formulations comprise less than about 10% S. capitis of the strains listed above and greater than about 90% S. epidermidis of the strains listed above.

[0057] As used herein, the term “Probiotic Commensal Skin Bacteria” includes a microorganism of the skin microbiome. The probiotic commensal skin bacteria can include a composition of bacterial that inhibits C. acnes growth or infection or kills C. acnes. In one embodiment, a probiotic commensal skin bacteria comprises one or more bacteria selected from the group consisting of is S. capitis N030_E12, S. epidermidis AMT5_C5, S. epidermidis N009_G7 and S. epidermidis N018_F3.

[0058] The term “purified” and “substantially purified” as used herein refers to cultures, or co-cultures of microorganisms or of biological agent (e.g. fermentation media and extracts, fractionated fermentation media, fermentation by-products, peptide, polypeptide, gene, polynucleotide etc.) that is substantially free of other cells or components found in the natural environment with which an in vivo-produced agent would naturally be associated. The level of purification can vary from about 50-80% pure for a certain microorganism or agent to 100% pure of a certain microorganism or agent.

[0059] The term “therapeutically effective amount” as used herein for treatment of a subject afflicted with a disease or disorder resulting from overgrowth or infection by C. acnes means an amount of a prebiotic, probiotic and/or postbiotic skin composition or extract thereof sufficient to ameliorate a sign or symptom of the disease or disorder. For example, a therapeutically effective amount can be measured as the amount sufficient to decrease a subject's symptoms of acne. Typically, the subject is treated with an amount to reduce a symptom of a disease or disorder by at least 50%, 90% or 100%. Generally, the optimal dosage will depend upon the disorder and factors such as the weight of the subject, the type of bacteria, the sex of the subject, and degree of symptoms. Nonetheless, suitable dosages can readily be determined by one skilled in the art.

[0060] As used herein, the term “topical” can include administration to the skin externally, as well as shallow injection (e.g., intradermally and intralesionally) such that a topical probiotic composition described herein comes in direct contact with skin and dermal layer.

[0061] The disclosure provides whole cell preparations comprising a substantially homogeneous or substantially pure preparation of S. capitis N030_E12, S. epidermidis AMT5_C5, S. epidermidis N009_G7 and/or S. epidermidis N018_F3. Such a preparation can be used in the preparation of compositions for the treatment of acne, inflammation and microbial infections. Whole cell preparation can comprise S. capitis N030_E12, S. epidermidis AMT5_C5, S. epidermidis N009_G7 and/or S. epidermidis N018_F3. The disclosure also provides fractions derived from such whole cells comprising agents that reduce C. acnes growth or viability in the skin.

[0062] The ability of a first bacterial composition (e.g., S. capitis) to inhibit the activity of a second bacterial composition (e.g., C. acnes) can be determined by contacting, e.g., a probiotic or postbiotic with, for example, a C. acnes and measuring the growth or viability of the C. acnes before and after contacting the probiotic or postbiotic. Contacting of an organism with a topical probiotic composition of the disclosure can occur in vitro, for example, by adding the topical probiotic or postbiotic composition to a bacterial culture. Alternatively, contacting can occur in vivo, for example by contacting the topical probiotic or postbiotic composition with a subject afflicted with a skin disease or disorder.

[0063] A probiotic commensal skin bacterial preparation or postbiotic composition can be prepared in any number of ways. In one embodiment, a probiotic commensal skin bacterial preparation is prepared by culturing and isolating a bacterial strain selected from the group consisting of S. capitis N030_E12, S. epidermidis AMT5_C5, S. epidermidis N009_G7, S. epidermidis N018_F3 and any combination thereof and resuspending the bacterial strain(s) in a suitable carrier. In another embodiment, a postbiotic composition is prepared by culturing a commensal bacterial strain selected from the group consisting of S. capitis N030_E12, S. epidermidis AMT5_C5, S. epidermidis N009_G7, S. epidermidis N018_F3 and any combination thereof under condition to obtain a fermentation product, obtaining a cell-free preparation of the fermentation extract and combining the extract with a suitable carrier.

[0064] Any of a variety of methods known in the art can be used to administer a topical probiotic or postbiotic compositions to a subject. For example, a probiotic or postbiotic skin composition or extract or synthetic preparation of the disclosure may be formulated for topical administration (e.g., as a lotion, cream, spray, gel, or ointment). Such topical formulations are useful in treating or inhibiting microbial, fungal, viral presence or infections or inflammation on the skin. Examples of formulations include topical lotions, creams, soaps, wipes, and the like.

[0065] In yet another embodiment, a topical probiotic composition is provided that comprises a plurality of probiotic commensal skin bacteria. When used for the treatment of acne or other skin diseases or disorders associated with increased C. acne levels or activity, the composition comprises one or more bacteria that inhibit such C. acnes on the skin. In such instances, the probiotic commensal skin bacteria is a coagulase negative Staphylococcus sp. In one embodiment, the probiotic commensal skin bacterial is selected from the group consisting of S. capitis N030_E12, S. epidermidis AMT5_C5, S. epidermidis N009_G7, S. epidermidis N018_F3 and any combination thereof.

[0066] In another embodiment, the topical probiotic composition comprises a postbiotic commensal skin bacteria fermentation extract that inhibits C. acnes growth or activity on the skin. In various aspects, the bacteria from which the extract is produced comprises S. capitis N030_E12, S. epidermidis AMT5_C5, S. epidermidis N009_G7 and/or S. epidermidis N018_F3.

[0067] In accordance with a further embodiment, the topical compositions above can be formulated as a lotion, shake lotion, cream, ointment, gel, foam, powder, solid, paste or tincture.

[0068] In another embodiment, a bandage or dressing is provided comprising the topical prebiotic, probiotic and/or postbiotic compositions described above. In various embodiments, a bandage or dressing is provided the major constituents of which includes a matrix and a probiotic commensal skin bacteria that inhibits C. acnes on the skin. In various embodiments, a bandage or dressing is provided the major constituents of which includes a matrix and a postbiotic that inhibits C. acnes on the skin.

[0069] A pharmaceutical composition comprising a probiotic skin composition disclosed herein comprising a commensal bacteria (e.g., S. capitis N030_E12, S. epidermidis AMT5_C5, S. epidermidis N009_G7 and/or S. epidermidis N018_F3), may be formulated in any dosage form that is suitable for topical administration for local or systemic effect, including emulsions, solutions, suspensions, creams, gels, hydrogels, ointments, dusting powders, dressings, elixirs, lotions, suspensions, tinctures, pastes, foams, films, aerosols, irrigations, sprays, suppositories, bandages, dermal patches. The topical formulation comprising a probiotic disclosed herein may also comprise liposomes, micelles, microspheres, nanosystems, and mixtures thereof.

[0070] A “pharmaceutically acceptable carrier” is intended to include solvents, dispersion media, coatings, antibacterial and antifungal agents (as needed so long as they are not detrimental to the probiotic commensal bacteria), isotonic and absorption delaying agents, and the like. The use of such media and agents for pharmaceutically active substances is well known in the art. Except insofar as any conventional media or agent is incompatible with the pharmaceutical composition, use thereof in the therapeutic compositions and methods of treatment is contemplated. Supplementary active compounds can also be incorporated into the compositions.

[0071] Pharmaceutically acceptable carriers and excipients suitable for use in the topical formulations disclosed herein include, but are not limited to, aqueous vehicles, water-miscible vehicles, non-aqueous vehicles, stabilizers, solubility enhancers, isotonic agents, buffering agents, antioxidants, local anesthetics, suspending and dispersing agents, wetting or emulsifying agents, complexing agents, sequestering or chelating agents, penetration enhancers, cryopretectants, lyoprotectants, thickening agents, and inert gases.

[0072] A pharmaceutical composition comprising a probiotic may be formulated in the forms of ointments, creams, sprays and gels. Suitable ointment vehicles include oleaginous or hydrocarbon vehicles, including such as lard, benzoinated lard, olive oil, cottonseed oil, and other oils, white petrolatum; emulsifiable or absorption vehicles, such as hydrophilic petrolatum, hydroxystearin sulfate, glycerol and anhydrous lanolin; water-removable vehicles, such as hydrophilic ointment; water-soluble ointment vehicles, including polyethylene glycols of varying molecular weight; emulsion vehicles, either water-in-oil (W/O) emulsions or oil-in-water (O/W) emulsions, including cetyl alcohol, glyceryl monostearate, lanolin, and stearic acid (see, Remington: The Science and Practice of Pharmacy). These vehicles are emollient but generally require addition of antioxidants and preservatives.

[0073] Suitable cream base can be oil-in-water or water-in-oil. Cream vehicles may be water-washable, and contain an oil phase, an emulsifier, and an aqueous phase. The oil phase is also called the “internal” phase, which is generally comprised of petrolatum and a fatty alcohol such as cetyl or stearyl alcohol. The aqueous phase usually, although not necessarily, exceeds the oil phase in volume, and generally contains a humectant. The emulsifier in a cream formulation may be a nonionic, anionic, cationic, or amphoteric surfactant.

[0074] Gels are semisolid, suspension-type systems. Single-phase gels contain material substantially uniformly throughout the liquid carrier. Suitable gelling agents include crosslinked acrylic acid polymers, such as carbomers, carboxypolyalkylenes, Carbopol®; hydrophilic polymers, such as polyethylene oxides, polyoxyethylene-polyoxypropylene copolymers, and polyvinylalcohol; cellulosic polymers, such as hydroxypropyl cellulose, hydroxyethyl cellulose, hydroxypropyl methylcellulose, hydroxypropyl methylcellulose phthalate, and methylcellulose; gums, such as tragacanth and xanthan gum; sodium alginate; and gelatin. In order to prepare a uniform gel, dispersing agents such as alcohol or glycerin can be added, or the gelling agent can be dispersed by trituration, mechanical mixing, and/or stirring.

[0075] In another embodiment, a pharmaceutical composition comprising a prebiotic, probiotic and/or postbiotic disclosed herein, can be formulated either alone or in combination with one or more additional therapeutic agents, including, but not limited to, chemotherapeutics, antibiotics (so long as they do not destroy the probiotic benefits), antifungal-agents, anti-pruritics, analgesics, protease inhibitors and/or antiviral agents.

[0076] Topical administration, as used herein, include (intra)dermal, conjunctival, intracorneal, intraocular, ophthalmic, auricular, transdermal, nasal, vaginal, uretheral, respiratory, and rectal administration. Such topical formulations are useful in treating or inhibiting infections of the eye, skin, and mucous membranes (e.g., mouth, vagina, rectum). Examples of formulations in the market place include topical lotions, creams, soaps, wipes, and the like.

[0077] Solutions or suspensions for use in a pressurized container, pump, spray, atomizer, or nebulizer may be formulated to contain ethanol, aqueous ethanol, or a suitable alternative agent for dispersing, solubilizing, or extending release of the active ingredient disclosed herein, a propellant as solvent; and/or a surfactant, such as sorbitan trioleate, oleic acid, or an oligolactic acid.

[0078] Materials useful in forming an erodible matrix include, but are not limited to, chitin, chitosan, dextran, and pullulan; gum agar, gum arabic, gum karaya, locust bean gum, gum tragacanth, carrageenans, gum ghatti, guar gum, xanthan gum, and scleroglucan; starches, such as dextrin and maltodextrin; hydrophilic colloids, such as pectin; phosphatides, such as lecithin; alginates; propylene glycol alginate; gelatin; collagen; and cellulosics, such as ethyl cellulose (EC), methylethyl cellulose (MEC), carboxymethyl cellulose (CMC), CMEC, hydroxyethyl cellulose (HEC), hydroxypropyl cellulose (HPC), cellulose acetate (CA), cellulose propionate (CP), cellulose butyrate (CB), cellulose acetate butyrate (CAB), CAP, CAT, hydroxypropyl methyl cellulose (HPMC), HPMCP, HPMCAS, hydroxypropyl methyl cellulose acetate trimellitate (HPMCAT), and ethylhydroxy ethylcellulose (EHEC); polyvinyl pyrrolidone; polyvinyl alcohol; polyvinyl acetate; glycerol fatty acid esters; polyacrylamide; polyacrylic acid; copolymers of ethacrylic acid or methacrylic acid (EUDRAGIT, Rohm America, Inc., Piscataway, N.J.); poly(2-hydroxyethyl-methacrylate); polylactides; copolymers of L-glutamic acid and ethyl-L-glutamate; degradable lactic acid-glycolic acid copolymers; poly-D-(−)-3-hydroxybutyric acid; and other acrylic acid derivatives, such as homopolymers and copolymers of butylmethacrylate, methylmethacrylate, ethylmethacrylate, ethylacrylate, (2-dimethylaminoethyl)methacrylate, and (trimethylaminoethyl)methacrylate chloride.

[0079] If desired, a suitable therapy regime can combine administration of a prebiotic, probiotic and/or postbiotic composition of the disclosure with one or more additional therapeutic agents (e.g., an inhibitor of TNF, an antibiotic, and the like). The peptide (s), other therapeutic agents, and/or antibiotic(s) can be administered, simultaneously, but may also be administered sequentially. Suitable antibiotics include aminoglycosides (e.g., gentamicin), beta-lactams (e.g., penicillins and cephalosporins), quinolones (e.g., ciprofloxacin), and novobiocin. Generally, the antibiotic is administered in a bactericidal amount. A “bactericidal amount” is an amount sufficient to achieve a bacteria-killing concentration in the subject receiving the treatment. In accordance with its conventional definition, an “antibiotic,” as used herein, is a chemical substance that, in dilute solutions, inhibits the growth of, or kills microorganisms. Also encompassed by this term are synthetic antibiotics (e.g., analogs) known in the art.

[0080] Compositions provided herein can be used concurrently with other antibacterial agents including sulfa drugs such as sulfamethizole, sulfisoxazole, sulfamonomethoxine, sulfamethizole, salazosulfapyridine, silver sulfadiazine and the like; quinoline antibacterial agents such as nalidixic acid, pipemidic acid trihydrate, enoxacin, norfloxacin, ofloxacin, tosufloxacin tosilate, ciprofloxacin hydrochloride, lomefloxacin hydrochloride, sparfloxacin, fleroxacin and the like; antiphthisics such as isoniazid, ethambutol (ethambutol hydrochloride), p-aminosalicylic acid (calcium p-aminosalicylate), pyrazinamide, ethionamide, protionamide, rifampicin, streptomycin sulfate, kanamycin sulfate, cycloserine and the like; antiacidfast bacterium drugs such as diaphenylsulfone, rifampicin and the like; antiviral drugs such as idoxuridine, acyclovir, vidarabine, ganciclovir and the like; anti-HIV agents such as zidovudine, didanosine, zalcitabine, indinavir sulfate ethanolate, ritonavir and the like; antispirocheteles; antibiotics such as tetracycline hydrochloride, ampicillin, piperacillin, gentamicin, dibekacin, kanendomycin, lividomycin, tobramycin, amikacin, fradiomycin, sisomycin, tetracycline, oxytetracycline, rolitetracycline, doxycycline, ampicillin, piperacillin, ticarcillin, cephalothin, cephapirin, cephaloridine, cefaclor, cephalexin, cefroxadine, cefadroxil, cefamandole, cefotoam, cefuroxime, cefotiam, cefotiam hexetil, cefuroxime axetil, cefdinir, cefditoren pivoxil, ceftazidime, cefpiramide, cefsulodin, cefinenoxime, cefpodoxime proxetil, cefpirome, cefozopran, cefepime, cefsulodin, cefinenoxime, cefinetazole, cefminox, cefoxitin, cefbuperazone, latamoxef, flomoxef, cefazolin, cefotaxime, cefoperazone, ceftizoxime, moxalactam, thienamycin, sulfazecin, aztreonam or a salt thereof, griseofulvin, lankacidin-group and the like.

[0081] In yet a further embodiment, a composition (e.g., a prebiotic, probiotic and/or postbiotic composition) provided herein can be combined with one or more steroidal drugs known in the art, including, but not limited to, aldosterone, beclometasone, betamethasone, deoxycorticosterone acetate, fludrocortisone acetate, hydrocortisone (cortisol), prednisolone, prednisone, methylprenisolone, dexamethasone, and triamcinolone.

[0082] In yet a further embodiment, a composition (e.g., a prebiotic, probiotic and/or postbiotic composition) provided herein can be combined with one or more anti-fungal agents, including, but not limited to, amorolfine, amphotericin B, anidulafungin, bifonazole, butenafine, butoconazole, caspofungin, ciclopirox, clotrimazole, econazole, fenticonazole, filipin, fluconazole, isoconazole, itraconazole, ketoconazole, micafungin, miconazole, naftifine, natamycin, nystatin, oxyconazole, ravuconazole, posaconazole, rimocidin, sertaconazole, sulconazole, terbinafine, terconazole, tioconazole, and voriconazole.

[0083] For use in the therapeutic applications described herein, kits and articles of manufacture are also described herein. Such kits can comprise a carrier, package, or container that is compartmentalized to receive one or more containers such as vials, tubes, and the like, each of the container(s) comprising one of the separate elements to be used in a method described herein. Suitable containers include, for example, bottles, vials, syringes, and test tubes. The containers can be formed from a variety of materials such as glass or plastic.

[0084] For example, the container(s) can comprise one or more compositions (e.g., a prebiotic, probiotic and/or postbiotic composition) provided herein, optionally in combination with another agent as disclosed herein. Such kits optionally comprise a composition disclosed herein with an identifying description or label or instructions relating to its use in the methods described herein.

[0085] The disclosure provides a more selective and potent method for killing and/or inhibiting the growth of C. acnes. The disclosure provides strains of skin commensal bacteria that produce selective antimicrobial activity against pathogenic bacterial strains, but not against other members of skin microflora. Therefore, antimicrobial therapy using commensal bacterial strains would selectively kill target strains of microorganisms. The capacity for selective killing of pathogenic bacteria over the normal microflora is highly desirable because it may help to maintain homeostasis and shape the normal bacterial community. Most skin commensal strains of CoNS produce multiple antimicrobials. In this case, antimicrobial therapy using commensal strains of bacteria would have a low risk of generating a resistant mutant against antibiotics. Because the strains of CoNS provided here are originally isolated from normal human skin, they would be low toxicity to the host. This disclosure may be used as a live bacterial application or as a sterile extract of the bacteria (e.g., fermentation extract) or as purified active protein or as synthetic peptides.

[0086] The disclosure provides several coagulase-negative Staphylococci (CoNS) strains as well as two Cutibacterium acnes (C. acnes) strains that are potent antagonists of acne-associated C. acnes strains.

[0087] Table A provides a plurality of coagulase-negative Staphylococci (CoNS) strains that have anti-P. acnes activity:

TABLE A

| | | | Anti-P. acnes | Anti-P. acnes |
|---|---|---|---|---|
| | | | activity | activity |
| Key# | Species | Strain/Clone ID | (ATCC6919)* | (ATCC29322)* |
| 1 | Staphylococcus epidermidis | NIAMS009-G7 | ++ | ++ |
| 2 | Staphylococcus epidermidis | NIAMS018-F3 | +++ | +++ |
| 3 | Staphylococcus warneri | NIAMS025-G2 | + | + |
| 4 | Staphylococcus epidermidis | NIAMS028-H4 | − | − |
| 5 | Staphylococcus epidermidis | NIAMS028-C12 | − | − |
| 6 | Staphylococcus lugdnensis | NIAMS028-E7 | + | +++ |
| 7 | Staphylococcus capitis | NIAMS030-H8 | +++ | +++ |
| 8 | Staphylococcus epidermidis | NIAMS034-C1 | − | − |
| 9 | Staphylococcus epidermidis | AMT1-A9 | − | + |
| 10 | Staphylococcus hominis | AMT2-A12 | − | − |
| 11 | Staphylococcus hominis | AMT3-A12 | +++ | +++ |
| 12 | Staphylococcus hominis | AMT4-C2 | +++ | ++ |
| 13 | Staphylococcus hominis | AMT4-D12 | +++ | ++ |
| 14 | Staphylococcus hominis | AMT4-G1 | +++ | ++ |
| 15 | Staphylococcus epidermidis | AMT5-G6 | +++ | +++ |
| 16 | Staphylococcus epidermidis | AMTS-C5 | +++ | +++ |
| 17 | Staphylococcus epidermidis | S.epiA11 | − | − |
| 18 | Staphylococcus hominis | S.homC2 | +++ | ++ |
| 19 | Staphylococcus epidermidis | NIAMS037-H2 | − | − |
| 20 | Staphylococcus epidermidis | NIAMS037-A9 | − | − |
| 21 | Staphylococcus epidermidis | NIAMS038-A10 | − | − |
| 22 | Staphylococcus epidermidis | NIAMS038-F6 | +++ | +++ |
| 23 | Staphylococcus hominis | S.homA9 | ++ | − |
| 24 | Staphylococcus epidermidis | S.epil457 | − | − |

[0088] #17 in Table A (S. epidermidis A11) has been deposited with the ATCC as accession number PTO-125202; #23 in Table A (S. hominis A9) has been deposited with the ATCC as accession number PTA-125203; #24 in Table A was used as a negative control strain which produces no antimicrobial activity. See, FIG. 4 for potency of antimicrobial activity against two P. acnes strains.

[0089] The disclosure exemplifies 4 strains of CoNS from skin: S. capitis N030_F12, S. epidermidis ANT5_C5, S. epidermidis N009_G7 and S. epidermidis NO18_F3. A listing of sequences comprising all detected open reading frames from each of the foregoing strains accompanies this disclosure and is incorporated herein for all purposes. Accordingly, the strains of the disclosure (e.g., S. capitis N030_F12, S. epidermidis ANT5_C5, S. epidermidis N009_G7 and S. epidermidis N018_F3) can be identified using various probes and sequencing techniques and the sequence listing provided herein. For example, the strain S. capitis N030_F12 can be identified by determining whether an isolated S. capitis strain expresses one or more of the nucleic acid sequences identified by SEQ ID Nos: 1 to 2377 or produces PSMβ1, 3, 4 and 6 (see, e.g., SEQ ID NOs: 9437, 9441, 9443 and 9447). Similarly, the strains S. epidermidis AMT5_C5, S. epidermidis N009_G7 and S. epidermidis N018_F3 can be identified by determining whether an isolated S. epidermidis AMT5_C5, S. epidermidis N009_G7 and S. epidermidis N018_F3 strain expresses one or more of the nucleic acid sequences identified by SEQ ID Nos: 2378 to 4765 (S. epi C5); 4766 to 7145 (S. epi, G7); or 7146 to 9435 (S. epi F3), respectively.

[0090] These strains are attractive candidates for biotherapy as they demonstrated broad antibacterial activity against multiple different strain types of C. acnes isolated from healthy and acne skin, but were less potent against other Gram-positive skin commensals and Gram-negatives (Table 1). In addition, two strains of C. acnes: C. acnes_UCSD_HI12 and C. acnes_UCSD_HI30, which demonstrated potent inhibition of different C. acnes strains by radial diffusion assay (Table 2) and in liquid culture (FIG. 3) are also described. The application/contacting of selected CoNS or C. acnes strains to the skin target and eliminant C. acnes, the etiological agent of acne, and not other skin resident bacteria which may play beneficial role in health.

TABLE 1
Results of CoNS antagonism towards multiple different bacterial species by radial diffusion
assay. Zone of killing/inhibition by radial diffusion: + small ++ medium +++ large

| | | Rank order for application | | | |
|---|---|---|---|---|---|
| | | 1 | 2 | 3 | 4 |
| Sequence | Bacterial genus, species | S. capitis | S. epidermidis | S. epidermidis | S. epidermidis |
| type | and strain name | N030_E12 | AMT5_C5 | N009_G7 | N018_F3 |
| N/A | S. aureus Newman | | +++ | ++ | +++ |
| N/A | S. aureus USA300 | | +++ | ++ | +++ |
| N/A | S. aureus 113 | +++ | +++ | +++ | +++ |
| N/A | Group A | | | | |
| | Streptococcus NZ131 | | | | |
| N/A | Group B | | | | |
| | Streptococcus DK23 | | | | |
| N/A | S. hominus 27844 | + | + | + | |
| N/A | S. lugdensis | + | | | |
| N/A | S. warneri | | | | |
| N/A | S. epidermidis 12228 | + | | | |
| N/A | E. coli RS218 | | | | |
| N/A | P. aeruginosa PA01 | | | | |
| N/A | P. aeruginosa PA4 | | | | |
| N/A | S. Typhimurium 14028 | | | | |
| N/A | A. baumannii AB5075 | | | | |
| Sequence | Cutibacterium acnes strain | S. capitis | S. epidermidis | S. epidermidis | S. epidermidis |
| type | and site of origin | N030_E12 | AMT5_C5 | N009_G7 | N018_F3 |
| K1 | C. acnes HL042PA3 | +++ | ++ | ++ | +++ |
| | Health | | | | |
| K2 | C. acnes CRA7 Health | +++ | | | |
| K1 | C. acnes NIKH1 Health | ++ | + | + | + |
| A2 | C. acnes LNGA1 Health | +++ | ++ | ++ | ++ |
| H1 | C. acnes TRUF3 Health | +++ | | | |
| H1 | C. acnes | +++ | ++ | + | ++ |
| | A15NonLesional PA07 | | | | |
| C2 | C. acnes | ++ | +++ | +++ | +++ |
| | AI15NonLesional PA03 | | | | |
| E3 | C. acnes | +++ | +++ | +++ | ++ |
| | AI09NonLesional PA01 | | | | |
| E3 | C. acnes | +++ | ++ | ++ | ++ |
| | AI09NonLesional PA04 | | | | |
| F4 | C. acnes Lesional 104.1 | +++ | + | + | + |
| C2 | C. acnes | +++ | ++ | ++ | +++ |
| | AI01Lesional PA22 | | | | |
| A1 | C. acnes | +++ | ++ | ++ | ++ |
| | AI15Lesional PA10 | | | | |
| C2 | C. acnes | +++ | ++ | + | + |
| | AI01Lesional PA23 | | | | |

TABLE 2
Several distinct C. acnes strains isolated from skin of healthy individuals (HI) were also
found to inhibit the growth of different C. acnes strains from both healthy and acne-affected
skin. Two distinct strains of C. acnes. C. acnes_UCSD_HI12 and C. acnes_UCSD_HI30
produced a potent inhibitory product against several strains of C. acnes. Both live cultures and
sterile supernatant of both strains were found to inhibit the growth of C. acnes measured by
radial diffusion in agar (Table 2) and liquid culture (FIG. 3).

| C. acnes | | | | | | | | | |
|---|---|---|---|---|---|---|---|---|---|
| strains | | | C. α1 | C. α2 | C. α3 | C. α4 | C. α6 | C. acnes_UCSD_HI12 | C. α8 |
| | SLST | Origin | F4 | FA | D1 | D1 | A1 | D1 | H1 |
| C. α30 | A1 | Health | | | | | | | |
| C. α31 | A1 | Health | | | | | | | |
| C. α32 | H1 | Acne | | | | | | | |
| C. α33 | H1 | Acne | | | | | | | |
| C. α34 | K1 | Health | | | | | | + | |
| C. α35 | K1 | Health | | | | | | | |
| C. α36 | K2 | Health | | | | | | | |
| C. α37 | K2 | Health | | | | | | +++ | |
| C. α38 | C2 | Acne | | | | | | +++ | |
| C. α39 | C2 | Acne | + | | | | | | |
| C. α40 | C1 | Acne | | | | | | | |
| C. α41 | C1 | Acne | | | | | | | |
| C. α42 | D1 | Health | | | | | | | |
| C. α43 | D1 | Acne | | | | | | | |
| C. α44 | F4 | Acne | | | | | | + | |
| C. α45 | F1 | Health | | | | | | | |
| S. aureus | I13 | N/A | | | | | | | |
| S. capitis | E12 | N/A | | | | | | | |

| C. acnes | | | | | | | (control) |
|---|---|---|---|---|---|---|---|
| strains | C. α9 | C. α10 | C. α11 | C. acnes_UCSD_HI30 | C. α12 | C. α13 | S. capitis |
| | K2 | C1 | C1 | A5 | F4 | F1 | N030_E12 |
| C. α30 | | | | | | | +++ |
| C. α31 | | | | | | | +++ |
| C. α32 | | | | ++ | | | +++ |
| C. α33 | | | | ++ | | | +++ |
| C. α34 | | | | | | | +++ |
| C. α35 | | | | | | | ++ |
| C. α36 | | | | | | + | ++ |
| C. α37 | | | | + | | | ++ |
| C. α38 | | | | + | | | ++ |
| C. α39 | | | | + | | | ++ |
| C. α40 | | | | + | | | +++ |
| C. α41 | | | | ++ | | | +++ |
| C. α42 | | | | | | | +++ |
| C. α43 | | | | ++ | | | +++ |
| C. α44 | | | | | | | +++ |
| C. α45 | | | | + | | | ++ |
| S. aureus | | | | | | | +++ |
| S. capitis | | | | | | | |

[0091] The four Staphylococcal strains included in this disclosure have been sequenced and found to contain several biosynthetic gene clusters encoding predicted non-ribosomal peptide synthetases (NRPSs) and/or polyketide synthases (PKSs). These are major multi-modular enzyme complexes which synthesize secondary metabolites such as antimicrobial peptides, antibiotics and siderophores. Each module of an NRPS cluster activates a different amino or carboxyl acid, followed by their sequential condensation to synthesize a linear or cyclic natural product (see, FIG. 1). FIG. 1 highlights such a NRPS cluster in S. capitis N030_E12 identified by antiSMASH—a comprehensive resource that permits the genome-wide identification, annotation and analysis of secondary metabolite biosynthetic gene clusters in bacterial genomes. The S. capitis NRPS cluster contains several genes with specific signature domains potentially involved in synthesis of an antimicrobial peptide such as gramicidin and tyrocidine. FIG. 2 highlights a trans-AT polyketide synthase (PKS) cluster in S. epidermidis strains AMT5_C5, N009_G7 and N018_F3 identified by antiSMASH. The PKS machinery contains three essential domains: the acyl transferase (AT), the acyl carrier protein (ACP) and the ketosynthase (KS). For example, some polyketides produced by Bacillus species include difficidin and macrolactin. Therefore, this PKS cluster present within all three S. epidermidis species could be a source for novel antimicrobial peptides.

[0092] In one embodiment, the disclosure provides a probiotic composition for topical delivery comprising a CoNS commensal skin bacteria of the disclosure (e.g., S. capitis N030_E12, S. epidermidis AMT5_C5, S. epidermidis N009_G7 and/or S. epidermidis N018_F3). In a further embodiment, the topical composition contains only 1, 2, 3 or 4 of the strains selected from the group consisting of S. capitis N030_E12, S. epidermidis AMT5_C5, S. epidermidis N009_G7 and S. epidermidis N018_F3. In still another embodiment, a topical probiotic composition of the disclosure can comprise or consist of a commensal skin bacteria selected from the group consisting of S. capitis N030_E12, S. epidermidis AMT5_C5, S. epidermidis N009_G7 and S. epidermidis N018_F3, and any combination of the foregoing, wherein the commensal skin bacteria is substantially pure (e.g., 80%, 85%, 87%, 90%, 92%, 95%, 98% or 100% pure of other bacteria species found on the skin of a subject.

[0093] In some embodiments, the composition comprises a cream, ointment, oil suspension or unguent wherein the probiotic bacteria (e.g., S. capitis N030_E12, S. epidermidis AMT5_C5, S. epidermidis N009_G7, S. lugdnensis N028_E7, and/or S. epidermidis N018_F3) as described above are incorporated within a moisturizer or emulsion such as those described below and in Nakatsuji, T. et al. (2016), Nature Medicine. In some embodiments, the composition comprises a patch or poultice wherein the bacteria are combined with a suitable excipient and are incorporated within a fabric, gel matrix, or polymer sheet. Suitable excipients and carriers for topical administration are known in the art and include thickeners, emulsifiers, fatty acids, polysaccharides, polyols, and polymers and copolymers, including, without limitation, alginate, microcrystalline cellulose, polylactic acid, polylactic-co-glycolic acid, petrolatum, and numerous others known in the art.

[0094] In some embodiments, the composition comprises a bacterial culture medium, a conditioned bacterial culture medium, and/or a bacterial culture. In some embodiments, the composition comprises a filtrate or supernatant of a bacterial culture medium. In some embodiments, the composition comprises a lyophilized culture medium. In some embodiments, the composition comprises a lyophilized conditioned culture medium produced from a filtrate or supernatant of a bacterial culture medium.

[0095] In some embodiments, the method as described herein comprises supporting the health of the skin of a subject. In further embodiments, the method comprises providing a treatment for skin dysbiosis and disorders (e.g., acne) derived therefrom. In some embodiments the method comprises providing a treatment for bacterial infection of the skin (e.g., C. acne infection or overgrowth). In some embodiments, the treatment comprises the steps of: identifying a subject with skin dysbiosis, bacterial infection, acne; and administering to the site of the condition in need of treatment the probiotic compositions as disclosed herein. Determination of the appropriate mode of administration of a given formulation (ointment, gel, patch, etc.) can be done by one of ordinary skill in the art of treating skin infections. In some further embodiments, the probiotic compositions are re-applied at regularly timed intervals. In some embodiments, the probiotic compositions are reapplied every three days. In some embodiments, the probiotic compositions are reapplied every two days. In some embodiments, the probiotic compositions are reapplied every two days. In some embodiments, the probiotic compositions are reapplied daily. In some embodiments, the probiotic compositions are reapplied more than once per day. In some embodiments, the probiotic compositions are reapplied weekly. In some embodiments, the probiotic compositions are only applied a single time.

[0096] In some embodiments, the method comprises providing a treatment for C. acnes infections. In some further embodiments, the method comprises the steps of: diagnosing a C. acnes infection; and applying to the site of the infection the probiotic and/or prebiotic compositions as disclosed herein, wherein such compositions are capable of killing or inhibiting the growth of C. acnes, either by production of antimicrobial compounds, by competition for resources within the cutaneous or mucosal biota, or by other means. Determination of the appropriate mode of administration of a given formulation (ointment, gel, patch, etc.) can be done by one of ordinary skill in the art of treating skin infections. In some further embodiments, the probiotic compositions are re-applied at regularly timed intervals (e.g., daily, every two days, every three days, weekly, etc.). It will be apparent to one of ordinary skill in the art that in other embodiments, similar or identical steps can be applied to provide a treatment for C. acnes. In some embodiments, the method comprises providing a treatment for infections with unknown or uncharacterized pathogens. In some embodiments, the method comprises providing a treatment for a chronic skin condition.

[0097] A commensal bacterial of the disclosure can be isolated from human skin and identified using methods described herein. For example, the disclosure provides a method of obtaining, identifying and culturing a commensal bacteria described herein by swabbing human skin surface using, e.g., a foam tip swab. The swabs were placed in tryptic soy broth. The broth is diluted onto mannitol salt agar plates (MSA) supplemented with 3% egg yolk. Pink colonies without halo representing coagulase-negative Staphylococci (CoNS) strains are collected and grown in tryptic soy broth (TSB). The strain can then be assayed as described in FIG. 4 (see also, FIG. 5A). Strains with strong inhibition of C. acnes can be further characterized by DNA isolation and sequencing or by PCR, southern or northern blots. In addition, measurement of the expression profile of phenol soluble modulins can also be measured. In some embodiments, organisms expressing PSMβ1, 3, 4 and 6 (e.g., SEQ ID NOs: 9437, 9441, 9443, and 9447) can be identified as S. capitis. PSMβ from S. epidermidis are provided in SEQ ID NOs: 9449, 9451 and 9453.

[0098] gDNA can be isolated using any number of commercially available kits (e.g., DNeasy UltraClean Microbial Kit, Qiagen). The gDNA can be sequenced using various sequence platforms (e.g., MiSeq; Illumina Inc., San Diego, Calif. for two cycles, which can generated 2×250 bp paired-end reads). Adapters are removed using cutadapt (see, e.g., world-wide-web at cutadapt.readthedocs.io/en/stable/). Low-quality sequences can be removed using Trim Galore (see, e.g., world-wide-web at bioinformatics.babraham.ac.uk/projects/trim_galore/) with default parameters. Sequences mapping to the human genome are removed from the quality-trimmed dataset using the Bowtie2 program (ver. 2.28) (1) with parameters (-D 20 -R 3 -N 1 -L 20—very-sensitive-local) and the human reference genome hg19. The filtered reads are de novo assembled using SPAdes (version 3.8.0) with k-mer length ranging from 33-127. The genome is annotated with rapid annotation of microbial genomes using subsystems technology (RASY) with default parameters. Predicted amino acid sequences and or the nucleic acid sequences can be compared to the sequence listing attached hereto to identify S. capitis N030_E12, S. epidermidis AMT5_C5, S. epidermidis N009_G7 and S. epidermidis N018_F3.

[0099] The disclosure also provides compositions that comprise at least 2, at least 3, at least 4, at least 5 or at least 6 PSMβ. In some embodiments, the composition comprises at least 4 PSMβ. In yet other embodiments the composition comprises at least 5 PSMβ. In any of the foregoing embodiments, the PSMβ are selected from PSMβ1, 2, 3, 4, 5, and 6. In certain embodiments, the composition comprises at least PSMβ1, 3, 4, and 6.

[0100] The disclosure also provides formulations for topical administration comprising comprise at least 2 PSMβ. In some embodiments, the formulation comprises at least 3 PSMβ. In yet other embodiments the formulation comprises at least 4 PSMβ. In any of the foregoing embodiments, the PSMβ are selected from PSMβ1, 2, 3, 4, 5, and 6 produced from S. capitis E12 and/or having a sequence that is at least 85%, 90%, 92%, 94%, 95%, 96%, 97%, 98%, 99% or 100% identical to the PSMs set forth in each of SEQ ID NOs: 9437, 9439, 9441, 9443, 9445, 9447. In certain embodiments, the formulation comprises at least PSMβ1, 3, 4, and 6. In some embodiments, the formulation comprises at least 3 of PSMβ1, 3, 4, and 6 and a probiotic, prebiotic or postbiotic of the disclosure.

[0101] The disclosure also provides a method of diagnosing skin dysbiosis and/or risk of a C. acnes infection. The method comprises obtaining a biological sample from the skin of a subject and determining the relative abundance of commensal bacteria in the sample, wherein the abundance includes determining the abundance of at least the presence of S. capitis and S. epidermidis. More particularly, the determining can measure the abundance of at least 1 to 4 (e.g., 1, 2, 3 or 4) of the bacteria selected from the group consisting of S. capitis N030_E12, S. epidermidis AMT5_C5, S. epidermidis N009_G7, and S. epidermidis N018_F3. If the level or abundance of S. capitis or S. epidermidis (e.g., S. capitis N030_E12, S. epidermidis AMT5_C5, S. epidermidis N009_G7, S. epidermidis N018_F3) falls below a threshold of less than 50%, 40%, 30%, 20%, 10%, 5%, 2.5%, 1%, 0.5%, 0.1% then the subject is at risk of having a C. acnes infection.

[0102] In another embodiment, the presence of one or more the PSMβ produced by S. capitis E12 can be determine in a sample from the subject in determining if the subject has or is at risk of having a C. acnes infection. For example, the sample can be obtained from the skin of a subject, extracted with n-butanol and the presence of PSMβs measured as described herein. The presence of PSMβ1, 3, 4 and 6 in the sample is indicative of a reduced risk of infection. In contrast no or low levels (levels below a normal average control) is indicative of a subject having or at risk of having a C. acnes infection. A “normal” or “average control” level is a level of PSMβ (e.g., PSMβ1, 3, 4, and/or 6) that is the mean level of total PSMβ or mean level of each type of PSMβ (e.g., PSMβ1, 3, 4 or 6) in a population of subjects that do not have a C. acnes infection. In one embodiment a determination of the sequence of each PSMβ present in the extract sample can be determined and then compared to the sequences as set forth in SEQ ID NOs: 9437, 9439, 9441, 9443, 9445, 9447, to determine which type of PSMβ is present.

[0103] In a further embodiment, the methods of diagnosis and/or prognosis can be used to determine if a subject needs a prebiotic, probiotic or postbiotic therapy as described herein.

[0104] The following examples are exemplary and are not intended to limit the claimed invention, but rather illustrate methods of compositions of the disclosure.

### Example

[0105] Human subjects and sample swab collection. All experiments involving human subjects were carried out according to protocols approved by the University of California, San Diego (UCSD) IRB (Project #140144). Swab sample collection was performed on 12 healthy adults with swabs taken from the upper arm and the face. Swabs were incubated in 3% Tryptic Soy Broth (TSB), vortexed briefly and plated onto mannitol salt agar containing egg yolk (MAY) plate for selective growth of staphylococcal species. S. aureus were distinguished from CoNS according to mannitol metabolism and the egg yolk reaction. C. acnes clinical isolates were obtained by swabbing lesional and non-lesional facial skin sites of 10 acne patients as well as facial skin from 6 healthy volunteers. Swabs were incubated in reinforced clostridial media (RCM), vortexed and plated onto brucella blood agar plates supplemented with Vitamin K, hemin and 5% sheeps blood and incubated for 5 days at 37° C.

[0106] Screening for antimicrobial activity from skin-derived CoNS. 24 individual isolated colonies of CoNS, that were selected from each skin site, were randomly picked from a MAY plate and transferred to TSB (1 mL) in a deep 96 well plate. Each plate contained a previously characterized CoNS strain, which included S. epidermidis ATCC1457 that failed to demonstrate antimicrobial activity against other staphylococci (negative control) as well as S. hominus A9 which was previously demonstrated to produce lantibiotics that kill S. aureus (positive control). The CoNS plate was sealed with sterile Aeraseal film (sigma) and cultured at 37° C. overnight, shaking at 250 rpm. Bacterial growth was evaluated by measuring OD₆₀₀ and only CoNS grown to a high density (OD₆₀₀>6.0) were used for subsequent analysis. To measure antimicrobial activity in the secreted supernatant, the CoNS supernatant from overnight culture was harvested and sterile filtered. To measure antimicrobial activity from live growing CoNS, bacteria from overnight culture were pelleted by centrifugation then the supernatant was discarded, and the bacteria were resuspended in fresh TSB.

[0107] Mass spectrometry. A portion of the fractions of interest (<1 μg) were dried under vacuum and resuspended in 5 μL of 5% acetonitrile with 5% formic acid. Next, individual LC-MS experiments were conducted on ⅕ of each sample through 85 minutes of data acquisition on an Orbitrap Fusion (Thermo Fisher Scientific) mass spectrometer with an in-line Easy-nLC 1000 (Thermo Fisher Scientific). A home-pulled and packed 30 cm column was triple-packed with 0.5 cm, 0.5 cm and 30 cm of 5 μm C4, 3 μm C18, and 1.8 μm C18 respectively and heated to 60° C. for use as the analytical column. Peptides were first loaded at 500 bar which was followed by a chromatography gradient ranging from 6 to 25% acetonitrile over 70 minutes followed by a 5-minute gradient to 100% acetonitrile, which was held for 10 minutes. Electrospray ionization was performed by applying 2000V through a stainless-steel T-junction connecting the analytical column and Easy-nLC system. Each sample was followed by two washes starting with a gradient from 3 to 100% acetonitrile over 15 minutes with an additional 10 minutes at 100% acetonitrile. An m/z range of 375-1500 was scanned for peptides with charge states between 2-6. Centroided data was used for quantitation of peaks. Acquisition was run in a data-dependent positive ion mode. Raw spectra was searched in Proteome Discoverer Version 2.1 against a uniprot reference database for Staphylococcus capitis (Uniprot proteome UP000042965, accessed Oct. 1, 2018) using the Sequest algorithm alongside a reverse database approach used to control peptide and protein false discoveries to 1%. No enzyme was specified in the search and a minimum peptide length was set to 6 amino acids. Search parameters included a precursor mass tolerance of 50 ppm and fragment mass tolerance of 0.6 Da and variable oxidation for modifications.

[0108] In vitro antimicrobial assays. For the initial CoNS antimicrobial screen, the radial diffusion agar assays were performed using S. aureus 113 or either C. acnes HL110PA3 (health-associated, SLST K1) or C. acnes HL096PA1 (acne-associated, SLST C2). For the radial diffusion agar assays, melted TSB or RCM agar (12 mL) was mixed with S. aureus or C. acnes (1×10⁶ CFU) and poured into a 10 cm square petri square. When the agar was solidified, a 10 μl aliquot of bacteria was inoculated onto a single grid. The plates were incubated at 37° C. overnight shaking (for S. aureus) or incubated at 37° C. for 3 days in a 2.5 L anaeroPack (thermo Scientific) (for C. acnes) to allow visible growth of bacteria. Antibacterial activity was indicated by a clear zone of inhibition within the agar that surrounds the colony. The size of the inhibitory zone was recorded as a measure of antimicrobial activity (+ slight, ++ moderate, or +++ potent). For the liquid culture assay, conditioned supernatant from overnight cultures of CoNS were harvested and sterile filtered (0.22 μm). 50% of conditioned supernatant was mixed with 50% fresh TSB or RCM containing 1×10⁵ CFU/mL of S. aureus or C. acnes, in a 96 well round bottom plate. S. aureus plates were incubated at 37° C. shaking overnight and C. acnes plates incubated standing at 37° C. in an anaerobic chamber. Bacterial growth was measured by OD₆₀₀ and positive antimicrobial strains were identified as those that suppressed bacterial growth to less than 50% (I₅₀) of growth measured for negative control strains. Bacterial survival was measured by counting the number of CFU on TSB plates (S. aureus) or Brucella blood agar plates (C. acnes). At selected times post-treatment with bacterial supernatant or extracts, the number of CFU was determined by serial dilution in phosphate-buffered saline (PBS) and plating onto appropriate agar media. Bacterial survival was measured as the total number of CFU per milliliter.

[0109] Purification of antimicrobials produced by CoNS strains. Conditioned media from overnight cultures of the selected antibacterial S. capitis E12 strain, including positive control antimicrobial S. hominus A9 strain, were first sterilized by filtration through a 0.22 μm Millipore filter. Initial characterization involved treating the sterile bacterial supernatant to boiling at 100° C. for 15 mins or incubation with proteolytic enzymes papain and proteinase K, at 200 μg/mL at 37° C. for 60 mins. Antimicrobial activity was measured by radial diffusion assay. For size exclusion of the antimicrobial molecule, 20 mL of conditioned media was loaded onto a 3, 10 and 30 kDa molecular weight cutoff (MWCO) columns (Pierce) and centrifuged at 4000×g for 15 mins. Whilst the flow-through fraction was set aside, and the retained fraction was washed 2× in PBS and resuspended with 20 mL TSB. Antimicrobial activity was assessed for both fractions. To precipitate the active molecule, ammonium sulphate was added to the sterile supernatant (30-80% saturation) for 1 hour under constant rotation at room temperature, followed by centrifugation at 4000×g for 45 mins. The resulting pellet was washed 3× with H₂O and reconstituted in H₂O. Antimicrobial activity was determined by S. aureus and C. acnes growth in agar and liquid culture.

[0110] Solid Phase Extraction (SPE) and HPLC purification of supernatant. S. capitis E12 sterile supernatant that had been retained on a 10 kDa MWCO column and precipitated in 60% AS was applied on an Oasis HLB cartridge (Waters). The cartridge was washed in 20% acetonitrile in H₂O and eluted in 80% acetonitrile in H₂O. The eluted fractions were lyophilized and reconstituted in H₂O. The 80% fraction was then loaded onto a C8 Sep-Pak cartridge (Waters), washed in 20% acetonitrile and eluted in 50% acetonitrile. The fractions were lyophilized, reconstituted in H₂O and then assessed for antimicrobial activity and visualized by silver stain (Pierce) according to manufacturer's instructions. First step HPLC purification was carried out with 1 mg of S. capitis E12 butanol extract loaded into a CapCel Pak C8 (5 μm, 300 Å, 4.6×250 mm) (Shiseido Co.) with a linear gradient of acetonitrile from 10% to 60% in 0-1% (v/v) TFA at 0.8 mL/min. Fractions were lyophilized then resuspended in H₂O and antimicrobial activity assessed by liquid culture assay. Up to five sequential purifications were carried out with each single antimicrobial fraction pooled together for second step HPLC. For the second purification, a linear gradient of acetonitrile from 25% to 50% was adopted.

[0111] Transplantation of antimicrobial CoNS on pigskin and mice. All experiments involving live animal work were in accordance with the approval of the Institutional Animal Care and Use Guidelines of the University of California, San Diego. Fresh-frozen pig skin sheets were obtained from Loretta Tomlin Animal Technologies (Livermore, Calif.) and sanitized by surgical brush with 3% chloroxylenol. The skin sheet was cut into 2.5 cm×2.5 cm and rinsed 20× times with sterile PBS more. 1×10⁷ CFU C. acnes (ATCC6919) was epicutaneously challenged on pig skin for 1 hour and 100 μl of S. capitis E12 extract (10 mg/mL) or PBS control was applied for 24 h. Live bacteria were harvested by swabbing to measure C. acnes survival. For mouse experiments, the backs of hairless SKH1 mice were scrubbed with alcohol wipes and 1×10⁷ CFU C. acnes was inoculated onto sterile gauze pads which were placed onto the dorsal skin and secured with tegaderm film for 24 h. C. acnes-containing gauze pad was removed and 100 μl of S. capitis E12 extract (10 mg/mL) or PBS control was inoculated onto fresh gauze pad and placed back onto the same dorsal skin site and secured with tegaderm film for an additional 24 h. 48 h post-inoculation, skin was swabbed to measure surviving CFU of C. acnes.

[0112] Screening for antimicrobial activity from human skin bacteria identifies a S. capitis strain with potent and selective activity against C. acnes. A library of 288 CoNS isolates were collected from skin swabs of the forearm and face of healthy volunteers. An unbiased analysis of anti-C. acnes activity was performed by live coculture with the CoNS isolate growing on agar with C. acnes and measuring the growth of C. acnes following the addition of 50% v/v conditioned CoNS supernatant that was sterile filtered (FIG. 5A). Results of the functional screen revealed a total of 13 isolates that were active against the growth of C. acnes in both the liquid assays and agar coculture (FIG. 5B,C). DNA extracted from the CoNS isolates with antimicrobial activity was subjected to 16S sequencing and several different species were identified, including S. epidermidis and S. hominis which are considered frequent colonizers of human skin. The most potent isolate was identified as Staphylococcus capitis (S. capitis strain E12) and was used for further characterization. Of the 13 antimicrobial strains identified, all were isolated from the forearm. None of the facial isolates were found to inhibit the growth of C. acnes. Interestingly, the lantibiotic-producing S. hominus A9 strain that is active against S. aureus was ineffective against C. acnes, illustrating the selective nature of antimicrobials derived from the mixed bacterial community of the skin.

[0113] Next, the selectivity of S. capitis E12 to inhibit the growth of several different CoNS commensal species and common skin pathogens was tested by agar assay. Whilst the S. hominus A9 potently inhibited the growth of S. aureus and GAS, S. capitis E12 exhibited only weak activity against CoNS and was ineffective against other skin pathogens (FIG. 5D). Strikingly, S. capitis E12 exhibited potent activity against a wide range of C. acnes strains, including strains that were isolated from either lesional or non-lesional skin of acne patients. 50% dilution of unconcentrated media sterile supernatant from S. capitis E12 was sufficient to inhibit C. acnes growth, thus validating the findings from the functional screen and demonstrating that under normal growth conditions this strain of S. capitis can produce sufficient antimicrobial activity to outcompete C. acnes (FIG. 5E). To investigate if the antimicrobial supernatant is bactericidal, the number of surviving C. acnes colonies was enumerated after 24 h treatment with increasing concentrations of S. capitis E12. Consistent with results from the functional screen, S. capitis supernatant was generally not bactericidal against other CoNS species, with exception to the S. hominus strain 27844 only at the highest 10× concentration. However, the S. capitis E12 supernatant was bactericidal against C. acnes, showing a 6-log decrease of C. acnes during exposure to 0.6× (60%) supernatant and complete sterilization of the culture at highest concentrations (FIG. 5F).

[0114] Purification and identification of PSMβ antimicrobial peptides. Initial examination into the nature of the antimicrobial factor revealed it to be resistant to heat treatment, but sensitive to proteolysis, suggestive of a proteinaceous molecule (Suppl. FIG. 1A,B). Furthermore, the antimicrobial factor was precipitated from supernatant during incubation with 60-80% ammonium sulphate (AS) and concentrated by centrifugation (FIG. 9C). Next, sample preparation was carried out on the concentrated AS precipitate using solid phase extraction. Samples were first loaded onto a hydrophilic-lipophilic balanced (HLB) column and the anti-C. acnes molecule was found to be eluted at 80% acetonitrile, as determined 72 h after inoculation onto C. acnes agar (FIG. 6A) or with C. acnes in liquid culture (FIG. 6B). The active elution was subsequently loaded onto a hydrophobic C8 cartridge and the anti-C. acnes molecule was eluted at 50% acetonitrile (FIG. 6A,B). Total protein staining of the fractions revealed a highly enriched band(s) of roughly 4-5 kDa in size, with greater purity visible during subsequent elution steps (FIG. 5C). Reverse phase high performance liquid chromatography (HPLC) revealed several peaks, of which a single fraction (fraction 21) was found to suppress the growth of C. acnes in liquid culture (FIG. 5D). To ensure the highest purity, the active fractions were then pooled together from four separate HPLC runs and a second step HPLC purification was performed. This time, several small peaks were visualized (FIG. 6F), and two fractions (fractions 15 and 16) were found to suppress the growth of C. acnes in liquid culture (FIG. 6G). Mass spectrometry (MS) analysis of active fractions (15,16) and control non-active fractions (13,14,17,18) revealed four candidate peptides referred to as “antibacterial protein” each 5 kDa in size (FIG. 6H). BLAST search of the peptide sequences identified these as belonging to the beta class family of phenol soluble modulins (PSMβ) present within multiple Staphylococcal species.

[0115] Whilst 4 distinct PSMβ peptides were detected by MS, analysis of the S. capitis E12 genome revealed up to 6 PSMβ-encoding genes, contained within an operon-like structure (FIG. 7A). All six PSMβ-encoding genes are closely related, with amino acid sequence identity ranging from 56% to 91%, and predicted charge ranging from −1 to +1 (FIG. 7B). Further analyses found these genes to be absent from genomes of ATCC strains of S. capitis 35661 and 27844 and indeed no antimicrobial activity was detected against C. acnes from these laboratory strains (FIG. 7C). Alpha helical wheel plots (Heliquest) also predicted these peptides to form an α-helix, amphipathic-like structure for each PSM, with separate hydrophobic and hydrophilic faces on the opposite sides of the long axis of the peptide. This amphipathic structure is common amongst many well characterized antimicrobial peptides (FIG. 7D).

[0116] PSMβ inhibits skin colonization by C. acnes. S. capitis E12 conditioned supernatant was extracted with n-Butanol, a procedure that enriches for PSM peptides. This resulted in a relatively pure extract enriched for all PSMβ peptides, and retained activity against C. acnes (FIG. 10). To confirm that PSMβ peptides were active as the anti-C. acnes molecule, and identify which peptide had opitimal activity, PSMβ1 and 6, the most abundant molecules from the purified active fractions (15 and 16, FIG. 6H), as well as PSMβ4, which was less abundant, were individually synthesized. All three PSMs were shown to possess antimicrobial activity in vitro (FIG. 8A). PSMβ1 and 6 both effectively inhibited growth of C. acnes at 62 μg/ml, whilst PSMβ4 was less potent, inhibiting at 125 μg/ml. Interestingly, the combination of all three peptides exhibited optimal activity against C. acnes, inhibiting growth in 31 μg/ml. However, this was not as inhibitory compared to the same concentration of the butanol extract, which inhibited at 8 μg/ml. This discrepancy could be due to the presence of the additional fourth PSMβ peptide (PSMβ3) found within the extract. Several bacterial antimicrobials have been shown to synergize with human antimicrobials such as defensins and LL37. However, exposure of C. acnes to S. capitis extract with or without LL-37 peptide did not result in enhanced killing activity (FIG. 11). Given the greater potency and relative purity of the PSMβ-containing extract compared to the synthetically produced PSMβ peptides, the extract was used in subsequent experiments to determine the efficacy and potency of S. capitis E12 in vitro and in vivo experiments.

[0117] S. capitis E12 extract was next compared to several antibiotics commonly used for acne treatment. The extract was more potent against C. acnes than erythromycin, clindamycin and tetracycline, antibiotics which are commonly prescribed for acne treatment (FIG. 8B). Moreover, no increase in the MIC (16 μg/mL) was recorded for C. acnes during treatment with the extract for up to 20 generations, indicating relative inability to promote resistance. Furthermore, exposure of primary human keratinocytes (NHEKs) to extracts did not produce a significant cytotoxic response from these epidermal cells as measured by lactate dehydrogenase (LDH) release (FIG. 8C). Likewise, mouse back skin exposed to different strains of CoNS for 24 h showed that S. capitis E12 did not induce observable erythema or injury (FIG. 8D). Finally, having confirmed the expected result that this commensal skin bacterium was well tolerated by the epidermis, C. acnes was epicutaneously applied to colonize pig skin ex vivo or back skin of live SKH1 mouse, and then extract from S. capitis E12 was applied. A single treatment resulted in a significant reduction in C. acnes CFU in both models (FIG. 8E,F). Overall, these results demonstrate PSMβ from S. capitis E12 has capacity to kill C. acnes and illustrates the potential of exploiting naturally occurring microbial events in the human skin for development of therapeutics.

[0118] A number of embodiments of the disclosure have been described. Nevertheless, it will be understood that various modifications may be made without departing from the spirit and scope of the disclosure. Accordingly, other embodiments are within the scope of the following claims.

What is claimed is:

1. A topical probiotic composition comprising, consisting essentially of or consisting of a microorganism selected from the group consisting of S. capitis N030_E12, S. epidermidis AMT5_C5, S. epidermidis N009_G7, S. epidermidis N018_F3 and any combination thereof.

2. A postbiotic composition comprising a fermentation extract of a probiotic composition of claim 1.

3. A pharmaceutical composition comprising a probiotic of postbiotic of claim 1 or 2 and a pharmaceutically acceptable carrier.

4. A composition comprising a thickened topical formulation of one or more probiotic bacterial strains and optionally, a prebiotic compound, a protectant, humectant, emollient, abrasive, salt, and/or surfactant;
wherein the one or more probiotic bacterial strain comprises one or more bacterial strains are selected from the group consisting of S. capitis, S. epidermidis and any combination thereof;
wherein the composition is formulated for the topical treatment of disorders of dysbiosis of the skin, scalp, or mucosae; and
wherein the composition inhibits the growth of C. acnes.

5. The composition according to claim 4, wherein the one or more probiotic bacterial strain are selected from the group consisting of S. capitis N030_E12, S. epidermidis and any combination thereof.

6. The composition according to claim 5, wherein the one or more probiotic bacterial of S. epidermidis are selected from the group consisting of S. epidermidis AMT5_C5, S. epidermidis N009_G7, S. epidermidis N018_F3 and any combination thereof.

7. The composition according to claim 5, wherein one or more probiotic bacterial strains comprises S. capitis N030_E12, S. epidermidis AMT5_C5, S. epidermidis N009_G7, S. epidermidis N018_F3 and any combination thereof.

8. The composition according to claim 5, wherein each probiotic bacterial strain inhibits C. acnes growth.

9. The composition according to claim 4, wherein the one or more probiotic bacterial strains is provided in a live form.

10. The composition according to claim 4, wherein the one or more probiotic bacterial strains is provided in a lyophilized or freeze-dried or spray dried form.

11. The composition according to claim 10, wherein the probiotic bacterium can be reconstituted into a live form.

12. A method of treating skin or mucosal infections, atopic dermatitis, psoriasis, mastitis, acne, or other disorders related to skin dysbiosis in humans or other mammals by applying to the skin or mucosa an effective amount of the composition of any of claims 4-11 to a subject in need thereof.

13. The method according to claim 12, wherein the composition is applied topically.

14. The method according to claim 13, wherein the composition is formulated as a cream, ointment, unguent, spray, powder, oil, thickened formulation or poultice.

15. A method of treating a dermatological disorder associated with C. acnes comprising administering an effective amount of a composition of any one of claim 1, 2 or 4-11 or pharmaceutical composition which inhibits C. acnes growth, viability or activity.

16. The method of claim 12, wherein the dermatological disorders is selected from the group consisting of acne, chronic blepharitis and endophthalmitis.

17. The method of claim 12, wherein the administering is by topical application.

18. A topical composition consisting of one or more bacteria selected from S. capitis N030_E12, S. epidermidis AMT5_C5, S. epidermidis N009_G7, S. epidermidis N018_F3 and a carrier.

19. The topical composition of claim 18, wherein the carrier forms a lotion, tincture, cream or ointment.

20. A composition comprising a cell-free fermentation extract obtain a culture of S. capitis N030_E12, S. epidermidis AMT5_C5, S. epidermidis N009_G7, S. epidermidis N018_F3 or any combination thereof.

21. A pharmaceutical composition comprising a composition of claim 20 and a pharmaceutically acceptable carrier.

22. A formulation for topical application comprising a composition of claim 20 and a pharmaceutically acceptable carrier.

23. The composition of claim 20 or 21 or the formulation of claim 22, wherein the composition or formulation comprises a plurality of phenol soluble modulin peptides (PSM).

24. The composition or formulation of claim 23, wherein the PSM is a PSM selected from the group consisting of PSMβ1, PSMβ3, PSMβ4, PSMβ6 and any combination thereof.

25. The composition or formulation of claim 24, wherein the composition or formulation comprises PSMβ1, 3, 4 and 6.

26. The formulation of claim 25, wherein the formulation comprises a cream, ointment, unguent, spray, powder, oil, thickened formulation or poultice.

27. A method of treating a dermatological disorder associated with C. acnes comprising administering an effective amount of a composition or formulation of any one of claim 20-26 or which inhibits C. acnes growth, viability or activity.

28. A method of diagnosing a skin disease or disorder comprising measuring the amount of PSMβ in a sample from the skin of a subject, wherein the measurement determines the level of PSM selected from the group consisting of PSMβ1, PSMβ3, PSMβ4, PSMβ6 and any combination thereof and comparing the levels to a normal control level of PSMβ1, PSMβ3, PSMβ4, PSMβ6 and any combination thereof, wherein a level that is lower in the sample is indicative of a skin disease or disorder.

29. The method of claim 28, wherein the skin disease or disorder is a C. acnes infection.

The application's sequence listing, which the Patent Office published only in electronic form, follows.

SEQUENCE LISTING (9455 sequences)

SEQ ID NO: 1 - DNA, 129 bp, Staphylococcus capitis
atggaatggaatggaatgcaatggaatggaatcaacccgagtgcaatggaatggagaggaatggaatggaatggaatggaaactacccgaatggaatggaatgtaatggagtgtaagggaattgaatag

SEQ ID NO: 2 - DNA, 993 bp, Staphylococcus capitis
gtgactcagactcagacagtgcttccgactcagatagcgattcagattcagatagtgagtcagactcagacagtgattcagactcagagagagattcagattcagatagtgactcagactcagacagtgcttccgactcagatagagattcagattcagatagtgactcagactcagacagtgcttccgactcagatagcgattcagattcagatagtgcttctgactcagatagtgattcagattcagatagcgactcagactctgacagcgattcagcctcagacagtggctcagattcagatagtgcttctgactcagatagtgattcagattcaaatagcgactcagactctgacagcgattccgactcaggcagtgattcagattcagacagtgcttctgactcagatagtgcttctgactcagatagtgcttctgactcagatagcgactcagactctgacagcgattccgactcaggcaatgattcagattcagacagtgcttctgactcagatagtgattcggactctgacagcgattcagattcagacagtgcttccgactcagatagtgactcagcgtctgatagcgattcagattcagacagtgactcaggttctggacatgatcatacatctgatcatggtcacgataacccttctggtgggggtagtgatgataattcgcacccgggtggaggacactctggctcacatcataataatcccggtagttcaaatggacacggttcaggagataatcatccttctgaaggaaatgataatagtagttcaagtggtcataataatggcagtggtgatgataattcagatcaaagtggcgaacatcatccatctaattcaaataataacgagcaaccttcaagtaatcatacgggaggtaactcatcaaatacaaatcatcatgctagcaatagcaataattcttccacaatacatcctgaggatagtaatggtggattgttaa

SEQ ID NO: 3 - DNA, 744 bp, Staphylococcus capitis
ttgttaaatcctaataaaggtaatgaggataatgaaaatagtagcaatggtggtaccccattaaaaagaaactctaatgccaaagatgatttaaattactcacaatctaatcatcaaacgcctaattatgatagaaatcaatttatttggaatagatcaggatcagttataaatcatagaagcaattctcagaattttaataaagatgagcaaagtaaagattctgaagaaaattctttattagatagatttagaagcttagcaagtggtgcatacaaatataatccatttttaattaatcaagttagaaatttagatacagaaaatggagaaattactgatagtgacatctatagtttatttaaaaagcaaaactttagtggaaatgaatatttaaattctttacaaaaaggttcaaactatttcagatttcaatattttaatccactaaatgcaagtaagtattatgaaaacttagatgaacaagtattagctttaattaccggtgaaattggttccatgcctgatttaaagaaacctaacgataaagacaaagggagtcgtagtgcttttaaaaatcacagcgcagatgaaatcactacaaacgacaacgagcaatccgatgattacaacaaaaacaaaaaattagatcgtgtgcttatcactttaggcagtgcgattgtagcaatttttgccggtgtagtaggtatgtttatttataatagaagaaaaaatcaacagtaa

SEQ ID NO: 4 - DNA, 744 bp, Staphylococcus capitis
atgagaagactttgggtgtccttactaacggtactcgcgtatggcttggctcaaatgttacctggttttatacttagaagtcatttacttggtcatatgtctcaaattaaaactgctaaattcatgatattcacgcaagtttctctttttatattagctgctattatcataattttaataaatttaaaggtaaaaaatcctactactcttgaagctggtagaaaggaacctaagagatacatcattccttgggcactattaggtttttgtcttgttatggtatatcaagttattataagcttgatatactttacaatcatgggtagtcagcagacaagtccaaacactgaacgtttaatggcaattgctaaaaaaatgcctatttttatcattttaatttctatcgtcggccctattttagaagagtttgtattcagaaaggttttctttggcgaattatataatgcaattaaagccaatcgcgttgttagctttctgattgcttctatagtaagttcacttgtatttgcccttgcacacaatgatatgaaatttattcctatgtattttggtatgggcatgatcttttcacttgcttatgtttttactaaaagaattgctgttccaattggtattcatatgttacaaaatggtacagtcgtttttatgcaagtttttggtggcgaagctttaaaaaaagctcaagaacatgctaactttattctacatttcatattaaactaa

SEQ ID NO: 5 - DNA, 285 bp, Staphylococcus capitis
atgcttaaaccattaggaaatcgtgtgattattgaaaagaaagagcaagaacaaacaactaaaagcggtattgtattaacagatagcgctaaagaaaaatcaaatgaaggtgtaatcatcgctgtaggtccaggacgcctactagacaatggttcacgagttgctcctgaagtaagtgaaggtgacactattgtgttccaacaatatgctggaacagaagttaaacgtggtgacgatacttacttaattttaaatgaagaagatattttagcagtaattcaataa

SEQ ID NO: 6 - DNA, 1620 bp, Staphylococcus capitis
atggcaaaagatttaaaattctcagaagatgcacgtcaagcaatgctaagaggtgtagataaattagcaaatgctgttaaagtaacaattggtcctaaaggtcgtaatgttgtcttagataaagaatatacaactccattaatcacaaatgatggggttacgattgctaaagaaattgagttagaagatccttatgaaaatatgggcgcaaaacttgttcaagaagttgcaaataaaacaaatgagattgctggtgacggtactacaactgcaacagttttagctcaatcaatgattcaagaaggccttaagaacgtaacaagtggtgcgaacccagttggtttgagacaaggtattgataaagccgttaaagtagctgtagaagcattacatgacatttctcaaaaagttgaaaacaaaaatgaaattgcacaagtaggtgctatttcagctgctgatgaggaaatcggtcaatacatttctgaggcgatggataaagttggcaacgacggggtcattactattgaagaatcaaatggtttcaacactgaacttgaagtcgttgaaggtatgcagttcgatcgcggttatcaatctccatatatggtaactgattcagataaaatgattgctgaacttgaacgtccatatattcttgttacagataaaaaaatctcttcattccaagatattctacctttattagaacaagtcgttcaatctagtcgaccaattttaattgtggctgatgaagtagaaggtgacgctttaactaatattgttttaaaccgtatgcgtggtacatttactgctgttgctgtaaaagctcctggtttcggtgatcgtcgtaaagcaatgttagaagacttagctatccttacaggtgctcaagtaattacagatgatttaggtctagaattaaaagatgcatcaatcgatatgctaggtacagctaataaagtagaagtcactaaagataatacaactattgtagatggtgacggtgatgaaaatagtatcgacgctcgtgtaagtcaaattaaagcacaaattgaagaaactgattctgatttcgatagagaaaaattacaagaacgattagctaaattagctggtggtgtagcagttatcaaagtaggtgctgcaagtgaaactgaattaaaagagcgtaaacttcgaatcgaagatgctttaaactcaacacgtgccgcagttgaagaaggtattgttgctggtggtggtacagccttagttaatatctataaaaaggtaagcgaaattgaagcagaaggcgatgttgaaacaggagtaaatattgtgcttaaagcattacaagctccagtacgtcaaattgctgaaaatgcaggtttagaaggttcaattatagttgaacgattaaaaaatgcagatgctggtgtaggattcaacgcagcgacgaatgaatgggtaaatatgcttgaagaaggtattgtagatccaactaaagtaactcgttcagcacttcaacatgcagcgagtgtagcagcaatgttcttaacaactgaagcagtagtagctacgattcctgaaaaagaaaataacgaacaaccaggtatgggcggtatgccaggaatgatgtaa

SEQ ID NO: 7 - DNA, 1176 bp, Staphylococcus capitis
atggcaagctatgaccaaatcgctaaaaacaactggcgttatcgtatttcacttggtaaaaatacagaaactggcaaatatgaatatatttctaagactggctttaaacgtaaatcagacgctaaacatcaagctgaaatgatagagcgccaattaagaaatggtgaatatatcgccccttcttctagcacctttaaacaagtagctgatgattggattaaacagtatgctaatgatgtaaaagtaagtagtgtcagagcacgtgagaaagctatacaacacgccatagagcgttttaatactaaaccaatacaaagcatcaagaaacatgattatcaacgttttgtggacgatatgagcgcacagtatagcaagaattatgttgatagtattgtggcatctacaaatatgatatttaagtatgcgtatgatatgagattaataaaagctatgcctagtgagggtattaaacgacctaaaaagaaagtaagcgtggaagaattagaagatattgagatacacaaaaagtttcttgaaaaagatgaattatttcaattcctggaggttgctaagtatcaccattcaccacaaaatagctttgaagtatttaccacattggcatatacaggcatgagagcaggtgaattgttggcattgaagtggtctgatatagatttcgagaacaacacaattagcattactaagacttattacaatccgaataataataaaaaacattatcagatacttacaccgaaaactgaaagctcaatcggtaaaatctcagtcgatccccacgtgattcaattactcaaagattataaggtaaacgtccaggacacatggaaaaatgagctttatgtagataataattttgtgtttactgatgcgaatggttatccccttgtaattaaaaagctgcaattatggataaaagctatacttaaaaagactgacataaccaacaaacaaataagtacgcattcattccgtcgtacaaattgcgccctacttatagaggcaggcgtacatattaaggaaatacaagaaagactacgccacaaagatataaataccacaatgaacatctacgctaaaattaccaactcatacaaaaaagacgcttcccacaagtttagtaaactcatggaaaacgtcagcaaagaattattttaa

SEQ ID NO: 8 - DNA, 654 bp, Staphylococcus capitis
atgcttactaaagaaactaatgtaaaagtcggaaactatttaaagaaagtaaggaaaaataaaaaagtgccagctagcgaacttgtttctacactaggatattcacaaggtcacataagcgggattgaaaatggctcaaaattaataccatcaaaatcatttatttctaaatacctcagagcaataactaatgataatttttctgaagtaaattactatataaatgaaattaatgaaattgccagtggtgaaatagaattagctacatatattgatgaatcaacttcattaatggatgcttttgttaataactttgaaagtgactcatcaaaactaaatacatttgtagaagaattacagaatggagataataaaaaagattattacaattttcctattaatgatttaaaatttcacttgatagatatgaataatcaaaagtattttaataaggtattgctttcagcagatgaccgtgaacatattaaagaatatatcgaaaattacattgagttaaaatataagatttacttaaaacaaattaatgatttatattctaaaaataaattagatgaaaaatcttataaacaagaatattatcagatagatagaattttaaaagctatcaaaggtgaaaatcatggcaagctatga

SEQ ID NO: 9 - DNA, 219 bp, Staphylococcus capitis
atgattgaattaactaatagcaaaaaactctatgaattaattttgataagtggaaacaacaaaagtaatttcgctaaaaagataggtgtttctcctgcaacaataacctttatttttaaaaacaagagagcaactccacacgttgctaaattgataattgatgagttaaatgtcgatttcaatgaaatttttgaagtgaaagaattaaaggaggcgtaa

SEQ ID NO: 10 - DNA, 321 bp, Staphylococcus capitis
atgttcaatattaatatagatgaacaagaagcacgtgctttattagaacaagcaattaatcaacgtgtagatgaattggcccacgatcgctatttcatgacctacaaagaattagctgagtatctaaatttaagtaaaccaacgattgaggagctgcttattaataacggtatgaagtattacatggtaggcagcacatatcgtttcaagaaatctgatgttgatgaatttatggaaaagattacatctcacatggatattcataacaatgatttaaaacaaattaatgttaagaagttgctggaggttcaaaatggttaa

SEQ ID NO: 11 - DNA, 144 bp, Staphylococcus capitis
atggttaaattcacattacaactattattaatcagtttaattactgtattagctagtgcgtttatagcgtttcatgtaggactagcaatttatctattaggaagcacaatcgcattcttaaattatgaaaacttggaggcgtaa

SEQ ID NO: 12 - DNA, 204 bp, Staphylococcus capitis
atggaacaagaacaaaaagaagttatacaagatatttatacaacgttaggaacaactgttgaggataaagcaacagaatatgaacatcattttaaagaaggacacaatgaatggactgaaacagttaatcgtgaggaaaacttgcaagcgataatcgagtgggcattacaacaaattgaaaataattttgatggagtgaaataa

SEQ ID NO: 13 - DNA, 351 bp, Staphylococcus capitis
atgataacagaaattttaaaagcatatgacgatatggcaataccagctatgaatgtatctcagttaagaggtgaaacagaaaggctttcagaattaacaggttatttaatcgaaaaagctaaagcatatagagaagaaggagatattaaaggtgctgaagctattgaacaaattgtattagacgatctccaatttgaatttgaaagtgtgtatggtcaatttaaagaagaatttaagaattgggaacagaaatataaaagatttgaaaacgtatgtacttattatggtgttcaagtaccaacgttaaaagataacaatataattcagtttagaaaaggagttaagcaataa

SEQ ID NO: 14 - DNA, 294 bp, Staphylococcus capitis
atggagtgggaaactaaaaatttaattgaagatatagatattattaaaagaaaaatcaatgacgcattaactacattcggctggtttgatgatgagtattttacgcatgatagtggtcatatgttaaccaaagatgaaatattgaaacacggatacaagtaccacgaacaccgttgttacatcacacaacacattgacttgttaagcgtgtatctaaaagaattagatacagtattagaagacatagaaaaagcgtcatcagcgaagtttggcgacagaactgataacgcatag

SEQ ID NO: 15 - DNA, 1602 bp, Staphylococcus capitis
atggacgaagtgagtttatataaaaagcattttgaatttcattcaaatttagattatatcaacactgcaaatttatcaagaattaaggagataagtaagcgaattaatttcgcttctatctctactgataaacaagtgtttgataataaaggtaatgcatatcatcgaaagaaagatgatgttgcaggtgattacattaataaccttaccttaaattataccataaaacccaaagaaattggacttgtatacggaactatttttgttaaaaccaacgatcaagatgaaaaagaagcacatttcaaatcagatagttttaataattatgctcgttttattgcagatttaatttctgataaggtcatctattccaaagaattggataattttctcattgtcaaaaacaatcagtatgaagtgattgacgatactaattttaaattgtgttatcctgttgagccgaaaaaccaaatagatgactttttggatattatgcttgagttatatcgtgaacatctaaatttagatcataattacaaaatttatccatatagtgttgctggtaatgatttcgtatataactgtaagaagttaaaacttataaaagaaaagccacaagattatgagttatacgctattaagtatgacgtaaattacaacgatttagattttaaaacgccaaatgatttttatgatttggttactgataatgagaagagtaaacataatttaaaactggtacatgcttatacgatgtatcgcaaaatgaaattgattcaagctgaaaaatggttcttatttaaagatttcggtcgttctggtaaaggtttatttataactacatttaataaactgttacacgttaataaagtgaactttgatggacttgtctcaggtggtttcgaagcagctaacgaatggatgaatttctatggtgcagatatagcacatgctaatgaaacaggtgaaatcactaaacctatgatgagaatactaagaaaaatagcaactggtgaaacaatttcaggtcgtggtattggtcgaaacgcattcacatttaaaaataaatccgttttgatactcgatacaaacgaaagtgttgatacaggggatattacagccaatacaactagaacaataaaaatagcatttaaagatagaccgataggagaaaccgacgatgaaagacacaagatttttgagccttattggaattttgtacagccaaatgatgaagattctgaagtagcatcagtctcatttttaatcacaagtttagaataccttaaagaaattggtcgagaatttagatttaaagatgtgacattaaaacattatttcagtgaggaagaattgactgagacacaagttgttatgttgaaagtgctaaaacaacagggctttattctttcaggtgatgagacattgcaaagattgatagaagaagattataaaagtatgaaatataaaaaagctcgtcaagatatgaaaaagataggtgtagcaacaagacaagatatttggatagaaggtaaaaattacaaaggtttcaaaattggaaatcaagaattatttaatatggctcattcattaatcgaataa

SEQ ID NO: 16 - DNA, 804 bp, Staphylococcus capitis
atgacaggttatcatgtagcaaaacaattattaaaaaagaatattgaagtgataccacttaataaacataaaacaccaacagtatcatttgcagataaaaatgtaactgatgagtttattgaatatcattcttacaaatattataaaactaatgtgttaggcgttcttactcgtaatgtatggtgtattgatatagatataggtcatacagacggagaaaatggtttcgaaagtatcaaagatataccttactatgatgaaattgtatctaatgcacagaatacattagtacaaaccacagcaagtggtggaaagcatatcattttttataaacgtactggtattaattacggtcagaaaatcggatatttacctggtgtagatattaaggcacacgataacagttactttgtgcttgcaggtagtcaaacggataaaggaaagtacaaacataatggcattaaaccaaagatgtatcaaggagaatttgaaaataggattttttctaaaccaggtaattatacacagcaaaccttagagccatattcaattaaaagcatgttacctaatcagaattttgctcatgtgaaaggtggcaaaggaggagaaggtaaacgtgcatataaacgtattatagacggtcaaagtgaatacagaaacgatgatttatataaagcagtaagttatgcaaaacaatgtaacgtagatattgaaccattacgcatattaattggtgataataaaaatggtgatgtaataactgaaagacagtgggaggcgacagttagaagtgcaagccattga

SEQ ID NO: 17 - DNA, 276 bp, Staphylococcus capitis
gtgcaagccattgatatagaaatagattatgacaaagaagcaaaacgaattggtttgatagtcggagttccagaagaaatatatttttgttcaataagtcatgtctcacaggcatatgttgaatatattaatgatgagtgggtagcatggcgtgaaagttttattcctaatacaaatcataggactagttataaattaattgcacaaggtgactttgaattagtaatagcaagagtgaagaactatctaacatatattaaaagaaaaaaaggatga

SEQ ID NO: 18 - DNA, 192 bp, Staphylococcus capitis
atgactatcttcttaagagcagacatgcagacaatagacttccttattaatgaattgaatgtaatgtgtgatagggaacaatactggtatcagtatcgtgatggtaatcgtatgagaactatagatcgtgataagggatatgttgcacctattaaacatgttaagcgtaatgtgaataagattaaagcataa

SEQ ID NO: 19 - DNA, 369 bp, Staphylococcus capitis
atgactaaagatgaactgaatgtatatatcattaactttattaaataccataccctagtatcctttattgatttagaagaattatttgagtcattgcatattggttatcaaggtgattttacatttgtacatgtagacaatgagaacattgtgttgtggcatggatggagtatggaagtcattaatatagtaggtagcttactatcatctaaacaacttgagctggtacgcacagatgtaacgacttatgtaagacatggtatgtatctaaatctgccagttatgacaaatccatttgattattcagatgctcgttggttgcctgtgacactgaagctaagtgagacgatgaatacactattacattag

SEQ ID NO: 20 - DNA, 255 bp, Staphylococcus capitis
gtgagtaatatcaatatgtttgagtggaaccatataaaaagtaagataaaagaaattcgtgaagaaattgatgatgtgaaacaacagagtttcattgataaagcgaagaatcgacaacttactagtgtacttagagaattaagtttagttgagaattgggttaacgaactaatggattatcaaaaagaacatagtgcagtaaataaaattaaaaatttacttaaaaagaataaggagagatattatgggaagtaa

SEQ ID NO: 21 - DNA, 609 bp, Staphylococcus capitis
atgggaagtaaaacaaactcaaaaccaacagttaatgaaattttttcaacgcatttagaagtaataaaagatatgttgaagcaaagtaaacatattgctaataatggctcatatcaagatagtattaatgtattatacaacaaattagaagaaggcaacttgagtacacaagaatatgaattaattttaaatgagatagataatttaagacgagaaaaagctactaatccaaatgttaatggtcaaattgtagtcaatttaccgagtaatattaaatcactagatcaattgcaaaaagtaacacatagtgagacagataatgctaataaggttattaaatcagttgagaaagagaatgaaagtatcaaccaacaaatcaatgagcttaaagctaaaattgaaagcaacaataattatatcggtgaaataatcaatcaacaatcgttaaatgatgttgctaaaccaattatagaaggcgaatccaagtactatgatgcaaaaagattctatagcgattttatgtggcaaaaagcaactggtttattgcagaaaaaaacattaggtaaaaagataattaattacccaaatttagcaccaagcaaaaaatag

SEQ ID NO: 22 - DNA, 273 bp, Staphylococcus capitis
atgacgacgtcgtcacaaattggtttgagtgttttatacgaaatcgcaactctccctgaaatagaacgcaccaaagaacatacgacatcaaacggagaaacaaaaaatccagatgaaatgagagtaagagaattacgtgaattaaagaacaacttaaaaaacgtgacgcattcattgggttcagtttttttatttataacctgtcaaaactttgcatctcattcaataacaaacggacttaaaagtacgcttgtacccagtgccttaaaatag

SEQ ID NO: 23 - DNA, 651 bp, Staphylococcus capitis
atgtcttatgatgatgagttgaattttcttaaaaaaataatttctgtaatctatgaaagaatgactaattacgctgatacctttgttgaactaagaaataataaaattaattttaaaaagaaatgtgtttgtgattttttggatgataaaaatacgtatattgatagtgagttgttagataatgtagtggtttttaaagaaatagtaaagaaagaaaatagaatcttattgattgatgaagagttagaattagaaatagataaacgtattaaaaatgaaaggtctatttataacaaacttttaaaatatcaagcaaaaaatggtaaaggaaagtatcctattattaaatgtttaaatgatttgttagggtatagattcactttacaaagcgatattgatttaaataatgtatataatatattaaatgagtatgtttatgagaattttaatggtaaaataaagatagtagacgctagtaaaaatgactataaagcaattcacttatattttaagattgataatttttgttttccgtgtgaacttcaaatatggctaaacaaagatcataagaataataaaaaatcgcataaaatatataagcaagattatttaaattgggaagaatatgaaagtgaattagaaaaaaagtag

SEQ ID NO: 24 - DNA, 735 bp, Staphylococcus capitis
atgtacaaacattatttaataattttggaagaatatgaccatgaaggaagattagcattccatatgactataactgaaaaaaaagatcttgaaaaaatagaactttatgaagaagatttaacagaattaggtattggtttttatacacatttgattactacgtcaaaagatacaattcaaagtataaaggaaaaagatagtttttttgaaaatgtaaccattttcgaaaaatattttgactttaaaaacgttgctaaatctcctcacggattaaatgctatggatatagcgagatatattttaatgttgaaacctactactccacttaaacttcaaaaattactttatatagtatatgaaagatattttttaaacagaaaaatagagttatttaaagagagatttttagcctttgattatgggcctgtagttaaagaagtttattcagtatacagggggcaaagtgacgtacttactgaaaaagatgatcagtctgtatatagtgtgataagtaatgctactactccaataacatataaaatattcagagaagaggattctgaatatattagtagtttaataaaagatgttattgatgagtatgatggagtgtcagcttgggacatggttgaaaaaactcacaaaaaaaacacagcatgggataaagcatataaattaggacaaaatagtcccattactgtagatttaataaagtcatcggtaccagtaaaataa

SEQ ID NO: 25 - DNA, 609 bp, Staphylococcus capitis
atgaaactctcagcaaaaaagcaaaagcagttccatcatttttgtaactactttaaaagtttagaaattaaaacatttttgcaaaatgctatcggcgctttatttttaagtccttttacattaataacttatgcatttattttagcatacaaggttacatttatgaataaatcattaattgaagctttgtcaagcgctgtttctttaattcttatattttgggtagttgcattgtatttaatgatgttttatgtagtttactttaaaggtaaaaattcattattaaaatttgttaaaataactactctaataattattatttcttatcatatatacatatttattagaaaaggtatagaaaatcttactcattttgataactatattattattattatttcagttcttatttcttactggctgatacaaactttgagaaatataattacttctatttacaattggatatttaacgatgaaagtcaccaacgagatgaactaattaaatttaagctttctttcataaaaagcttactcttaggctttttttcttttattgccactatattaggtatagcattaacgattaaaaacttattctttacttaa

SEQ ID NO: 26 - DNA, 459 bp, Staphylococcus capitis
atgaactataaaatcgaaattttagatgattgtaatgtgatctatgttagaaataaaggtaagtatggtagtaataagaattatgaaatgatgaagaattttaaagagtggattaaagaaaattgttattggagatatgttgaaactaatggaatattaggtgtagcattagatgatccgcaaattgtcgaagaagaatcatgtagatatgatttagttttaaaaatagacgaagatgtaaagataaatgattttataaattctcgaagttttacgggaggaaaatatgttgtttttgcattaccacatacaacaaaagacgtgaaagacttctattctaatttaccaaacattatagataacaataatttgagagtaaaaaatgaacctatattagagcgttataaggaagaagagggaaaagataagtattgcgaagtactaataccaattttataa

SEQ ID NO: 27 - DNA, 822 bp, Staphylococcus capitis
ttgcaaaatactaaattagagttaaaacacattttgattataattttcattataatacttgcaataatatcatttgtttttgttgtaggttatattattagttatgtagatcctaaacatagtattactggttattctatagctataagttttgttggagtatttgcaacgtttggtggtgcttatttaggtgctaaagtttcaggggataattctaggaaattgtatgagtatcaaaagaatgaaaagaataaacagataattaataaacttgagatagctgctagtatcaaaatgataaaagttttaaatcattctaatatagcaaaagaatcaaggttaaatttgtatgttgcaccagaagataatcgcacttacgatgaaataatgagtagtggaattatggagactttagatttaatagatggttatgctaatcctattattgaactactagaagatagggaaatatatgaaggatctcctaatttatatagaagtttactcaaaatgtttaatgaatgtaatagaatgaattatcatattaatcaaatcgatataaaagataaatctggaagattgccagaggattttaataatttaagtgaagatgaaagagattatttacaagatacagtacatgaatatagaggatatgtcagaaaagatattttaataaattttgtagaatttgaatttatagaaaacattttaaatgattgtgctagcgaaattttaaatagtatatctgaggaaaacaaactagtagaatccattgattttaaaaatcatattgatatgagatatactttaaatttatag

SEQ ID NO: 28 - DNA, 591 bp, Staphylococcus capitis
atgaaaaaagctttgtttctattattagatgaattctcagactgggaaattgcacatttaagttcaattataaatagtagtgatagatggattactaagatagtatctgtaacgaataaagtgaagtcaattggtggaatgacattattagttgattctaaaatttctaatgaaactcacgattttgatgtattaatattaataggtgggaataagtggaatattgaagataaaacactactcaattttattgaaaaaacatttgaactagaaaagccagttggagctatatgtggagcagttgattatttagctaaaaatgggtttctaaataaatatagacataccgggaattcaatttatttatggaacaagttaaagaaatatgaaaatgctaatggttttgttgaaactcaggctataactgatagtaatttagttacggcaaatggaacaggcgaacttgaatttactgaagaagttttgagattaatcaattttgatactccaacgaatattaataaaaagatgtttatgattaaaaatggcttttatgagtattgtaaaaagtatggtaacccatataattaa

SEQ ID NO: 29 - DNA, 408 bp, Staphylococcus capitis
atggagctatctgtatttcacgacggacaattttatgttggtttagttgaatacaaagtaggaagtaaatcaaaatttgttaaatatacctttggtacagaaccagatgatggagaagtcatttattttatagagaattatctattaataatgatcgataatacaaagacaagtattagaactaaaagaaaaaaacaaaaaatcaatcctaaaagattgcaaagacaagtagcaaaagagcaaaaaagtccgaaaaactttactaaagcgcaaatagctataaaagaagaacaagagaaaattaaaaaattatctaagaaaaaaagtaaggcaaacagagaatggattaaagaaagaaaaagacaaattaagaaaaataaagctaaagaaaaacataaaggccattaa

SEQ ID NO: 30 - DNA, 420 bp, Staphylococcus capitis
atgattcaagccgtaaatcacgttacttattctgtatcagatataaaaaagtctgttgaattctataaaaatatactgaaggctaaaatattacttgaaagcgacaaaacagcttactttactataggtggattgtggttaggtttaaacgaagaaagtgaaataccaagaaatgaaattcattactcatatactcatatggctttctcaatcaaggagaatgattttgatgaatggtatgactggctaaaacaaaaccatgtaaatatattagagggtcgcccaagagatgtcagagataaaaaatcaatatatttcactgatccagacggtcataaattagaattacacacaggttctttacaggatagaatgaattattataaagatgaaaagcctcatataaaattttatgaatag

SEQ ID NO: 31 - DNA, 1497 bp, Staphylococcus capitis
atgaaaaacaacaagcctagagatttaaaacaatttccatctttaccaagtaaaaaatattttagctacggcacagcgagtgctttaactttagctttatatctttttgcgggcaatggttccgctcaagctgaagaaattaacaagactaatagcactacatcacctaaaactattcaaactgaaagcaataaaactaatacatcaacttccaataatgagactcatcataaatcatctaaaaatttaaatgattatattgatggaactccaaatgaagatcctgacgaagatgaggacagtggaacatatgaagttcctatcttatacgttactgtatggttggatgatcaaggtaatatcattaaagatgcagtagaagataataaaacgcctgcctctgaaagagtgccggtaaaaattcctgggtaccaacattttagaacatcaatttctgatggtataactaaatttatttatagaaaagtaaatacatctcaaacagcaaacacagccacaagtagttcaacaaaaaaggatgacactaaaccatcagaagtaaattctgaaaaaccaacgactcaaaaagattcagaacaaccaaaacaatcagaacctgtgaaaccaacgacacagaaagagccagagcaaccgactcaatcagaaccgacaaaaccaacgacacaaaaagagccagagaaaccagcacaaccagaaccatcaaaaccagctacacaaaaagagccagagcaaccaactcaatcaggaccatcaaaaccaacgacacaggaagagccagagaaaccaacacaaccagaaccggtaaaaccaacgacacagaaagagcaagagcaaccgactcaatcagaaccggtaaaaccaacgacacagaaagatccagagaaaccagcacaaccagaaccatcaaaaccagctacacaaaaagagccaaagcaaccgacacaaccagaaccggtaaaaccaacgacacaggaagagccagagaaaccaactcaatcaggaccgacaaaaccaactactcagaaagatccagttattcaaactaaacagcaggagaacaatcaaaataatgtaaatgataaacctaaattacacgttacagtatggttagatgatcaagggaatattattaaagatgcggtagaagacgataaaacacctttaaatcaaagaggtgttatacaaatagaaggttataaatatattagaacagaaaccgaagatggtattactaaatatatctataaaaaagttaaattaaaacaacataagcaaatattagaagtaattaaacctactaaaaaaatatcaaaacgtaatgaagataaagatgataaaacatctcataatcataaaacttctaagaaagaattacctgaaacaggagttaaagaacaagaatttactccagcattattaatgttactagcaggtttaggattaattggtatttttagaaataaaatcaaagaatag

SEQ ID NO: 32 - DNA, 681 bp, Staphylococcus capitis
atgattaaattacaaaatgtttcatttggttttgaaaagaaagaaatattaaaaaatatctctttagaaattgaacaaaatgataaaataataggcttattaggtcctaacggtgcaggtaaaactacactctttaatataatagcagattattatcaaaaatatgaaggatatataaataaaagagagtttactcatttcttattaccagatcgtgaatatatacctggtaatttaactattaataaatgcttaagagattttaaaaaaatttatgctcattttaatgaaactagagccttaaatatgctagaaaaactagatttagattttaacaaaagaatttcaagtttttctaaaggaatgaaagaacaattacatttaatatttgcgttagcacaagatgtagatttatatatatttgatgaaccgctagctgctgtagacccagttactcgagatatactaattgatttaataagaaattggagaagaaaaaatagcatagcaataataagcacacacttagtgcaagatatggataatttatttgatgaatatattattataaacaatggtaaaatattatctcatgaaaaaacaaaagaagttattcaaacacaaagtaaaagtttaaatgacatttacaaggagagtgttaagaatgctaacgattactaa

SEQ ID NO: 33 - DNA, 534 bp, Staphylococcus capitis
atgataggacaatatttaaaaaaagctagagaagaaaaggggataactcaagaatttgttgctaaggaaatgtacatatctcgtcaaacattatcaaggtgggaacaagggaaaacactgcctaatatatatgctttacagaaacttagtagtatttacaatgttcccttagatgctttgattgaaggagctaatggtaaaacggaaaatgaagaaaataaaaggattaattattttgctttattcggagcactactcttcaatctgttgttattctctataatattgtttattagcattataagtatcattagtttatggagtttagctattatttgtactattagccctattatttttgtgatttttgtttccttaaatttacaaaattttgaagctattcaattattagttagcattactttttctgtaataggagtgatattattagtgatttctaaaagagtaactattttcttatacaattattttaaaatatacttgaaatataatcataaaaccattttttattaa

SEQ ID NO: 34 - DNA, 723 bp, Staphylococcus capitis
atgaagacgattaaaatgattgcagatgaattgaatgtaaccaaacaaaccattgttaataatgcgaaaagtttgaatatatcattcgaaaaaaatgatggagttaattacattaaagaagaagactatttaaaaatagttaataaaattaacaagaagggaaggacatttgtaaataaagatgaacacaaaactcaagaatatactcataaagaagaaagtacagagtttcttagagaaaattctaaagtcaacacgatagatgaagaaacattaggaattaagattaatgagttagaaaagcaaatagaaaattttaaagctagatcagaaaaagatagtacttatatagaaacactcactgaacaattaaagcaacaaaataacaatgtgaatactctcaatagacttttagaaaatcaacaaattttagcattagaaagtaataaaaaaattaaaaaattagaaagtgaactagaagaggaaagacaactcaattattcatcagataatgctcataaaaaccaacaaagctttgatactgaaatagtaaagaatttcggttctgataatatacatcgatatatttcatcagataataaagattatacaaataacagtgaagaagataatacagaaacacctcaaagtattaatgataataatcaatttcaaaaaaaacataaacaaaaaaaagggttttggagtcgtttgtttagttaa

SEQ ID NO: 35 - DNA, 990 bp, Staphylococcus capitis
atgtctaataattttaatattaacgaagttcaaagagaaaaattttaccaactgccaaaagttttttttacaaatcctaaatatacgaaactttctaacgacacaaagattgcttatgctatattacgtgatcgattagatttatctattaaaaataactggattgatgaaaatggagatattttttttatttttactaatgaaaccttaaaaaatatccttaacattagtagccctaacaagctttctaaaataaaaaaagaattgcaagaggctgaattatttagtcaaattagagttggacttaataaacctaataaattatatataaagaaacctatagtaacaaaaaatgacatctatctaattcaaaacgatgaaaaccataaagaaacctgtaatggcaaggacgtatcaaaatcatacgtccagaaatatcaaaatcatacgtccagaaatatcaaaatcatacatcaagacgtatcaaaatcatacgcaaatgatactgattataataatactgattataacgagactaaatttaatgatacgagtgatatgaatgatactaatattaaaagtaatataaaaataaatcattcgaatcatacaaatcatcaatcaacacaatttaataatgaagcactaaaatttcagttattagaagaattacctacacaccttcaaaattatttaggtaattttgaagtgaaggaaatacaaatgattaaaagtgtcatcctaaaagcaaaaacatcatttaatcagaaaaataatacattatatagattagaaaatattgaattcgaactaatcaatgtacttaaacgttttaaagcaacattaattcaaaaaggagaaagtgttgaagccatgcaaggttatttaatgcgttcagttaaaacagaactcgaagaaatgcactccttaaatatgcgccgtcaaaacgcgccacaaaaccatatattcgatacatcacactatttgtga

SEQ ID NO: 36 - DNA, 570 bp, Staphylococcus capitis
atgacgaaagataaacgttcgaataagtgggcttttttaatatatgaagaaagcacgccatctaactatcaagatattttggaacagatgcatattccttatattttaagcccgtggcacaatcaagatatagatcattcaactggagcaatcaagaaatcacataaacacggtgctttattctttgattctttaaaaagttattctcaagtctctgaattacttcaacaacacttaaatacaccaagtcatattgaaattattatgtctcctaagggcatgtttgattattttattcatgcctctaattcagataaaacaccttatgatattaacgatattgaaagtggttgtgggtttgacttaaatcaatttttattagatcaaggtcagtctgaaatgtttaataacattattgatatgattgaagaccaagattttatagaatttcaagatttagtaatgtatgcgcgacaacatcatctatcttatttagatttgattatccaacggacttatttttttgcgaaatatttagattcaagacgacatacgtccaatcacaaatag

SEQ ID NO: 37 - DNA, 603 bp, Staphylococcus capitis
atgaggaaaacctacttcatgcgtgcgtatgatattatcatttacttgtttctatttgctattttgacatttatgtttagtaaactctttgacctattgaacatcgttatatctcaaattgatatcatcgatatgcgaaatgtcacacactatatcacagtgatttcaaacggtttatatcaacttacattttatttgttaggattagcgttgatattaatggttatcgatttaatcattcgtttattgaaagatcaacttacgaatcatattaaatctgtctatcacacaatggttttacgacattatattaaacaagatgtcgacacaacatcatcgaaagattggcaacaaaaaggcgaaactaaaacaaattctgttgaacgctattttaataaagtcgtgggaaaatcgattgttgatgttcgtcaaaatgaagttcgtgtagcgattaaaattcctcgcaagcaacaggcacatgaaatatttaagaccattgaacctcagattcatgaagagattacccacatgcatcctaattactacttttcagcatctcaacgacatcatcgttatctatggtttataggtcacaaacgttaa

SEQ ID NO: 38 - DNA, 1077 bp, Staphylococcus capitis
atgacaggtaaagagctcgaacaatatctcctacaaagtttaaacatggcactgggatccatgatgcaaggcgaaaccagttataccaatagttttacctgcaaggttacggaagaaggtttttactttcttcctcgcctgcctgcaggctacattattgatgatgacttatatcaaaaaatatttctcattgcgagtgcagctttatatccaaaattcacactgctaaaacaaaattcagcgtattttgttccaatggatactgatgatattcatacccaacgagcattgttttttccgtggcaaaaagggatatctaaacgtttagtcattacggatttagatcgttttacttcaactctaatgaaccaacaaataccgatcatgaaacaattaactttaaactatcaaaacattacatctatagcgatcgcaggtaattcaggcagtggtaaatcatatatgctgacatacttattaagtgtgctaaagcccatatctgaactcattattgttgatccaaagtttgatacaccgagtcgatgggcgcgtatccatgatattactgtcattcatccacaccaaaatcgatctaagtctgattttttatctgaaattaatgaaaacttaagtcattgtcttcaggttattcaacagcgtcaaaccattctttataacgatccagactatcagtttgagcatctaaccattgtgattgatgaagtgcttgctttagctgaaggtgtcaataaggccattaaagacgcattcttttcattactatctcaaattgccttattgggtcgtgcaaccaaagtccatttattactagtgtctcaacggtttgatcatcaaaccattccagtttctgttagagaacaactcaatgtgctgattcaaatcggtaatattaataaaaaaacaacacaatttttattcccagatttagaccctgaaggtattgtgatacccattggtaaagggacgggattgattcaagtgattgatagtgaatctccctatcaagtcttacctctactatgtccgacttactatacaaaggatggtgtattgtga

SEQ ID NO: 39 - DNA, 321 bp, Staphylococcus capitis
atgaaaattcaagctaatttcaaaaaaggcggctattcaactgaaatagcgtctaactacattgatcgtaaaaaaccgatttacaatttaagtatagaactttacccgcaacagcgtttcgagaataatcagcctaccggagaaattattgcgtataaagcttggtttgttcaagaaggtttaccacccttcacagtcaaattcgaaaatgaagtgacattaccgaattttatgagcgttatcacttttgatcatctagaagcttgtgaagtccgttatgatgtttacttcaaagcttcagatctgaaggaggttaaataa

SEQ ID NO: 40 - DNA, 432 bp, Staphylococcus capitis
atgaatcacgtcgagaacagaagagagattaatatacaaaaagcttttgacaataatgattggcaaactttattacgattactcaatcaaccctttgaaaatgcacaacgtaaagatagattttatcgtgtattatctttaaatcattctcaattatgttcaaatggtcatcattcagaactaggagaccttatcgtaagtccttcattgacacctctggaacatttcttattaaaagaacgtcaagttcaagtcaaatacgcactgtctctgttaaatgagattgattataacattattacaggtttctatttagatcataaaagttattcccaacttagtaaagacgtaggtatcagtgataaaacagttaaaaaacgcttaatccaaaatacgagttttctgaaaagctatttgcaagacatcatttaa

SEQ ID NO: 41 - DNA, 1299 bp, Staphylococcus capitis
atgaatttagaacgcatgatggatacaatgattggagatagaattaaaaagtttaggaagtctcaaggtttaacacaagaagatttttgtgaaagatatgaaaataaagtaagtattgataagtatcgattatcagcattagaaaacggaagaagggaaaaaaataaaaacccgcattttcttactgcagagtataaaaattttttttctgaattaatgaatatagatattaaaacatttgtttttggtaataatgaggaaaaacgtcaattaatcaaattaatactactcaatattttaatgaatggaacaactaattcaagtcatcgaaatgatcctaaagtcgaacagatacctatctttgaatttaataatgatttggaattctttaggctatcccaccttaatttagataatgaagaattaaaagatatggcttttaatacatacagtaatatgatcgatgggaaaaaatatggtgaaagggaattagaaacaagaaaacatcaaattataaaagaattacaatcatacgatgatttcttttataatcaagataatttcaggtactacaaacgtttaatggatggaagacagtgtttttcgaagcaatcctctatattgttaaaatgtttatttggaaattttgaatttgcttatgaatttttaacaactgtacaaaatctagagaatttccatttagcaggtcttctccttagagaacgaagacaaagttattatatcgataatcatcttagaggtgatggaaattttggatctaaggccacagattggaaagaaataggttatagaatatttataactagtttcaatgaattttatcaacaacatgctgcaacgttccttgaattttttgaagaaagtgtttttcaatcacgttatcatgctgtaacaaatgaacgcatcaattcactacttcaaagtgatagatttttaagtgtattaaatgagatttatgaaaacgaccaatacttacctaatagaatgttaggacataatttttcaagatcaatgattcaaaagttagcactggtagaagaacggtcgaaaaggttggctaaaaaaggtaacaatttagaaaataaaacgatcattaatccaacagaatattatgatttatcacgagtttatcaagaaagaatacaatatgtttatgatatagataggtatttatatgatttagaaaatatgactttattatttgttgataaagataaagatgataagagtgcaggtctgtttttaccagagtattttgatattaccccgttgaaatag

SEQ ID NO: 42 - DNA, 684 bp, Staphylococcus capitis
ttgttggatccttataagttaacagaaacagaagaagaacaaagaagaggactaaggcaacggtttattggaatatttattgttataagtgtaactcattttattattaatttcatttcttctcctcctccacaatatattgtctggggaaatggaaccaattattttagtaaagttattgatttcataggacaaacttttcaatctatttcctttgtaaatataatgttatcaattatagttttactttttggctttttcattaaaagaataatctatttttatactggtttattatttttagtaggatcttttttaataaatagaacactttcgagtattaatactcaattactattaataagaatcattaatagtaatgatatggatattggaggcgttggaacgttcaagccagtaattacattggtatatactatactatgttttggctttttaggtattatggcttacataaatatttcttatatatgtggatattctaaatattttaatgaggataatgatgatattagaaagaaaagagtaatgtatcctttgatatcagtagttattccagctatatatatttacttatttcaataccttggtgtggaacaattggcgaaattcttatatgacgttttctttaaattagtacaggaatttaagtcccaattatag

SEQ ID NO: 43 - DNA, 1692 bp, Staphylococcus capitis
ttggctataagtagatatgattcatattttaataaaatcaaagaagaatgcgaaaaaataaaacaacaagaagggtataataacttatcattagcttttgctcactggtttttatctgtccaatatgaattatcagagcaagaaattgctgaatcgataattgatggtaacggagattacggcattgatgcatttatacataatgaagatgaaaaagaattagaaatctttcaatttaaattcgcaaataaaactgagtctataaaaaaagaaatacctcaaaatgatatttataaagtcataaatggttttaattatttaattgatccttcagaagatctaaaattagacaaagcatctcaatcttttaaagaccttagggaaaatttaagaaattcagaaatatataaatttaatattaacttcgttagttttaaccaaggggttatagataataaagaaataatcactaattttattaataatatgcaaagacaatctggaatagatatatcatattctaattttgatgttcgagtaatctctaatatttatgaaaaactacaaagacaaaatactttatctttagatttaatatatacttcacttcagcaagcctatactgtaaaagatattgagtcctacattggactaattaatagtaaagacttaattaacagtattaaagataaaataggcgtgattttcgatgaaaatattagattattagaaaaaaaatcgaaggtcaatgacaatataaaaaagactgcttcaagtgattcttctgatatgttttatttttacaataatggtataactttcatatgtgataatatacaaaatagtcctaattctcgttcagccaaattagatggtgcttcaattgtaaacggttgtcaaacagttacttccttgtttgaaacatatcaagaagggaaacttaacgataacatagatattttagtcagaattactaaaatatctgattatgatcaaagagcaaagataactcagttcttaaattcacaaacccctataaaagatagttattttgtagcaaaccattcaataattagagaattacaaaagaaattatttgataagaagtattatcttgaaagacagattaatgaagccacttataaagaaaaatatgaaaataaagatatcaaaaaaggaatgacaattttaaaattagatgatgttatacaatattactctggctattatctagacaaatttgctgcaacctctaaaagaagtaaatctactctttttggtccagattatgtagaagaaatactatctaatataacaccagaaaaagtcattcattcatataatatgtatcaagatatttctaaagttattactgcatatcgtcgttatagaaggaataaagataatactgattttgtccaaatattaggagttacaaaagaagaattagagcaaaatgaggagaaatatttatttataaatactgctgatatactaatactaaatacatgtaaatttattaaagaatttgataaccctaataattcagttcaagatacaattgttcaagcaatctttttactcaaaaacctaatacagaataataaagaactttatgaaatgtcaccagctggcttaacaaaaaatcaaaaaatctattctgaagttgctaaatattatgaaagtaaatga

SEQ ID NO: 44 - DNA, 609 bp, Staphylococcus capitis
atgattgttggctatgcaagagtatcatctatcgatcaaaatttagaaagacaactagaaaatttaaaaatatttggtgttgaaaagatttttacagagaaacaatctggtaaatctattgaaaatagacctgtatttcaagaagcacttaactttgtgagaatgggtgatcgatttgtagtggaatcgattgatcgtttgggacgtaattatgatgaaattatcgaaactgtaagctatttaaaagagaaaaatgttcagttaatgattaccagtttacctatgatgaacgaagtggttggtaatccgttaatagataaatttatgaaagatttaatcattcaaattttagcagttatttcagaacaagaaagaaatgaaagtaagcgtagacaagctcaaggtatacaaattgcgaagaaaaaaggagtatataaaggacgacctttactctattctccaaatgctaaagatcctcaaaaacgtattgtctatcatcgcgttgtagaaatgttagaagaaggtaaagggattagtaagattgcgaaagaagtgaatataacaaggcaaactgtttatagaattaaacatagcaaagcatcatattga

SEQ ID NO: 45 - DNA, 1692 bp, Staphylococcus capitis
atgttaaaaggatacttgaaaaatactaaaaaagaatctcttctttttatatttgctataacacttaatgtgctaggaagttttcttacattaactataccactattaatacgtaatattatagacgaaaaaattagattcataacaataatgattatattatcagttggtatagtagccacgttattcttatctttatcatcatatatgttatttactttcagtgaaagaaagatcaaaaaattacgaaatatattaactgataaattattacattcaaaaattcttttttttgataaaaataatagtagtaggttatctagtagaattataaatgatactgaaaatttaagagacttttttgcaaataatatccctgattttataactggtttaatgatggttattggcggatcaataatgttatttttattagattggaaattagcatttgtcattttaataggtcttttttcattaataataatattaaatcccttttctagtattaatagtaaatatactaaaaaaaagcaaagcttcttaagtatattatctggagaattaacagaaacatttcaacaaattagaatcattaaatctaatcaatctgaaaaaataacttcaaaaaatatatcacaattaacaaacaatgtctttaaaatagctaaaaaatcttcatttatagatgccttaataaatcctatagtctttgcagttcttttcactgttctattagtaattttcacttatggcggtattagagttgctaataatactataagtactggaacactaatttcatttttcatttacctgatacaactattaacacctattagtcaagtcggtaacttctttaataattatgcaaaagcaaaaggatctacagaagaaatcactaatatattaaaattagagaaagagtcagatgaaggtaaaaacaacatcaaaaatgtaaataatttgatttttaacaatatattttttagctataattctgataatttcagtgttttatctaaactaaacttgagttttcaaaaagggcaaaaaacatctatagtaggcccctcaggttcaggaaaatctactataattcagttaattgaaagattttatactccccaaataggtcaaataagttccaatgatttaaatatccagaaactcaatctagagaattggagagaaaaaatcgctttgattacccaagataattcattatttactggtacaatctatgacaatctaatttcaggattaaaaaaaatccctactaataatgaaataatgaacagtttaaaaaaagcacatatatacgaagaaattatgcaaaaaaaagagggtttaaaattcttcgtaggtgaaaaaggttctaatttatcagaaggccaaaaacaaagagttcaaatagcaagggcatttttaaaaaactctgaaatatttatattcgacgaagccacttctaatttagatagtaaatctgaaaaagttattatggataacttaaacaaaaataaagaaaaaattatactaataataattgcacatagattatctactatacaagactccgattatatatactttattgaaaatggtactgttacaggagaaggatcacatcaacatctattaaaaactcattatggttataaaaattttattagtaaccaaactattgaatag

SEQ ID NO: 46 - DNA, 687 bp, Staphylococcus capitis
atgttaaatgatattagattgctaaagtggctatataagagagcaaataatattaatgctcaaatatttataaatattattgaaaataaagactctgatattaatattgaaaagcaccatcaagtttatccttatatgctattttcagaagaaatatcaaatagggatgtgataaaagaattgaaaaaaattttagcaactgaattgaattcaactaatgaaagtcatttatatctacgcaacaaattagatttaacactagatgattttgaagttcatatagataaaatacatgagagcattacattggaaatgcttaataaagatattaatatagaatacttatatgatttactatttttagttgaatttaaagaaattactgaaagtgaaaaaaatatattagcaaatgttattcctagtttaattgtgaataactgtatagaatataattttatagaagcttcgatcctagtacacatagctgaacatatatgttcatatattccaaatgaattttggaaaaatactagagatttttttgaaaatcatcagaggtttgacggttcatttggttattttaatccatttttaaataagcactttttaactgaaaatgaaaatataatacgttcttattattgctataaagtaatcaaaaccatagataaaattcaaaggaagtaa

SEQ ID NO: 47 - DNA, 591 bp, Staphylococcus capitis
atgtttcaaaaacaaaaatacaaatacataattaaacaattaaactcgaggaaaatgaacatagatttatactccgagttatgtttattatttgaaatttataatgatttaaatattttttacgatgttcaagatatggaacaattaaaaattagccgtttaataaaagatattgcttttacatttaacgaatctttatcatatgaagacttaattaatatatatcctatgtatataaaagaacatattcacttcgctattacatcaaatatcacagacaaaaaaaaacaattaataagaaaattatttcttagtcaatgtatacaaaaaaatgaatggttggatactgaatatgacaatataaagacattatattcttacatatgtgaaaattctgattataatatagactcaaaaaaaatagtaaacaaattaaaactttcaaatattgaaagttttaatcactctaatactgaagttttttctttagaagagtatatagattttttaaatgtaatatctcaaagttctagtggtataagtaagaatataattgatattttaataggggagttaaaatatgttaaatga

SEQ ID NO: 48 - DNA, 870 bp, Staphylococcus capitis
atgaaaaaatcaattaataaaggtttagattacataattaaaaatattgatttttttaatgttaattttaaaatagatacagatttaggagtaaaaccatttatagaattagtttttttatataatttaattagaacaactgatatagatatagataagaaagaaaaaatagaaaattatatagataatgttattgcaaaagtagattttgaagaagagttaaaacaagatatttttggtatttctgggttatcaattttagaagaatatttactaggaaaaagacaaaaaaaatataaaaaaatattacaagtattagttgaacaaaacaaagtagacttattaattgaaagaacgccatttcgtactatggatatgaagtattctttaaatcaggcaaatattaaagataatttaccatcatatgattctatttttaataaaacaattttaggaaagaatttacctttattttattatagtacaacatctgcttacagtgttactcatacagtgttttatatcacaagtatgggtaaacattgccgaataaaccaagaaataaaaaacaaaatttttttattcaggactttaattggaatacatattaataaaaaagatttagatgtattatctgagatattattgtgtgtattgtttttagatatttatgatcctgttaactctcaaggtatttttgactttgccataaaatttattttagaaaatcaaaataaaaatggaagttttccagcacctaagtcaagtaattctagaaagaaaaagaaaagatttaacgaagactaccatactacattggtttgtataggagctttagaatgtttcaaaaacaaaaatacaaatacataa

SEQ ID NO: 49 - DNA, 192 bp, Staphylococcus capitis
atgctaaaaaatattaaagaaaacaaaaatttcattatcccaacatcattagttaatgattcaacttcaattcaaaaagctggagttggtgcttggagtggctgggttttagtttataaatccagttcagttgatggtaattctgtattaaaagataatttacagtcttttaatcttaaaacagttcaataa

SEQ ID NO: 50 - DNA, 114 bp, Staphylococcus capitis
atggatggggtcaaagatacgttaatcaataatactatattaatcaatgttactattattttcattagtttaattttatatattttcttaagaaaaaagaaaactaattggtaa

SEQ ID NO: 51 - DNA, 2262 bp, Staphylococcus capitis
atgaatgatattaccattataggagcttcacaaaataatttaaaaaatatagatataactatacctaaacatttgattacagtatttacaggacgttctggttcaggtaagtcatcactggtattcagaacagtagctgctgaatctgaacaacttttaaatgaaagttattctagctatattcaatttcatttaaatcagcaacctaaaccaaaagtaaaagaaattaaaaatcttccagtagcaatgacgattagtcaaaaaagatttaatggtaattctcgctctactgtaggtacagtatctgatatatacgcctctgttagattgttatggtcaaggataggtgaaccttttgtcggttattcagatgccttttcatttaacagtcccaatggtatgtgtgaaacatgtgaaggattaggttacattgaagacattaatttaaatgagctcttagattggaacaaatctttaaatgaaggtgctattaatttcccatcttttggacctgataaagaaagagggaaagcttatcgtgatagtggtctgtttgataatgataaaaaattaaaagcatatacaaaagaagaattagatttgtttttgtatcaggagccaataaaattaaaaaaatcacctgaagaatggcggaaatcagcaaaatatgtgggacttatacctaggtttagaagaatattcttgggagataaagaatttaacaaaaaacgttatgctaaacatcttaaaaatgttgtggaaaataaaatttgtccaacttgtaacggtcaacgtttaaattcgaaaattttgagttgtaaaattatggggaaaaatatttcagattttacacaaatgactgtaaaagaaaatttagcatttcttaataaattaaataattcaacagcccagtttattattgaaccactccgaaaacaattagaagcacttgattatataggattaagttatttaactcttgaccgtgtaaccacttctttatcaggtggagaagcacaacggcttaaattaatacgacatttaaatagttcgctatctgatttggtttatatcattgatgaaccaagtgttggtttacatccagaggatattgcaaaaataaatgaaattttgaaatctttaaaacataaaggtaatacagtattaattgtagaacatgatcctgatgtaattaaagaagcagattatatcattgatatgggaccaagttcaggggcgcaaggtggagagataacgtttaagggaacatacaaagaattattgtcttcagatacatctactggggaagcactacgtatcaaacatcacttaaaaaatgagatacgtgaagcaaagagtttttatcatcttggaccagtgacccaaaacaatttgaagaatgtgacagttgatatacccaagcatgttttgacagtattaactggagtagcaggttctgggaaaagttcacttgttaaggcaggttttgcaaaaaatgataatgcagtatttatggatcaaaaagcgatacaaggttccaatcggtctaatttactaacttatttaggtgtttttgacagagtcagaaattttttcagcaaagaaactggattaaataaatctatgtttagttataattcgaaaggagcttgtgccaattgtggtggtaaaggttatattgaaacagaacttgcatttatgggtgaattttcacaaacatgtgaagtgtgtcacggtaaacgttataagccagaagtgttgaatgcaactatagatggctattctattgctgatttccttgaattgactgttgacgaaggtataagattttttgataaagaaaatgaaattcagtctaagttacaagctataagtaaaactggattaaattacgtaacccttggccaacctctatctacattatcaggtggtgaaattcaacgcgttaaattaggccaatatttaaatgatgatgttacagatagtatttttatatttgatgaacctacgacaggtttacatgaagctgatattcctatattgataaactgttttaatgatcttattgaacaaaataacactgttattttaattgaacataatttatcaattatgtgtgatgctgattggattatagatgtagggccaggccctggtctagatgggggtaaagtacaatttagtggctatcctataaactttgttaaagagaataaaacattaacatctaagcatttgaaactttatatagcaaatgattaa

SEQ ID NO: 52 - DNA, 1149 bp, Staphylococcus capitis
atgaaagcagttacttatcaaggtcataaaaatatggaagttcgtgaagtacatgatccaataatagaagaatcaacggatgcaataataaaaataacagcttcaggtatatgtggttctgatttacatctttatcatcaaggcgatttatttatggatcctggttttgttattggacatgagccaatgggaattgtagaagaagtaggaaaagacgttaaaaccttaaaaaagggagatagagtagttataccttttaacataggttgcggcgattgtttctattgtaataatgaaatggagtctcagtgtgataattctaactcatcaccggcaagttggaaaatggataatggtggacttttcggttttggtggcatgcacggaaaccactggggaggtcaagcagagtatttaagagtcccatttgccgatttctcctctttcaaagttccagatagtgatttgaaagacgaacaagtattatttttatctgatgttgtcccaacagcttattggagtgttgaacatgcaggcgtaaaatctggagataccgttattgttcttggttgtggcccaatcggtttaatggcacaaaaatttgctaaattaaaaggcgctgaacgtgtgattgccattgacaatgtagaacatagattaaaccatgccaaaaaatccaatggcgctgaagtatataatttttctaaagaagataatataggaaaattacttcgtgaaagcacacgcggtggtgcagatgtcgttatagattgtgttggaatggatggacaagttgctcaagatgatttagagataagttcaaattcagcacaacgaggtaatattagtccaattattacagcagctgaatcagtaagaaaatttggaacgattcaattaactggtatttacggtacacctgcagacaattatccaatagatttaatttttaatagagatgtccaagtaaaaagtggacaagcgccagttattcatcaaatgccaaaattatatgaaatgattaaaaatgaagtttttgatccaacagaaattataactcacacaatgcctttagaagatgcaaaacaagcgtatgatattttcgatcagaaaaaagataataatattaaagtaattctaaaaccataa

SEQ ID NO: 53 - DNA, 126 bp, Staphylococcus capitis
ttggccatcatttcaattacttggttaaatgagtcctttggatactatcaactagtagacggactatttattattatagctgtcgtagctttaactacaccgaaaaaaagtaagtatgaaaattaa

SEQ ID NO: 54 - DNA, 345 bp, Staphylococcus capitis
ttgttaatagaatataataataaattattttacacttctaaagatttagctttatcagtaattggtggtaggtggaaaatccctattatttatcatttattacaatcagaagtacttaggttgagtgaattagaaaaaaaattaccagatattaatcaaagaatgttaattagacaattaagggagcttgaaaaggatatgataataaaaagaactatatatccagtagtccctccaaaagttgaatatcgattaactagtgttggtttgtctctcgacaatgtggtctatggtatttgtgaatggggagatgaatatttgaaattaattaataatgaaaattag

SEQ ID NO: 55 - DNA, 633 bp, Staphylococcus capitis
atggaattacaattagcgattgatttattaaataaagaggatgctgcagaattagcaaataaagttaaagattatgtagatatcgtagaaattggaacaccgattgttataaatgaaggattaccagctgtacaacatttaaatgataatattgatagtgtaaaagtattagcagatttaaaaattatggatgctgccgactatgaagtaagccaagcagttaaatttggtgcagacatagtaacaattttaggcgttgcagaagatgcatcaattaaagcagcagttgatgaagcacataaacatggcaaacaattattagtagatatgattgcagtccaagatttagaaaaacgtgcgaaagatttagatgatttaggcgcagattatatcgctgttcatactggttatgacttacaagctgaaggtcaatctcctttagaaagtttacgtaaagttaaatctgtaattagtaattctaaagtagcagtcgcaggtggtattaaaccagatacaattaaagatattgttgcagaaaatcctgatttaattattgttggtggcggcattgcaaatgctgatgaccctgtagaagctgctaaacaatgtagagctgcgattgaaggaaaataa

SEQ ID NO: 56 - DNA, 552 bp, Staphylococcus capitis
atgatgacagaaatcacaaattatcgtttaatactagatgaaatagacaacacattatcacatgtgaaagacagtgaagccgaaacgtttttaaagcaaattattaaagcagagcaagtttttgtatctggaaaaggacgttcgggttttgtagcaaatagttttgcgatgagattgaatcagcttgggaagggtgcacatgtagttggtgagtccactacaccttccattaccgaaaaagatttgtttgttatcctttctggctcaggttcgacagagcatttaagattattagcagataaagctaaagctgtaggtgcagaagttgtattattgtcaacaaatccaacgtcaaatattggtgaacttgcaaatgcagtgattgaattaccggcgggaacgaaatatgatgctgaaggttcagcacaacctctaggtagcttatttgaacaagcatcacaagtgtttttagatagtattgttttagatttaatgactgagataaacgttgatgaagaaacaatgcagcaaaatcatgctaatctggaataa

SEQ ID NO: 57 - DNA, 609 bp, Staphylococcus capitis
atgattataggttatgcgagagtatcatcgatagatcaaaatttagaaagacaattggataatttaaagacgtttggtgtggagaaaatctttacagagaaacagtcgggaaagtcagtggaaaatagacctgtatttcaagaagcactcaattttgtcagaatgggagatcgattcgttgtggaatctattgatcgtttaggacgtaactatgatgaaattattgaaactgtgaattatttaaaagaaaaagacgttcagttaatgattaccagcttacctatgatgaatgaagtgattggcaatccattactgaataagtttatgaaagatttaatcattcaaatattagcaatggtttcagaacaagagagaaatgaaagtaaacgtcgacaagcgcaaggaattcaagttgcgaaggaaaaaggcgtatataaagggcgccccttactttattcaccaaatgcgaaagatcctcaaaaacgtgttatttatcatcgcgtggtggaaatgttagaagaagggcaagcaattagtaaaattgccaaagaagttaatattacaagacaaacagtttatagaattaaacatgataagggattatcttga

SEQ ID NO: 58 - DNA, 561 bp, Staphylococcus capitis
atgttagaagctatacttatcagtattactttcagcgtaatctctataataattacatatttaagtgtgttatatatatgtaaagaactaaagaatgtttctatatataaacagggatttaatcagttagaatggaaaatactattttttaatctttttggatcaatagtattttatctatgtttaatattaacgatttttagttttatattatgtgtgccagtaacaattgctttcattattgaaggagaatcaatgagtaatataacttataataaatactatatattaatagtgtttatgctcatcgttgaaattctcagtataataggagtatgttggttgaaaataaagctacatgctgtttttatgaaaaacactttaagttacaatatgaggcttttaaactttaatgtagagatcttaactataataacactattattaacagcaattaatggaatggtacattcaaaaaatttgtctcaatatatcgttatttttacatttactgccgcatttgctgcaattgagaaattattgtataatcaaaaattttaa

SEQ ID NO: 59 - DNA, 486 bp, Staphylococcus capitis
atgaagaaattttctaaaattattctagctagcggtattgttttgggtttctctgtaacgcccgaactatttaatgcaacggaagcacaggcacaagagtctattgaaccttattataattatgatggttatactgcgtatcaaagtggatttatattagacaaaaatttcaaagagtcattgaaatacgataattttactatcaacggctatcaaatagcaaagaatacaaccggtgacaatcgaataaatttatacgatcaaacactttatggtgtatctgagaataaagctaatggtgttttcttctctctcgatggaaaatctattaataaaaatactttaattcaaaattatggtcaaccaaattcttactctcctgcttcagcatggggtgaagaatatatgtacaaaattggtaataaagatgtcagattttatatttacaatggctatgtgaataaatgtcaaattattagtgaataa

SEQ ID NO: 60 - DNA, 678 bp, Staphylococcus capitis
atggtggtttttgtttttactttattatttacgttagcttttacttcaatgaatttctttaactcagcaaacgccgaagaaaataacactactaattatcaggaattacaaaaagatggaactttagataagtctgttactcaagagcagtggaatcaattcttacaaaattcaagtcaagcaaaacagcaaatagaaaataaaagcgatgtatctactagatctaaatttcatttaaaagctggagatgttttaatttctaatgctaccagttcttggggtttaactggacatgctgcaattgcaattagcatcaaaaaaatattacatatttatggtaaaggtcatcatccagctacacattctttatcttggtttaagaaaagatatgctaagaaaggtaaatggatgaaaatttatcgttcaaaaaaacatggagcaggttctaaagcagctagatgggctagaaaacattatgtaggtaaaaaatacagatatggtattaatactcatctatctaaaagaaatcctacgtattgttcaaaaattgtttatcaagcatatagatatggaataggtagaaaagcaatgtcttcaccaacaccaatagtttcaccatatacattacctaatttttcttctaattcttataagttaaaaagagtgaaaacttattaa

SEQ ID NO: 61 - DNA, 135 bp, Staphylococcus capitis
atgtcaggtattgttgaatcattacataatgcagtaaattcaggtttacatgtcaaacaagactgggtagacatgggctttggcattgctaatacaattgctaaaatcgttgaccaagtacttaaatttgtttaa

SEQ ID NO: 62 - DNA, 291 bp, Staphylococcus capitis
ttgcaacagaaccgaaaaggttatattcaatttggaacggaagtagttaattctaaagatcactcaattattgctttactaggagaatcgcctggggcttcaacttcagtttctgtagctttagaagtacttgaaaaaaacttctcagaatatgaatcaaaatggacaccaaaaatcaaaaaaatgataccatcttatggccaatcattagttaatgatattggattaatgagaactattcgaaaacaaacatctaaagatttagaattaaattattatgaaaacaaatag

SEQ ID NO: 63 - DNA, 150 bp, Staphylococcus capitis
atgcataaggtggagtttgatgctgttctaaaaaataatgatggttcagttgaaggtgctgtatttactcaccccttctgttcctctccattagagccacgcatattagctgcttctagtcagccatcttggccattagtggtagtgtaa

SEQ ID NO: 64 - DNA, 573 bp, Staphylococcus capitis
atgagcgcatcagattcagcatcaacaagtgcatctgactcagcgtcagtaagcgcatcagatagtgcgtcactaagcacaagcgcatcatattcagcgtcaacaagtacatcagattcagcatcaacaagtgcaagcgattcagcgtcagtaagtgcatcagatagtgcatcactaagcacaagcgtgtctgactcaacatcagtaagtgcgagcgattcaacgtcaacaagcgtgtctgattcgaactcaatgagcgcatctgattcaacatcagtaagcgcaagcgactcagcgtcaacaagtacatctgactcagcgtcagtaagtgcatcaaatgtcacttcgaatgcaacttctaatagtgcatcaactggagaaagtacaaactcatctaatgtagtgcaacaatcaaatcataaagataatagtgatgagaacaaagaacttcctgaaaccggtaatagcaatgacgctaataatacaaatgtattaatgggaactgttctttcattacttgctggattaggtttaatgaagagatcacgtaaaaacaaagaagataaaaaataa

SEQ ID NO: 65 - DNA, 1194 bp, Staphylococcus capitis
atgttaagaaataaagaattcaaagttttgcataaaagaattatttttacaatactcattcttgtcatatacatactaggaagtaatatttctataattggtaatgaatcaattaaatttaaccatgacagtttttttaaattagctatttcaaacgtcggtggagatttaaactcattgaatgtattttcattggggttaggcccatggttaacagcaatgattattatcatgttattcaactatagaaatgtagataatattgttaagcagactcgttctgaaaagcaaataaaggaaagactattaacaatactcatagcaacgatacaagcatattatgttatccatacctatgttcagaataatataatacagagcacaaatattctgttacttgtattagttttactaacagggacattatttttggtctggttggctgatcaaaatactacttatggaattggtggaccaatgccaattgtattaatgagtttaataaaatcgttatttcatcaacaattatctaatataaatataacaacaacattatttattgtgattggtttattaattatagcgatgctaatacttctctatatagaattatcagagtatcggattcattataaagatataatgaacatggctacacaaaattcacattcatatcttgcctggaaattaaatccagcaggaagtatgtctataatgataagtttatctttgtttctattgttaaatagtgctattaacttaattggaaacttacttctgaataaggaaatgaatgtagcaatttttggttttgataatcctgtaggtattacagtatatattgtaatacaaatcatttttggatacttactatctagatttttgattaatactaaaaggaaatctaaagaatttttaaaaaatggaaattactttgtaggtattaaccctggtgaagaaactgagcgatatttaaataaaaaagcaagaagaatttgctggtttggttcaattacagtgacattgattttagcagtgcccttgtattgttcattattgattccagagctttcaaaagaaatatatttttcaatacaacttattgtattaatttatattggtataagtataaccgaaacattaagagcatattcttattttgatagatataaaagcatattagacaaatattag

SEQ ID NO: 66 - DNA, 1557 bp, Staphylococcus capitis
atgagatattttataccggcgtggtatagtagacaaaacttgtggaaagaccataccctccccttctattataagccggataaaacagagtttgatgacatgattagcttaatgtctatgcataagaaaaatggttataaatataaggtgctagtattaaattattcacctaatttaaggttgtttttacatagacacgatttatttgaaagtgattattggtctgtttttgatgtgttacaaagtgctccaaacacattacctagagctattgattatttagatttgaactggcctaaagacacagagtttgtatattcaccgtttatggtagaagcagttataagcgaaaatacgtattctcaagttacgtttaatcaagagggatatgtacttcatatacatgaatatgaaaatggattgcaacaacaaaagatgatatttgacgatagaggatttatatcttcaattattaaatatgaaaatgataatgaggttaaacaaacttatttaaatgtattgggtgaaaagatactaactgaggacttaataacaggagaagtattagttaataatacagttaaaaacttattagaccatagtaaatatttgaatatgttggaaataatagaagagattgttgaaaaattttataaagatcaaataacattatcagacaattttattgctgcttctgatgaaagacataatcagttaatcacacgttattttgaagcaaatcaattatgtttttctctattttcaaatagaaatagagaaataacgccacatttaattcactccatgcaacctgcaaaaagttgcttagttgacacaaaagaaaatgaaagagaatgtaatcttattgctaataacaattcaattgacatgaaagtgtctagaattacaccctttgatactgaaaaaataccaaatataagttcacagttatataatgtgcatattggtttttggatatataatttatcaagagatgtagtagagactacaataaatcaattatataattatataaaaaataaagaaaactataaagttactattttaatgaaagatataacaagcaaaacgccgaaatggttatcagacatagtaaaagaaaaaaatgaattatataatgaagaacaaaaaactttaagtgaagaaatggctgatgtgttagaagaagaaatagaatttatagaaataattaaaattgaatcagtcctatttgaagaagatttaattagaacaatgtcacaattaagagtagttatagatttgggtgatgaaccggatttatatctacaaattagcgcaataagtgcaggagtacctcaaattaatatgatagaaacggattatgtgacacctaatgtaaacgggttaataataccaagttcatctaatattacacaggcactagattacttcttactaagtttgaaaaactggaattattcttatgcatcttccataaaattagtagatgaatttagttcgactaagataataagagaagtggaccgtttgataaaaggagagttacatggttag

SEQ ID NO: 67 - DNA, 1545 bp, Staphylococcus capitis
atggttagaaaatttaacatattgcaaatcggcggagaagatttagaacctattttccatgataaaaaaaacgtgtacatcgattatcttgatccaatactatttacatttgaaagtggatatgaagaagcaattgaaaatttaatagatgaaattggttcctttaatttagtatttattcaaacaacgtattctcaagaattgatgaaagttattgaattagtaggagagccatatacgatttatgtagatgaaaaatactgggattttcaatttgaaaatgatcctcgagtaaaatataaatttattaaaccattactttataaatcaacagatgagttgcatcataaattaaaagcgggtgcttttactaagcaatacggagataaagtctttccaattaaaggagaggtaagtcctagttttgaaggagaatttgaatacttaggtaacaaggagctcgttttatctggagattttggggagtcgtatactccaattgttagctggaaccaaaatttagtttatgataagaatatgatggtacaattatggccagaattttttgtagagggaaatgttgatatccaatatgtcattagattaatcccatttggctcattagaacatacaaaagatgttataaccgtaacaaaggatgatttaaaacaacctttggaattgatgccaagaccttatgatgcaaacatttctatagtggtaaaagctaaggggacgggtgttgtacatcttagggcaatccataaacgttggtctcgtgcagaaatgggccaatttataatgggtggtcaacgttataacgatgaaaatggcgaagagtttatacactatttcaatcctggtgatttaaagcctccactaaatgtatattttagtgggtatcgttcagcagaagggtttgaaggatattttatgatgaacagtctagaagccccatttctacttattggagatcctagaatcgaaggtggatccttttatcttggctctgaaacctatgaaaataacataaaaaaaattattaaagaagcattggaatatttaaattttaaagaagatgatttgatattatctggattgtcgatgggatcatttggcgcattatactatggttcacaattaaccccaagagctgtgattgttggtaaacctttagttaatattggtagaattgctgaaaatatgaaactaaaacgacccaatgattttggaacggcactagacattttgatgtcacaagcaggcacatttagtaaacaaaatatcaatcatttgaataagcgtttttgggaaaaatttaagcaaaatgaagttgaaaatactacttttgctatcgcatatatgcaaaatgatgattatgatgatatagcttttgatgatttaatgtctttgctaggagaatccagaacacatgtcatgacacgtggcgttcctggtagacataatgatgattcggcaactataacaagttggtttgtaaacttttatcatattattttaaataatcaattcgggagagagtaa

SEQ ID NO: 68 - DNA, 393 bp, Staphylococcus capitis
atgccctcaggaatggtgatacatgaatggaacatgttatcaagttatacaacaaataaacaagtgccttcattaccactattgaaaaaagggaacaattataaaattaattttgattatgatgtcacacctgaaagatcagtgtattttaaaattgttttatctaaaaagaatggtgaaaaaattaaaactatgattatcgaagatgatgatattgagtttaaatatccaaaagatgcctattcttataagattgaattaatgaatgctggatttcagcatttacaatttcgccgaattattattgaagaccaacatatagagaacagtcactcaactatatcaactgatattagtgaaatgatagataaaatcagacacaataaagtataa

SEQ ID NO: 69 - DNA, 2391 bp, Staphylococcus capitis
atgacaggtaaatttgataatactattaataagatgcggttaaaaaaactaaataaaacattaaatagtatcaataaaatgagtcatgttttttctgaatatactgatgaagcattaaaagcaaaaactcaagaatttaaaaagagaataatggagtctaaagcgactttagatcaaattttgccagaagcatatgctgttgtaagagaatctgcctaccgtgtactaggcatgtaccccaaagatgtgcaagtgctaggagctatagtaatgcatcagggaaatatagcagaaatgcaaaccggagaaggcaaaacgctaactgcaacgatgcccttatatttaaatgcattaacaggtaaaagagcatttttaattacgactaatgattacttagccaaaagagattgcatggaaatgaaaccattgtatgaatggttaggcttaactgcatcattgggatttatagacattccagattatgaatatgaagctggtgaaaagcaaaatctatatgcacatgacatcatttatactacaaatgggcgtttgggctttgattatcttacagataatttagcagatcacaaacgtactaaatttttacctgaattacagtttgcaattctagatgaagttgattcaatcattttagatgcagcacaaacaccactcgttatatctggtgcaccacgattacaatctaatttatttgatattgtaaaagaatttgtacatactcttaaagatgggcaacattttaaactagacaaaaataaaaaagaaatttggctaacaaaacagggtattgataaagcaagtaactactttaaagttcatcatttgtatgatgaaattaattttgatttggtccgtattatcaatttatcactgagagcaaagtatttatttgattacaatttagattatttagtatcaaatggagagattgtgttgattgataggattacaggtcgaatgcttccaggtacaaaattacagtcaggtttgcatcaagcaattgaagctaaggaagacgttgaattatccattgataagagtgtgatggctacaattacatttcaaaacttatttaaactctttgacaaatttgcaggaatgactggaacaggcaaacaaggagaaaaggagttttttgagttatattcgaaaatcgtagttgagattcccactgacaaacctattcagagacaagatttagaagatagagtattcgcaaatatggaagaaaaaaaccaagctatcattgattttgtggttgaaaaacataaaaaatctcagccagttcttttgataactagaactgcagaagcagctgaatatttttcagctaatctattccaattagatatacctaataacttattaattgctcaaaatgtttctaaagaagctcaaatgatttcggaagcaggcaatagagcagcagtcactgtggctacaagtatggcaggacgtggtacagatattaaattagcagaaggagttcatgaaattggtggtttagcagtcatcattaacgaacatatggaaaatagtcgtgtagatagacagttaagagggcgttctggtcgtcaaggtgacccaggggtatctcaaatatttgtttcattagatgattacattgttaaaaaatggagtcaatctaaaatgatagagaacgacaagttgaaaaaaattaatagtgaaattttagaaaatagtaagattttccaaatgaaagttaataacattgtaaacaaagcacagactgtttcagaagagacatctattgttcaacgtgagatggctaatgaatttgaaaaaagcattagtgtacaaagagatttaatttataaagaaagagaccgtattttagatatggttgacaaaaaccaatttgattataagcaattagctaaggatgtttttagaaacgatttaaaaaaatttaatataaatgataaaaaagacataattagctatatctataaaaatctatctttcaactttgaatcgaataatgtaaagatagatgtatttaaccaagaggcaattgttaactttttaatacaacattttatacatcaatttgaggataatcaaaagaaagcatcagatccatatttcatattacgctacatacaaaaatcaattattaaagcaatcgatatggcatggattgaacaagtagattatcttcaacaactaaaatctaacgttaataatcgtcaaaatggccaaagaaatgccatatatgaataccataaagttgcattagaatcatatgaaattatgactatgaaattaaagcgaaatattataaggaatttgtgtttaagtattattacatttgataaacatggagatcttgtgatttatttcccataa

SEQ ID NO: 70 - DNA, 1512 bp, Staphylococcus capitis
atgactgtatataatgtgaattttggcataggttgggcaagtagtggtattgaatatgctcaagcatacagagctaaattattgagacagttgaatagaaatataaaatttatttttttagatttcatatcttctgaaaacatccaaacattgactgataatctaggatttaaagatgatgaagtaatttggttatatcaatattttagtgatataaaaatcgcaccaacaacttatactttagatgatttaataggtgaaatcggtaacgaaattacacatatagaggataatggcaaaatcaaaagattgtattttgattatgataaaagttcattttcaacatgttatatgaaaaatgcagataaaaattatgtggatagagtggagtttgtcattgaaggctatttagtaagaaaagatttctttagttatacgagagtgttttctgaatattatgccccttatcaaaattatgccaagatatatatgagacagttttacaatgaagatggaacaattgcatataaggaatatatagatgataaagaaagtgtctttgtctttgacgatgcacagctctatagtaaatcagaatttgttgcatatttcatgaataaattaaatttatcaaataaagatatcgtaatcttagatagagctacagaaattggtcaagcagtattacaaaataaaggcgctagtaaattaggtgtggtagttcatgcagaacattttattgataatgccaccgatggcgataatatattgtggaataactactatgaatatcaatttagaaatgcaaaatttgtggacttctttattactgcgaccgatttacaaaatcgtattttaagtcaacatttttctaaatatacttatgataatccattaatcagaacagttcctgtaggtagcttaaatcaacttattcatccagagaaaaagagactgccatattcaatgctaacagcatcacgactggctaaagagaagcatgtagactggattgctaaagcagttgtgaaggccaaaaaagaaattcctaaattaacgtttgatatatatggtcaaggtggagaaaaagataaaatagaacaaattgtttatgaaaataatgcgcaagaatatattacattaaagggccatgttaatttgcaagatgtttattcaaagtatgaattatttgcatctgcttcacaaagtgaaggtttcggtttgacattgatggaggctgtaggctctggtttaggaatgataggatttaatgtaaattatggtaatccaacatttattcgtaatggtgaaaatggatatctgatgtctgaaaatgtagaatctgcagatgaagaagagaagattaatgaactagcttcatatattgtgaaatattttaaaaatggaccaaaaaatccagaacgcacatcatatgaaattgctagcgaatttttaactcagaaaatagtagaaaaatggagtatgctaattaacgaggtgctacatgattaa

SEQ ID NO: 71 - DNA, 1341 bp, Staphylococcus capitis
atgattaatatatttgataattatcattttaattcacaattattacatcgttcattgaaacttgcagggtatcaacatttgacaatttgtttagaggatgatggctttttaccagatgatgttacctctccttaccaatttttcgctcaaaatccaattaaacaaactgataaacctttattctttaatgaagtagaggtgccaacccactgggaaattacaggtacaaatgatatgggtaaaataaaaaatttaggggaaataagaggtaaaattttctatcaatccaatttcaagtctcgtattgtaaaccgagttgagtggttggataataagcaacgattacgcatagttgatttttacaataagaaggggtttaaatttgctgaagctatttatgatttagctggtaaagctataatgaaaaagtactttgataacctaggcaaagaaattatctatgaaaattatgtgactggagactacgtattaaactggaaaaacaagacacactttttcaagtctcaagaagcatttgtcatatattacttaaaacaactaaatgtagatttggatgtaattatctttaattcactagcgatgccttttatcgcgttatatagaatgaatacaattggaaagggaattctcgtttggcaagaaaatagtcatggaactattccaggaaatatgaaacttatgtttgatgaatcgttaaatagaaattattcaatcataataccaaatagagatgaatatctaaaaattcgccaagggctttgtgataaagaacgtgataaagtaattagaggtggctatctttatagttaccgaaagcaaaaccaatttactagaaatatattaactttaacaaattccgatcaattgctctgtattgaagaattagtaaaaagtaatagtgaatatcaatttcatatagcagctattacagaaatgtctaataggctattagatttaatgaaatatgataatgttcgattgtatccagtggcgaatgaagagacaattgaatcattatatcaacgatgtgatatttatttagataacaataaaggtaatgaactattgaatgcagttggtcgagcatttgaaaatgatatggtgatatttgcaacgcatgatgaagcacataatcgtatgtttacagcgcctgaaaatattgttatgaaaaaagatattaataatttgacaacaatgttgcaaaaaatgtctaatagtaagaaaacatatctaactagattacaattacagaaaaattattcaaatgaaattgaacctgaaaaactcattaataaaattaaggttatgttgcaaagttaa

SEQ ID NO: 72 - DNA, 1020 bp, Staphylococcus capitis
atggtacaagcaacggcagctgcacttattacatcttatgtttctaatgataaacaaggaaagggtttaggtatatttagtatggcactcggcttaggacctatacttgggccaagtataggctctatattattaaactttagtaattggtctatgattttttggattaatatacctatcatcatacttatagtagtcataaaccaggttttcataggagaattaaacgaggaaagatttaaattaaattttgactttataggcaatattttaatggttgtaatgttatcctcactcattttagctataacttttttaaaatctcagtttataatcgttcttttgataatatttttgattagtttatggctatttataaagtgggaatcaaaagttaaattcccattaattcctgtaacatggttacaaaataaaatgatgttgtccctactatttggcattttcactttaggaggttctatgtctttaggtttcattatcccacctttttatatagaacaaaatcttaagttaaatacattgattgtaggaatagttaacctttctgcgccattaggaatggttattatgtcacaattttctaataaactaacaaaaaaattcaacaatcaattattgctaactttaagtatattactgatgggaatatcttatttagttattggtctacttcaatataacctattgatatggaaacttattgtactgttattattctttggctttggatgtggtatatacttacctattaatactagaagtattttaaatttagtcaaaaaatcacaacaagctacagctggatcattacaaagaatgattcaaaatttgggaattgctttatattcatctgtaagttctatcactatacaaatatttaagaaccaccataatatgattcatgggtatattgtcctatggattatggcttctattattttatttattggatttatcttgtcagttaaaaatttactgggttataaaaaaactgagtaa

SEQ ID NO: 73 - DNA, 864 bp, Staphylococcus capitis
atgagtggagaaactgttatttataaaaatgaaatgaatttagtccctttaagacgctttactgctactgaaattaatttgttctttgctatgtgtaataaactcaaagaacaagatactaatacactccatttgtcttttgacgaactcaaagaattaagtaattacagtcctgaaacacgtaacattaacaggtttgtagatgatctccaaagagtttacgacaaaatgttagatatcagatatactattagaactgaaacaaaaattaaaaaatttgtcttattttataagtatgaaatagatatatccgaaaaatatttagaaattgctacttctcccgacttaaaatacatcttaaattcaattacggataattttactaaattcgaattaaaagagatgacacaccttaaatctacctactcaaaaaatatgtttagattacttaaacaatataaacatactggctatatgaagattaaaattgaagactttagagaaagactagatattccagaatcgtatagaatgtctaatattaatcaatttgttttaacaccgattatcaaggagctttctccaatatttagtaatctcaatatcaataaaataaaagcaaaaaaaggacgtaagattgagtggttagagtttacttttgacgctgaaaaacgcattcacagtaaacgacagccacaaatggcgaatataggtaagtcacaacaatatatcagtcgtgaaaaaacgccaaaatggttggaagaacgcacatatgaaaaaccaacacaaaatgagtatgatccgcaattagaaaaagaacgagaggcatttttaaaacaacttcaagttgattgggaagaatag

SEQ ID NO: 74 - DNA, 519 bp, Staphylococcus capitis
atgatttatgatatttccgaaagattaaaaaaatatacagagtcacatgaccaaaaagaaaacttatttcactttggtatgtatgtagctttaacatcattagctggtactataatttatatgtttagtagcacagccatttggattacgcccctgaatatgtctgttgcaagctttttaatattacttatgggtatgtataaaagaaaagataaaagagcatttctattgttttatatgcatggtacacaaaaaaaagagattattaagagcttaacatgcggaattatatctttacttgttggttttgcgacatttaatttacttaagtggtttaatcttagttataaaataaattataatatattagccatttttaaaaattccttccattttcttttagaatttctttttacaatgtggactatgttttttttaacaatagcaatgggtttaatattaaaacctattgctttattgatagttaaaagagtaatggatgttagaaaagatttatag

SEQ ID NO: 75 - DNA, 585 bp, Staphylococcus capitis
atgaaaaaaatatttttttcttttttagctctttctttaattataagttttgttatcccatcaatgagtaaggcagaagaaagaacttttgataacattaatactaatgaaagttataaagatgctaaaactgtagatgaatttcttaattcaaaagaaccagtgagtatcgactataattctttatctcctaaagaacaaaaacgctttcttgaaaaaacagcagttaaaactagttctagatcagcagatggtaaaacagtaactacatatgctaaaaagtgctcgcctaaaaagaaaaatttctcgtacaaattttcaaataaacaaattaaaaactctgctggaataggtggtattggcactgttggaggatttgttaaaaatgtattggtaaaaagaatcgctgcaccaatttctattggttctggtatagctctagctggcgctacaataaacggctggaccggaggaaaaggtattgtcgttaaaggatattcaaaaaacagaatggttagagaaaatccttatcaattaccaaagtgtaaacgtgttggtacagtaactagtatcaaaagatattaa

SEQ ID NO: 76 - DNA, 135 bp, Staphylococcus capitis
ttggttaaaaatgccaatcaaattgccagatattacgaccaacatcaatatgacgcactcaattacgaagcattagaacgtgatatcaacgaattacgtgaaaggttgaataaaatatgtaaaattctaaattag

SEQ ID NO: 77 - DNA, 675 bp, Staphylococcus capitis
atgaactatttcagatataaacaatttaacaaggatgttatcactgtagccgttggctactatctaagatatgcattgagttatcgtgatatatctgaaatattaagggaacgtggtgtaaacgttcatcattcaacggtctaccgttgggttcaagaatatgccccacttttatatcaaatttggaagaaaaagcataaaaaagcttattacaaatggcgtattgatgagacgtacatcaaaataaaaggaaaatggagctatttatatcgtgccattgatacagagggacatacattagatatttggttgcgtaagcaacgagataatcattcagcatatgcgtttatcaaacgtctcattaaacaatttggtaaacctcaaaaggtaattacagatcaggcaccttcaacgaaggtagcaatggctaaaataattaaagcttttaaacttaaacctgactgtcattgtacatcgaaatatctgaataacctcattgagcaagatcaccgtcatattaaagtaagaaagacaagatatcaaagtatcaatacggcaaagaatgctttaaaaggtattgaatgtatttacgctctatataaaaagaaccgtagatctcttcagatctacggattttcgccatgccacgaaattagcatcatgctagcaagttaa

SEQ ID NO: 78 - DNA, 846 bp, Staphylococcus capitis
atgattagtattaaaaacttaacagtaaaaaacaaaagtcaatcaatactaaataatattaactatgaatttgatgatggaaaggtatatggcttacttggtccaaatggttcaggaaagacaacacttttcaaaacaattattaatgttataaattactcaggtgagataaataaaggttttaattccaatgacatcggtcatttaattgagtatcccgcattttataataatataaattgtttagataatttgaagttgcactctatttataagggtcaagctaacgttgatttaaaaaaatatctagaaatggttaatttagataaagctgaacaaaaaaaattcaaacaactttctatgggaatgaaacagcgcttaggaattgcaagatctttaattggtaatcctaaagcaattattttagatgaaccatccaatggattggatcctattggtattaaagatatgcgagaaataatttcaaaaaatgtgaaatctgagaatagaactacaataatctctagccatatacttaaagaaattattgaatttgcagatatattattatttatcaaagatggaaaaatagtagctaatataaaaaataatcatacagactatggcttaataaaaacagatttatctaaagtttcaaaacagagtgactctgctcaatatagtggagaatatacaattttatcagatgatagttatagttatataataggagactataagaacttaaaaaatcaaaaaatagatgctgatattcaaaaattaaacttagaagatctatatttaaaaatcatgtctataaatgctaaagaggtgcttcttaaatga

SEQ ID NO: 79 - DNA, 726 bp, Staphylococcus capitis
atgatacaacttattaaaaatgaactgttcaaaataaaaagtgaaaaatttattttagttattgtattacttagccttatacctctattaatgaatttagctaacttcattataaatgattctaatctatctcttgataaagggttttactttaggttttacaatcaatatcttatgctaattcctataataacaagtattttagcagcatcaattttttatctagaatataaaaaccaaacatttttaaattggatttcttattataataaaagacaaaagctatttttatcaaaattgctaacttcatacttaatatcaacaatattggcgcttttaaatttagcagcaatacttctattttatatcataaatggcgttactattggtgatttatctaaaataattatttcatttttaatattgaatttttttacaatatttattatgactgttgttattacattttttattaatctaactcaaaatataataattgcaattgtatgtggaattggaatttcattagtaactatgatttttatggcggcacctttttcatacattttccctacttctttaggttatcgccttggattaaagtttattgacccttcattttattatagttctccagtaacacatacgataattggttttattataacacttgttatttttattattttttatattctatcttttaaaacaatgaaagtgagataa

SEQ ID NO: 80 - DNA, 204 bp, Staphylococcus capitis
atgaaaaacagattaaaagaacttcgttcacgtaaaaaatatacacaaacagatttatctgagaaaactggcatttcaagacaaactatttcattaatcgaaagagataaattcactccctctatactgatagcaattaaaatatctagaatttttaatgaacaagttgaaaatgtatttattatagagaaacaagatttataa

SEQ ID NO: 81 - DNA, 201 bp, Staphylococcus capitis
atggctggatttttagataatatagatacttcggaagtgaaatacacagagaattatagacctatatctaaaagtacaacaatgagagtagatactgatattaagaaaaggctaaaccaaatggcgttagataaagatacgtctataaaatcaataattgataaagttttagaagaatttttagaaaataataagtattaa

SEQ ID NO: 82 - DNA, 795 bp, Staphylococcus capitis
ttgaatataataacagttggaaattttaaaggtggcgtaggtaaaactacagtatctacattactttcttatattgcatctgaaaactataacaaaaaggttcttttaatagattttgatcctcaaggtaacgctactcaaattatgaaaagaacttatccagaatttaaagaggaatcactttcattcataaatatgctaaaaagtggaaatatagatgaaagtatcattagattaacttctaatttatcattattgcccgctgattcgtctttggctaatttatccgatattatttcaaaaacagacattttgaaaaaaagatatattttaaaaaatgtggtagaaaaaattgaaaaaatttatgatttcgattatgtatttatagatgtgccacctactataaattcagattttactaataatgctgtttacgcaagtaattatattttaatggtatttcaaacacaacaatcagcttatgagagcagtctttcttttgttaattttctaagagatagaaaaaaagagtcagatttaccatttgaattagttggtgcagttccagtattaataaaaaaaaatggacgagtagataaacaaatattagagatgtctaaatctgcgttttctgaagcattatttgaacaccaaatatatcaaagagaaagaataaaaaagttcgctgctgatgggataaaagataaagatatgcatgataaaaaagtcatacatatgttcaacaaagtatatgaagaattagttagtagaattaaattaattgaggaggaatga

SEQ ID NO: 83 - DNA, 993 bp, Staphylococcus capitis
atgactgaagaaagatttaatatccaacaacaatatagagaaaaattttatcaactgccaaaagtgttttttactaatgagaaatatatgcaattaagtaatgatgctaaaattgcgtacgctttgttaaaagacagattagaattatcaataaagaacaattggtttgatgataatggcgatatatttttcattttcacaaatgaaaaacttaaagctatattaaattgtcatgatggtaaattaacaaaaattaaaaaagagttatcaaaaaataatcttttagaacaagtaagatgtgggcaaggacgacctaataaattatatttaatgaatcctgaagttactaaagaagacgtttatgaaatcaaaaaacaagaagaaaacattgatgagacttgtcatgacactgaaatgcgaaaatcgcatttcaagaattgcgaaaatcgcatttctagaaatgctgaaatcgcacaacaagaaatgcgaaaatcgcacactaatgatactgaacttaatgacactgatattagtaatactgattctagtgatacgaatgatatgaatgatgtaagagaagaaaatgtagaagctacaaaacctaatcatccaaatcatacgaatcatttacaacaacaatccgatgaagaagctttaaaacatttagaacttcaggaaatgcccgaagatacaaagagatatatgaataactttagtgctaaagaaatacaaatcattaaatcagttattttaaaagctaagcgttcgtttaatgatatgtatggtgaagtgtatatgcttgaagatatggatgatgaattatttacagtacttaaaagattcaaaggtataatggttaaaaaacaagaaactgttgaagctatgcaaggatatttaatgcgctctattttgtccgaattagaagaaatgcgctcaacgaatatgcgtataaaaaactttgaaaacagtccactcaacatatttaaaacataa

SEQ ID NO: 84 - DNA, 702 bp, Staphylococcus capitis
atgaatttttcgttagttaaaagttttttacctcacatgacaaaagaggatatgagggtcattcaagttccgaattggtatttaagctattatagacgttttccagaaaagctagaaaactgtaaatataagcatatcaaagcgattaacgattatataaaacaagaaaaagctcatattattggtatcgatttaggtaaataccattatttaacagcgtcaaatatagatcgatcttttgtttttgtcgataaacataacacgctcttccatctttttagaaaatacgagagacgtattgctaataagcaatatgataatagcgaagcttattctaaactgaaaacaggacttaaaagccatatcaatcaagtagttaacgaaatgttagaacaaacgtccaatcgttttcaaaccgtctttgcattaggtgatcatggttcaagccatttatcttttcctagtttggtatttgacttgacttattttgcgattaagcagcgaaaaaatgaaaatgacgaaatactgatcgttgatgaaagtttcacgtctattgaatgtccaatatgccatgatagaaatcagtacaacagaactaataaaaataagtttaagtgtacaaaatgtggattcatacatcaaaacaatggtattgtagctgctagcaatatagcaaagaaaggacaattattaaattcttaa

SEQ ID NO: 85 - DNA, 276 bp, Staphylococcus capitis
atgaataataaacaaaaagcgaggctaaaacattacaaaaactatgattatccaaaacaagcgtatgctttctttgatcataaaaaggtaaaagttgttttaaataatggagaatcatttacggggtatattgttaaagaatatacgtacgaaatattattagtgaaaagcgatggcatcaaagatccaaaagataatgaattagagaaacgtacgctcattcctaaacactcgattgcttatacgaccaatttcattcatttacctcaagaataa

SEQ ID NO: 86 - DNA, 345 bp, Staphylococcus capitis
atgttattaaccgggttaggtacatatgtcggaacttggttagtcttaagtgtcactttattaatttcatgtgcaatgaaaagtcctggtgtctctattgctgtcggtattgtattttattttgccacttcaattttgtcaggtatattaacaattattgtagataaatgggaatggttaaaatggaacccgattagtatgatgaacattatggttcaaattgttgataaaagtatgaaaaaatttacaaaattagaattacatgagttgtttattggtaatattatttatattattattttcttaattctcgtagtatttgtctttaaaaagaaaaatgtctaa

SEQ ID NO: 87 - DNA, 126 bp, Staphylococcus capitis
atgctaaaaaaaggaatgttaagcgtgaaaaaattattaatagtaacaattattagtactattggtttttgtgcactcaaacgttaccaaaaacatgtaaaccaagcaccaaacatagaatattag

SEQ ID NO: 88 - DNA, 1500 bp, Staphylococcus capitis
atgaatacaaaagagtcaaaaacagttgttgttattggcgctggtgttttaagcacaacttttagttctatgcttaaagagttagaaccaagttggaatataaaactatatgaacgtttagatcgtcctggtatcgaaagttcaaatgagcgtcataatgctggaactggtcatgctgctttatgtgaattgaactatacagtgaaacaacctgatggatcaattgatatagaaaaagcaaaagaaattaatgaacagtttgagatttcaaaacaattttggggtcatttagttaaaaataatagtatttctaaccctaaagaatttattcaaccattacctcacattagttttgttagaggtaaaaataacgttcaattcttaaaggatcgttatcatgctatgaaggattttccaatgttcgacaatattgaatatacagaagatattgaagagatgagaaaatgggttccattaatgatggagggtcatagctcaagtgatattatggctgctagtaagattaacgaaggtacagacgttaactttggagagcttactcgtaaaatggctaaaaacattgaacaacatcctaatgccaatgtccaatataatcatgaagtaatagactttaaccatcgaaaagatggtaaatgggaagttaaagtgcgtcaacgtaacagcggtgatgttcaaactgaacttgctgattatgtatttattggtgctggtggtggcgctattccactattacaaaaaactggaattccagaaagtaaacatttgggtggattccctattacaggacaatttttaatttgtactaacccagacattatagcccaacacgatgccaaagtttacggtaaagaaccacctggcacaccgcctatgacagtacctcacttggatactcgatatattgatggtgaacgtacattattattcggtccattcgctagtgtgggtcctaagttcttaaaaaatggttctaatcttgatttatttaaatcagtcaaaccatataatattacaacattattatctgctgctgctaaaaacctacctttaatcaaatattcatttgatcaaatattaatgactaaagaaggttgtatgaatcatttacgtacattttatccagaagcacgtgatgaagattggcagttatacactgcaggcaaacgtgtacaagtgattaaagatactcccgaatatggtaaaggatttattcagtttggtacagaagttgttaattctgaagatcattcggtaatagctttattaggagagtctccaggagcatcaacttcagtatctgtagctttagaagtacttgagaaaaacttccctgaatatgaatctgaatggatgcctaaaatacaaaaaatgattccatcttatggtaaatcactcattaatgatactgcgttaatgaaaaaaatccgtcaacagacatcaaaagatttagaattaaattactatcaaaacaataagtag

SEQ ID NO: 89 - DNA, 1605 bp, Staphylococcus capitis
atgttagtgcattcatttgatccatttcataatttgttgttatcttcaattgttgctgctataccaatcattcttttcttactgtgtttaacagtatttaaaatgaagggtgtttatgctgcattaacaactttgattataacaatattagtagcattattagtttttaaattaccattaagaattgctggaggagctacatttgaaggcttctatcaaggaattattcctatcggttttatagttattatggccgtatggttgtataaaatttctaccgaaagtggtcaatttgatattgtcaaagatagtatagcgagtatttcacaagatcaacggattcaattattattgattggttttgtatttaatgcgtttttagaaggtgcagccggatttggtgtaccaattgctatatgcgctgtattacttacgcaacttggatttaaacctttagaagcagctatgtattgtttagtgggtaatgccgccgctggggcttacggtgcagtaggaattccagtagctattgttgatacgttaaatttatcaggtgatgtttctgctacagaggtagcactcattggtaatttaacgttaggatttattagcttctttgtgcctttcttattaatatttatgattgatgggctcaaaggtattaaagagacgttaccatcgattttagttgtttctgtaacttatacgcttttacaagtcattatgacatcatttgcaggtcctgaacttgcagatataatacctggattagcagctatggttgcacttgcattattctctagtaagtttcaaccccaaaatatatttagattacaaaaagatgaagaacctaaacatgtaactaaacattcattccaaaaaattgtttatgcatggagcccttttatcattttgactgttattgtacttatatggagttcgtcattctttaaaggattatttgaaaagaatgggttattaaacgcgtttgtagttaaatttaatgtacctggtacgatgaatgatgtaacccacacaccaaacgtactcacttttaattttattgcacaaaccggtacagccatattaattacagccattttgacaattattattgcaaataacatgaattttaaaattgctgggaaactattaggattaacagtgaaagaactatggatttctgtattaacaatatgttttatcctagctgtatctaaagtaacgacttatggcggattaagtagtgctatgggccaaggtattgctaaagctggatctatatttccactattatcaccagttttaggttggataggtgtatttatgactggatcagttgtaaataacaatgcattgtttgctccaatacaagcctctgttgctggacaaattggtgctaaagggtccttacttgtggcagctaacgttgctggtggtgttacggctaaaattgtatcacctcaatctatagctatagctactgctgcagttaatgaagtaggaaatgaatcacaattaatgaaaatgacaatgcgttttagtataggattattagtatttgtatgcatctggacatttctacttagcttattaataagctaa

SEQ ID NO: 90 - DNA, 705 bp, Staphylococcus capitis
atgactaacgtcttatatcaacatggtactttagggacattgatggcaggattattaaaaggaactgcatcaattagcgaaatattagaacacggagatttaggtatcgcgactttaactggttctaatggagaagtgatatttgtagatggaaaagcttatcacgctaatgaatataaagaatttgttgaattaaaaggtgatgaattaacaccttatgcaacagtaacaaaatttacggcagatacaacataccaaactaaagataaatcatctgaagacgtttttgaagaaattaaaaaaaacatgttgagtgaaaatttattttcagcagttaaaatttctggaaagttcaaaaatatgcatgtgcgtatgatgcctggacaagagccaccatatacacgattaattgattctgcacgtagacaacctgaacaaactgaaacttatgttaaaggtactgttgttggtttcttcacaccagaactattccatggcattgggtcttctggattccatatacactttgctaatgatgaacgtaactttggtggacatgtactggactttgaagttgaagatgttagagttgaaattcagaacttcgaaacattcgaacaacatttcccaatcaatgatgaaacctttaccaatacagacattgattataaagacattgcggaggaaattagagaagcagaatag

SEQ ID NO: 91 - DNA, 1665 bp, Staphylococcus capitis
atgactaataaaaattataatgcagctaacatagttattgatactctaaaaaataatggtgtggaatatatatttggtattccaggtgcaaaaattgactatttatttaacgcacttgaagacgatggacctgaacttattgttacgcgtcacgagcaaaacgcagcaatgatggcccaaggtataggacgactaactggtaaaccaggtgtcgcacttgtaacgagtggtccaggtgtcagtaacttaacgaccggactattaacagcaacatctgaaggagatcccgtattagctttaggaggacaagtgaaacgtaacgatttattgcgtttgacacaccaaagtattgataatgcagctttattaaaatcatcaactaaatatagtgaagaagtgcaagatcctgagtccttatcagaagtgttgactaacgcaatgagaacagcaacatcaggcaaaaatggagcgagttttgttagtattccccaagatgtggtttcatcaccagttgaatcaaaagcaatagcgcgtactcaaagacctgatctaggtcttcctagtgaacaaggtattgatgatgtgatagatttaataaaagatgcatcattcccagtattacttgtgggtatgagaagctcaagttctgatgaaacaaatgctattcgtaaattagttagaaaaactaatttaccagttgtagaaacattccaaggcgcaggtgtcattagtcgtgaattagaaagtcatttctttggccgtgtcggattgttccgtaaccaagtgggtgatgaattactacgtaaaagcgatttagttgtcacaataggttatgatccaattgaatacgaagcaagtaattggaataaagaattagatacaaaagtgatcaacattgatgaagttcaagctgaaattacaaatcatatgcaaccaattaaagagttaataggtaatattgctggaacaattgaaatgatttctgacaaagtaactgatcctttcattaatcaacagcatttagatgaactagaagagctgagagcatacattactgaacaaacaggtattaaagcgacacatgaagatggtgtattacatccagttgaaatcattgattccatgcaaaatgtgttaaccgatgacactacagttacagtagacgtaggtagtcattatatttggttagctcgtaaattcagaagttataacccaagacatttactatttagtaatggtatgcaaacattaggcgttgcattgccatgggcgatttcagcagcactcgtacgaccaaatacacaagttgtctcagtggctggtgatggaggtttcttattctcatcacaagacttagaaacagcagttcgtaaaaatttaaatatcattcaattaatttggaatgatggtaagtataatatggtggaattccaagaagaaatgaaatatgaacgttcagcaggtgtcgattttggttcagtcgattttgtaaaatatgcggagtcatttggagcaaaaggattgcgtgttacaaatcaaaaagaattagaagatgcaattaaaaaagggtatgaaattgaaggtcctgtagtaattgatatacctgtaaattataaagataatgtaaaactttcaactaatatgttgcctgatgcatttaattaa

SEQ ID NO: 92 - DNA, 201 bp, Staphylococcus capitis
atgaataacggtacagtaaaatggtttaattcagaaaaaggttttggttttatcgaaagagaaaatggcaacgatgttttcgttcacttctctggcattgctggtgaaggttataaatctttagaagatggtcaaaacgtagatttcgacattgttgacggtcaacgtggcgaacaagcaactaatgttgttgtaatctaa

SEQ ID NO: 93 - DNA, 618 bp, Staphylococcus capitis
atgattcagactattgtaactgctgctattctttatattgcgacagcagtagatttattagtgattttattaatattttttgctagagcaaagactaggaaagaatatcgagatatttatattggtcaatatgtaggatctgtggcattgattgtcgtaagtttattctttgcctttgtcttaaattatgttcctgaaaaatggatattaggattattagggttaataccgatttatttaggaattaaagtagctatttatgatgattgtgaaggagaaaagagagctaaaaaagaattgaatgaaaaaggattgtctaaattagttggtacggttgcaattgttacgatagcaagttgtggtgctgataatattggtttatttgttccgtattttgtgacattaagtgttactaatttattaattactctgtttgtctttttaattttaattttcttcttggtatttactgcacaaaaattagctaatattccaggagttggagaaattgttgagaaatttagtcgttggattatggctgttatttatatagctttaggtttatttattattattgaaaatgacactattcaaacaattttaggatttatattttaa

SEQ ID NO: 94 - DNA, 348 bp, Staphylococcus capitis
atgagttatgaaaatgcttgtgatgtgatctgtgtacatgaagataaagttaacaatgctttaagttttttagaagatgataaatctaagaaattacttaaaattttagaaaaaatttgtgatgagaaaaaattgaaaatcatattatctttgattaaagaagatgagttgtgtgtttgtgatatttctttgatattgaaaatgagtattgcttcaacttcacatcatttaagacttttatataaaaatgaggtgcttgatttttataaagatggaaagatggcatattattttattaaagacgatgaaataagagagtttttctctaaaaatcagaagggtttttga

SEQ ID NO: 95 - DNA, 567 bp, Staphylococcus capitis
atgaaacgaatgttattttgctttctaatattattatttttagcaggatgttcaaatagtaatcatcataaacctaaaaataaaattgtggagtatggtgatttcaaatgtccttattgtaagcaagtagatgatcacatcatgcctaaactagaaaaagattatattgataaagggaaagctgactatcaattcgtgaacatggcttttttaggtaaagactcagtaacaggttctcgtgccgctcatgctgttgaaaatatagcgcctaaaaagtctttaaaattccaaaaacttatgttttcaaaacaacctaaccatgagaacaaatggattactagaaagttaattgataagcaaatagacaaattgaatttaagtaagagtaaaacaaataaaatcaaaaaagattatagaacgaaaaatagccaatcatggaaagatgctaaaaaagatgtgcgacgctataaagataaaggtgtgaaagaggcaccaacggtttatgtgaatgataagaagttgaaagatccttatagttataaggaatataaaaagtatctaaaataa

SEQ ID NO: 96 - DNA, 582 bp, Staphylococcus capitis
atggaaaaagcatataacgtaaaatcaaaagtagttaaaggctttgctgcatttgctatcataactggtatgactgttagcactggtttagcggacaatcattcacaagctgctgaaaataaccaaacacaaaaagcatcatctaaaagtgctggtgaaatagtaaaaattgatgacaatatgggtagaattgatttaaataaaaatattacatacaatgtagatgaaaatggtatagctacattaaaagataaaaatacaaataaaacagaacaattaccatcaacagctaaagacaaaaacggtaaaaatgtaaacatagtttattttgaagaaaaaggtaaattaggtatgcaggtagttcctaatcaacaagaccgtaaaaagaaaaaagggtctgttgctaaatgtgttatcggaacagcaggcggtgctgtaggaggagcaacagcaggaggtcttacaggtgctggtgtgggtacagttacattaccagttgtaggtacagtaagtggtggcgttgtaggtacagtcggtggaggtatcggcggtgcttcaggtggctacgtagcaggttgctaa

SEQ ID NO: 97 - DNA, 288 bp, Staphylococcus capitis
atgaatgctaactttgctgaatatgtaacagaagaagaaaaagaatattatatacagaattatttagatgagtatgagcctaaagagtttaataaaatactttatggattattgaattacaaagagaaagagagagttgttgatttagaaaaagatattgaacactttagatctaattcagaaaaagaacttggtgattttatggacttagtagacatgcaacaagcaaaaggtgaattacaagagtttgaagaagatcgaatggaggcgtatcacgattatgtatag

SEQ ID NO: 98 - DNA, 483 bp, Staphylococcus capitis
atgataaaagataataaaataattcaaagaatgatccaagataaaatgaatgagcaaaatttagatctattgttacgtatattaaataacttatttgaattagaaccaagagaatacacaagaataaaaaatagtactgaacaaatagtacctacattagaaaagaagggtggttatttacctgaacattcaaaacatattcttgaaaaaatattctttaggttagctgattgtgaatgcgaagtagaatcggaaatgaacttgtattttataataattgatcaagaagtaatttacgaaaatatagtaaacgaattacgacctaataaagataatttaaatgttgaacttgatgataatggtgaaataggagcatttataaaggattataaagaaatacaacgaatatctgaaaaatatgatgttgatattacattagtaatcaaaatattacacaaattacagaatgaatcggaggaataa

SEQ ID NO: 99 - DNA, 642 bp, Staphylococcus capitis
atgaaatttggatatgcaagagtctcaactgaggaacagcatctggaaaatcaaatcaattggttaattgagcaaggagttgatcgcaagaatatatttgtagatgagataagtggtacaacaagtccttacgagcgtgatggttttaaaagtttattaaatgccaaaatcagacaaggtgatgatctatatgttttcaaattagatcgtctaggacgtaaggcaaatgtcgttgaagaaatggtacgtgagttgctaaatgatggtattatacttcattccaaagatttacccgatataccagccaatgataaatatggcatgggtaagttattgcttaatgtaatgttgtccgttctaacatttcaagccgaaacagaacgtttatacatgcttgagcgtcagcgtgtaggtattgaaagagctaaaaaagaaggacgttataaaggtaagaaagtaaagtattcaaaagatagtgataaccctcaaggtcgagttatttatgaaaaagtagtagaggtattaaagaatggaggaacaatcaggggcacagctaaaaagtatggtctaggtatgaaaactgttcaacgtataaaaaatgaaatcaaacgtgaatcggagtcttacaatgataaaagataa

SEQ ID NO: 100 - DNA, 288 bp, Staphylococcus capitis
atgactgaatttgataatttagatgctaagggtgtttatgacgtattattagagatagaaaaacaactgaatgattatatgaataatggttatagtaatcattcagttgttgatgagggtttttctcacagtcatgatattagtggtaaacttaataatacagtatcttttatagaaaacgctaataaaggtgtatattcagatgctgatgcctcaaaaattattgagaaagcttgcaatgtacaacatgaaattactcgatatataagaaagcaaagttttaaatag

SEQ ID NO: 101 - DNA, 168 bp, Staphylococcus capitis
gtgggatacaaatcaaaacgtatattgtatatatacaaaaaattattatctaaacatcatgttaatgttaaaaatttatcagaattttttagcacaaatgaaagaacgattcagcgtgatatagaagatattaatacattggttctgttgcaaagtaaaaaaatatag

SEQ ID NO: 102 - DNA, 117 bp, Staphylococcus capitis
ttgttaaaattatactataaattcaactttgcaacagaaccagtgaatggattagaagaatttcattttacagagcaagcaagaaaaacagtacaaaataaaaaaatctatttctag

SEQ ID NO: 103 - DNA, 1578 bp, Staphylococcus capitis
atgtcatttgttgaaacaatccataagaccgcattcgatgaattcagacatcatcgtggtgcaacatcataccatccaaaaatgatgttaaaagtaattctatatgcctacacacaatctgtgttttcaggacgtaagatagaaaaattacttaatgacagcatccgaatgatgctatcacaaaatcaaaaggcttcttataaaatgattaatcgatttagaataaatccaaaagtagatgctttattagaatcattatttattcaatttcatagtcagtgtttgaaacaaaatcttatagatgatcaggccatttttattgatggtacgaaagttgaggcgaatgccaatcgatatacatttgtaaaaaatagtactaaccatgagacaagaatgaatgaagattctaaagcactctatcatgaattgatgacaaataatatcatacctgagattaaaacagatcacgataatgacttagtaaaagaagaaatagatttgattggtagtcatttagataaagagatcgaagatttaaaccaacatattgataatgaaaaatgtactaaaataagaaaacaaatacggcttaaaagaactaaattaaaaaatacaaaaaacaaattaatggattactctgagaagcatagatacgaagtccaaaaatctattttaaaaaatagaaatagttattctaaaacggaccatgatgccacatttatgagaacgaaagaagattatatgaaaaacggacaactcaagccagggtataatttacaaatagcgacaaatcaatttgttttatcttataatgtgtatcaaaatcccactgatacaagaatgatgataccatttttaaattcaattcaagagacctacggtcatttacctgaatatattttaggtgacgcaggttatggtagcgaatcaaattatatggcagttatagataattttaatcgaacgccactcataacttatggaatgtttataaaagataaaactaaaaaatataaaagtgacatctttaatactcaaaattgggattatgacgaaattaacaatgaattcatttgtccgaacaataaaagaataggattcaaaagatatgcatatcgccatgataagtatggttttaaacgagactttaaattatatgaatgtgatgattgttcagaatatccgctgaaacaccaatgtatgaacttcaattcaaaaacaaataaaaaaataatgaagaattataattgggaatattttaaagcccaaattaataaaaagttttcagaaccaaaaacatctacagtcaaaagaaagattgatatggatcctgtttttagatttatgaaggctatttttggtttcactcgaatatctgttgggataaataaagtcaaaagagaactaggatttgtgctaatggcacttaatataagaaaagtaacaactcaacgagctgaaaataatcaaacacattataataaagacaatttctatattatttcaatagaaattgtctttatttacttatccaggaactttatgtcccggactctttttttctcattaattaggtaa

SEQ ID NO: 104 - DNA, 213 bp, Staphylococcus capitis
gtggatcatatcgaagacgtgttagaaaaattaaaacatgatggggctaagcttttatctgaaactcatgacaattcaacatatgaagattctaaaggtagtaaaagtgtttatatcaaagcatcatttaatacgttaatagaattacaggcaataccaaacggctactattatccaaaagatagcgaatctgaagtctttattcctggataa

SEQ ID NO: 105 - DNA, 303 bp, Staphylococcus capitis
atggagcttagtaaacaaatccaaaaatacagaaaagaacaaaatttatcccaagaagatttagcagaaaaaattcatgtaacaagacatacgatatccaattgggaaagaaacaaaaatatacctgatttaaacagtttaattttactaagccaaatttttaatacttctttagatcatttagttaaaggagatataaaaactatggagcatcaattaagtaataaacattttaataattggacattcgttatggggatatccagtatatggttctgttgcaaagtaaaaaaatatagctaa

SEQ ID NO: 106 - DNA, 120 bp, Staphylococcus capitis
atgttttacattgctgataaatcaatggttttgattattttagaaacaagtcaaaaacgtgtttcttttatttgggtaggatataaaaataaatcaactttaatttataaactgttatag

SEQ ID NO: 107 - DNA, 114 bp, Staphylococcus capitis
atggaaaatgaaaaatcaattaaagaagaaatacaagagttttatttaaatgggggtaaatataacgaagaagaaattgattttggaaaacgtgaaggatcagaattgttataa

SEQ ID NO: 108 - DNA, 150 bp, Staphylococcus capitis
atggaatcatcaaatggacacgaatggaatcattgtagaagggaatcatatggaatcatcaaatggactcgaatgcaatcatcgaatgaactcgaatggaatcatcatggaatggaatcgaatagaatcattgaatggactcgaatgtag

SEQ ID NO: 109 - DNA, 999 bp, Staphylococcus capitis
atgcaatataatactacaaaatatatagacgaaaatcaagataatgaaacattgaaagatatgactaaaagtgggacaaaacgcccatggagagaaaagaaaatcgacaatgtaagttatgcagatatactagaaattttaaaaattaaaaaggcttttaacgtaaaacaatgtggtaacgtcttagaatttaagccgactgatgaagggtatttaaaattacataaaacttggttttgtaaatcgaaattatgcccagtttgcaattggagacgtgctatgaaaaatagttatcaagctcaaaaagtgattgaagaagttgtaaaagaaaagccaaaagcacgttggttatttcttacactatcaacacgaaatgcaatagacggtgaacatttagaacaaagtttaaaacatatgtctaaggcttttaataaattgaaaatgtatacaaaagttaaaaagaatttaattggatttttacgttcaaccgaagtaacagttaataaaaatgatggtagttataatcaacatatgcatgttttattgtgtgttgaaaatagctattttaaaaataaaactaattatataactcaagaagaatgggttaatttatggcaaaaagctcttcaagttgattacaaacctgtcgcgaatatcaaagcaattaagccaaataaaaaaggcgataaagatatacaagctgcaattaaagagacatcaaaatactcggttaagtcgtccgattatttaacaggaaaccatgaaaaagacgcagaaattgttcaagatttagaacaaggtttatacagaaaacgtatgttaagttacggtggtttacttaaacaaaaacataaacttttaaatttagacgatgccgaagaaggtaatttaattcaaacgagcgatgaagaaaaaacgaccgaagaagaacaaaaagcccattcaattacggctatttggaattttgaaaaacaaaattatttcttaaaaaatttgtaa

SEQ ID NO: 110 - DNA, 1059 bp, Staphylococcus capitis
atgagtcaatctcaatttagtggaaaatcattttttaacaatatattaaatgctgtaggggcgggggtagttgttgctctattacctaatgcattattaggtgaattactcaagttatttaaagaaggaaatcacttattagaaactatattccaattagtaactgttattcaatcatttatggcttttataataggtgtgttagcggcgcatcaatttaaatttaaaggagcaggagctgcaatgataggtacttctgctatattaggttctggagctatacagtttagtaatggtggcatagctttaaaagggataggagatattattaatgtcattattgtggtcgttatcgcttgtgccatttatatgtttcttgagggtaaacttggttcatttgaaatgattatactaccggtattagtacccgtagttagtggagcgataggtttaatgacactcccatatgttcaaatcattactaaatctattggtagactcattaatggctttacagaattaaacccattattaatgtctatccttatatgtgtgacattttctttattgatggttacacctatttccctcgtagcgatagctactgctataagtttaactggtttaggtagtggtgctgcaaatatgggtattgtagcagcatgtgtaacgtttttatttggatcactaagagtcaattcaatcggtgtcaatttggtcctattaattggtgcagctaaaatgatgatacctgtctatttgaagaacttaattattgctattcccttaacactaaatgggattatttgtggtatagtagcgtatcttttaaatattaaggggacaccattgtcagctggttttggttatacaggtctagttggaccgattaatgcgcttaatcgaatgtctggtgatacgtctttcaatattattttattgataattggttattttgttgttccatttattggtgcgtttattatacatcatttatgcaaaagatttattcattcatatagcgatgaaatctataaatttgaaataccaaaagaataa

SEQ ID NO: 111 - DNA, 1455 bp, Staphylococcus capitis
atgtacaaaattattaaaattcttatagtcattacactacttttaggctctgcaattacatatataaatccaattgctagtgctgaagaagattctaattggaacaagattaaacaacgtggtgaacttcgtgttggattatctgctgattatgcacctttagaatttgaaaaaataaaaaatggtaaaactgattatgcaggtgtcgatattgagctagcgaagaaaatagccaaagataatcatttgaagttaaaaattattaatatgcaattcgatagtttattaggggcattaaaaactggaaaaattgatgtcattatatctggtatgactacaacaccggaaagaaaaaaggaagtagattttaccgagccgtacatgatgacaaataatgtaatgttagttaaaaaatcagataaaaataaatataaagatttgaaagatttcacaggtaagaaaattgctgctcagaaaggaactgatcaagagaaaatagctcataatgaaataaaagatagtcaagtatcctctctaaatcgattacctgagtcaattttagctcttaaaagtggtaaagttgtaggaacaattgtcgaaaaaccagtaggagaagcgtatttaaaacaaaatcctgaattagaattcgctaatgtaaaatttaatgaagaaaagaaacctacatgtatagcagttcccaaaaattcgccaattttactaaagcatttaaatcaaactattgatgaagtaaacaacaaaaacctcattgataagtatatgaatcaagctgctcaggatatgcaagatgatgggaatttcttcacaaaatatggaagtttctttattaaaggaattaaaaacactattttaatctcattagtaggcgttattttaggttctatactaggtgcttttatcgcattattgaaaataaataaatttaaaccattatctttagcaagtatttatattgaattcttaagaggaacaccaatgttagtacaagtatttattgtattctttggtaccacagcagcacttggcttagatgtttccgcacttatatgtggaacaatagcacttatcataaattcatcagcatacatagcagaaattattagagcaggtatcaatgctgtggataaaggtcagatggaggcagcaagaagtttaggtttaaactacattcaaactatgaagtcggtcattatgcctcaagcgattaaaaatattttaccagctttaggaaatgaatttgttacgcttattaaagaatcatcgattgtttcaactattggtgtaagcgaaattatgtttaatgctcaagttgttcaaggtatttcattcgatccttttacacctttaatcgttgctgcagttctatactttattttaacgtttgcattatcacgcatcatgagtttagttgaagggagaatgaaagctagtgattaa

SEQ ID NO: 112 - DNA, 723 bp, Staphylococcus capitis
gtgattaaaattaaaaatttgaacaaaaagtttggaaatcatgaagttcttaaagatattaatctagaagtttctcaaggagaagtagttgctattataggtccttcaggtagtggtaaaagtacgttgttacgttgtatgaatttacttgaaacacctacgaaaggacaagttatttttgaaggtaatgatttaactcataaaaatgttcatttagatgaattacgtcaaaaaatggggatggtatttcaaaacttcaatctatttcctcataaaaaagtgatagataatattatgttagcacctaagatgttacttaaaggggataaagagcagttaaaaaataccgctttagctttattagataaggtaggtttaaagaataaagcagatgcatatcctaatcaattatctggaggacagaaacaaagggttgccatcgctagggcattagccatgaaaccagatgttttattatttgatgagccaacatctgcgttagacccggaggttgtaggagatgtattaaaagtaatgagagatttagctaaagatggaatgacgatggtaattgttacgcatgaaatgaactttgctaaagaagttagtgataaagtgatttttatggcagatggcgttgtagtggaatcaggtaagccaacagcaatttttgaacatcctcaacaagaaagaactcaaaatttcttatctcgtgtattataa

SEQ ID NO: 113 - DNA, 1128 bp, Staphylococcus capitis
gtggattacaagcagttaaaaagagagattatcgactatgcccattcgattggcattgatagtataggtttcacaactgcagatccgtttgatgagctaaaacaaaaattggaaagctatcattcaaaaggttttgcatctggatttgaagaatcagacatcgctctaagaactgaacctaaactaagtttaccgagtgcgcgttccattatcgcaatcgctgtaggttacccaaataaattaaaaggtgcacctaaaagtgtaagaggtgatcgacgtggcatgtttgcgcgagcttcttggggtcaagattatcatacaattatgcgtaaaagacttgataaattaagtgaatttctacgagaaaaggtacccgatgtcgagatacagtctatggtagacactggtgtactttcagacagagctgtagcagaacgcgcaggattaggatttgttggtagaaatggatttgttatttctccagaattggggacttggacttatttaggtgaaatgttagtgagtatacctttcgaaccagatgatcctattttagacagttgtggagactgtacaatctgcgttgatcgttgtcctacgggtgcattagtaggtaatggtcagttgaatagtcaaaaatgtataagctttttaacccaaacaaaaggttatctacaagatgaataccgttataaaataggaaatcgtttatatggttgtgacacatgtcaacaagtgtgtcctaaaaatagaggtattaatactcaacatgatgatatagtacttgaaccggaaatcctaaaaccacgtttagttcctttgttgcaaatgagtaataaagagtttaagaacacttatggtcatttggctggagcgtggcgaggtaaaaaacctatacaaagaaacgcaattctagctttagcgcattttaacgaggaaagtgctataccagaactaaaagaagttgcacttaatgatcctagacctatgattagaggtacagcttattgggctataggtcaaattcaaggtgaagacgcaaaggcttttattaatgaaaattatgaaaaagaaatagaggaagttcaagtagaaatgaaaaaaggcttggacatgaggagagactga

SEQ ID NO: 114 - DNA, 471 bp, Staphylococcus capitis
atgacaaatcatattgtattatttcaaccagagatacctgctaatactggaaatatagctagaacatgtgctggtactttcacacatttacatcttattaaacccttaggttttagtacagatgataaaatgttaaaaagagctgggttagactactgggagcatgtaaatattacatatcatgaaagcattgaagaattttttgatagcactaaaggtaattattacttattaactaaatttggcaaacaaacttatagcgattttgatttttctaatacattagagaatcattattttatttttggaagagaaacaactgggcttcctgattgggtaaaagagaaatatgctgataccgctttaagaataccaatgagcgataaaattagatcattaaatttatctaatacggctgcactattaatttatgaagctttaagacaacaagaatttccaaatctttcataa

SEQ ID NO: 115 - DNA, 600 bp, Staphylococcus capitis
atggcaatgaactttaaagtatttgaaaatagtgaaagagtagcagaatatgctgcagatattattcgtaaacaatttaataataatccaactacaattgcaggttttcacttagaaaaagatcacgcacctgtattagatgaacttaagaaaaatgtagatacgcatgctgtagatttcagccaaatcaatattttagattatgatgataatagatcttattatgaagcattaggtgtacctgaaagccaagtgtattcaatttcttacgaacaagatgcaattgattttatttcagataaaatgaaaactaaagaaaataaaggtaaattaatccttcaagttctttcaattgatgaaagtggcaagttagatgtaagtgtacgtcaaggtcttatggaagctagagaaattttcttagttgttacaggtagtaataaacgtgaagttattgaaaaactttatcgtgaaaacggtaaatctagttatgagccagcagatcttaaagcacaccgcatggtaaatgttattttagataaagaagcggctgcaggattacctgaggatgttaaagaatacttcacagcacgttatgtttaa

SEQ ID NO: 116 - DNA, 180 bp, Staphylococcus capitis
atgaataaagaacatgaatctaaattgaattatcatgaagaagaaaatgctatggttacagatttagatgatttaaaagaattaggaaaagaaatggaacaaatttcagaagaaaatgatgaagataaattaaaccaatctcatgatgaagatgttcgttctgaccttaataatgaataa

SEQ ID NO: 117 - DNA, 399 bp, Staphylococcus capitis
atgttaggaaaatattggctgcatttgatgatagcaaccatcattattagtttaatttcaattaaagcgtttccgcttgctttaggagctctctatttacccttactatttaaaattgttcagcttcaattaaacctctcaaagggtttaatcgatgatgtgagtgctcaaacttttattaaaagtaatcaatccggcgttgtaatcagtgttatttgctgtttagccattacaggtattcttatctatacacttaatagcttttataatagcttaactggaattttaggatttttagtttcaattagtccattcactattgcgttaagtgtaattttatttattttaacagctatagcaattgtacaagctattaaaagtaaatataaaaatgcttaa

SEQ ID NO: 118 - DNA, 1386 bp, Staphylococcus capitis
atgtcagtcagaattgaacatgatacttttggagaaattgaagtacctggagataagttttggggtgctcaaactgaaagaagtaaacgtaatttcccagttggtaaggaacgcattccaattgaagtagtttatggattcgctcaattaaaaaggggtgcagcgttagctaacaatgagttaggaaaattaagtgatgagaaaaaagatgccatagtatatgcatgtgatcgcattcttaaaggggagctagacgaacattttccattagtagtttggcaaacaggaagcggcactcaaagtaatatgaacgtaaatgaagtagtaagctatgtagctaatgagtatcttaaagaacataatagtgatgaaatgattcatcctaacgatgatgtaaataaatcacaaagctctaatgatacattcccaacagcaatgcacgttgctttatatcatgaagttgaaacaaaattagaaccagcgcttaagaacctgcgtaatactttaaaagaaaaagaagatcaatatcaatcaattattaaaattggacgtacacatttacaagatgcaaccccaattaaattaggccaagaaattagtggttggcgatatatgttagataaatgtgaagaacttttaagtgaatctaagaaacatatccttagtttagctatcggtggcacagcagtgggaactggaataaatgctcatccagagtttggagctaaagtagctaaatttatttcagataacacagggtatgcctttgtttcatctgataataaattccatgctttaactgcacatgatgaagtagttcaattacatggtacattgaaagcattagcaggcgatttaatgaaaattgcaaacgatgtaagatggttagcttcaggtccaagagcaggtttagcagaaatttctattcctgaaaatgaacctggttcatctattatgcctggtaaagttaatccaacacaatgtgaaatgttaactatggtcgcagtacaagttatgggtaatgatactgcagttggttttgcaagttcacaaggtaactttgaattaaatgtattcaaaccagttattcttcataatactttacaatcaatttatctattagctgacggtatgcaaacatttaatgataattgtgcagtaggtattgagcctattgaagaaaatatcgacaattacttaaatcaatcattaatgttagttacagcattaaacccacatataggttacgaaaaagcggctcagattgctaaaaaggcgcataaagagggattaactcttaaagagtcagctataaatagcggatatgttactgaagaacaatttgaagaatggattaaaccagaagacatggttgaccctcactaa

SEQ ID NO: 119 - DNA, 831 bp, Staphylococcus capitis
atgaaatttacgatacctgaacaatacactgagaaatctttaagagagatatttcaaaatctcaatctccctaaaaaagacttacatcaacttaatatgtcaaaagatataacaatcaataatcaatctgctaaattaactgatgtagtgagaaccggtgattcggtgttcatacctacaccagaggaaaaaagtaattatttacctagttatcgttacgcacaggtttattatgaagatgatgactttgcgatagtgatgaagcctaaaggtgttaaaactcatccaaatgatttaaaagagagtaatacacttatgaatcatgtaatttacacagttgacagtgaatatgtcgaacctattcatcgtttagaccaagaaacagtgggtttacttattgttgctaagaatccaattatgaagaaaatcttagatcgaatgttagaagaaaatgaaattactcgtatttacaaagctaacgttaaagcattgttaccaatcaaacctcaaacaatagatatgcctattggtaaagacaaattccatcctaataagcgtagaatttcaaatacaggacaacgtgcaatcactcatattttaaattctgagatgattaaagaaggtatatgtcaacttgatattaaacttgatacaggtcgtacgcatcaaatacgagtacatttagcagaaatcggtcaccctgtaattggtgatccattatatggtgattcaacattgcgtaaattagaacttaatagtcataaaattgaattgattcatccactaacacgtgagttggtttcggtaagcttggatgataaaaaggcataa

SEQ ID NO: 120 - DNA, 1113 bp, Staphylococcus capitis
atggagaagccaacaagacttgcattactaaaagaaatagctgaatttcttaatgaagaaacagagatgtatagcatgatgcaaggaggactacgttatcttattaatggtagtaacttcacgactggatggatattttttatcaatgaggaggggaaccatgaactcgtttcctcagtagacctccctggtgcattatctaaaaaagattgtcattatatgactaacggatcatgttggtgtgtcaaagcatataataataaaaaattaactaaagcgtccaatattataaattgttcaagaattaatttagctaatcgtgcatatcaagaagaaacagatgatattacgcatcatgcaactgtgccactgcgttctggagaggaacaatttggactacttaacgttgcttcaccaaataaaaaacattatagcgagcaagatttagaattactagaatctgtagcatttcaaataggttcggcgataaaacgtatattattgacagatagagaaaaggaagcggctaagattaatgagcgcaaccgtttagctcgagatctgcatgattctgttaatcaaatgttattctcgttaaaacttactgctcatgctgcccaaggaatggcatcggatgatttttctaaaaatgcatttaaaactatagaagaaacgagtcaaaatgctgttaatgaaatgagagcattgatttggcaattaaagcctgtaggactagagcacggattaattcacgctttaaataactatagtgatgttttaaatctaaatttagacgtccatgttgatggcttaatcaatttaactaatcatgtagaagaaaatatttatcgtatgatacaagaggcgatgaataatgtcagaaagcatgccgatactaatgaagtctcattaaatctaacgcaaagacaggataatctcattattgaaattatagatttaggaaagggatttaacttgcatgaagtaaatgttaatgcttcaagtggtatcaataatcttaaacaacggacacatacattgaatggtaaattagatattcaatcacaattgaataaaggtactaccattacaataaatatacctttaaagtaa

SEQ ID NO: 121 - DNA, 624 bp, Staphylococcus capitis
atgcataaagtagtactagtagatgatcatcatatcgtacgccaaggattagagtttttactttcaacagttgatgatttagaagtagtcaagggtttttctgatggcaaaacatttctatcatatatagagcaacatcatctgcctgatattgtgttgctcgatttagtgatgccagaaatgaatggaattgaaattactgaagttttaaaaagacaatatcctcaagtcaaagttttagttttaacgagctatgtagatgatgaacatgtgatatcagctatagacaaaggtgctgatggttacgaaatgaaagacgtagaaccacaaaaattgattgaaacaattcataaagttttaaatggtgaacgtatcattcatcctgaagctaaaagtgtgattgaaacagtatctaaaaagcctcattttactaataaattatctaaaagagaagttgaagtattgagagagatggttaaaggcaagacaaataaagaaattgctcaaacattatttgtatctgaaaagactattaaaacacatgtaagtcacatatttaataaattacaagttacggatagaacacaagctgccatttatgctatggaaaataaattaatataa

SEQ ID NO: 122 - DNA, 465 bp, Staphylococcus capitis
atggatagacagagtttcacagatttaattcaaacaaaatttaaaatggtacgtattgaagcgggctatactcaagatacaatggctcaaacaatcggactttctaaaaaaacattagtacaaattgaaaaagaaagagtcttacctaactggacgacttgtgtctcaatttgcgcgttatttagagattcagatgtactcaatagcacatttggttgcgacccattagaaatcgttcaaactatttctagaaatcattgtgcttaccctaatcatgctactacaagtgatatttattggaatacaatcgaaacgcgtaatggatttattttacaaagtaataaagtaagtaacatttaccgagtattaaatgcagataagcaaccaatcttcggtacttctaaaatgagagaggctgaaacttactttaatagaaatgctaaagaagaattactacatgtataa

SEQ ID NO: 123 - DNA, 1131 bp, Staphylococcus capitis
atgcacgcttttttagtgattgcttttatgatgattataggggctataataggtggtataacaaatgttatagcgatacgtatgttatttcatccatttaaaccatattatatatttaaaatgagaattccattcactccaggtttaattccaaaaagacgtggagaaatagctgagaaaataggtcaagttatcgaagatcatttaattactgaagaaatgattcgtcataagttaaatcaaccacaatctcaagatgcgattcaagacttagttcttactcaaatacaaaagcttaaatctcaagatgcaacaattgaaaattttgctcaagcattagacattaatgtaactgatttattaaataataaggtgaaaacaactttgaatgacaaacttataaacttttatcaacaacataagcaagaggcattaacagcatgtttgccagagcaattgtttgttttagcagatgataaagtagaagaattagctgatttattatgtgaaagagctagaaaatatttgaattctgacaaaggttcacatgatatatatgaaatgttagataccttctttcaggaaaaaggaaaaattgtaggtcttctacaaatgttcatgactaaagaaagcatcgcagaacatattcaacacgaacttattcgattgactcaacatccgaaagcacgtgtaattattaataaaatcattcgcaatgaatatgagacacttaagaataagcatttagaagaattagttagtgatgagcaattcgaatctatttctaaatccacgacagatcttttaatctcatatattgatcttaatggtaaagctcgtttaccaatatatgaacttgcacctcagtttattcacttccttgaaaatgaagcagctactaaaattactcaagtcattgttcataatatttcacgacatcttaccaatataatgaaaaagattaatttgcgacaactagtagaagatcaaattaatacatttgacttagattacattgaaaagttaattatagaaattgctaataaagaattaaaattgattatgtcactaggatttttacttggaggaattattggtttcttccaaggtgtaattgcaatctttgtctaa

SEQ ID NO: 124 - DNA, 345 bp, Staphylococcus capitis
atggcagtaaatttatacgattatgcaaatcaattagaacaagctttaagagacagtgaagaatataaagctattaaagatgcatttgctaaagttaaagaaaacgaagaatcaaaaaaattattcgacgaattccgtgaaactcaaattagtttccaacaaaaacaaatgcaaggtgaagaaattcctgaagaggatttacaaaaagctcaagaacaagctcaagctatcgaaaaagatgaaaatatctctgaattaatgaatgctgagcaaaaaatgagccaagtattccaagaaattaaccaaatcatcgtaaaaccattagatgaaatttacgctgactaa

SEQ ID NO: 125 - DNA, 1197 bp, Staphylococcus capitis
atggttaaatttatacactgtgctgatttacacttagacagtcccttcaaatctaaaagtcatttaagccctaaaatatttgaagatgtacaaaaaagtgcctatgaaagttttaaaaatatagtagatttggcattaaaaaaagaagtagatttcattatcattgctggggatttattcgataatgagaatagaacattacgtgcggaagtctttttaaaagaacagtttgaaagattacgtaaagaacaagtatttgtatatgtatgtcatggtaatcatgatcctctatcttcaaagatatcttcaaattggccaaacaacgtttcagttttctcaaatcaagtagaaacgtatcaagcgattactaaagatggggaaacaatttttatacatggctttagttatcaaaatgatacaagttatgaaaataaaattgatgcttatccatcaagccaaggtcaaaaagggatacatattggtgttttacatggcacgtatagtaaatcctcagtcaaagaccgttatacagaatttaggttagaagacttaaatagtcgattataccactattgggcgttaggtcatatacatgaacgtgaacaactcagtgatatgccagtaattaactatcccggtaatattcaaggtagacattttaatgaattaggtgaaaaaggttgtttattaattgaaggagatcatcttaatttaacaacacaattttatcctactcaatttattaaatttgaggaagcaaccattgatactaatcatacgtctaaacaagagctatacgaagatatacagtcattcaaagataaagtaagacctgaaggtaaagctttctatagattaaatgtacgcgtaaatagtgaagattttattgcaccacaagacttggttcaagttaaagagatgattacagagtatgaagaaaatgaaaatcagtttgtgtttatagaagatttaaatattaaatatgttcaaaatgatgaatcacctcttgtaaatgagttctcctcagatttgttggaagacacatcggtctttgattctgctatgacggaattatacttaaatcctcgtgcatctaaattcttagatgattatacagaatttgataaaaccgaattaattaatcatgctgaaagtcttttaaaagatgatatgagaggtgaacaaaatgataattaa

SEQ ID NO: 126 - DNA, 2940 bp, Staphylococcus capitis
atgataattaaatcactagaaatttatggatacggtcaatttgttcaacgtaagatagactttaataaaggttttactgaaatttttggtgaaaatgaagcaggaaaatcaacgattcaagcatttatacattcaattttattcggttttcctactaaaaaatctagagaacctcgtttggaacctaggttaggaaatcaatatggtggtaaattagctttaatatttgacgatggtactgaagctgaagttgagagaattaaaggtagcgctcaaggtgatgtcaaagtttacctctcagatggttctacacgcgacgagtcatggctaaataagaaactcaattacattacaaagaaaacgtatcaaggtatattctctttcaacgttttagggttacaagatattcaccggaatttagatgaaaaacaattacaagattacttattacaagcaggtgctttaggttcaactgaatttaccagcatgagagataccataggacaaaagaaagaagaattgtataaaaagtctggtaaaaatccaattattaaccaacaaatcgaacaacttaagcaccttgaaagccagatacgtgaagaagaaagtaaattagacacatatcatcgcttagtagatgagagagataaatcttctcgcagattagaacatttaaaacaaaatttaaatcagttatccaagatgcatgaagctaaacaaaaagaggttgcactgcatgatcaaacgcaagaatggaaaggattagaacaagttctaaatatcgaacctctaaaatttcctgaaaaaggtatagaccgttatgagactgctaagtcgtttcaacaatcgcttgaaaaggatattggtcttaaagaagaacgtttagctcaacttaagcaagaagctaaaaatatctttccagtagaaactaaagatatagatgcaattaattccttatatcaacaagaaaatgaaattaaacaaaaagaatatgagttgcgttcagttgaaaaagatatctctgataaacaaagagaacaagaaagtttacaaaacactattgggtggaatgaaccacatcatgaagtagatagttctgaagctatgaaaagtcatgtaagtgagcaaattcgtggtaagcaagaacaaaatgcttatattttacaactagaacgcggtcttgaagataataaaattgaacgtaattctaatagtaatgaacttgatcaactagagaaagaattagttcctgaggaaacttttgaaaagaaaaaggaatattcacagcaggtattagaattacacgaaaaagaaaacttatatgaaaaattaaaagaatcatttgaagaagaacaaattcgtaaaaatcaacgtcaaaaattacttagacttgcatttattgctttagctatcataggtgcggcattaactgtattttcatttgtaacgactaacatgatttttggtattgtctttgcgattctaaccgtcatctttatcgtaggtatcttcttagcaaaaactaaagatgttgattatggtgtagcaatgaaccaagaaattaatgacttggaaagtcaacttgaacatttagaaagcaactacaatttagattttgatttagatcatcaacatcgcattcgtgagcaatggcaaaatgctattaaagcaaaagaaatgttagatgaaaagaatgcatatttaaataaatcaatggatgaggcgcaaaatcgtttagattcattatcagataatattaacaacgtgaagaaagaattatatttatctcctaagatatctgatgaacttatcgttgaaagtattacctcaatgagtaatattaagtctcatgataactacgtcaaagagttgaatcataagcgtagtcaacttatggatgaaattaatcaattttataaacacgctaaagacgtaacgagtccacattttagtcattttaatacaatgtcgttcttccacgatgttaatcaatggctaaaaaatgctaaagacaacaacgataattggcataagaatcaaaaagaaacacagttattaacaaatgagctcaagcatcttaaatcacgcttaagtgaaaataaaaatatcatcaaagagctatttgatttcgtcaatgttgaagatgaggaaagttattattcacatcatcaagattacgaaacgtatcatagtaacttaaatagatttaatgatttaactcaatacttagagaaccaaaattactcatatgaaatgagttctaaattaagtgaaaaaacaaccgctcaattagacgaagaagatgatacattagcgagacaagtagatcaatataacgatcaatatttaaatatgcaagctgaagtcagtgatttaactgctcaaattaatcatatggaaacagattcgacacttgcacaattaagacataaatattacagtttaaaaaatagactaaatgatatcgctaaagattgggcaagcttaagttatcttcaaaatttagtagaagaacatattaagcaaatcaaagataagcgtttaccacaagttatccaagaagctgtatctatattcaagtatcttacaaatggtgcatatacaatgattaattatactgaagatgattcaattcatgtcaaacatgataatggacaagttttcgaacctgttgaactaagtcaatctacaaaagaattattgtatgttgctcttagaattagtttaattaaagtattaaaaccatactatccattcccaattattgtggatgacgcatttgttcattttgacaaacatagaaaagaaagaatgttaaattatttaagagaattatctcaaaattatcaagtgctttactttacatgcactaaagataatattatcccttcaaaagaaatgattattcttaataaactagaggaaggcgggaaaaaatga

SEQ ID NO: 127 - DNA, 942 bp, Staphylococcus capitis
atgagaaatgtagaaaatttaaatcccggcgattcagttgatcactttttcttaattcatcgtgcgactcagggtgtcactgctcaaggtaaagattacatgacactttacctccaagataaaagtggtgatatagaagcgaaattatggactgccacgaaagaggatatgcagaaccttaaacctgaagaaattgttcatgttaaaggcgatgtgattaattatcgtggtcgtaaacagatgaaagttaatcaagtgcgtttagctaaacctgaagacaatttatcaactaaagattttgttgatggagcacctatgacgcctgatgaaattaaagaagcgctttcgcattttatgttagatattgaaaacgcaaatttacaacgtataacgcgtcatttaataaagaaatatcaagaccgtttctttacgtatccagcagcaagttcacatcatcataattttgcaagcggtctaagctatcacgttttaactatgttacgtattgctaagtcaatctgtgatatttatccgctattaaatagaagcttattatatagtgcgattattttacatgacttaggaaaggtcagagagttaagtggaccagttgcaacgacttatactgtcgaaggtaatttgctaggccatatttctattgctagtgatgaagtagctgaatcggctaaagaattaggtattgaaggtgaagaagtgatgttattaagacatatgatcttagcacaccacggtaaaatggaattcgggtcacctaaactacctcatttgaaagaagctgaaattttattctttattgataatattgatgcaaaaatgaacatgtttgagaaagcatttaagaaaacggataaaggtcaatttactgaacgcatttttggtttagaaaatcgccaattctatactcctacaagtttagattaa

SEQ ID NO: 128 - DNA, 1002 bp, Staphylococcus capitis
atgaaattgatgaataaaattattgttcccgtgaccgctagcgcgctgttacttggtgcttgtggctcaaatgcaacagaatctaaagataatacattgatttcttctaaagcaggagatgtaaaagtcgctgacgtgatgaagaaaatcggaaatgaacaaattgctaatacttcatttaacattgttttaaataaaatcttagctgataaatacaaagataaagtcgatactaaagacgttgatgaagatattaagaaagaagaaaaacaatatggcggtaaagatcaatttgaaagcatgcttaaacagcaaggtatgtcattagatgattataaagaacagaaaaaactttctgcttatcaaaaccaattattactagataaagtgaaagtctctgataaagatattaaagataattctaaaaaagcttctcatattttaataaaagtaaaatctaaatctagtgataaagaaggtctttcagataaaaaagcaaaagaaaaagctgaaaaaatccaaaaagaagtagaaaaaaatcctagtaaatttggtgaaatcgctaaaaaagaatctatggatagttcttcagctaagaaagatggttcattaggttatgtaattaaaggtcaaatggtagatagcttcgaaaaagcgctatttaaattaaaagaaggtcaagtttctaaagtagttaaaactgattatggttatcatatcattaaagctgataaagaaaatgactttaataaagaaaaatctaaccttaaagaaaaaattattgaacaaaaagtacagaaaaaacctaaattgttaacagatgcttataaagatttattagatgattataaagttgattacaaagatagagatattaaaaaagctgttgaaaattcaattttagatccagataaaattaaacaacaacagcagcaacagcaatcttcacaaggtggtgcctctggttcaggctctgcaggtttaacaagtagtgggtcataa

SEQ ID NO: 129 - DNA, 570 bp, Staphylococcus capitis
atgtatttatgcactcgacaaattgatatacacgcaagatttggaattcaaagaattgctttcatgagtatagtagcaactattattacctttttagtaagctatgaaattatgtactatttctctgatactcctttatcagatcgacattttatcattttattaatctttataattttaatgtatcccattcataaaatcatgcatcttgttttctttttgccattctataaatcttttagactccataaattagttataaagaaatggctgccatattttaatacgtatgttaatacgcctgtccataaagtatatttttgtataaatttaattttacctatattattattaactggcatttttgttctgttaagtattcatctacctcaatatggtcattattttatgtttttattatcattaaatattggcttttctatgatggatattttatatttgaaaatcttacttttctcaaatgatggtcactatgtagaagaacatcaatctggtctacatattttaaacaaagtgaataatcctaaatcaactagaacatcgctctag

SEQ ID NO: 130 - DNA, 372 bp, Staphylococcus capitis
atgaaagtcacaagaatattatttggcttaggtgtaggtgctgcagcaggatttgcagtagcattaagaaatcgtgacgaccaaagtgtcaaacataatacaattgatgcgagccaacctacaggagcacaatctgaacttgaacgagaaattgaaactatgaaacaaacatttaatgatattcttaattatggttctcaaattaagaatgaaagtgttgaatatggtagttcaattggagatgagtttaaagagttaattggtaactttaaatctgatattaaccctaatatcgaaaagctccaaactcatattgaaaatttacaaaaccgtggagaagatataagtaacgcattctctaaagataagtaa

SEQ ID NO: 131 - DNA, 426 bp, Staphylococcus capitis
atgtcagaaactattttcagtaaaattatttctggagaaattccaagctttaaaatttatgaaaatgactacgtttatgcttttctagatatttcacaagtgacaaaaggtcacacattattagttcctaaaaaagtttctactaatatttttgagactgatgaagaaacaatgaaacatattggagtggctttacctaaggtagccaatgctattaaagccgcttttaacccagatggattaaatatcattcaaaataatggagagtttgcagatcagtctgtatttcatcttcacttccatcttatcccaagatatgaaaatgatatcgatggctttggatataagtgggaaacgcatgaagatacaattaatgacgacgctaaaaaagaaattgctgaacaaattcaagcacaatttgattaa

SEQ ID NO: 132 - DNA, 741 bp, Staphylococcus capitis
atgacagtaaaagttgaacatcttacaggcggatatggaaaacgtcctgtaatcaaagatataaattttgaattaaaaaaaggcgaaattgttggtttaattggtcttaacggtgcaggaaaaagtacaacaattaaacacatgttaggacttcttaatccaatggaaggttcattatccatttctgatacaaatattaatgatgacattgaagtatatagaagaaaattatcatatattccagaagcaccagtgatttatgaagaacttacattagaagagcatatagagatgactgctatggcctatcaactaagtagggaagaggcaatgcgtcgtgctgagccacttttaaaagtatttcgtttagaaaatgaattaaaagtctttccaagtcatttctcaaaaggaatgaaacaaaaggtcatgatcatttgcgctttcatcgttgatccagaattgtatatcatcgatgagccattcttaggtctcgatcctttaggaatacaatcaatgcttgatttaatggttgaaaagaaaaacgaaaatcgaactgtcttaatgagtacacatatacttgctacagcggaacgttactgtgatagatttattattttagatcaagggaaagttgttgcgtttggtaacttagatgaactacgtgaacaaacaggtctgtatgatagaaccttagatgatatttatatacatgttacacaaggtggcaatgccaatgaataa

SEQ ID NO: 133 - DNA, 1224 bp, Staphylococcus capitis
atgaataatcaatcattatctctgtttaatcggagatataaagcgattcgtaaagaaaaaagttactataacaaattcatttttaatggtcatttcacggtgtttttacttatattgttaggtgcatttatttttggatatggtgaatggctacaacatataccacaacatattgattatgcactatttgcaagtattgctgtagcattagtttcattatttccaattcgaacacttttaaaagacgcagataaaatttttctattaccatttgaaaaacatatgaaagattatatgcaagtaagtttaatatatagttatagttcaagaatttttttacaagtcatacttcttattatactatttcctttattttatagattaaatgataaccattttgcattttatattgtatttgctataagtgctatcatttttccttatttaggattacttgttaaatggcagtggttaaagctaaatctttcaagttggacaattaatttattattatttgtactatttggtataacattttatttaattttaagatttcataattactttgctattatatttattttcatcgtaggggtattgttattgattttaaaattgaatagcaaaaagcaattatttccttgggagagaatgatagcgattgagcaacaaaaacatacgaattattataaatttgtaaatatgtttactgatgtgaaacatttaagagagtcagcagtacgtagaagttatttagatttcatattacccactccaaaaggtaacaagtttaatgaaaatcgtatgtacttattcttatttgtaagaagctttgtaagaggacgagacgcgttcagtatcattcttcgattagtgattatagcactcgttttaatgttatggttatcaaatccaatcgtatctctaattataggaagcttatttatgtatattacattattacaaatggctcagttctatactcaacaagcatatggtttatggccacaagtatggccagtccctgatacgaaagttatcaaaggatatgaacaatttttataccgattaatgatcggtgtaggtattatctttacaatagtatttgttataaaacatcctacattgttcttctttgctttacttttctatattgtagggtggttaacaataagaagtaccattaaaaagttaaaatatcaggaaactttattaagagactaa

SEQ ID NO: 134 - DNA, 504 bp, Staphylococcus capitis
atgaatttatatacatcttatgggacatatggattcttaaatcaaattaaattgaataatccagatcatgacctatttcagttttctgcttccgatacatcagtcattttagaagaaactgaagataagtcagttttaaaacatcctagttcttacaatgtactctaccaagttggagaatttaacgaaaatcatttctactgtgctttgttcattccctcttcagaggatcatagtaatcaactagagaaaaaattattgcacttaggcgcaccttttgattcattcgctggattcaaaagttatcgattattaaaacctttagaaggtaatacttataaaatatactttggcttcgcaaatcgcactgcctatgaagacttcaaggcttcagaattatttaatgataatttttctaaagtagctttaagtcaattctttggagcaagtggtcaacattcaagttattttgaaagatacttgtatccaattgatgaaaactaa

SEQ ID NO: 135 - DNA, 1035 bp, Staphylococcus capitis
gtgcatagtaaaaacgatacgatattaaagacaataaaaggtgaatcaacgtcacacactccagtttggtttatgagacaagcaggacgttctcaacctgagtatcgcaaacttaaagaaaaatattcactttttgaaattacgcatcaaccagaattatgtgcgtatgttacgcatttacctgtagataattacaatactgatgcggctgttctttataaggatattatgacacctttaaaacccataggtgtagatgtagaaattaaatctggtattggaccagtgatttcaaaccctattaagtcagtacaagatgttgaaaaattatctcagatagatcctaaaagagatgtaccttatgttttagaaacaatcaaattgcttacagaggaaaaattgaatgtaccgttgattggttttacaggtgcgccgttcacattagcctcttatatgattgaagggggtccttctaaaaattataattttactaaagccatgatgtatggagacgaacctacatggtttgcactaatggaccatcttgtagatgtgtcaatcacatatgtagtcgctcaaattgaggctggtgctgaattaatacaaatctttgattcttgggtaggagcactaaacgtccaagactataattattatatcaagccagctatgaagaaattagtgagtggtatcaaagctcattatgatgtacctgtgatacttttcggggtaggcgcaagtcatttaattaatgaatggaatgatttacctattgatgttttaggtctagattggagaacatctattaatcaggctgatcaaatgggagtaaacaagacactacaaggtaatctcgacccttcattattattagcaccatgggatgttatcgaatcacgactaaaagatattcttgatcaaggaatggtgcgtggcaagcatatatttaacttaggtcacggtgtatttccggaagttcaacctgagacattaagaaaagtgagtaaattcgttcacaactatactcaaaaatag

SEQ ID NO: 136 - DNA, 924 bp, Staphylococcus capitis
atgagtaaaacaattggattattagtgatggcgtacggtacaccatacaaagagagtgatatcgagccttattatactgatattagacacggtaaaagaccaactgaagaagaactacaagatttaaaacaacgctatgaatttatcggagggttatcacctttagcaggaacaacagatcgacaagctgaggcattaactaaagctttaaatgaaacgtatgacaatgttgaatttaaattatatttaggattaaaacatatctctccttatattgaagaagccgtagaaaaaatgcataaagatggcattgatgaagctgtaacagttgtgctcgcgccacattattcaagtttttcagtaggttcttatgataaccgcgcacaagaagaagcagataaatatggcattaaattgactcatattaaacattattatcaccaaccaaaatttattaaatattggacagataaaattaatgaaacgttaaatcaaattcctgaagaagagcacgatgaaacagttttaatcgtttcagcacatagtttacctaaaggtctgattgaacgtaataatgatccatatcccaaagaattacatgaaacagctcaaattcttaaacaagactccaatattgttcatgtagcagaaggttggcaatctgaaggaaatactggtacaccttggttaggacctgatgttcaagatcttacgcgagaattatatcaagaacatcatttcaaaaactttatttatacaccagtaggatttgtttgtgagcatttagaagtgctctatgacaatgactacgaatgtaaagtagtatgtgatgaaattggcgctaaatactatcgtcctgaaatgcctaatacaaacccgctatttataggagcaattgttgacgaaattaaagctcatttttaa

SEQ ID NO: 137 - DNA, 1416 bp, Staphylococcus capitis
ttgaaaggaagcgtgaaaaagttgagtaaaaaaattgcgattatcggcgcaggtattactggtttatcgagtgcgtattttataaaaaaacaagatccaactatagaagtaacgatatttgaagcctctaatcgtcctggaggtaaaattcaaacatatcgacatgaagggtatactattgagttaggtccagaatcctatctaggacgtaaaactatcatgacagatatggctaaagatattggtctagaaaatgacttaattactaatactacgggtcaatcgtatatatacgctaaaaataaattatttcctataccaggtggctctattatgggcattccaacagatataaagccatttattaaaacgaagcttatttctccaattggtaaattaagagctggaatggacttgtttaagaaaccgattcaaatcgaggatgatatttctgtcggcgactttttcagaaaaagactaggagatgaagtattagaaaatctcattgaacctttaatgggtggcatatatggtactaatatagatgaattaagtttaatgagtacatttccaaactttaaagaaaaagaagaacaatttggcagtttgattaaaggaatgaaagatgagaaagaacaacgtattaaacatcgccaactatacccaggggcacctaaaggacaatttaaacagtttagacatggtttaagttcatttatagaagcattggcagaaaatgttcagaataagggagtaaatattcgttataatactcaagtacgtgacattaaagtttctcagaaagattatgaaattttactcgaagatagtagtgaaacatttgatggggtacttgttactacaccacaacaagtatttatgaaatggtttagccatgatcctgcctttgattactttaataagatggactcgactactgttgcaacagtggttatggcttttgatgaaaagaatatagagaatacgtatgatggtactggattcgttatagctagaacgagtcaaacagatattacagcttgtacttggacttcgaaaaaatggccgtttactacacctgaaggtaaagtattaattagagcttatgtaggtaaaccaggcgacactgtagtagatgaccatactgatgatgaaattgtatcaattgttcgtaaagatttaaggaaaatgatgacattcaagggtgatcctgactttacgatagtgaatcgtttgcctaaaagtatgcctcaatatcacgtagggcatataaaaaatatcaagataattcaacaacatataaagaatacttatcctagattaagaattactggagcaccttttgaagcggtaggtttacctgattgtattcaacaaggaaaaaatgctgttgaagaaattttagaagaaatttag

SEQ ID NO: 138 - DNA, 555 bp, Staphylococcus capitis
atgactgacgtgattataatccattcaaaatatgggaatgccacaaatcattggtatgagtggttaaagcataatttaactttagaaggttatcatgtgacgttgtttaatttagaggcagatgaccatgcaaaaattgatgaatgggtaagacaaatgaaagaacaaattgaaattcgtaaatatgatacttattttgtaacccatggttttggtacgatagctgcactaaaatatattgaggggactcatcatcatattgaaggattgtttagtattgcaggtttcaaagaagatgcccatgatattgatgagaatgtcaacttagagggcatatcaatagattatgaaaaagttaaatctcaagtcgatcatttttacggacttacatctaaagatgataaatatgtttcttataaagagactaaaaggttgatggatacgttggaaggtaagattcgaatagtcgatgaaggtggacactttttagaggatgaaggttttaaaacatttacttctttacaatctagaatgcaaggttacatgactaagtaa

SEQ ID NO: 139 - DNA, 1404 bp, Staphylococcus capitis
gtgggttattggttaaaagaacaatcacaattaaataaagataaaattgcagtggccactgatgaacaatcgttaacgtttagtgagctgtatgagaaggcttatgatttggcacgctacattcagtcacttcataagaaaagagtaggtttatttattaaaaatgatttagattcggtcattcttatacatgcttgttggattgctcaaatcgaaatagcgatgctcaacacgcgtttaactgagcaagaaatgagaaatcagatgaaatcagttcgtgttgataccatattacatacgatgcctctaacaatggaggattttaaattatacaacattgaaggtcttagaaattttgcacctcaacaactccaatctaagcaattcaatttagaagatattgcatctattatgttcacttctggaacgacaggcccacagaaagctgtgccacaaacgttccataatcatttagcaagtgccacaggttgtaaacaaagtttaggatttgatcaacatacaaagtggctatcagttttacctatttatcatatttctggtctgagcgttattttaagatcagtcattgagggattcacggttcgcttagttggtaaatttaatactgataagatgcttaatattattaaagatgaaaacatgacgcatgtctcacttgttcctcaaacattaaaatggttgatggatggtggtcttacacaaccattctcaatagaaaaaattttacttggaggagcaaaactttcttctaatctgatagagcaagcacttgccaatcagttaccaatttataactctttcggtatgacagaaacatgttcgcaatttctaacagcttcacctgaaatgttagctcaaaaacatgatacagttggtaaaccgagtgataatgtaaaagtaaaaattaagaatcctaatcaagatggtcatggtgaacttcttatcaaaggtgaaaatgtgatgaatggttacttgtatcctgagaatttgactaatacatttgaagacgactttttcaaaactggagatattgctgagatagatgaagaaggtttcgtaatggtttatgatcgtcgtaaagatttaattataagtgggggagagaacatttatccataccaaatagaaacagttgctaaacaatttaatgaaatttctgatgcagtatgtgtaggtgttgctgatgatacttggggacaaattcctgtgctttattttgtttctgaaaatgaagtcaatagagaagaattgttaaaccattttcaacagaatttagcaaaatataaagtgcctaaagccttctatcaagtagagaatttaccgtatacctctacaggaaaactacaacgtagcaaagtatcatataaaggaaaccaattatga

SEQ ID NO: 140 - DNA, 1002 bp, Staphylococcus capitis
atgattattaaagctattcaattatacacgtataaacaacctttcaaatctcccattattacacctaaagttaaactttatgaacgtgaaagtttaattgttgaaatagtaacccaagatagtcaatctttttatggtgagtgtaatgcgtttacgacgaattggtatgatgatgaaacgatagatatagcagtccatacgctcaatgagtggatacctcagcttattgacaaagaatttaattcatttagagagtggtctgtttatttagagcaacttgaggagaccccagcgactcgttcagctatcgttatggcagtttatcaaatgtatcatgagttatcatctttctcagtaacctatggtgcgacaataagtggtttaacaaatgaaaagttacataagctttatgaaacacagccacgtcgtgttaaacttaagtggtcttcacaacttgttgaagatatcaatgctatacatcaaaatgatattcattgtgatttagcacttgatgcgaatgaatcgctgaatgttgaatcattttcaaagattagtgaggttaatcaagcgaatatcatatatattgaagaaccgtttaaatcattagagaatttaaatgcaatgaatgtgagcgaatatccacctatagctatcgatgagaaggcgacttctatcaaagatattgtttcaattattgaaaaatttcctattcaattagttgttttaaagccgtatagattaggtggtattgataaagttttagaggcaatagatattttaaaagaaaaaaatattaaatttgtagtcggtggcatgtatgaatttggattaagtagatattttacagcaatgttagctaaagagggagattatccaggtgatgttacaccttccggatattactttgaagaagatttagtgagagattcaggcattttaaaagagggaatgattcattttattccccctaaagtacaaaaaactaaactaacaaaactttaa

SEQ ID NO: 141 - DNA, 252 bp, Staphylococcus capitis
atgataaaaaagatttttctagcgctagttgtattttatcaacgttttatatcaccgttgacaccacctacttgtcgattttatccaacatgttcggaatatacgagagaagcaatccaatatcatggtgcatttaaagggctttatttaggtatacgccgcattttgaaatgtcatccatttcataaaggcggtttcgatccagtaccattaaaaaaagataaacaatcgacatcagaacataaacattaa

SEQ ID NO: 142 - DNA, 474 bp, Staphylococcus capitis
gtggagtttcgtgataaagacaatcgaacagtcactttaaattttaaaacgaataaggatacgcctaatggtaatcacgtactcacgattccaatatataatcatcaactcttatttactcgacacaaagtccgtggaattgaattccctgggggtaaagttgagtgcggtgaaacaccattagatgcggttttaagggaattatatgaagagacaggcgcaattgccgagaaatgtatttattttgcgcaatataaagttaacacaaatgatcatagtacatttcttaaagatgtatttttcattgaagtaagtcatttcattgaaacttcaacttattatgagacaaatggtccatgtctatttgaaaatgtttccaacatacctaaggataagcaaagttttttaatacaagatgcgacgatattgaaatgtttagaaagggtgagagcgcttggattttacaaaaattaa

SEQ ID NO: 143 - DNA, 786 bp, Staphylococcus capitis
ttggattttacaaaaattaagaaaatgccaatagacgctcatacgcatcattttgatgaagtaacctataaagtagatggattaaatgtcaaagctttaatgatgacaccagtagaacaaaatgtaattcaacgtatagttatatatcttcgcggtggaaaaggacaagtaggtcgtgtaagagctgcaagattaatgcagtttgcaaatgaacatacgctagttatagggccatattatagaggtaataatggtagtgaaggtaaagatgaattttatcgaggagatttgaatgatgtaatacaattaattcgacttttacatgataagtatccctcagcatatattcatatgataggattctcacgtggtggactacaaggtttattaacctttcaagacttacctgtaaatagcttcatcatatggggaggcgtctcagatattcatttaatgtatgaggaacgtgttgatttaagagggatgttaagacgaatggtgggccatcctaaaaaagataaagacgcttatgaacaaagaaacgcgatgaaaaccattgattctaccagccctcctatattaattgttcatggaggtaaagataagcaagttggcattcaccaagcttatgatttagaagaaaagttgacagctaagagggtgtactacgaaacgttttatcaactagatgaaggtcatgtgccacgacctccagcaatgaaagaaacattatctaaaattcaacaatggatgaccaatattgaagaaactaaaaataatttgtga

SEQ ID NO: 144 - DNA, 1593 bp, Staphylococcus capitis
atgtcagtagacacatacacagaaacaataaaaataaaaaatttactagagaaaccatcaacacagtttcaactctcaacaactcagctatacaataaaattttagataataacgaagggaaattaactgaattaggtgcagtgaatgcaagtactgggaaatatacggggcgctcacctaaagataaatttatcgtaactgaaccttcttacagagataatgtcgattggggagacattaaccaacctattgatgaggaaacttttttaaaactttataataaagttctagattatttaggtaaaaaagatgaattatacgtatttaatggttatgcaggaagcgacaaagattcacgtttaaaattaactgtgattaatgaattggcttggcataatttattcgcgcataatatgtttattcgtccagaatctaaagatgaagctaaaaatatcaaacctaatttcacaattgtatcagcacctcactttaaagctgatccagaagtagatggcactaaatcagaaacatttgtcatcatttctttcaagcacaaagtcattttaattggtggcactgaatatgccggagaaatgaaaaaaggtattttctcagtaatgaattaccttttaccaatgcaagatatcatgagcatgcattgttcagctaatgtaggtgaaaaaggtgatgtcgctttattctttggactatcaggcactggtaaaacaaccctttcagctgatccagaacgaaaacttattggggatgatgaacatggctggaacaaaaatggtgtatttaacattgaaggtggatgctatgccaaagcaatcaacctttctaaagaaaaagaacctcaaatttatgatgcaattaaatacggcactatattagagaacacagtcgtaaaagaggatggtacagtagacttcgatgacaataagttcactgaaaatactcgtgctgcttaccctatcgaacatattgataatatcgtgttaccctcaaaagcagctcatcctaatacaatcattttcttaactgctgatgcctttggtgtgatccctcctatttccaaactaaccaaagatcaagcaatgtatcatttcttaagtggattcacttctaagttagccggtacagaacgtggagtaactgagcctgaaccatcgttctcaacatgttttggagcaccattcttaccattaaatccaactgtttacgctgatttattaggtgaattaatcgataaacatgatgttgacgtttatttagttaatacaggatggactggtggaaaatatggtgtaggacgccgaatcagcttacactatacgcgtcagatggtaaaccaagctatttcaggaaagttaaaagatgctgaatataaaaaagatgaaacatttggtttaaatatcccagttgaaattaaagatgtgccaaaaactattttagacccagtgaacgcttggagtgatgcaaataaatatcatgaacaagctcaagacttaattaatcaatttgaggaaaactttaaaaagtttggttcagaagtagaacatattgctgaaaaaggtgcattcaataaataa

SEQ ID NO: 145 - DNA, 1194 bp, Staphylococcus capitis
atgacttataataaacgattatttacttcagaatcagtaactgaaggtcatcccgataaaattgcagatcaggtatcagatgcaattctagacgaaattttaaaagacgacccaaatgcgcgtgtcgcttgtgagacaacagtaacgactggtatggcgcttatttctggtgaaatttcaacatcaacatatgttgatatacctaaagtagtgcgtgaaacaattaaaaatattggttatacaagagctaaatatggttatgatttccaaactatggcagttttaaccgctattgatgaacaatctccagacatcgcacaaggtgttgataaagcgctagaataccgtaatgaaatttcagaagaagaaatagaagcgactggtgcaggagatcaagggttaatgtttgggtatgccactaatgaaacagatacgtatatgccattaccaattttcttatcacatcaacttgctaaacgtttatctgatgtgcgtaaagatgaaattttagattacttacgtcctgatggaaaagtacaagtaacagttgaatatgatgagaacgatcaacctaaacgtatagatacaattgttgtatctactcaacatgctgaagatgttgaattggaacaaattgaagcagatattaaaaaacatgtcatttaccctacagtatctgatgatttattagatgctgatactaaattctttattaaccctacaggtcgttttgttatcggaggaccacaaggggatgcaggattaactgggcgtaaaatcattgttgatacttacggcggttatgcacgtcatggtggcggttgcttcagtggtaaagacccaactaaagttgaccgctcagctgcttatgctgcacgttatgttgctaaaaatatagtagctgcggagttagctgatcaatgtgaagtgcaattagcctatgccattggtgtggctgagccagtatctatttcaatcgatacatttggtactggtaaagtttcagaagctaaactagttgaagcggttagaaataattttgacttaagaccagctggaatcatcaaaatgttagatttaaaacatcctatttacaaacaaactgctgcatacggtcattttggccgtactgatgttttacttccttgggaaaaattagacaaagttaatttacttaaagatgcggtcgaatga

SEQ ID NO: 146 - DNA, 909 bp, Staphylococcus capitis
atgagtttatcttcaccgatagttataggcttaatcgttgcaattattgtggcaattcttttctttattctctttttagtagcgaatcacagtaaaaagaaaattaaaaaccaaacagaagcccaatataaagaaaaagagcaacatatgaaagaatctcatgaagaagccttagaaaaagaaagagttgaaaataaaaaggctgtcacaaaacaaaaagaagattttgatgcgacagtaagcagtaaagatagagaaattgatgcattaaaactattttctaaaaatcatagtgaatatgtaacagatatgagattgattggtattcgtgaacgtcttgttaatgagaagagaattcgtcctgaagatatgcacattatggcaaatatcttcctaccaagtaatgaatttaataatatcgaacgcatcagtcatcttgttttaactagaactggtttatatatcattgattctcaacttttaaaaggtcatgtgtataatggtattagtggtgctcagttcaaagagttaccaacaatgtctcaagtattccaaacacttgatttagatgaatctacacctcaaacattagtattagatcaaaatgaagatcaacaatctttatcatttgttaattattctgagaagattaaacatattcaaaatcttgcaggtgatttacaaagtgaattaaacactaaatatacaccaacttcaattttgtattttaatcctaaaaatgatggagatgttacaatttctaattataatcaggcttctaatgttaaggttctagttgggcctgaacaactcgatgaattctttaataaatttgtattccatggacgtattcaatataacgtggacgagttacaaactattatggataaaatagagtcttttaattaa

SEQ ID NO: 147 - DNA, 843 bp, Staphylococcus capitis
atgatggaaacagttcaattttataatggtagagagatgcctaaagtaggtttggggacttatagagttgagaatggtgatcaatgtaaagatgctgtgaaacatgctattgaaaatggttatagaagtattgatacagccaaaatatatggtaatgaagaaatggttggtcaagggataaaagaagggctagcttctacaggtttaaaacgtgacgatttatttataacttctaaattatggttagaagattatggtcgtaataatgttgcacaagcttatgaaacaaccattcataaattaggtttagattacttggatttatatttaatgcattggcctggaacaaatgaagcagtcatgattgatacatggcagggaatggaagatttatacaaagataataaagttaaaaacatcggtgtaagtaattttactcctgaaaattttgaagctttactcgctcaggtatctataaaacctgttatcaatcaagttgaatttcatccatatttaattcaaaaagacttacgtaaatatttagaagcacaaagcatcgttatggaatcttggtctccgttaatgaatgctaaaattttagaagatgaaactatcaacgaagtcgcaaatgagataggtaaatcacctgcacaagtgattataagatggaatgttcaacatggggtagttgttattcctaagtcagtgacgccgcatcgtatagaagaaaatttaaatgtatttgattttgaactttctgatgctcagatggagaaaattgatagtttaaataaagatgaaagaatgggaccgcatcctgccgagtataacgggcataaataa

SEQ ID NO: 148 - DNA, 357 bp, Staphylococcus capitis
atgaagttagctatccttcttgttatgttaggtggaggtttaggcgctgtaattagagcgtttataacaaatatatgtaatgaaaaattcaattctgctattcctatagcaacttcaatagttaatattttaggtagttttctaggcgggataacattgggttcttcaatttcaaatgactggatatcaccattttttataacaggagttctaggcggattaactactttctctacacttacaaatgaattagttcatttcatgacacccaattttaaactaggtcattttataggatattcactactgcaatttttaattggatttatagcttgttatataggatttcatctttaa

SEQ ID NO: 149 - DNA, 363 bp, Staphylococcus capitis
atgcagtacatatatatatttattggtggcgctttgggtgcattactacgttacgctttttcaacgcttaatgatagttcgggattccccttaggcacctttatagtcaatcttttaggtgcttttttaatgggactaattggcactttgacaattaccctatttaaaaagtatcctctagttaaaaaagcaataacaacagggtttataggcgccttgacgactttctccacttttcaattcgaactcgtccaattatttgatcatcacaattttatgatgcttatcatatatggactgacaagttacatcctaggtatcattttctgttacttaggagttaaaataggaggtcaattatga

SEQ ID NO: 150 - DNA, 309 bp, Staphylococcus capitis
atggcacgttctaagaaatacttttacttaagtatacttatgattattgttagttttttctttaatactaacaattctttattgagtcatattttaggctcatttatgaaattaatggttgctacatcaatagtaaatattattatcttaattttatctattatttttgcggataaatcaattaaatattcaagagaaagtaaagattggataaaagtagcaagtaaacttctacctttaattatatttatagttattgtgatacacattctttcatcactacacacatttggttttatatttaattaa

SEQ ID NO: 151 - DNA, 714 bp, Staphylococcus capitis
atgacgaagttaaatgtagaagtatttgcagatggcgctgatatagaggaaatgaaagctgcttataataataagtatgttgatggttttactactaatcctagtttaatggctaaagcaggggtgactgattataaagcatttgctgaagaagtagttaaagcaattccagatgcatctatttcttttgaagtttttgcggatgatttagaaactatggaaaaggaagctgaaatccttaaacaatatggtgataatgtttttgtaaaaatacctattgtaacaacaacaggggaatcaacgcttcccttaattaaaaaattatcagctgataatgtgagattaaatgtcacagcagtttataccattgaacaagttagagatattacaaatgctgttactgaaggcgtacctacatatgtttcagtgtttgctggtcgaatagctgacactggtgtagatccactacctttaatgaaggaatctgttgaagttactcatagtaaaaaaggtgttaagttactttgggcaagttgtcgcgaagtgattaatgttattcaagctgatgaaataggtgcagatatcatcacatgtccagctgatgtggtcaaaaaagttaattcaaatttgggtcgtaatattgaagaactctcaattgacacagttaaaggtttcgctaaagatattcaaagctcaggtctttctatcttgtaa

SEQ ID NO: 152 - DNA, 444 bp, Staphylococcus capitis
atgggcaaaaagacgtttaaagaaaaggttcaaaaacaattatggtttttaaataaaaaagaaaaagaacaattgaataaaaagctaagtcagttagatagtgaagataatgtagattttaataaacccattcagttttctaatcgttatctcaaaaatcatatatacgagcataaaagtactacttcaggtaaaacctttatattactatttagtattgttgtaacatatgctttattacttggattatttttaacaggtttgataacaagtttaacttcagttcattactttattaatcctaaagttgaattatctagtttattagtaattatcattttaatagcagcaatctgtataatgatattgagcctttatttaattaaaataattacagcattatttacaaaaaaattactagaattaaaatttaataagcgctag

SEQ ID NO: 153 - DNA, 444 bp, Staphylococcus capitis
atgactacttattcaacgagacatttactttatttaaaaactgctatatctaatgagacagaaacacgtatacaatactctgactatcatatcactgtcccctttacaccacagaaaatgattcactatctacttgagttgaatcacacttcattacaagtgcaatcgtcaaaagctaaaagattactaaatataaataaactaatacctatctatatcaatcgagatacaattttattcccactaacacaaaaacgtgcatcaataaaatattttattaacgcacgtaaaattattggaattcactcttctgtagattctactattatcattttcgacaatacgactctacttcgtactgaaatcccctatacactggtatccaaaaaatggcaagaaagtttaactcttgctcaaatcattgaaaagactagcgcttattaa

SEQ ID NO: 154 - DNA, 471 bp, Staphylococcus capitis
ttggaatttgaagaagtttataaaaactataataaaattattcattatttgttaaatcactatcacatcacttataattatgatgaattttatcaactcttacttattaaaatgtggcaactcactctaaattacgatgaacaaaaatcaacctcgataagtacatacctcttcacgagattgaaatatcatttaatagaccattttaggaaagaaaataatagatccaatcaaatcactcttgatgcccatcttcacaattcttatgattctacaattctcctcaatgattttaacttagtgttagaagacttctctgatcaactcaaaccacaagaagcgcaatggctgcgtcttcatattcaaggctttaaacaatatgagatagcccagcacatgaatttatctctaacttctataaagaaaattaaaaactccactaaacaaaaatgtttaaataatcttaaataa

SEQ ID NO: 155 - DNA, 219 bp, Staphylococcus capitis
atggattacgcacacttaaatttagagcactttttcgcacgtaacgatgatttagacgtaattagagatcgttctgatttcgtcatgataaataattttactaatgaaatgaagtatcgtgatggtgaaattgaagggacaattgatttaaatcagtattattataaaaatcgttcacaagcggctagttttgttatgatggaatataaaaagtcttaa

SEQ ID NO: 156 - DNA, 852 bp, Staphylococcus capitis
atgattaagcacaaaaagggctctatcttagctattataggattgctaatagtatttgttgttgctgctgttattttcttttcaatgatctctgatcaaatattctttaaacatgtaaagtcagaaaagaaagtaattaaaatcgataaaactctagataaagcagcaaagaaacaaatacataactatacgagtcaacaggtatctaataaaaataatgattcatggcgtgatgcatcagatgctgaaattaaaacagctatggatagtagtgaattcattgataatgataaacaaaaatatcaatttttagatttatcaaaatatcaaggtatagataaaaacagaattaaacgtattttatttgatagaccagtattattagaacatactgatgactttttaaatgcagctaaagctaaacatgttaatgaagtttatctcatctctcatgcgcttttagagacaggttcagctaaaagtgaattgtctaaaggtgtagaaatcgacggcaaaaaatattataacttttatggtgtaggtgcattagacagtgatcctgttaaaacaggtgcagaatacgctaagaaacatggttgggatactccacagaaagctatatatggtggtgctgatttcattcacaaacatttcttatctcatgaagatcaagacacgctgtatagtatgagatggaaccctaagaatcctggtgaacatcaatatgcaacagatattaaatgggctgaaagtaatgcaagcattattgcagatttctacaagaacatgaagactgaaggtaaatactttaaattatatgtatacaaagatgataaagaacatcaaaaatag

SEQ ID NO: 157 - DNA, 1491 bp, Staphylococcus capitis
atgcgtgtggcaataatcggtatgggaacagctggtgtcagtgttttacgacaacttgttaaacatgaagatttttccaaacttaaagtggatgtgtacgacgatgcaaaaaatatggggcaaggtgtaccatttcaaaatgacagtagtgaattattaataaatatgccctcaaaaaaaatgagtttaaatctagatgatgatgaagaattttggaaatggtatcaacaacaaaccgaatttgattttccgaatccacagtacttaccaaggtttgtttttggtcattatatgaagtcacatctttctcgatacgaccaacaatacgagaatctaacaattattaatgaaaaagttcaggaaatctttactaactcaaatgtagatgatacgaagttaaagtattatgtatgtacatgtgaagatgataaagaatggcgagtatatgattatttatttttaacgtttggtacgtttagttatcacgatccttatcatttgaaaggtaaaaaaggatacatccaaacaccatatccaacatataatacattagatcatgtagatgaatcagataggattgcaattataggtactgggttagcgagtttagatgcagtgagatatgttgctgcacatcatcctaatttgccgataacaatgacaagtcgttcagcctctttacctagtgtaagaggtaagatgatagatatccaattcactcatttaactaaagatcattttaatggtattaaggaaaataattacggtaatgtacctctagataaggcagttgctttgtttttaaaagagtgtgaggattatgaaattgattttcaaaaattagtgaatagaagaactggtcaccatattaaagatttacaatttgatttaaataatgaaacagaaatgggagtatttcaaagtatcattgagcatttgaaagagaatttagattggatttggaatagtttaagtttaagagatcaagaattatttaatgaaaaatactcaaaaatgattcaattaaattcaaaccctatgcctcctagaacggcaaagttacttatacagttaattgaagaaggatatcttgaaataaagaaagatttagaagatattcaacatgacaataatcaattttatttaaaatttaataatgaagatcaagaaactgaattatttgatgtagtgattaatgcaacaggatctaaaacacacctcggacaattagatgaagatgatcaattgatgctaaatcttgaaaatcgtcaaattgtacaaagacatcctatgggtggcattcaaattattcctgaaaccaatcaagtcattagtccaagatatggtacgttgacgaacgtcattgccattggtcaaatgacaaatggtgttaacaaattacgtaatggtgtgaagatgattgttgatcaagtagtgaatacagtatctcacttatatttgacgcaaaaagaaatggaaaaaaataggtaa

SEQ ID NO: 158 - DNA, 1050 bp, Staphylococcus capitis
ttgagtcgatttatgaattatgccattcaacttgctcaaatggttgatggtcaaactggtataaatccgccggttggttctgtagtggttaaagatggtagaattgtcggtctaggcgcccatttgaaaaagggtgataaacacgcagaagtacaagcattagatatggcgggagaaaatgctaaagatgcaactatatacgtttctttagaaccttgtactcatcatggttctacaccaccttgcgtaaataaaattattgaatttggtattcgtaaggttatctatgcggtaaaagatactaccttagcttctaagggtgatgaaatacttaaagaagctggtattgaagttgaatttcaatttaatgagaatgccgctgaactttataaagacttctttactgctaaaagaaatagcattccagagttaactgttaaagtttcatcaagtttagatggcaaacaagccactgattctgatgagagtaaatggataactaataaagaagttaaagaagatgtttataagttgcgtcacgagcatgatgctgtattaacaggtagaaaaacgatagacgctgatgatccattgtatacgactagagttcaggatggtaagcatccaattagagttattctatcaaagtcaggacaaattgattttgagcaacagctatttgcagatactgcttcacctatttggatttatactgaaaatgaaaatttaaaaaatcaaagtaatgataaacatatagaaattatttgtttagaaaaatgcgatagtacagctatattaaaagatttatatcaaagaggtattggaaaactgctagtcgaggcaggtccaaatgttacttcacaatttctccaatctcatcatttagatgaactcattctttatttagccccgaaattaataggtggttcaggtaaacatcaattttacaaaactgatcaagtcattgatttacctgaagcaactcaatttgaaattgtttattccaagttaattaatcaaaatttaaaattgaaactacgaaagaagtga

SEQ ID NO: 159 - DNA, 633 bp, Staphylococcus capitis
atgtttacaggtatcgttgaagaaattggtatcgttcaacaagtgcgttctgagaaatcagtgagaactttagaaattaaagcgaatcgcattcttgaagatatgcatatcggtgattctataagtgtaaacggcgcatgtttaacggtgattgattttaatgatacagctttctcagtccaagtgattaaaggtactgaaaataagacctacctagccgatttacaacgtcaggctgaagtaaatcttgagagagcgatgagtggtaatggcagattcggtggacattttgttcttggacatgttgatgaacttggaacgatttctaaagttaatgaatcagctaactcaaaaataatttcaatcaaaacttcaaaaaatgttttaaatcaaatggtacaacaaggttctatcactgttgatggcgtaagtttaacagtctttgatcttcatgaaaccacatttgatattcatcttattccagagacgcgtaagtctaccattttatcagataaaaaagtgggcgatgcagttcacttagaaacagatgtactttttaaatatgtggaaaatatcatgaatcatcaaaaatctgaactaacagaagataaattgcgtgcatttggtttttag

SEQ ID NO: 160 - DNA, 1182 bp, Staphylococcus capitis
atgcaatttgatacagttgagttagctatagaagctttgcgaaaaggtgaaagtatcattgtagtagacgatgaagacagagaaaatgaaggtgaccttatcgcagttactgaatggatggctgacgatacgattaattttatggcaaaagaaggacgtggtctcatatgtgcacctttagatacttcaattgctaaaaggttagagctaaatgctatggaaccgcataatactgatgcttatggtacacatttcaccgtgagtgtagatcataaaaatacgactacaggtattagtgcctatgagagaacaatgacagcaagagcacttatagatcatcatgctaatgccgaagacttcaatcgccctggtcatttattcccattaattgctaaagataatggtgtactagaacgtaatggtcacacagaagcggctgtagacttagcaaaattaactggagctaaaccagcaggtgtgatatgtgaaattatgaatgatgatggaacaatggctagaggtgaagacttacaaagtttcaaggaacgccataacttaaaaatgattacgattgaaagtttaattgaatatcgtaagcaatctgagtcacatgtgaagttaaatgctaaagttaatatgccgacagattatggaaaatttgatatgtacggttttacaactgacttaagtgatgaagaaattgtagtgattgctaaaggatcaattcgttcaaatgaaaatgttcgtatacactcttcatgtctaactggtgatatattccacagtcaaagatgtgattgtggtgctcaacttgaagcatcaatgaaatacatcgatgaacacggcggtatgattatatatctaccacaagaaggacgaggtataggattgatgaataaattacgagcttatgaattgattgaaaaaggttatgataccgtaactgcaaacctcgctttaggatttgatgaagatttaagagactataatatagctgctcaaattttaaaatattttaacgttgaaaaagttaacttattaagtaataatcctaaaaaatttgaaggattaaaagaatatggtattaacattgaagatagaattgaattaattgttcctgagactgcatataatcataaatatatggagacgaaaaagtcgaaaatgggtcacttaatttaa

SEQ ID NO: 161 - DNA, 459 bp, Staphylococcus capitis
atgaattttgaaggtaaattagtaggtaaaaatttaaaagttgcaattgtagtaagcagatttaatgattttattacaggtcgtttattagaaggtgcgaaagatacattaattcgtcatgaggtcgaagaagaacaaattgatgttgcatatgtaccgggtgcttttgaaattccattagttgctaagaaattagctcgaaaaggtgactatgacgcagtaattacacttggatgtgttattagaggggctacttctcattatgattacgtttgtaatgaagttgcaaaaggtgtttctaaggcaaatgaagtatcagaggtaccagttatttttggtattttaacaactgaaagtattgaacaagctgttgagagagcgggtacaaaagcagggaacaaaggttctgaagcagcagtaagcgcaattgaaatggctaacctaatcaaacaaatatag

SEQ ID NO: 162 - DNA, 1002 bp, Staphylococcus capitis
atgtcacttttccgagatttttttatcgcattatctaataatacttatttaaatgaaactgctaaaaaggttggccctagaatgggtgctaataaagtagtagctggaaatactattcctcaactaattgaaacaattcaatatcttaatgaatatagaattgcggtcactgttgactgtttaggcgaatttgttgaaactaaagaagaaagtttacatgcaaaacaacaaattttagaaattattgaagcaattcaatattttaatgttgaggcacacatgtcagttaaaatcagtcaattaggcagtgaatttgatttagatcttgcttatgagaatatgcgtgaaatacttcttaaagcagatgagtgtggcaaaatgcacattaacattgatactgagaaatatcatagtttacaacagatacaacatgtacttgataaactcaaaggagaatttaaaaatgtcggtacggtagttcaagcgtacttatatgaagctgaagatttaattgataaatacccagacttacgattgcgattagttaaaggtgcttataaagaagatgaaactatcgcctatcaaaccaaagaagacattgattccaattatattaaaattatagagaaaagacttttaaacgcacgtaattatacatcaattgcgacacatgatgatcaaatcattagtcatgttaaacaatttatgaagaaaaatcacattgaaaaagatcaaatggaatttcaaatgttatacggctttcgttctgatcttgctcaatccattgccaatgaaggctatcattttacagtttatgttccttttggagatgattggttcgcttacttcatgagaagattagctgaaagacctcagaacctgtcacttgcatttaaagaattttcaaaccctaaagttttaaaaaggatagccctctacggcagcgtggccacaggcttagcctcaaccctagccatagcaaccaaactactcaagaggtaa

SEQ ID NO: 163 - DNA, 828 bp, Staphylococcus capitis
atgtggaagtgggaaacagaaaatgacgcaaaaggcgtcgtagtcattgctcataatattttagaacatactggacgatatgcatacgttattaccatgttacgaagaaatggttatcatgttattatgggagacttgcctggacagggacaaacctcacgagcaaataaaggtcaaatcgatgactttaatacatatcatgaaaatttattagaatggatcaaaatagccaatgaatataaaattcctacctttgttttaggtgttggtttaggtggtttaattgtcgtaaatctcttagaaaaggctgaattacctattgaaggtgtaatgctattgtctcctatgctagaacttagaagaactggtaaaggtcgaaagaataaaattatctctaatttaggtaagatgtccaaggatactaggttcaaagtgggcatctcttcacaagatttaactcgaaatgatgaaattattgacgaaacagataatgatggtctcatgttgaagaaagtaacgtatcgttggtataacttaatcgttgaaaaaatgaaagagacaatggatcatattaaagatattaaaccattaccagcgcttatcatgtatggaactgaagataaaattttagaaactgatgctatcatagaacttaaagataaattagctagtaatgaattgtactttaaggcttggaatggtttatatcatgaaattcataatgaacccgagagagatcaagttatgagatatgttcttacttttttaaataatagtgttaacactatggggtttgtggttaaagaggaagaaatagaagatatttag

SEQ ID NO: 164 - DNA, 402 bp, Staphylococcus capitis
ttgactaaaagtgaaaaagagagagtacatggaattttgcaattagaggcattactttctgacattaactcgatttttgatacaatcaaaaaagagtataaaatgtctaaagaagaagttttaattttacttacactttgggaagaaggttcaatgactcttaaacaaatggataaattcgttcacattaagccatataaacgtacaagaacgtacaacaatttggttaatcttgaatggatttataaagaaagacctcaagatgatgaacgaactgtaattattcattataatgaaaaactcaattcccaaaaagaagatttacttaactttattggacaatcaattagaagtaaatcagagccaatgcaaaatagtttaaaatcaattttagctgtttaa

SEQ ID NO: 165 - DNA, 564 bp, Staphylococcus capitis
atgaaaatcgagcgtattctccccttctcaaagtcattgattgatagtcatgtttgtgagagtagtatcgtcattgatgctacttgtggaaacggtaatgatacgctatatcttgctgaaaaagtcactaatgggtttgtttatggatttgatattcagaaagaagcgatagataatactcaactcaaagtaagtgattttaacaatgtttctttaattcaggacagtcatgaaaatgtaaaacaacacgtcttagaaaaacatctaaatctcattgattgcgctatattcaatttaggttatttacccaaaggagataaatcaatagttactaaaccggattcaactattaaagctattgaggaaatatttgatatgatgcgtgtcgaaggtattattattctagttatttatcatggacatgatgagggtaaattggagcgagacgcacttttaaaatatcttaaagaacttgatcaacagaaagcgcatgttttacagtatcaatttattaatcaaaaaaataatgcacctttcatatgtgcaattgaaaaaagaatataa

SEQ ID NO: 166 - DNA, 954 bp, Staphylococcus capitis
atgggtaattttttcccgtatgcttttgaaaataaacgatatcacacatggaattatcatttaaaaaataaatttggacgaaaaatatttaaagttgctttagacggtggatttgactgccctaatagagatggtactgtcgcacatggaggttgtactttttgctcagctgcaggaagtggtgactttgctggtaacagagctgatcccattgaagtacaattccaacagattaaagaaagaatgcatgaaaaatggagcgaaggacaatacattgcttacttccaagccttcactaacacacatgcgcctgtagaagtgctgaaagaaaaatatgaaccagtacttaaagaagaaggtgttgtcggtttatccatagccacacgtcctgactgtttacctgatgacgtagtagaatacttagctgaactcaatgaacgaacttatctttgggttgagttgggcttacaaactgttcatcaaactacttctgatttaattaaccgtgcacatgacatgcaaacgtattatgaaggcgtagcgaaattacgtaaacataacattaatgtatgtactcacatcatcaatggtttaccaggcgaagattacgatatgatgatggagactgctaaagaagttgcgcaaatggatgttcaaggcattaaaattcacttacttcatttattaaaaggaacaccaatggtaaaacaatatgaaaaaggcatgttagaattcatgagtcaagaagactatacaaatttagtatgtgatcaacttgaggtcattcctcctgaaatgattgttcatcgtattacaggtgatggccctatcgatttaatggttggaccaatgtggagtgtaaataaatgggaagtcctaaatgaaattgataatgaattagaacgtagaggctcttatcaagggaaaaaatttgagcagaaggttaaatcatga

SEQ ID NO: 167 - DNA, 1224 bp, Staphylococcus capitis
atgaatatacctaaatcagtttggtggctagttattggcatgtccttaaatatcactggcgccagttttttgtggcctttaaacactatttatatgaaggaagaacttcataaaagtcttacaattgctggtattgtcttaatgattaattcatttggcatggttgttggtaacttactagggggcaccttatttgataaacttggtggttataaaaccatacttataggtactattacatgtttgtgcagtactacgctgttaaatctatttcatggttggccatggtatgcaatttggctcgtgttattaggttttggtggcggtatgattgtcccagcaatttatgctatggccggagcagtatggccaaatgggggacgacaaacatttaatgccatttatttagcgcaaaatataggtgttgcattgggcgcagcacttggaggatttgttgctgaatttagctttaattttatttttctagctaatttagttatgtatgttttatttgctcttgttgcaattacacaatttaatttggaaattcatgctaaagttaagcatcaagatgcagttgatttaaaaagtaaagaaaatagaaaacgttttacagcaatgatgttggtatgtgcgatgtttgctatttgttggattgcctatattcagtgggaaacaacaattgcatcctttactcaatcaatcaatatctctatgtctcaatatagtgttctttggacaataaacggtattatgattttagtagcacaaccacttattcgaccaattattgtaattttaagagggaacttaaaacatcaaatgttcgttggtattttaatctttatgagttctttccttgttacaagttttgcgcatcactttgctattttcgttgtaggtatggttattcttacatttggtgaaatgtttgtatggcctgcagttcctactattgccaataaacttgcacctgaaggtaaacagggtcaataccaaggctttgtaaactctgcttctacagttggtaaagcctttggaccgtttattggtggtgtactcgtagatgcaatgaatatgagtatgatgtttgtaggaatgatagtattactttgcttcggactcattttcctaagcatctttgatagaggtttgcctaaagataaaaatgaaacccctatacctagaagacgtaagagaagaaaatcaaaagcttctaaataa

SEQ ID NO: 168 - DNA, 2418 bp, Staphylococcus capitis
gtgttgaattacaatcacaaggaaattgaaaaaaaatggcaagattattgggcagaaaataaaacatttaaaacaagtgacaatttaggtcaaaagaaattttatgcgttagacatgtttccttatccatctggtgcaggattacacgtaggacatcctgagggatacacagctactgatattgtttcaagatataagcgtatgcaaggatataatgtgctacatcctatgggatgggatgcctttggtttacctgctgaacaatatgcgttagatactggaaacgaccctcgtgaatttactaagaaaaacgtacaaacatttaaacgtcaaattcaagaattaggttttagttatgattgggatcgagaagtaaataccactgatccagaatattacaaatggacacaatggattttcattcaactttataataaaggtttagcatatgttgatgaggttgcggtgaattggtgcccagctttaggcacagttttatcaaacgaagaagtcgttgatggcgtttcagagcgtggtggacacccagtttatcgtaaaccaatgaaacaatgggtactaaaaattactgaatatgcagatcgtttattagaagatttagatgacttagattggcctgaatcaattaaagatatgcaacgtaattggataggtcgttctgaaggtgcgaaagtatcctttaatgttgaggacactgataataaaattgatgtcttcacaacacgtcctgatacaatttttggtacgtcattcttagtattaagtcctgaacattcacttgttaatagcattacttctgaagacaaacaagaagaagtcaaagcttaccaagaagaagcttctaagaaatcagatttagaacgtactgatttagctaaaggaaaaacaggcgttttcacaggtgcatatgcaattaatcctctttctggtgagaaattaccaatttggattgctgattatgtactatcaacatatggaactggtgcagttatggcggttcctggacatgatgaacgtgatcatgaatttgcaaagaaatttgatttaccaatcattgaagtcatcaaaggcggagatgttcaactagaagcatacactggtgaaggtgagcacgttaattcaggtgaactcaatggtcttgaaaatgaagctgccattagtaaagcaattgagttattagaagataaaggcgctggtgagaaaaaagttaactacaaactgcgcgattggttatttagcagacagcgttactggggtgaaccaattccaattattcattgggaagacggttcaatgacaactgtgcctgaagaagaattacctttattactaccagaaactagtgaaattaaaccttctggcactggagaatctcctttagctaatattgatgaatttgtaaatgtgattgatgaaaagacaggcatgaaaggacgtcgtgaaacgaatacaatgcctcagtgggcaggtagttgttggtattacttacgttatattgatccagataatgaaaatatgattgctgaccctaaaaaattaaagcactggttaccagttgatttatatattggtggggtagaacacgcagtacttcatctattatatgcaagattctggcataaagttctttatgatttaggtgtagttcctacaaaagaaccattccaaaaattatataaccaaggaatgattctaggtgaaggcaatgaaaaaatgagtaaatctaaaggaaacgttattaaccctgacgatatcgtatcttcacatggcgcggatacactacgtctatatgaaatgtttatgggaccacttgatgcagcaattgcttggagtgaaaacggcttagatggttcaagaagattccttgatcgtgtatggagacttatcgttactgaagatggctcattaaataacaagattgtagagtctaacgataaatcattagacaaagtttacaatcaaacagttaaaaaagtaactgaagatttcgatgcgcttagctttaatactgcaatcagtcaattaatggtatttattaacgattgttataaagctaatgaaatttataaaccttatattgaaggttttgtaaaaatgttagcgccaattgctcctcatattggtgaagagttatggagtaaactaggtcataatgaaactataacttatcaaccatggcctacatttgatgaaagtctacttgttgacgatgaagttgaaattgtagttcaggttaatggcaaagtccgtgctaaattaaatattccaaaagatttattaaaagaggaaatgcaagatttagctttggctaatgataatgttaaaatgagtatcgaaggtaaagagattaaaaaaattatcgcagtacctcaaaaattagttaacattgttgctaaataa

SEQ ID NO: 169 - DNA, 312 bp, Staphylococcus capitis
atggaatcaattacagtagatgaactaaagaaaaaagtgttggattctaatccagttaatatcgtagatgttagaaatgatgaagaaacagctatgggtgttattcctggagctaaaacgattccaatggatcaaattcctgataacttaaatgagtttaataaagacgaaacatattatattatctgtgctgctggagctagaagtgctaaagtcgttgaatatcttgaagataaaggtattcatgctgttaatgttgaaggtggcatgaatgaatggggagatgaaggtactgttatcgacagtatttaa

SEQ ID NO: 170 - DNA, 3810 bp, Staphylococcus capitis
atgaatctatttagaaaacagaaatttagtattagaaaatttaacattggaattttttcggcactcattgcgactgttacatttttagcgcatccatcacaagcctctgcatcagaactagactcaactcaacccgaaagttctgaaggaacagtgcaaaatggctctggacaaaatgtgtcaactgaagaatcaagcgcacaattaaacaacgatgttattcaaggtgataataaaccaagtacaactcatttagaacaatctgataatttgaataactcacaaattacaggcaatacactagatcaaacacaatctctaactaataatgaatcaaatgaattagaaaatgaaactaatactttagcaactaatacgaattctactatcgatgagaacgctatacatgttgataacacaactcaacactatttagaagctaaggctaatgataagtcatctaaagatgctaaaaatacgtcaaatccaatcacacacgatactaagatagtaagagaagaaagtaatttacctaaaaaaagaagccgaagagatttaccagctggagatagcaacaacgcaaacacagctacgacagctaatgatcctaatttgagtaatacgggatcaaacagtataaaaacaacgttaacatttgatgatttaggtattactagtagtaataacagatataaacctgaagtaaaagtcctaaatgaattaaaaggattcaaaatgattaatggtggtagtgtagggttagttaatagtgaacttgagcgtaccaatgtatttcatagtggcgatcctagaaactatcaagcaagtggtaatgtattggttctaggtagatcaagagggacagatgttaatgatcatggaggtttcaatggagttgaaaaagatttcactgttaatccaaattcagaattaatatttggatttaatacaatgcctgccaataatggtaaaggtggaacatatttaatagttaaaaatgcagataatgataagcaaattgtgaaacaagatgttcaagatggtgggatttggagattagttaaaattccagataatgttaatagagttaaagttcaatttttaccaaataatgatattatgactgacactcgccgagtggctctattaaaggatggatataaatattactcacttatagattccattgatatcgcttcaggatctcatttgaaggtgctccctaaggaaaataatgatgctgtgaagaataataaacaatttgaagtgagtactagaatagagaatgatggtaatttcgctgctgcgttagatactaataaattaatttatacggttaaattaccagaaaactttgagtatattgatgattctactgtagctacgttcgttaatggaaatatgccaaatactacaattaaacctttaagtgtaaattacaatcgacaaactaatacactgactttcacaagtaatggtgtgaataagtctagtagtaatcaagaagatgctaaatttttacctaataaaattttaaatattaaatataaattaagacctgttaatattccaacgcctagacaagttacagttaatcaatcaataacatataaaacttatgctcaatattacttaaatactaatgataatactgtaactgcgcaacaaacaccatttacaattgatgtaaaaatgaataaagacgatttagaagaacaagtgaataaagaagttataccttcaaattatactttagcctcttttaacgcttataaaaaattaaaagcacaagcacaaacgatacttgaagaagaagctaataataaaccaattaatgagagagtttcccaagctgaaatcgatagtttgttacatcaattacagaatacattaattaatagggtggacgcagctcaagaaattaataataaagcacaagatatgagtgatgaagcggaagctaacaatgaattaactactgaagaaaaagaagctctaacggagagaatagataatgataagaatgaaatcctcagtaaaattgatgatcaaacaactgatgaaggtgtcgagcaagttaaaaatactggactaactaccttggctgcagacactcctcaaccagtaataaaacctaaagcacgtgaagccattaataataaagttactgatcaaaaagcgttaattaaccaaaataatgaggcaacgcatgaagagaaaaatgtcgcaattcaaaaagttgataatcattcttcggaaacactacaaaaaattggtgaggctgaaacagagagtactgttaatgcagcgagagatgagggtattaataacatttcttcggacattccaaaccctcaacaaaaagccgaagctagaagaataatcaatcaaaaagctcaagataaaatcactgaaattaatcaaaacactcaagccactcaagacgagagaaatattgctttaaacaatgtaaaccaagcaaaaacacaagctttgcaaaattttcaaaatgctaatacaaataatgatgttactaacgctaaagatgctgcaataaatacaattaatcaattaagtgttaaccctgttaaaagaaagcaagctattaatgaattaaacacggtagcgcagcaacaaaaacagaacattcaaagagataatgaagctacgaccgaagaaaaaacggaagctgaaagtaaagtggagagagaattagctcaagctactcaaaacattaattctgcatctactaacaatgaggttgaccaagcaaaaacaagtggtcagaatgctattaattcagccaatcctaacactacagttaagcgaatggcacgagaagcaattgaaaataaagtaacttctcaaattcaacaaatcaatgctaataacaaagcaactaatgaagaaaaagagacagcaattaataatgtatatgcacataagcaagaagctttgaacaatgttactaatgctcattcaaattcagatgttaaaaatgtacaacaagatggtgtaaacactatcaatctagatcaacctaatgcgattaaaaaagatcaagcaattttggaattaagtcaaaaggcacaagaaagaaaagctacacttaaccaaacaccagatgcaactgatgaagagaaaaacgctgctaataccaaggttgatcaggcacttaatgatggtatacaacaaattaatcgttcaacatcaaataatgacgttgataatgctaagacaaatgctacacaaacaatcgataacatcaatgtagatgttctaaagaaaccacaagctaaagaagaaatcgcctctaaagtgaatgacaaacaaagagaaataactaatgataatgaaggtactactgaagaaaaacaaagtgctatagaaagtgtaaatcaagctaaagttgaggctgacagtggtatttcacaagctcaaactaatacagaggttgaaaaagctaaaaatgctggattgagtaatattggaaatattcatcctgtctttaataaaaaacaacaagcacgtacaaaaataaatgagaaatttaaaacaaaacaagatcaaatcaatcaaacccctaatgctactcaagaagagaaaaatgaagcattaacaagattaacgcaagctaaagatgctgtattacaaacaataagtaattcacaatcaaatgataatgttgaccaagcacaaactaatggaattcaaactttagatggtattaacactacagttaataaaaacctcaagcaaaagaaaatattaatcatgtcgctcaaaatcataataatgaaattgacttaa

SEQ ID NO: 171 - DNA, 2241 bp, Staphylococcus capitis
gtgattaatggaactcaaacgataaattcaattactcctgctacgactgtaaaaactaatgctaaaaatgaaattgctaaaaaagcagattctatcatagctaaaaaccaaacttcacctgatgctactgacgaagaaaaagctgaagctaattcaaaagtagaagaagcaaaagctgaagctaatagtaacattcaaatagcaaagtcaaaagaacaagttaaagaagcaaaagataacggtcttaataaaattaatgaaattagcccaactactacaattaagtcagaagctagaaaggctgttcaaaataaagtaaacgagcaaattggtttaatcaaagcgacaccagatgcaactgatgaagaaaaagcaactgctattgcaaaagttaatagtgaactagccaaagttcaacaacaaattaatacagaacatacatctcaaggagttaatagtgttaaggcaaatgcaatgactgcaatagagcaaatcacagctcaagcaatagagaaagaaaccgctagagatgcagttaaacaaaaagctaatgaacaaactgatgttatcaataataacaataactcaacagaggaagagaaagtagaagcgataggcagaataaataatgctaaacaagaagcactaaacaatattaatagtgcaacaatgaatcaagccgtaactagtgctaaaaatgagggtattaataatattaatttaattcaatcgtcaacatctactaagacaaatgctaagagtgatattgatcgtaaattaagtgaacaaatagaaaatattaaccagcatcaaactgctacaacagaagaaaaagatacagctgttcaattagcaaaccaaaaagctaatgaagcaaaaaataatattcaaactgcaacggataacgaaggcgttgctcaggctaagacaaatggcataagtgcaataaataatattgaacctaatgcacaacaaaaacctaccgctaaacaagatatagaaaccaaagtaactgaacaaaatagagtaattgataatacggctaatgcaactgatgaagaaaagcaagaagctaaaaatagagtaaaaacagaagaaaatacaggtaatcaaaatattgatcaagctcaaacaaatcaacaagtaattgatgcaaaaactactactattgatacaataaacactattatccttaatgtaacaaagaaaccaaccgcaaatagggaaattgatgctaagtttgagcaacttaaacaagctatcaattctacacctgatgcaacaacagatgagaaaaatgaagctatacaacgtttaattgaaaaaaaagatgaaagtaaaaatctaattagtcaagcaactaaggatgcacaagtagatcaaaataaagaaaatggaatacatgaattagaaactattcatgctcatccaactaaaaaagcagaggctattcatgctgttcaagagaaagttaaatcacaaaatgacttaattacgaataacaacgatgcaacagatgaagaaaaagaggtcgcaaaaaatcttctagaagcaagcaaaataaaaacaattagtagtattaatcaagcacaaacaaatgctcaagtagataatgctaaaaacacaggtatggatgagatgagtttaattcacccagcgactactaccaaaactgatgctaaaacagctcttgatcaaaaagctcaacagcaggatacaattattaatggtaataatgatgcaacagacgaagagaaagctaaagcaagagagctagttgaacaagctaaaactgaagctaaaaataatataaatagtgaccatacaactattgatgttaataatgaaaaaactaagggcatacaaaaaattgcagaaattcacccagctacaactgttaagtctaacgctaaacaagaattacaaaataaagctgatgatcagatcgctcaaattactaacacgcctaatgcaactcaagaagagaaacaagatgctatcacagaagttaatacttcattggctcaggctaatcaaaacatcaatcaagcgcattctactgaggaagttaaacgtgccaaaggtgatggaattaactctattaacgatattcatgcaaaagtaaacaagaaacaatctgctattaatgaattaaaacaaaaagctaatgaacaaaaacagttaatcttagctaataacaacgcgactgatgatgaaaaaatgcagcacaagcacaagtag

SEQ ID NO: 172 - DNA, 4653 bp, Staphylococcus capitis
gtggatgaaaagtttgaagcaggtaaacaaaatctccaacaaattgaggtatcaacagtaactaaaacaactgcaaaagctgatgtagcaaatgctataaataataaaagagaacaaattaatattaatcgtcaggctacaacagaggaaaaagatgaagcacttaatcaactaaaacaggaagaaacgaaggcaaataatgcaattgattcagccttagcaaatcaaaatgttaatgatgccaaaacacaatacttggcaagtattgaaaatattcagcctaatattgttaaaaagcctgcatcaaatgatgtaatcaataataaagtaacagaacaaacaaaacttattaataataatcaagaagctacttcagaagagaaacaggcagctttaacgaaattagaaactgcgaaaactagtgcacttcaaaatattaatcaagcttctacaaatgacgaagttcaagcagctgaaaatactggtgttgcagaaataggaaaaatagtgccagaaacaactgtgaaacaagcagctaaacaaggcattgaacaaactactcaaaatcaaataaacaaaataaatgataataataattcaacatttgaagaaaaagcagtagctattaataaagtcaacatagctaaaaatgaggcattaaataatattactaatgctacgacaacgcagttagttcaagatgcaaaaaatagcggaactattgtaatcacaggaataaatcctgatacatcgataaaagcaaatgcgattcaggctctttcaacagaagctaaaaataaaaatgatttaattgatcaaacacctaatgcaactgctgaagaaatggaagaagcaaataataaagtagatagtatccaaaaaaaagcaaatgctaacataggcaaagctaatacaacagatgaagttaaccaaattaaagcaaaagcaattcaagatatgaaagctgttcaaactgaagttgttaaaaaacaaaatgtgaaagaacaactttcacaattaggtgagaatcaaaaacaagtgattaatagcaacactgaagctactaaggatgagaaagacgaagctattgagagactcaataatgaattaaatactgcaactacacaaattaacaatgcaagtcataatagtgaagtagacggaatcttaaataattctagacctaaaatagaagctattacacctcaagcgagaaagaaacattcagcaatagatgaaattggtgcaaaagttaatgcacaaaatagtgaagttgacaaaaataaagaagcgactttagaagagagaaatgatgcactaaataaaattaatcaagcttatgaagaaggtaaggctaacattaaaaatgcccaaactaatgatgaagttgacaatgctaaaaattcaagtatacaaaaaattgcattaatacaaccatctactgaagtaagagcaaatgccagaaaagcattaaaagcgaaagcagatgaacaaaacgccttaattgacagtaatcgcaatgccacaacagaagaaaaattggaagcaaaagaattagttgaacaagaattaaattcatctaactatagattaaaacacgctgatacaaatcaagatgttcaaaatataatatctgaagattcaaaagctatagctaatatacaaccatctactgatgttaaggatagagctaaagcagatgttgttgctaaaagtaatgaaaaacaaaatgaaattgttaataatactgaagctactacagaagagaaagaagtggcttcccaacagcttcaacaggttactgatcgaacaaataattcaattggtttagcacaagatacagatcaagtaaacgtagaaaagaataagggcatagaatctattaaagatattcaacctattatcattaaaaaaccagctgctagggttgagcttgataaagcacttaaaagaaaacaaaacgaggttaatcaattacctaatgcaactacggacgaattacagcaagcgttaaatcatttagatcaatttgttcaagaagctaaaactaatataaatcaagcacaaactaatgctcaagtagatcaagctaaagagaacggtactaacagtattaatacttttgaaccagtaataggtgttaaacagaatgcaattgacgcaattaataatgctaaacaagaaaaaatcgaccgaataagtcaagctttcagtgctacacaagaagagaaagataaagcatcacaattcgtaaatgaagaagctcaaaaagctatagaattaattaataaagcccaaacaaattcacaagtaactgaagcaaaagataatgttttaaatacgattaaacaatttgaaccagaatatcataagaagcgaaatgcaatactaaaactttatgatattgttgatgctcaagaagctattattaatgcagttcctgatgcgacagaagatgagaaacaaaatgctatagataaagttgaacaattattacgtgctacgaaaaaagaaatcggtttagcaagtgataatgctggtgtagatgacatttacaacaacatatcagagcaaattaaaacaattttccctgaagttgtaagtaaatctaatgctagaactatacttaacaatttagctaatcaattaattaaaacatttgaaaatacacctgatgttactacagaagaacgtgatgatgctatcaaccatgtgaaaaatcaattaagtgctgtcttaggtgcaatcgataaggatactagagatgtacaagtggctcaagaaaaggtatttggtttaaatgatttaaacaatattgttattaatgtaattcaaaaaccaactgctagaaaagctataaatacaaaagcagatgaaattaaattatcaattaacaatacacctaatgctacggatgaggaaaaacagaatgcattagataaagttcatgctattgttaatgatgcccaaaataaaatccgtgaagctaaagcagatagtgaagttatggtcgctaaaacagatgcaatttctttactttctgttatcaatccggaagttcaagtaaaaccatttgctttagatgaaatccaacaacaagctaataatcaaaaagctaaaataaacaacaactctgaagtgactaaagaagaaaaagatgcggctatacttttagtagatgatttaattaaacagagtgaagtacgattagatgctgcgactaaaaaccaacaagttgaagatattaaaaatgatattattaataaaattttaaatattgaaccaactaatagcattaaacctgcagctttgaaacaaattttagctaaattagacgctcaaaaagcgtttattagtgaaaataatgatgctacagacgaagagaaagcggtagctatagataaactcgtagaagcgtctagtgaatatgctgctaaaattgatgatgctaaaacgaatgatgaggtcgaagcagttaaaaatcaaagtattaaagatatagaatctatactttctctaattagtaagaaacctcaagctaagttagaagtacaacagaaagctgaggaaattcgaactacaattaattctaataaagatgctactactgaagagaaaaatgcagctttaaaaactttagatgaattgataaatgaggcaaatgaatctatattatctgctcatactaataaagaagttgataaagccaaagcacttgctttaccgaaaattgaagaggtgaaagttacaactgaagttaaacctcaagcaaaagcgcaaattcaagatgtagctaataagaagaaaaatgagtttgagaaatttgaggatgcaactattgaagaaaaacaagaagtattaaataaacttgctgagatagttaatactattaatcttgcaatacaagattctgaggctaatgctgatgtatcgaaaacacttcacgacggtttagctaaattagatttaattcaaatcaatgcacataagaaatctgatgcgaaatcatacttacatcaacaactttctgctaaaattcatgctgttgaagtaaatagtgatgcgacagttgaagagaagcaagcatttattagcaaattaaaagctttagtcaatcgtattcatatgcaagtgaatgactcagaaacaaatgaagaagtagataatagtttgaataactttaaagtagaatttgaaaaattaaaattacaaactcataaaaaagctaatgccaaacgtatcattcaaaacaaagcggatgaaatcattcgaaacattgaagataatgataaggttagttatcaagctaaattagcagctaaaaatttaatttctcaaattttgaatgattcatttaatgaaattgaagacgctaatgataataaaactgttgatgaagtagtcaaacaaacaattactaaactagaagctataaaagttaaagaagataagttaaactctatggaatctactcatcaaactgaacaaaataataaagataatgtaaatggctctaataataatcaacatacaataaatgaattgccttatactggtgaaacagattattcaggacctttagcaggtgcagcattactttcagggctagcattgttatctacacgtaaaattaaaaaagaaaaaaaatcttaa

SEQ ID NO: 173 - DNA, 1260 bp, Staphylococcus capitis
atgtatcaaactattataattggcggaggtcccagcggttcaatggctgcagtcgccgcaagtgaagtaagtgataatgtcttattaattgaaaagaaaaagggtttaggacgaaaattgaaaatatcaggtggaggtcgttgtaatgttactaatcgcctaccctatgctgaaataatcaaaaacatacctggtaacggtaaatttctttatagtcctttctcagtttttgataatgaatctattattgaattttttgaaagccgaggcgtgaaattaaaagaagaagatcacggtcggatgttccctgtatccaataaagcacaggatgttgtaaacactttgattaaacaaattaatgaaaacaaagttaatgttatggaggaaactccagtcacagaaatttctcatgataacggtattttttatgttacaactcaaaaaggtgaattccaaagtaaatctttaatcattgctactggtggtacatctgtaccacaaacagggtcaactggagacggttatcaattcgccgaatctcttggccactctataaccgaactcttccctacagaagttccaataacttctagagacgctttcattaaatcaaaacgtcttaaaggattaagtttgaaaaatgtagaattatcagttttaaagaaaaatggtaaaaaaagaataagccatcaaatggatatgatatttacgcactttggtgtaagtggtccagctgcgcttagatgtagccaatttgtctataaagaacaaaagaatcaaaagaaacaggatattgctatgcaattggacgtatttccagatttaaatcacgatcaactctctcaaaaaattaactccttattaaaggctgaaccagataagtatataaaaaatagtttgcatggcttaattgaagaacgttacttattgtttatgttagaacaatccgatattagtgatgaaactacatctcatcatttgtctaatcaacaattaaatcattttatctcaaatttaaaaggatttacgtttaacgttaatggaacactccccattgataaagcgtttgtcactggtggtggtgtatctttaaaagaaatacaacctaaaacaatgatgtcaaaaatcgttccaggattatttttgtgtggagaggtattagatatacatggttatactggtggatacaatataaccagtgcattagtgacaggtcacgttgctggatctaatgctggaacttttaaaaatgaatcctaa

SEQ ID NO: 174 - DNA, 1662 bp, Staphylococcus capitis
atgagtgagagtaaagaaatggttcgaggaacctttttaattacattaagtattttaattactaaagtattaggtgtgctgtttattatcccgttcacttcattgattggcgggcaagaaaatatggctccttttacttatgcttacgctccttataatattgcaattgctgtagcaactgcaggggtgccactagcagcttctaaatacgtagctaagtacaatgctttaggtgcttataaggtcagtcaaaagttttataagtcaagtttcattgtaatgagtattacgggtgtaattggctttctaattttatattttttagctccatacatagcagagttaactttatcgcgtaagaataatgcgaaaactggttggtcagttgctgatattacatggattataagaattatcagtatggtagttatatttataccagttttagctacatggagaggtatattccaaggatacaaatctatgggcccaacagctgtttcagaagtaacagagcaaattgcccgaattattttcatattagtaggtagttacttagctttaaatgtatttaatggtacagttctacaagcaaatggaattgccacgttcgcagcagcaatcggagctatagctggaattattacgctttggtattattggattaaacgtagaagaaatattaaagaaatggttgagtctgatacagctaatatgcatgtttcttatggaaacatgtataaagagattattgcttacagtattccatttgtaattgtaagtttaaattttccattatttaatttagtagatcaatttacacataacggggctctaagtttagttggcgtaaatccaaagttacaagatacattctttaacatgttaaatatgtctacaaataaaattgtaatgatcccaacatcattaagtgctggttttgcggtgagtttaattccatttattacaaaaacttatgaagagggtcgtctagaggaaatgcatagacaaattagaacatctattggtgtcctaatatttattacagtaccagctagtataggtattatggcattagcgcaacctttatttactgtattctatggttatgatcctattgttcatggtcacgaccctaactttgacggaagtagattactattctattatgcacccgtagcgatattaatttcactattaagtgtaactgcttctatgttgcaaggtattgataagcaaaaattaacagtctttgttattttaggttcagtagtcattaaattagcactaaactatccgcttattatgcttttacacactccaggtgcggtactaagcactgcaattgcattattatttgcgattggctgtaatttctatattttaaaaaaatatgcgaaattcaaattcagctatagttggattcaatttgctaaaatattcttatactccttcatcatgatgataggtgtagaggttgtatacttcattcttaaattattcctaaatcctactagatttggttacctcattataatagctataagtgttattgttggtgcgcttatttatggtggcattacaatcaagaatagactggctgacgaatttttaggtgatgttcctgaaaaaattagacgaaaagtgacgtttttaagatga

SEQ ID NO: 175 - DNA, 693 bp, Staphylococcus capitis
atgagaatagataaatttctagctaatatgggtttaggcactcgtactgaagtaaaacaattacttaaaaaaggtcttgtagaggctaatgagaaaaaaattaaaacacctaaatctcaaattgaccctgaaaccgacaaagtagtggttgatggtgaagagatttcatatgtagataacgtctatatgatgctaaataaacctaaaggttatatttcagctacagaagataacgctcatcaaactgttttagatttaatccctgaattttcacatttagggatttttcctgtaggaaggttagataaagacacagaagggttacttttattaactaatgatggacaatttaatcatgaattaatgagccccaaaaaacatgtatctaaaacttatgaagttatatctaaatatcctattaagcagtcagatatagaagcttttaaattaggcgtagaactttctgatggtaaggtcaaaccggcagaacttattaaaggaaatgatagactttcatatgttacgatttatgaaggaaaatatcatcaagtaaaacgaatgtttcatagtatcgaaaatgaggtattagaattgaaacgtgttaaaatcgccaatttagaattagatgaaactctaaattctggtgaatatcgttttttaaatgaacaagatttcgaaaatctaaaaaaatga

SEQ ID NO: 176 - DNA, 426 bp, Staphylococcus capitis
atgggtaaaagtacaaatttatttagaattgcattaggcattggtggcgctgttgcagcagtcgctttatcacgcaaagacagtcgtgacaaacttaaaaatgaatataacaaatataaagaaaatcctgaatcatacaaagcaaacgctaaagactttgctagccaaattggaaacaaagccaatgaaacgattcaagaagtaagaaataatccaagagattatgttgatcgtattaaaaatgatcctaaagcattctttgaagaagaaaaatctaaatttactgatttagatgacaaaaaagcagatgatttagaagaaggaaagtttgacgacgaaggtggcgcaacaacttctaataatctaagagttgtctctgaagatgatttaaaaaataataaaaatgctttagaagataaagaataa

SEQ ID NO: 177 - DNA, 1410 bp, Staphylococcus capitis
atgtggaaagaaaaggttctagaatatgaaaatcaaatgattgatgatcttaagggcttattatctattgaaagtgtaagagatgattctaaagcctctgaagatgcacctgtcggacccggaccaagacaagctttagattacatgtacgaattagctgagagagatgggttttcaacacatgatgtagatcatatagccggacgaatagaagctggccaaggagaagatgtcttaggtatcttatgtcatgtagacgttgttccggctggtgatggatgggattctgacccatttgatcctgtagtaacagacgatgcaattattgccagaggtacactagatgacaaaggacctacaattgctgcatattacgccgtgaaaatattgaatgatatgaacgtagattggaagaaacgtattcatatgattataggtacagatgaagagtctgattggaaatgtacagatagatatttccaaactgaagaaatgcctacattaggttttgcacctgatgctgagttcccagcgatacatggtgaaaaaggaatcactacatttgatttaattcaagatcaaataaatgaagatgtagatgaaccagattatgaattattaaactttgaatctggtcaaagatataacatggtaccagatcatgctgaagcccgtgttttagttaaagaaaatatgacagatgtgattcaaaactttgaatatttcgttgaacaaaatgagcttcaaggagaaagtaccgttgatagtggaattttaatcttaacggttgaaggtaaagcggttcatggcatggatccttcactaggcgtcaatgctggattatatctacttaaattcttgtcttctttaaatttagataaaagtgcaaaagattttgttgaattcaataatcgttatctctttgattctcattttggagaaaaaatgggtatgaaattccatacagatgtaatgggagacgttactactaatataggaattattaaatacgataataaagaagctggaagatacggtgtgaacttaagatatcctcagggatttgaatttgaagaggctgttgaaagatttactaatgaaattaaagacatcggatttagccttgaacttggaaaagttcaaaagccacattatgtagataaagatgatccatttgtggagaaacttgtcaaagcatatagaaaccaaactggcgatatgactgaaccttacacgattggtggggggacttatgctagaaacctagacaaaggcgtcgcatttggtgctatgtttgaagatactgaagatttaatgcatcaaaaaaatgaatatatgactaaaaaacaattgattaacgcaaccagtatttatttagaggcaatttatgctttatgtgtggagggataa

SEQ ID NO: 178 - DNA, 849 bp, Staphylococcus capitis
atgacaaaagtttttattaacggggaatttttgaacgaaaaagacgctaaagtatcttacgaagatcgtggttatgtatttggcgatggaatctatgaatatattcgtgcttacgaaggaaaattatttacagttaaagaacactttgaacgatttttgagaagcgcaaatgaaattggcctagatttaggatatacagtagatgagttaattgatttagttcgtcaattattaaacgaaaataatgtgaaaaatggtgggatttatattcaagcaactagaggtgtagcgcctcgtgaacattccttcccgacgcctccaacaaaaccagtaatcatggcatttactaagagttatgacagaccatatgaacaattagaaaacggagtatatggtgtgacaactgaagatattcgttggttacgttgtgatataaaaagtttaaatcttttaggaaatgtattagcaaaagaatatgctgttaaatataacgctacagaagcgattcaacatcgaggtgagacagttacagaaggtgcatctagtaacgtttatgcgattaaagatggtgcaatttatacgcatccaatcaataactttattttaaatggtattactcgccgtgtaataaaatggatcgctgaagattacggcataccattcaaagaagagacatttacagttgatttcttaaaaaatgctgatgaggttattatttctagtacctctgctgaagtcatgccagtgattaaagtggatggtcacgatattggcaatggaaaagtaggagatgtaactcgtaaattgcaagaaggctttaataagtacattaaatcacatagtatttaa

SEQ ID NO: 179 - DNA, 792 bp, Staphylococcus capitis
ttggagcagttttatcagttagggtggacgcttgattcagctggcggtgcttctggtgaagcatatatggctgaacaagatggacagaaattatttttaaaacgtaattctaatccttttattgctgcattgtctgcagaaggaattgtacctaaacttgtatggacgaaaagaattgaaacaggagaagttgttaccgcacagcattggaagaacggtagagaattaaaatctgatgaaatggatcaaaccagagtagcgaaattactcaataaaattcacagttctaaaccattgttaaacatgcttaaacgtatggaaatggaacctatcactcctgatatcatgttaaataaaattaatgcctctttatctagagaagttctaactcaccatgttgttagaaaagctttaacttatttagaagatcatattccaaatttagattcacgcttttttactgtagtacatggagatgttaaccataacaattggttattgtctgatagagatgaattgtatctcgttgattgggaaggggcaatgattgcagacccagctatagatataggtatgctgctttacaactatgttcctcaatctaaatggtcaaaatggtttgatacatatggcctagaagagagtatcaatttaaataaacgtatgaaatggtatacagtgattcaatccattggtatggttcaatggtatgaagaacaaaaacgatataaagatatgaatatgtggttgaaattcttaaatgaagttatgaatagcaacttatttatataa

SEQ ID NO: 180 - DNA, 645 bp, Staphylococcus capitis
atgagagttcgatacaaaccttgggcagaagattatttaaaagaacatcctgacctagtagacatggacggtactcacgcaggccgtatgtctgattggtttgacacagaacaaccaatatatatagaaattggctcaggaatggggcagtttataactactttagcttctaaacatccagaaattaattttgtatcaatggaacgtgagaaaagtgtcatgtataaagttcttgataaaacaaaagaacttaatttaactaatcttaaaatgatttgtaatgatgctattgagttaaatgaatattttaaagatggagaaatttcaagaatataccttaatttctcagacccttggccaaagaaacgtcatgcaaaaagacgtcttacatatcacacattccttgctctatataagcagattctcaaggacgatggagaaattcactttaaaacagacaatcgtggtttatttgcatatagtcttgagagtatgtcgcaatttgggatgtattttacaaaaatgaatttaaacctacatgacgaagatgatgaagataatattctaacagaatatgagaaaaagttttctgataaaggctcaagaatctatcgtatggaagcaaaatttcacaaggatttataa

SEQ ID NO: 181 - DNA, 825 bp, Staphylococcus capitis
ttgaaattagggcgatttactctccattatttaagaggtggaaacactaatatagatggtggggcgatgtttggtgttgttcccaaaccgttatggactaaaaaatacaaagtaaatgataagaatcaaattcatactccgacacatcctattttaattcaaactagtgataagaatattttaatcgatacgggtattggtaatggtaaactttcagataaacaacaaagaaatagtggtgttgaatatgagagcttaatagatgaggatttaaaacaattaggtttaacaacctctgatattgatatggtcttaatgacccatcttcactttgatcacgcttctggtttaacagataaagatggacatgcaatttttgaccgagctacacatttcatacagcaagacgagtggcatgaatttctttcacctaacataagaagtcaagctacttattggagttataatcaaggggattataaggaaaggttaattttatttgaaaatgagatagaaccttatcctggtataaagatgaagcacacaggcgggcacagtttcggtcactcaatcattacgattgaaagtgataatgaatacgctgtgcatatggctgatatattaccgactactgctcatcttaatccactttgggtgacagcttatgatgactatccgatgcaatccattagagaaaaggaacgattaatcccatatttcatgcatcataattattggttcttgttttatcatgatgaaaattattttgcggtaaaataccaagatgacttcaaaacaattgatacatttatttctagacaataa

SEQ ID NO: 182 - DNA, 318 bp, Staphylococcus capitis
atgatgaagtcttttaattttaaaggtatagcaatagtgatgcttttcgtaacatttataacttcactatgtttagcattttacttaacaaagcgaaaattatataatgccaatgacttattaaaagaagttaaaacgtattttagaaacgtaaaaggctcttatgtagtacatcaacctattgtcttgaataatgttaatcataaccaacctatctatcaaggtggtattacagcttatcatgatggtaaattagtagactatgagttttatgccgatgctaattctggtcaagttatcgatattatcgagttatag

SEQ ID NO: 183 - DNA, 1077 bp, Staphylococcus capitis
atgatgatagataatacgaaaactttagaacgcataaaacaattaacagagcttcatggagcccctggttttgaagatgaagtaagagattatatgaaacaagaaatgaacccctatgttgatgaatttgttcaaaataacatgggtggaatttatggagttaagaaatctaaacaaagcaatgcccctaaagtaatgattgctgcacatatggatgagataggttttatgattactcatgtaactgataatggtatgattcagtttactaatttaggtggcgttgctaatgatatatggcaaggacaaagactgaaagttaaaaatagaaatggcaatgagattgttggcgttgttgccaatattccaaagcactttagaacaggtaatgaagcggctccggaaataaaagatttaatgttagatatcggtgcttcatctcaagaagaagtacgagaaagaggtattgaaattggagatacaatcgttcctgacacatctttcactcaattatctgagtatcgttatatagctaaggcatgggataatcgttatggttgtgtcctcgcgatagaaatattagaattgctcaaagatatagaattagatgttgatttgtatgtaggcgctaacgttcaagaagaagttggattaagaggtgcaaaagcggctgctgagcaaattaaacctgatattgccttcgttgtagattgttccccagctaatgatataaaagggaaacaacaactctctggtgcactaggggagggcacattaattcgtattaaagatggtacaatgatattgaagccacgctttagagattatttattaaagttagccacagaaaatgatattaaacatcaatattatatttctccaggtggtaccgatgggggagagatccataaagcaaatgagggcatacctacagcagtgattggcgtttgcgcaagatatatacacagcacggatgcagtttttgatataagagattactactcagctagacaactattaaaagaatgtataactcatttaaatcatcatcaaatagaagtactaaaatttggttaa

SEQ ID NO: 184 - DNA, 312 bp, Staphylococcus capitis
gtgaaacaacttgatacagaacaacaatttgaagaattaaaacaaggtaatactgtctttgaatttaccgctgattggtgcccagactgcaaagttatagaacctgatttacctaaattagaaaacaaatataaagactttaattttgtttcggtagatagagacaaatttattgatatatgtattgataacgatatcctaggaatacccagtttcttagtttataaaaatggtaaacttgaaggtagctatataggtaaagaaagaaaatctattgatcaaattgatgcatttttagcaaaatatatttaa

SEQ ID NO: 185 - DNA, 864 bp, Staphylococcus capitis
atgaatgtcttccaaatgagagataaattaaaagcgcgtttaaatcatttagacgtagactttaaatttgatagagaagaagaaactttaagaatttatcgtacagataatcataaaggtgtcacaatcaaactcaatgctattgtcgccaaatatgaagaacaaaaagataaaattatagatgaaattgtttactatgtagaagaagcaattgctcaaatgggcgatcattctttagaaaaaatggaagatttaaaaatcatgccagttgttcgagcaacaagctttgacaagaagactaaagaaggtcattcatttatttatagtgaacatacagctgaaacgaatatttattatgctctcgatttaggtaaatcatacagattaatagatgaaagtatgttaaaaacagtaaatatgactgaacaacaaattaaagaaatgtcattattcaatgttagaaaacttaaaaataaatattctactgatgaggttaaaggcaatattttttatttcatcaattctaatgatgggtatgatgcaagtcgcatacttaatacgtcattcttgaatgaagtccaagaacaatgtgagggtgagatgttagttgcagttcctcaccaagacgtgttaattattgctgatatacgtaataaaacaggttacgatgtcatggctcatttgacaatggaattctttactaaaggtttagtaccaattacttcattatcatttggctatgacaagggacacttagaaccaatatttattctaggaaaaaataataaacaaaaacgtaatcctgatgttatacagagattagaagcgaatagaaagaaatttaataataaagataatcaatag

SEQ ID NO: 186 - DNA, 597 bp, Staphylococcus capitis
atgaacttattttataatccacaaggtgtaggagatgtagcttttttacagattgaacctacagatggtgcatttgattacaacaagaaagatgatgtagtcgaaatcactcaagatgggcaagttgttggtttcaatatctttaacgtatcagataaaataaaaatagaaggaaacggtcatatcaaattaacttcagaaattattgaggcgttacaacaatctattaataattctggatttaactatcaattagatactgatttatcacctaagtttgtagttggatatgttgaaactaaagaaaaacatcctgatgcggataaattaagtgttttaaaagttaatgttggtaatgaaactttacaaattgtttgtggtgcacctaatgtagcagctgaacaaaaagtagtagtagctaaagtaggtgctgtaatgccaagtggaatggttatcaaagatgctaaattacgtggtgttgattcaagtggtatgatttgttcaatgaaagaattagatttaccaaatgcacctcaagagaagggtattatggtattaaatgatgattatgaaattgggcaagcattttttgaataa

SEQ ID NO: 187 - DNA, 3684 bp, Staphylococcus capitis
atgagctggtttgataaattatttggcgaagataatgattcaaatgacgacctgttacgtaaaaataaaaaaagaagacagggcactcaatctcaacaaaataatcaagactcattactgcctcaaaacaatgatatttataatcgcccaagaggtaaatttagatttcctatgcatgtatctgaagaagcttcatataacgatctagataatgataaaaaatatgaaacttctgaatacaatgctaattatggttcaagaacatatgacacacaagatgatgactctacacgtaatttagttgataattctggaaaaagacatcgccgtagacgttcatctcaaatgcgtgagcatgatcatattaatcaacattcaaatcgtaatgaaaatcaaatgcatcatcgcgagtcaagtcgttctaaaagaagttctaataacagtcaatctgatgattatcgttcatataataataagtcaaattctcgcatgaaattacaatctgaacgtttgaaatctaacagtaaactccaatcctctacgaattctgaacttacatatcatggcggtagtttcaaagcgagcgacgttccgtcagctatttttggaactaagcaacgacgtcctttagaaaacggagtgattccacctaaacaagattctctacaaaatagcaataatgcaactagtaaatcacaaaggaatcaacctaaaaatgcacatgatgtaaacatgtatcgtcaatctataaataaacaaatgggctatcaatctgaagaatcatcatctaaagataatcaacctcaaccaaaaatccatgccaaaacttcagatacagaacagacacagaaaacatcttcaagtcatcttcaatctaacaatcattcagcgcaaaagtctgaaggacgaacacctaattattctaaaaaagataacactgttaatattgaaaatatctatgcttcacaaatcgttgaagaaatcagacgtgaaagagaacgtaaagtccttcaaaaaagaagatttaaaaaagcgcttcaacaaaagagacaacaaaataaagacaatgaagaagatcaaattcaaaaagcaattgatgaaatgtacgcgaaacaagcacaccaatacattggtgaaagctctctagatgaagaccataatgatgaggatatgaatgacggacagtctaataatgtgtcagaaagaactacaacaacttcattcaaagaagaccaaattggcgcttcgtcgtacaattatgaagaaatcaaccttgatgatgaacaacatattcaaaaggtaaatgacgaagatgtgcatgtaagtgatgcctctagcgaaaatgctactgaggaaactagtgttgataaagcacacaacgataatgtagaggatgctcaattccaagaattaaatgatagccaacaaccatcagaatcgacttctcaccttgaaaatgaaaattcacaacagcaagaacactataataatgcaattaaccaaagtgttgataatgagaaggagtatgctaaacatagacagaaaaacgatgatgattttaaagaatcagcttcttcattaagtacaagtgagataaatagtgatagttcttcgtcgatagtaaatgcttcaaataatgatactatggcttccacggttaattcaaaacatagtatgacagctaatgaaggtcaatcatttggtagcagtgtggctcaagaatcggaattaaatagaccaacaactcaatcgcaatcaaaagatgtttcaacacataaaccgcgatttgcaggtagtaaaccatttaatgtggtaatgacgccttcagataagaaacgtatgatggatagtaaaaacaatagtagaattaatgttcccgaattaaaacctgaacaacaaattgatcaatctactgaaatggattctagtgagagtcaatttacttctgagaataatttaaatgaaagtgaaacaaatcaacaaacttcacatgagtaccaaactcaatctgaatcaaacgacgacggtattacaggtgtgtctacaagtgacaatgttaacaataagcatattcaacagcatactcaaagcacatctcataatgaaactagtggaagaagtagcggtaattattactcagaaactgtaaaagataatgatgacactaacctaaataataataaaacttctgcaacaggaattactcatcaggaagtaaaagaacaagcatccaattcttataaaaaccaacaagagtcacctcaagataagcaacaaggaattagaaaaggacctaatattaaattgcctagctttgatttattagaagaacctgaaccacacgaagttgatgaagaatggatagaagagaagaaacaggaattaaatgatgcactttattatttcaatgtgcccgcagaggttaaaaatgtaacagaagggccaagtgttacaagatttgaattatctgtagaaaaaggtgtgaaagtttcaaggattactgcacttcaagacgatattaaaatggcattagctgccaaagatatacgtattgaagcgccaattcctggaacaagtcttgtaggtattgaagtaccaaatcaagacccaactaaggttaacttacgttctattatagaaacacctaaatttaaaaatacagagtctaaattaactgtagcgatgggttatcgaattaataatgaaccattattaatggatatcgctaaaacgcctcatgcacttattgccggagcaacaggctcaggtaaatcggtttgtatcaatagtatcttaatgtcattattatataaaaatcaccctgaagaattacgcttactattgattgatcctaagatggtggaattagcaccatacaatgatttaccacatttagtttctcctgtaattacagatgtgaaagctgctactcaaagtttaaaatgggcagtagaagaaatggagaaacgctataaattatttgctcaatatcacgtaagaaatattactgcatttaataaaaaggcaccttatgagcaaagaatgccaaaaattgttatagtaattgatgagttagccgacttgatgatgatggcacctcaagaagtagaacaatcaattgcacgtattgctcaaaaagcacgtgcatgtggtattcatatgttagtggctacacaaagaccttcagtaaatgttattacgggtctgattaaagcaaatattcctactagaattgcctttatggtatcttcaagcgtggattcaagaacaattctagatagtggtggcgcggaacgcttattaggatatggtgatatgctatatctaggaagtggaatgaataagccaattcgtgttcaaggtacattcgtttctgatgaggaaatagatgatgtcgttgactttattaaacagcagcgagaacctgaatacttatttgaagaaaaggaattattaaagaaaacacaatctcaagcacaagatgatttattcgatgacgtgtgcgagtttatggtgaatgaaggacatatatcaacttcattgattcaaagacatttccaaattggttacaatagagcagctagaattatagatcaattagagcagttaggttatatatcaggtgctaacggttctaaaccaagggatgtttatattactgaagcggatttaaataaagaataa

SEQ ID NO: 188 - DNA, 1314 bp, Staphylococcus capitis
atgacgcactatcattttgtcggaattaaaggctccggcatgagttcattagcacaaatcatgcatgatcttggtcatgaagtccaaggttcagacatagaaaaatacgtatttaccgaagttgctctacgtaacaaaggcatcaaaattttaccttttgatgttgaaaatattaaagaaggcatggttgtcattcagggtaatgcattttcagacaatcatgaagaaatagttaaagctcatgaattaaaacttgatgtcattaaatatcatgacttcctaggtcatgttatcaatcaatatacatctgtagctgttacaggtgctcacggtaaaacttcaacaactggtctattgtcacatgttatgaacggagataaaaagacatcattcttaattggtgatggtactggcatgggattgcctggaagcgattattttgcattcgaagcttgtgagtaccgtagacatttcttaagttatcatccagattatgcgattatgacgaatattgattttgatcatccagattattttaaaaatattgaagatgtctatgatgctttccaagatatggctcataacgttaagaaggccataattgcatggggtgatgatgactatttacgtaaattagaggctgatgtaccaatttattattatggttttaaagagactgacgatatttatgctaaaaatattcaaatcaccgaaaaaggtactcagtttgatgtttatactaacggggaattttatgatcagttcttatcaccacaatttggtgaccataatattttaaatgcgctttcagttattgcgattagttatttagaaaagatgaatgttgacaacattaaagatgcattagtcacttttggtggtgtaaaacgtcgctttaacgaaacaaaagtatctaatcaagtattagtagacgattacgctcaccatcctagagaaattagtgctacaattgaatcagctagaaagaaatatccacagaaagaagtagtagctgtcttccaacctcacacgttctctagaactcaagcttttctagacgaattcgcatctagtttaagtaaagcagatcgcgtattcttatgtgaaatttttggttctattagagaaaatacaggtgaattaactatacaagatttaattgaacgtattgacggctcgtcgctaatagatgaaaatagtattgacatattaaaagaatttgataacgcagtcattttatttatgggcgctggtgacattcaaaagttacttaaagcttatttagaaaaattaggcgtaaaaaatgagttttaa

SEQ ID NO: 189 - DNA, 525 bp, Staphylococcus capitis
atggattggattttaccaattgcaggaattatcgctgcgatagcgttcttaattttatgtatcggtatcgttgtagttttaatttctgttaagaaaaatttagattacgtggctaaaacacttgatggtgttgaaggtcaagttcaaggtattactcgagaaactactgatttacttcataaagcaaatcgcttaactgaagatattcaaggtaaagtggatcgtttaaattctgttgtagatgctgttaaaggtatcggcgactcagttcaaactttaaatggttctgtagaccgagtaactaactcaattacgcacaatatttctcaaaatgaagataaaatttctcaagtagttcaatggtcaaatgtggcaatggaaattgctgacaaatggcaaaatagatactaccgtagaggaagtgcaaactacaaagcaaacactgtagctgacgatgcaaatcatagctattcaaattcagaatacaattctgatcatagttacactacacgtgttaacaaataa

SEQ ID NO: 190 - DNA, 1509 bp, Staphylococcus capitis
atggaacactataaccgcgataattttgagagaaataatacaggtcgtgatttatataaccgtacgtcacgcaattcatcaaatacgcctaaacgtaaagacttcgtagtaagttttattgctagtgcaatcgttggctctgctttaggtcttttttataaaaataaagtatataaaaaaacagatgaattaagagataaagaacaagatttaagaaataaagtacttaattataaagaacaggcagaaaacaccgttaattcagtaagagatagagtagagaactttagaaatcgttctaaagatggtttaacttctgatgaattacaagcacaaaaagtagcaatccaaagagaagttagtgacaataatctatcagatcaatcacctgaggctcaagaaattcaagaagctaaattagaagctactaaagacgactttgaacaacaaaataaaccatcagctacagaattaacagctcaacaaaatgcgattcaacaagaatcaaaattagctgaccagtcaccagaagcacaagagatacaggaagctaaagccgaagcacaagaacaacaaaataaaccatcagcaaaagaattaacagcccagcaaaatgcgattcaacaagaatcaaaattagctgaccagtcaccagaagcacaagaaatacaggaagctaaagctgaatcacataaggaagatagtcaagaagcatcacatatcgaaagtgataaaaaaccatcagctgaagaaatagctattgctcaaacagctattaaaaaagaatcaagtgataatgatttagctgatcctactactaaagaaggcaaaaatgaagatgcccatcaaaaaacgcaagcaaaaaatttagctacagctgctaaaacaaaaaacgataaaatcactaatgacagccaagttgctaaaaatacaaatgatctcacaagtgaatcaagtgtacctaaatctgctgacaaagaggtacctaatttagttacaaagaaaaatgagaatgacacaggttcaagtgatggttcatttgcaaatcgactagctacagctgcaaaagcaaaaaaatctaaactaactaaaggatctaaagaatcacagctcactgaagcattattagctgaaccagcattacctaaaggtaagaaaaataataatgtacctaatcttgtaactcaaactactaagcaatcaacaaactctaaaaaaggtcaatcttctacctctaaagaagataaagtaaataaatcacaagaaagtgcgacattcgataaaggcgtagttacccatgagaattctataaaaggtactcaaaaatctaatagtaaaggtaacaaaacaaacgcaaaatctaataaaaaggcaaatacaagtaaaaaacaaagtaatacgcctaaacaaaacaacagaactcaaaaacaacaaaatcaatcaaataataatcaacaaaaagttgagaaagcaaatagcaagattgaaaaacgtacattcaatgattaa

SEQ ID NO: 191 - DNA, 114 bp, Staphylococcus capitis
atgtttacagaaaatataaaattttctaaaaacgtcaactacaatatacaattttgtgaaaacttttcaacatttaattatgaattagaaaataaaaaagctgagacaatatga

SEQ ID NO: 192 - DNA, 1092 bp, Staphylococcus capitis
atgactaataaattggaagaatatagagaggaaattgtctcattaaactatcaaattttagatttgttatctaaaagaggcgagttagctcaaaaaattggagaagaaaaaattaaacaaggaactcaagtatatgatcctcaacgtgaaaaagaaatgattaatgatttattggatcgaaatgagggtccatttaatgataatgtaatcaagcagttgtttaaagaaatttttaaagcctctactgatttacaaaaatctgaaaacgaaaaacatctatacgtatcacgaaaattaaaacctgaagatactattgtgaaatttgataatggtggcattattggtgatggtaataaatcatttgtatttggaccttgttcagttgaatcacaagaacaagtagatgctgttgctaaagatttacaatctagaggagaaaaatttattagaggtggagcatttaaaccacgtacatctccttatgatttccaaggacttggtgtagaaggattaaaaatccttaaaaatgtaaaagataagtttaatcttaatgtagtcagtgaaattgtaaatcctaatgactttgaagtagcagacgaatatttagatgttttccaaattggtgcacgtaatatgcagaactttgaactgttaaaagaagctggtcgcacaaacaaaccaattcttttaaaacgaggtctatctgcaacaattgaagagtttacttatgcagctgaatacattgcttctcaaggcaacagaaatattattttatgtgaacgaggaatacgtacatatgaaaaggcgactcgtaatacacttgatatttctgcagtacctattttaaaacaaggtacacacttaccagtaatggttgatgtaactcatagtacaggcagaaaagatattatgctaccaactgcaaaagcagcattagccgttggtgctgatggcgtaatggctgaagttcatcctgatccatcagttgcattaagtgatgctggacaacaaatggatttgaatgagtttaatgatttctacaatgaacttaagccacttgcagatatgtataatgctaaaaagttaaaataa

SEQ ID NO: 193 - DNA, 990 bp, Staphylococcus capitis
atgactgtaacgatttatgatgtagctagagaagctcgtgtgtcgatggcaactgtatcacgtgtagttaacggcaatcaaaacgtaaaacctgaaacgagaaacaaagtcaatgaggtcatcaagaagctaaattatagacctaacgcagttgcacgaggacttgcaagtaaacgtactacaactgtaggtgtgataattccagatatttcaaatgtttattattcacaactcgcgcgaggtcttgaggatattgcaacaatgtataaatatcactcaatcatctccaattctgataatgaccctgaaaaagagaaagaaatctttaataatttattaagtaaacaagttgatggtattattttccttggtggtactatttcagaagaaattaaagatttaattaatcaatcttcagttccagttgtggtatcaggaacaaatggtaaagatgatcatattgcatcagttaatattgatttcaaacaagctgctgaagaagccactcaacatatgattgaaaaaggtgctaagaaatttgcacttgttggtggcgattattctaaaaaagcacaagatgatgtattacaaggtttaacaaaagttttaaatcaacatcatttagaacttgatgaggcattacatttctctggtaaagaaagctataaagagggaatcaaagcatttgaaaaattacaaaataatatgcctgatgctattctttcaattagtgacgagcaggcaattggtattttacacagcgcattagatgctggggttaatgtacctgaagacttacaaattttaagctttaacaacacacgtttagtcgaaatggtacgcccacaactatctagtgttatacaaccactatatgatatcggtgcagtaggcatgagattattgacaaaatatatgaatgaagaagacattgaagaaccaaatgtaattcttcctcacagaatagaatatcgtggaacgactaattaa

SEQ ID NO: 194 - DNA, 1173 bp, Staphylococcus capitis
atgccaaataaaaatttaagtactggttatgtttattctgaagatctcttacaataccgctttagtaacgaacaccctttcaatcaaatgaggcttaaactaacgactgagttgttaaaggacgcgaactttttaaaggatgagcatatcgtaataccacgtatagctacagatgaagaactcgcattaattcatcaatatgattatattcaagctattcgtcacgcatcacatggtatattaagtgaatacgaggcaaagaaatatggactcaatggtgatgatacgcttcaatttaaacatatgcatcgtcatagcgctcggattgtaggaggagcgcttaatttagcggattgtatcatggatggaacatttattaatggatgccatctcggtggtggtttacatcacgcactacccggacgagcgaatggcttttgcatttataatgatgttgctataactgcaaagtatttagttgaaaaatatcatcaacgcgtcatggttattgatacagatgcacatcatggagatggtacacaatggagcttttatacagacaatagaattatgacttattccattcatgagacaggaaaatttttattcccgggctctggtcattatactgaacgtggtgaagatataggatatggttatacggtaaatgtgcctcttgaaccttatactgaagatgcctcttatctagaggtatttaaagaaactgtagaaccattagttgcagcttttaagcctgatatcattttaagcgttcatggtgtagatatccattatagagatccacttacacacatgaactgtacattaaatagcctatattctattccatatataatccaagatttagcaaaacgctattgtaatcataaagtattaatgttcgggggcggaggttataatatttggagagttgtccctcaagcttggagtcacgtctttttaagtttaatcggggagcctattcaacaaggttacctcccgttaaattggattaataaatggaagttatatagtactgtcaaactaccaaaacgctgggaagatcgtttaaatgattatgcttatattccaagaactaaagaaatatctgataaaaatcttagaattgctaaacaggttgcaagttggtatgaacgttatagcgatatttaa

SEQ ID NO: 195 - DNA, 633 bp, Staphylococcus capitis
gtgagacatgttaaaacttatgtaactaagaatcttaaactaagtgacactacttttgtcattgaaggacctatttcgtacaattttttgaaaacgcttactttagataaccagcttaatgcattccgcctacctcaggatcagtatgaagcacttttagagattactgaactacctgaaggtcgtgtctatatcattcgtcaagacaagcatatcgtgggatatgtgacatatcattatcctgatgaattcgaaagatggtccgagggtcatttgacctatttaattgaactaggagccatagagataagtcctacataccgtcacttacatttaggtggcgagcttattgcgactagtttatctgcggatgaatttgaagattatattgtattgactactgaatattattggcattgggatttggatcaagcacagctagatgttttcgagtataagaaactgatgcaaaagttaatgtctaaaggtggattagaaatttttgctacagatgatcctgaaatcactagccaccctgctaattgtttaatggcacgtattggcaaacgtatcactttgtcacaacaacaagcttttgacgatcttagatataaaaataaattcttcttttga

SEQ ID NO: 196 - DNA, 1710 bp, Staphylococcus capitis
atgaaagttgaagtgtataaaagagaaccaggggattataatttagagaattataatgaagcatatcaaaatttcgattggaaagagatagaaaaatcattttcttggtatgaaacaggaaaaatgaatatggcgtatgaatgtatcgatcgtcatgttgataacggaaaaggggaaaaaatagccttaaattataaagatgagaaacgtaaagaatcatacacttatagtgatttaaaaaagttatcaaatcaagcagctaatgttcttaaagataaggcggatgttaaaaaaggagatcgcgtttttatctctatgtctcgtacacctgaattatactttgcgttcttaggtattttaaaaattggtgcgattgtgggtccattatttgaagcgttcatggagaaggctgtagcagatcgtttagctaatagtgaagctaaagtagtcattacgaataaagcattacttcctagaattccgaaagataaattacctcatttagaaacaatcattgttgtagatgatgacgttgatggtgaatacattgattttaataaagaaatgggacaagctagcgaggaatttaatattgagtggctagcgccagatgatggattaattcttcactatacatcaggttctacaggacaacctaagggtgtattgcacgtccaacaagcaatgctattacattatatctcaggaaaatacgtattagatttaaaagaagatgatgtttattggtgcactgctgatccaggatgggtaactggtacatcttacggagtctttgctccttggttaaatggggttacgaattgcatagccggtgggcgattctcacctgaatcttggtatagcatgttagaagaatttaaagttacgatatggtataccgcaccaacagcacttcgtatgttaatgagtgctggagacgatatcgttgaaaaatacgatttatcatctgtacggtcaattttatctgtaggagaaccactaaatccagaagtaataaaatgggcgaaagatgtctatgataaacgtgttttagatacatggtggatgactgaaacaggtggacatatgattgtaaattacccaactatggatattaaactaggttctatgggtaaaccactacctggtattgaggcagcaatcatagatgatgaaggtaatgaactcccacctaatcgtatgggtaatttagcaattaagaagggttggccttctatgatgcattctatttggaaaaatcctgaaaagtttaactcatactttatcggagattggtatgtttctggtgactctgcttataaagatgaggatggatactactggttccaaggacgagttgatgacgttattatgacagccggagaacgtgttggaccatttgaggttgagtcaaaattagtagaacatgaagccgtagcggaagcaggtgttattggtaaacctgatccagttcgtggagaaattattaaagccttcgttgcattaagacaaggatatgaaccatcagatgatttaaaagaagatatccgtaaatatgttaaagaagggttatcagcacatgctgcgcctagagaaattgaatttaaagacaagttgccaaaaacacgttcaggtaaaattatgagacgtgtgcttaaagcttgggaattagatttagatgcaggtgatttgagtacaatggaagattaa

SEQ ID NO: 197 - DNA, 1668 bp, Staphylococcus capitis
ttggcacatttatcagatttagagattgcaaatcaatcacaattaaaacctattggagaaattgctgataaagcaggtatatctgcagatgcacttgaacaatatggacactataaagctaaaatagatattaatcagattaaacctagagagaaaaaaggtaaagttgtattagtgactgctatgagtcctacgccagctggagaaggaaaatccacagttacagtaggtttagcagatgcatttaatgagttaaaacaaaacgtgatggtcgcattacgtgaaccagcgcttggaccaacttttggtattaaaggtggtgccacaggtggaggatatgcacaagtattaccaatggaagatattaacctacatttcaatggtgattttcatgcaataacaactgcaaataatgcattatctgcatttattgataaccatctacatcaaggtaatgaattaggcattgatcaacgtcgtatcgagtggaaacgtgtattagatatgaatgatcgtgcacttcgttatgtaaatgttggattgggtgggccaacaaatggtgttccaagagaagatggttttaatattacagtggcatcagagataatggcgattttatgcttaagtcgtagtattaaggatttaaaagaaaaaattagtcgtattactatcggttatactagagatcgtaaacccgtaacagttcaagatttaaaagtagaaggggcacttgcgttaatacttaaagatgcaattaaacccaatttagttcaaacgatagaaggtacaccagcacttgtgcacggtggaccatttgctaatatcgcacatggttgtaactctatattagctactgaaacagctaggaatttagcagatatcgttgttacggaagctggcttcggttcagatttaggtgctgaaaagtttatcaatattaaatcacgcgaggcaggctttgaaccatcagcggtagtggtagttgctacgattcgagcactaaaaatgcatggtggtgttgctaaagatcaacttaaagaggaaaacctagaagcggttaaagcgggtattgtaaaccttgaacgtcacgttaacaatgtgaagaaatatagccttgaacctgttatcgctttaaatgcatttatacatgatacggaagcagaaactgagtttgttaaacaatgggctcaagaacaaggtgtacgcattgcgttaactgaagtatgggaaaaaggcggtaaaggtggggttgatttagctcatcacgtacttgaagtcattgatcagcctcaaacatttaaacacttatatgaattagaacaaccacttgaaagtaaaattgaaacaatcgttaaagaaatttatggtggttcaaaagttacgttcagtagtaaggctcaaaagcaattaaagcaatttaaagaaaatggatgggacaattatccagtgtgcatggctaaaacacaatattcattcagtgatgatcaaacagcattaggtgctccaacagattttgaaattacaatcagagaactagaagcaaaaacaggtgcaggatttattgtagcgttaactggtgcaattatgataatgccaggtttacctaagaaaccagctgcacttaatatggatgttactgatgttggacaagcgattggactattctaa

SEQ ID NO: 198 - DNA, 915 bp, Staphylococcus capitis
atgcacaacaataagaatatttcacaatctacggatagatatgtgcaattcgaacgtatttataagaaaatcaaacatatttgtgtaggcatttttgttgtattctccataattggaatcgcattgattttagcattagtgatatacttccatcatttaactaaggaagcgtcctctattagtgataaagagttaaagcagaaagtgttacaccttccaggcgatgaactaataaatcatagtaacaaacatattttagaagaatatgatcattctcttaatactctgattgtgggacctaaatctgtaaatccgaatgtgataaaagcacttacctcatctgaagatactctcttctataaacataatggtatcttacctaaagcattaatgagagcaatgtatcaagatattattgatgcaaatgaaacatcaggtggtagtacgattacacaacaactaattaaaaaccaagttttaacagataaaaagacatatagtagaaaagcaaatgaaattattttggctatgagacttgagaaacttctatctaaaaacgaaatcatatatacttatctgaatattgttccgtttggtcatgattataatggggccaatattactggtatagcatcagcttcatatagcttatttggtgtagctgccaaagatttaaacattgctcagtccgcttatttagtaggactcttacaaagtccttatggttatactccgtatgataaccaaggtaatttaaaaagtaatcggatattacattatagtattcaccgtcagcgttatgttttaaagcgtatgcttgtggagcgcaaaatttcaaaaaaacaatacattaaagcgaaaaagtatcgtattaaatcacacttactcactcaccctcctcaacaaggtgcgtag

SEQ ID NO: 199 - DNA, 1263 bp, Staphylococcus capitis
atggctaatgcattaattgaagatttaaaatggagaggtttaatatatcaacaaactgacgaacaaggtattgaagatttattaaataaagaacaagttactttatattgtggtgctgaccctactgcagatagtttacacattggacatttactaccattcctaacattaagacgtttccaagaacatggtcatcgtccaatcgtgcttatcggtggcggtacaggtatgattggtgatccatctggtaaatctgaagaacgtgttttacaaactgaagaacaagtggaagctaacgtacaagggttatcaaagcaaatgcatcgcttatttgaatttggtactgataaaggtgcggttttagtcaacaataaagattggcttggacaaatatctttaattagctttttacgtgattatggtaaacatgtaggcgtcaactacatgttaggtaaagattccattcaaacacgtttagaacacggtatttcttatactgaattcacttatactattttacaagctatcgatttcggtcatttaaatcgtgaattaaattgtaaaattcaagttggtggctcagatcaatggggtaacattacaagtggtatcgaattaatgcgccgtatgtacggtcaaactgaagcgtttggtcttacaatcccattagtaactaaatctgacggtaagaaatttggtaaatcagagtcaggcgcggtgtggctagaccctgaaaagacaagtccatatgaattctatcaattctggattaaccaatctgatgaagatgtgattaaattcttaaaatactttacttttttagataaagaagagattgatcgtttagaacaatctaaagaagaggcgccacatcttcgtgaagctcaaaaagcattagcagaaaacgtaactaaatttattcatggtgaggaagcgctaaatgatgcgattagaatttctaaagctttatttagcggtgacttgaaatcattaactggtaaagaattaaaagaaggtttcaaagatgtacctcaagtttcattatcttctgaaacaacaaatattattgaagcgttaattgaaacaggtattgctacatctaaacgacaagcacgtgaagatgttaataatggtgctatctatattaatggcgaacgtcaacagtcagttgattatgaattaagcaatgacgataaaattgataatgagtttacaattattcgtcgtggtaagaaaaaatatttcatggttaattatcaataa

SEQ ID NO: 200 - DNA, 465 bp, Staphylococcus capitis
gtgaataaagaacaattgatgatgaaaaattttcgggatatctttaataaaattgcttggctaaacaaaggaaaaatggaagaagcgcttaaaggaaataaaccaagtgaagtgcattgtattgaagcaattgaagagcttaacgaacctaatgtaaggcgattaacagaagcattatttatgacacgaggcgcgataagtaaacttacgaaacgtcttgagcaaagaggcttaatagagagttataaaaatcctaataataaaaaggaagtttattttcggttgaccgaagcgggtcagcaaatttaccaaacccatgaagaacttcataaagaatttcaacgtagggatcaagaggtgtttgataatatcaccgaagacgaatttaaatcaatgatgcgttttgccgaaaaatataatgcgcaccttgatcatgaaataaaaaagcaaggattattacattaa

SEQ ID NO: 201 - DNA, 1419 bp, Staphylococcus capitis
atggcaacatctcattctcaatccaatggtgtcactaaagaggtaatgactgcagcttgggcaattgctttaggcgccatcgctccaatgttagattcaacaatgataaatattgctattaaacaacttaatcatacatttaatagttctctagatattgttcagtggggaattacaggttacgtattagcgctcgccattgctgtaccattgtccggttggtttatgaatcaatttaatggaaagaaggtttttattttagcaatggccgcttttggcttaacttctatattagctggagtgagttggaatattatcgtatttaatatctttagaattttacaaggatttagtgcgggagttatcacaactttaatgtttacattacttgtgaaaacagcagggcaagaccatattggtaaggttatggcagtggttagtacgcccatgatcttcggtcctatattgggccctgttcttggaggatttattatccattttgcgagctggcgttggatattttttattaatatctttatcgttatcattgcaataccattgatgaataaatatgtacctcaatttgaaccatttaataaagacagtaaattagatgtaattggaatattattattatcatttatgagtatcagcataatctatggtgtgacgaaagcttctgatgatggtacattctttactttgaaaccaatgatatatattatcatgggaatacttttaacgattacttattgtatttataatcgtctaagacattatcatacagttctgccaatcaatttatttacacaaaagaactatgctgcgtcatctattggattgttacttgccaatataggaattatgggaccaatgttaattattccattattcttccagaactttaaacattatactgctattgaagcttctttagctttaatacctcaaggtctaggtatgttaattacaagaccttatattgggaaaatgattgaccaaatcggtgcgaaatatgttgtcatagtgagcattattatagccatgtttggtacagtgccattgatgttcgtttcaaatcacacgcatattgtatggttgtctttgatactttttataagaggatgtagcgtaggcgggataaatcttggtcttacaagcgatgcttatcaaggcattgacgataaacaaattgccgaagcgggtgtagggattaatatgattgaaaatattggttctagtctaggtacagccattatcgcaactgtagtagcatctatgttagcactaaatcatccatcaatttttcaaagtttaagagcttatcatgcaggtttcttagtctcaactatagcattgttacttatcgttttacctgcgttatttcttacgcataaatccaatgaaattgaattataa

SEQ ID NO: 202 - DNA, 1248 bp, Staphylococcus capitis
atgtcagatcaaacacaacaacatcagtcacacgacaattaccaacgtccttcatacaataaaaagcccaaatttccttggtttaagacaattatagttgcgcttattgcgggaattattggtgcactacttgtattaggtataggaaaggttcttaatcatactgttctcaatcatgatggtgcatctgttcaagaggtatcaaatagtaagggcggtaaccaacttgatggtaaaagtgataaatacacgtcggttcacgatatgattaaggatgtgtcaccggccatagttggagttattaatatgcaaaaatcttcaagcttagatgatttactaaaaggcaaatcatcaaaacctgaagaagcaggtattggttctggtgttatctatcaaatcagcaatggttcagcttacatcgttacaaataatcatgtcgtcgatggtgcatccgaaattaaagtacagttacataactccaagcaggtaaaagcgaagttaattggtaaagacgctcttactgatattgcagttcttaagattgaggacactaaaggtattaagtctatcaaattcgctaactcatctaaagtacagactggagatagcgtcttcgcaatgggtaacccacttggtttagagttcgccaattcagttacttcgggaattatttcagcgagtgaacgaactattggtgccaatacatctgcaggtaatactaaagttaatgttttacaaactgatgcggctattaaccctggtaactctggtggtgcgttagttgatatcaacggtaatttagtgggtattaattctatgaaaattgcttccgagcaagtagaaggtatagggtttgctataccaagtaatgaggttaaagtcacgattgaacaactcgttaaacatggtaaaattgaacgcccttctataggaataggattaatcaaccttagtgaaatacctgaatcttatcgtaaagagttgcatacaacaaaggattctggggtttatgttgctaaagcggataatagtaataatgttaaaaaaggagacattattactcaagtagatggtaagaaagtcaaggaagatactgatttaagatcatatctttacgaacataaaaaacctggtgaaacgattaccttaacagtcattagagatggcaagactaaagatattgaagtgaaattgaaagaacagacacgaacttcatcatcacaatctcaaagtcaatttgcgcaataa

SEQ ID NO: 203 - DNA, 624 bp, Staphylococcus capitis
atgtacagcattataagtaaaattttagacgtcattttagtcaaaatggctaaatcgttatatgtaattggaaaagaaaatattcctaaagatagtaaatatgtagtgacttgtacacatgaaagctataatgaagtgattatgttaggtatggcattactaccaaatcaaattcattatatggctaaaaaagaattatttagtaataaatggggcggtaaattcttaagctctttaaatgccttccctgtagatagagagaatccaggtccaagcacattaaaaagacctatcaatctacttaaagaacataaaacagttggtatcttcccaacaggtcaccgtacatctatggaaggtgcaccattaaaacgtggtgctgcaactatagcaatgttaggtaaagcaccaattttaccggctgcatatgtaggtcctaaaaaaattcatggcttaattacaggacaagcgatgataaaaattggtgaaccaattgatacaactgatattccaaaagatttaaaacgaaatgaaaaagtagaatatcttactaaagaaatagaaaaacgcacaaatcaattacaaaaagaactcaatgagattgctaaacgtttagaggactaa

SEQ ID NO: 204 - DNA, 1434 bp, Staphylococcus capitis
atgctacctgttgcagtattacctgctgcagcaattattgtagggataggtcacgtgctagacgcgctatcaattttgccacaagttgcaatgttctttacaagtgtaggggaaacgatactcgaacaactaggaatattatttgcgattggtgttgcgataggtatggctaagaaaaatgatggtgcagttgcattagctgcgactttaggatttttcatagtcacagtcgtgctatcgcctaaaaaactagcacctctattacaagtaaaaacgacagatgttaatagtgcttttgagcaaatgacaaatgggaatgtctttgtaggaattttaattggtttaattgcagcattttgctataacaaatttagtgaaactgaattgcctgtggcactgtcattctttagtggtaaacgtttagtacctatcatgaccgcttttttctgtacatttttagctattgttttactttttgtatggccaccagtatttaacgcaattgttacttttggtaaatggatagtaggtatgggaccatttggtgcattgttatatggtttctttaaccgtttgcttataccaactggattacatcatgcattaaataatgtattctggtttgatactgccggaatcaatgacataggtaaattccaaagtggtaaagatgcagttaaaggtattactggtcgttatcaagcagggttctttcctgtaatgatgtttggtataccagcggccgcgcttgcgatgtatcatacagcgaaatctagtcagaaaaaacaagtctacgcttggttcttagcaagttctatttctgctttctttgttggagtaactgaaccaattgaatttgcttttatgtttgttgcaccagttttatttgtcattcatgctgcgttaacagggttatcgctatttatagcggctatctttcactggacagctggtttctcatttagcgctgggttgattgactttgtcttgtcactcgttaacccagtgtcaaataagccatggatgttactagttcaaggtatcatattctttattttatattacgctatttttagatttgtcatccaagtgtttaacttgaatacaattggtcgaggggataatgaacttgcggatccaacggctaacgctacgtctgaaaataattctgctacatattcagaatctaaaggcaaatactatcatacagcctcacaaattttagatggactaggcggcagtgataatatttcaagtttaacaaactgtgctacgcgtttaagaatggaattaaatgataattctattatagatgaacagaaaattaaaaatgcaggtgcagtaggggttactaaaagtggtaaacactcaacacaagtgattattggtacacatgttcaacaagttgcagatgaaatagagaaacaaatgtaa

SEQ ID NO: 205 - DNA, 1128 bp, Staphylococcus capitis
gtgaagtccatattatttgatgttgatggtgtatttttgagtgaagaacgctgttttgatgtttcagcaattactgtagaagaacttatgacgagtgaaggtatttttttaggttgtggaacatacatagattttgaaaatgatttaaatgataaaaagattcaggaaatacgagaacgtgtatttcaacatgataaaatattgaatcaattaaaatcattaggattaaattctaattgggatatgctttttatcgtatttagtattcatttaattgatcttgctaagcaacttgatcaatcacatagatatgagtttttaaattctagtacttttaatgaaaaaactttattcgaaatgaataaacatttattacataaagagatagattacgagaaacctttagaagttattgattccttcagaaatgggaaagatgctatatatgaagatttagaatcatatgctaaagatcaattagaaattgatgatacagaattatttaaattaaaaagtaatctatggcaactcgctaaagatacatatcaagaatggtatttaggtaaggatttattcaataaagtagaagagggtatcgcattattagatttcaaaaaggggttcatctatgaagaagtgatacttaaacctcaagaagaaattcaattattattgcaacatttaaaggaagcgggttatcatctagcgattgctacaggtcgtcctagaacagaaacaatcattcctttcgaatcattaggacttaaatcatattttgatgatgaacacattgttactgccagtgaggtgttagatgctgagagtgattacccagagtatcaacctttaggtaaacctaacccatttagttatatagctaccttgaatggtaatgacagaaatagatacaaggagtatgctactcatcaggaaaatatagtgaataaagacgaggtttatatagttggtgattcacttgctgacttattaagtgcgaaaaaaattggcgctacatttatagggacgttaacaggtctaaaaggtgataaagcgcagccagaactcgaagtatatggggctgattacatcgttgaggatgttactaaaataaggaatattctactataa

SEQ ID NO: 206 - DNA, 1596 bp, Staphylococcus capitis
atgagtcataaaattttagtatcagaccctatttctgaagaaggtttaaaaagtttattagataacaatgaatttgaagtggatattcaaactgatttatcagaagaagagttaatcaatatcatcggcaattatgaaggattaattgtacgtagtcagactcaagtcactgataaaattatcaactcagcttcacgtctcaaagttatcgctcgagcgggtgttggggttgataatattgatattgaagctgcaacgttaaagggtatcttagtgattaatgcccctgatggtaatacaatttctgcaacagaacattcaattgcaatgattttagcaatggctcgcaatatccctcaagcgcatcaatcattacgtaataaagaatggaatcgcaaagcgtttcgcggagtagaactatatggtaaaacattaggtatcatcggagctggacgtattggtctaggtgttgcaaaacgtgctcaaagttttggcatgaaaattttagcattcgatccttatttaactgaagacaaagcgaaatctctagatattcaaaatgcaaatgttgatgaaattgctgaacaagctgacttcgttacagttcatacgcctttaacacctaaaacacgtggcattgttggggagtcatttttcaacaaagctaaaccaaatctccaaattattaatgttgcaagaggtggaattattgatgaagaagcacttattcatgctctagacaataatttgatagatcgtgctgccattgatgtctttgaacatgagccacctacagactctccattaatttctcatgataaaataatagttactccacatttaggcgcttctacagttgaagcccaagaaaaagtagctgtttcagtttcagaggaaattatagatatattaacaaatggaacggttgaacatgcattaaatgctccaaaaatggatttaagtaatgttgatgaagcagtcaaatcatttgttgatttaggtacaactataggtgaatttgcaattcaattattagagggagcgccaagtgaaattaaaattacctttgctggagacttagccacgaatgatacaagtttaataactaaaacaattgtgaccaatatacttaaagaggatttaggtgaggaagttaatattattaatgctttagctctattgaaccagcaaggtgtaacatataatattgaaaagcagaaaaaacattctgattttagtagttatgttgagcttgagttaactaatgataaagaccaaattaaaatcggagctacagttctagcagggtttggtccaagaatcgttcgaattaatgacttctcacttgatttcaagccaaatgagtatcaaatagtaacttgtcataaagataaacctggcattgttggccaaactggtaaccttttaggtagtcatggtattaatatcgcctctatgacattaggtagaaataatgaaggtggcgacgcacttatgattctatcaattgatcaacaagcctctttagatgttatcaatattttacgtgaaactggcggatttaatagaattattagtacaaaacttacaatataa

SEQ ID NO: 207 - DNA, 1164 bp, Staphylococcus capitis
atgcagtattaccaacctttattattaactccaggtccaacgccagttccaaattcaattatgagtgcgattcaattacctatggtcggacatagatcaaaagattttgaagacatagctgatgaagcatttaaaggtttgaaacctattttcggtacaaagaatgaagtacttatattaacttctagtggtacaagtgttcttgaagcaagtatgctaaatatcgcaaatccagatgatcacatcgttattattgtctcaggtgcatttggaaatagatttaaacaaatcgctgagacatactataaaaatgtgcacgtttacgatgtaacatggggagaagctgttgacgttaatgatttcattaaatttttaaaacaattaaatcatcgtgttacagcggtattctctcagttttgtgaaacttctactggcgtattacatcctgtacatgaattaggtcacgctcttaaaaattatgacgattcactgtactttgtcgtagatggtgtaagttgtattggtgcagttgaagttgatttaattaaagataaaattgacgttcttgtttcaggtagccaaaaagccatcatgttacctcctggtgttgcttttgttgcttatagtgacagagctatagatcgttttgctgaagtaactacacctcgattttatttagatttaaataaatatcttagctctcaagaacagaattctacacctttcactcctaatgttgctttatttagaggagttaatgcatatgtagaattggttaaacatgagggattaaatcatgttataaagcgccattatagcatacgtaacgctttacgtactgctttaaaatctcttgatttagagttattagttaaagatgattcatatgcctctcctactgtaacgtctttcgtacctaaagacaaagaagaattaacttatttaaaagatcaacttaaatcacgtttcaatattacaattgctggtggtcaaggacatttgaaaggtcatatattacgcattggtcatatggggaaagtgtctccatttgatatcctctctgttgtttcagcaatagaaattcttttaactgaatctagaaataaaaattatatcggcaaaggtattgctcaatttatggaggttatcaaacatgagtcataa

SEQ ID NO: 208 - DNA, 441 bp, Staphylococcus capitis
atggtaaagcatgatttcaaagtagttactcaatggaaaggtggacggaatgagataggcactgttcaaggagatttgattaacgaacagatttcaatcccctattctttaggcggtcaaggcatagggacaaatcctgatgaaatgttagtatcagcagcttcctcatgctatattatttcactcgctgcaactttagaaagagctggatataaagatatacgcattaatcaacaatctgttggcactgcctcctttgaaaatggaaaattcaaaatggagtgtattacacactatcctaaaattaatgtcgacaacaatcataaagataatctaaagaagagactactaaaactcttaaaaattgcggataataattgtatgatttcaaatgctataaaaaataatgttgaagtgcgtattgaaccaactttagtttaa

SEQ ID NO: 209 - DNA, 747 bp, Staphylococcus capitis
atgaaaattgcacgtccaaatcaaacttttcaaatcgtagcacatagaggtttgcctgatgattatcctgaaaatacacttattgcatataaacatgcacttatgcttcatatagatatgttagaaattgatgtacattatactaaggataaacaacttgttattattcatgatgatactattgatcgtacatctaatgggaaaggtaaagttaaagactatactttagaagagttaagagaatttgattttggtgtaaaaagaggtgatgcgttcaaaggtgaacgtatacctacatttgatgaggtgcttgatttagttaataatttttcaaaaaagctacttatagaaatcaagacaccatctcaatatccaggtattgaagagatgattgtagataagttaaaagaaaaagatatgccttctcacaaagtgatattacaatcatttgattttgattgtgtgaagaagttagcaaatatgaatttagaatacgaattaggcgtattattgagtaaaaagaaatattggtataaattaccagactttaaagaaattgcgaagattgcagattatgcgaatccaaattataagttagttactaaaagatttatgaaacatgcccatgaagaaatgttaaaagtattaccttacacagttaataaacctaaggcggctaagaaacttttacattatggagcagatggaattatttcagacatacctgaagaaatgtttaagttgtag

SEQ ID NO: 210 - DNA, 603 bp, Staphylococcus capitis
atggctcgattcagaggttcaaactggaaaaaatctcgtcgtttaggtatctctttaagcggtactggtaaagaattagaaaaacgcccttacgcaccaggacaacatggtcctaaccaacgtaaaaaattatcagaatatggtttacaattacgtgaaaaacaaaaattacgttacttatatggaatgactgaaagacaattccgtaacacattcgaaattgctggtaagcaatatggtgtacacggtgaaaacttcatgattttacttgctagtcgtttagacgcagtagtttactcattaggtttagctcgtacacgtcgtcaagcacgtcaattagttaaccatggtcacattgaagtagatggtggacgcgtagacatcccatcttattcactaaaacctggtcaagtgattacagtacgtgagaaatcacaaaacttaaacatcattaaagagtctgttgaaatcaacaacttcgtaccagaatatttagacttcgatgctgacagcttaaaaggtactttcgttcgcttcccagaacgtagcgagttaccagctgaaatcaatgaacaattaatcgttgagtactactcaagataa

SEQ ID NO: 211 - DNA, 471 bp, Staphylococcus capitis
atgactaacgtaaaagaaacaaattacttgatgcttaccaagcaattaaagagtttaatcgaggatgaacatcatttaattgcaattttaagcaacacttctgccctaatcaatgatcatttagatcaagttaattgggtcggattctatttaatagaagataatgaacttatcttaggtccatttcaaggtcatccggcttgtgtgcatatcgaaataggtaaaggtgtttgtggtactgctgtttctgaagatgctacacaacgtgtaagtgatgttcaccaattccctgggcatatcgcatgtgatgcgaatagtaaatcagaaatagtaatacctattcatgttaatgataaaattattggtgtcctagacattgatgcaccgataaaagatagatttacttgggatgatcaagaaggcttagagcaagtcgttcaaattctagaaaaacaattaaatcaatcataa

SEQ ID NO: 212 - DNA, 1695 bp, Staphylococcus capitis
atggtgttatttatcatattagcaatactcgtaattatattaattgcgataggcgtaatgttctacatgcgctcgaataagagaaattcaattgaaaaagctgaagagcgtaaaaatgaaattgaaaaactaccttttgatgacaacttgaaaaaattacaaaatttaaacttaaaaggtgaaactaagactaagtatgatgcaatgaaaaaagacaacacagaaagtacaaataaatacttagctcccgttgaagaaaaaattcataatgctgaggaataccttgataaatttaagttttctgcagcgcaaactgaaattgatgatgcgcatgaacttatggatcaatatgaaaacaattataatcaacaagtatctcaagtagatgaagttttagctttacataaagacaatgaagcattatacgataaatgtaaggtcgatcatcgtgaaatgaaacgtgatgtattggctaatcgtcatcaatttggagaagctgctcagcctttagagaaagaaattgagaaatttgaaccgaaattaaatgagtatgaaacacttaaatcagaagggaattatgttcaagctcataatcatatagccgctctacacgaagagatgaatagtcttaaagcttatatggaagagatacctgatttaattcgagaaactcaaaaagaattaccaggtcaattccaagatttaaaatatggttgtagagacttgaaagttgaaggatacgatttagatcatgttaaagttgatggaaacttacaaagtttaaaaaccgaattaagttttgtagaacctatgataagtcggctagaattagatcaagctaatgataagcttgaaagtattaatgataagttagatgagatgtatgatctaatagagcatgaagtaaaagctaaaaatgaagtcgaagaaacgaaagatgtcattacagacgatttattcaaagctaaagacatgaactatacacttcaaactgaaatcgaatatgtgcgtgaaaattattatattaatgaatctgatgcacaaagtgtccgtcaatttgaaaatgaaattcaaaatctcattgcggtttatgatgacatcttaaaagaaatgtctaagtcggcagttagatatagtgaagttcaagataatttacaatatcttgaagatcacgtttcagttatcaatgagaaacaagataaacttcaaaaccatcttattaaattgcgtgaagatgaagcagaagcagaagacaatttattaagagttcaatctaagaaagaagaagtatatagacgtttattagcttcaaacttaacaagcgttccggaacgtttcatcattatgaaaaatgaaattgataatgaagtgcgtgaagttaataatcaatttagcgaacgcccaatacatgttaaacagctaaaagataaagttgctaaaatcgttattcaaatgaatacgtttgaagatgaagctaatgatgtattagtcaatgcagtatacgctgaaaaattaattcaatatggtaatagatatcgtaaagatcataataatgttgataagagtcttaacgaagcggagcgtttattcaaaaataatcgctacaaacgttctatcgaaatttcagaacaagcacttgaaagtgtagaacctggaattactaaacatattgaagaacaagttattaaagaatag

SEQ ID NO: 213 - DNA, 1140 bp, Staphylococcus capitis
gtgatttatttagacaatgcagccactacaaaagctgatcaagatgttattgattccttcgttaaagtgaatcaatcattgtacttcaatcctaatagccctcatcaagctggcttacaagctgaacaagtactgaagcaagctaaagaagaaatagacattgctttaaatttaaatcacctgtatcatatcgtatttacaagtggtgctacagaatctaacaatatggctcttaaaggaatcgcttataggaaaagggaaacagctaatgaaattataacctctgttctagaacatccctctgttttagaagtgatgagatatttagaggagaaacaaggttttaaacttaaatatgttgatgttaagagtgatggtaaaattgatactgaacatttaaaatctttaatgtcagataaagttgggttggtcacatgtatgtacgtgaataatattatgggccaaattcaaccaattcaagatattgttaatatcttaaaagactatccacgagcacatttacatgtggatgctgtacaagcacttgggaaagtgtctatggatttaaatggtgttgatagcttgagtttaagcggacataaatttaatggtttaaaaggacaaggacttttaattattaaaaatatacaaaatattgagccagttgtgcatggtggcggtcaagagtatggtttgagaagtggcactgttaatttgccaatggctgtttcaatggtgaaatcaatcaaacttaccatgggtcgtttagatgaagcccgtcgtaaattaaataaaatgaatcagtcagttagaacatttttagaagaatttagaggcgtttacattaattcccctaaggatagtgcaccccaaattattaatgttagctttccaggtgttaaaggtgaagtgcttgttaatgctttttcaaaacatggtgtaatgatatcaacaacaagtgcttgctcatctaaacgtgggaaacttaacgaagtgctattagcaatgggagttcctgatgcaagaatagaaggtagtataagaatatctatgggagttcatacaactgaagaggatattcaaagatttaaagaagtatttgaacaagtatatgaagaagttaaggagttgttaaaataa

SEQ ID NO: 214 - DNA, 1224 bp, Staphylococcus capitis
atgcactacgatcatttgctcgtaagatatggtgaattgacgttaaaaggtacaaatcgtaaaatgttcgttaatcaattaaaggctaacgtaaaacgcgcgttaattcccttacaagggtaccatgtaaaaggtaaacgcgatcgcatgtacgtcgatatggatcaagatgcggatatgaatgaaattattcatcgtttaactaaagtttatggaattaaatccataagtcctgtgattaagaccgataaaacagaagaagcaatatatgaggcagcaattcagctagctcgtgattttgatgaaggctctacttttaaaatagatgtaaaacgtgtagataaatcctttcatttagatacctatgctttacaacgtgaagttggtggcgcaatactcaagaatgttgaaggtgtttcggttaatgttaaacaacctgaccatgaagtgagagttgaaatacgtttggatgcggtgtatatcttcgaaaaaattattcaaggttcaggaggcttacctgtaggaactggtggcaagacgttacttatgttaagtggcggtatcgattcaccggtggcaggtatggaagtaatgaaacgtggggttacaattgaggcaattcactttcatagtccaccatttactagtgaaaaagctaaagataaagtgattgaactcacacgtattttatcagagcgtgtaggacctattaaattacacattgttccttttactgaactacagaagcaaattaataaggttgttcaccctcgatatacaatgacttcaacacgacgcatgatgatgcgtgtttccgatgcgttagttcataaaattggtgcaaatgccatcgttaatggggaaaatttaggtcaagttgcaagtcaaacactaaaaagtatgtatgccattaatcatgtaacttccacaccagttttaaggccattattaacactcgataaagaagacattattaaaaaggctcgagatattggtacttatgaaacatctatccagccatttgaagattgctgtacaatctttacacctaaaaatcctgtaaccgaacctgactttgataaagttgagaaatatgaaggggtattcaattttgatgatatggttcaaacagcagtggataatattgaaacgatgactatcgatcaaaattataaaagtgagaaagaacaatcaactgatgctttaattgaagatttattttaa

SEQ ID NO: 215 - DNA, 774 bp, Staphylococcus capitis
gtggattggcatctatctgtaatcgttactattatgttttttgggtttatcgcctcgtttattgattcagtagttggtggtggtggattaatttctactcctgcacttttagcagtaggtttaccaccctcaatggcattaggaaccaataaatttgcaagttcatttagtacattaacaagtgcttttaaatttatacgttctggaaaagtagatttaaaagtagtcgggaagcttttcccatttgtatttattgcatcaggagctggagcaatcttagcaacttatttacccgcgaatatattaaagccactcattattgtcgttttaacgatagttattgtatacactattgtaaaaaaagattggggtagtgtcagaagcttcacttcatttacatttattaaggcattcattttttcaatcatgtttatcattttaggattttatgatggctttttaggtggaggtacgggctcattcatgttatttactttactcatgtttgggtttgactttttaagtgcagctggtaatgcaaaagttctgaactttgcatcaaatattggtgggttattactttttatcatgctaggtcaggtcaattttacttatggattcattatggcattaagtatgattgtaggttcttattttggtgctcattttgctttgaaaaagggcgttggatacgttaaaaatttatttattttagtaactgcagtccttatattaaaaaatatatatgattatgtaatgcagttgatgcactaa

SEQ ID NO: 216 - DNA, 495 bp, Staphylococcus capitis
atgactgaaattacttttaaaaatgatcctattacattgtcaggtcaacaggtaaaagaaggtgacattgcacccgactttactgtattagacaatagtttaaatcaaataacattagaagattataaagggaaaaagaaattaattagtgtagttccttctattgatacaggagtatgtgaccaacaaacacgtaaatttaatgaagaagcatctcaagaagatggtgtagtattaacaatttctgttgatttaccattcgctcagaaaagatggtgtgcgtctaatggtttagaaaatgttgttacattaagtgatcacagagacctatctttcggtgaaaactttggggtagttatggaagaattaagattattagcacgctcagtttttgtattagatgaaagtaacaaaattgtttataaagaaattgttagtgaaggtactaacttcccagattttgatgctgctttagaagcgtatcgcaacatttaa

SEQ ID NO: 217 - DNA, 948 bp, Staphylococcus capitis
atgactgaagaaaatacaattatggaacgcttattccatgcattagatgaaaaagctaaatccttaaatgaagagaatggacaaagcttcattgaaaatttagggttagctatggaggaaatttacaccaataaaagagatttactcgaacaagctacacttcaagatagaagaaaagcatttcaatttgcatatttaagtttaatgcaagaagagaatattcaagcaaaccaccaaattactcctgattcaataggtttaatacttggtttcttagttgaacgattcatgcaagataaagaggagatgcatgttgttgatatcgctagtggtgctggacacctaagtgcttctgttaaggaggtactttcggataaaacaacgatgcatcatctcattgaagtagatccagtgttatctagagtaagtgtacatttagctaacttcttagaaattccatttgatgtataccctcaagatgctattatgccactgcctttagaagaagcagatgtggtaattggagacttcccaattggctattatccagtagatgagcgtagtaaagaaatgaaacttggctttgatgaggggcacagttactctcattatttattaattgaacaagctataaatgcattaaaaggggcaggttatgcgtttttagtcgttccaagtaacatttttactggagataaagtgaaacagttagaaaaatttattgctacagatactgaaatgcaagcatttttaaatctaccaacaacgttatttaaaaatgaaaaagcacgaaaatctatacttattttacagaaaaaacaacctcaagagactaaacctgttgaagttttattagctaatattcctgattttaaaaatccacagcaatttcaaggatttattagtgaattaaatcaatggatggacacaaatcatacaaaaaaataa

SEQ ID NO: 218 - DNA, 1245 bp, Staphylococcus capitis
atgtcaaaattaattttggcggtaaatgctggtagttcatctttgaaattccagttaatcagaatgccggaagaaaagttagtaaccaaaggcgtcatcgagcgtattggtttaagcgattctattttcacgattgtagttgaaggggaaaagcttactgacgttagagatataaatgatcatgaagaagcagttaatattatgttagaaagctttaaagaacatcacatgattgaagatatcaatgaaattgaaggaacaggtcaccgtgtagtgcatgggggagagaaatttccaaaatcagtagttgtaacggatgaggtagagactcaaattgaggagttaagtgagttagctccactgcataacccagctaatttaatgggaataagagcttttaaaaagttattaccaaatattcctcatgtagctgtatttgatacatctttccaccaaacaatgcctgaacaagcttatttatacagtttaccttatcattattatgaagattatggcattcgtaaatatggcttccatggtacaagtcataagtatgtatctagaagagcggcagacattttaggaagaccgatcgaagatttaagaattatttcttgtcacattggtaatggtgcgtcaatagctgcgattgatggcggagaatcaattgatacatctatgggtttcactccattagcaggtgttacaatgggtacacgttcaggtaatctagacccagcgttgattccgtttattatggaaaagactggtaaaaatgcagacgaagtattaaatattttgaataaagaatccggtttactaggtttaactggtacgtcaagtgatttacgagacttaactgaagaagctaaacacggacgtcatcgtgcacgtgtagcacttgatttatttgcatcgaagattcataaatacattggctcttatgcggctagaatgcatggcgttgatgtaattgtattcacagctggtataggagaaaattctcatattattcgaggtaaagttctagagggacttgaatttatgggtgtatattgggatccgaagaaaaatgagagtcttcacggagatgaagggtatattaactatcctcattccccagtaaaagtattggttgtaccaactgacgaggaagttatgatttctcgtgacgttatcaaatatggtggactaaaagaggaatcatccgaagaacaaagtgttaacactgaaactaataattga

SEQ ID NO: 219 - DNA, 501 bp, Staphylococcus capitis
atgattacgtataaaaatattttaatcgcagtcgacggttcacacgaagcagaatgggcttttaataaagctgtaggagttgctaaacgtaacgatgcaaaattaacaattgtaaatgtaatcgattcaagaacatactcttcttatgaagtctatgatgctcagttcactgagaaatctaaacatttttctgaggagttacttaaaggttataaagaagtagcttcaaatgcaggagtaaaaaatgtagaaacacgtttagaatttggctcacctaaagcgattatccctaaaaaattagcacatgaagtaggtgctgatttaatcatgagtggtacttcaggtttaaatgctgtagaacgttttattgtaggttcagtatcagaagcaatcgtacgccacgcgccatgtgatgttttagttgtacgtacagaagaaattcctgaagatttccaaccacaagtagctacgcctagattacgtgaaagatatcaagattaa

SEQ ID NO: 220 - DNA, 1119 bp, Staphylococcus capitis
atgaaaattggtattccaaaggagataaaaaataacgagaacagagtgagtttatcaccaagtggcgtacatgcacttgtagagcaaggacatacagtctttgttgaaacaaacgcaggactaggttcatattttgaagacgttgactacaaagaagctggagcagagatcgtatctgaacaggcgaaaatatgggatgtagatatggtagtcaaagttaaagaaccattagaatctgaatatcaattctttaaagaggggttaattctcttcacttatttacatttagctaatgaagaaaaattaactcaagctttagtagataataaagttattggtattgcatacgaaacagtgcaattacctgataaatcattaccattattatcacctatgagcgaagttgccggaagaatgtcaactcaaatcggagctgagttcttacaaaaagttaacggcggcatgggaatattactcggtggcgtaccaggtgtacctaaagggaaagtaacaattataggtggaggtcaagccggtactaacgcagctaagattgctttaggcttaggcgctgatgtcactgtgcttgatgttaatccaaaacgtttacaagaacttgatgacttatttaatggaagggtacatacaattatgtccaatccactaaatattgaaatgttcgttaaagatagtgacttagttattggtgctgtacttattccaggtgctaaagctccaaacttagtcactgaagatatgattaagcaaatgaaagcaggatcagtgatagtagatatcgctattgaccaaggtggtattttcgagacaactgataaaattactacacatgacgatcctacttatacaaaacatggtgttgttcactatgctgtggctaatatgcctggcgctgtaccacgtacatcaacattagctttaaataatgctacattaccatttgcgcaaactttagctaataaaggttatcgtgaagcgtttaaatcaaatcatgcgttatccttaggattaaatacttacaaaggtcatgttacgaataagggtgtagctgaagcgtttaacttagaatatacttctgttgaagatgcgcttaatcaataa

SEQ ID NO: 221 - DNA, 1056 bp, Staphylococcus capitis
atgactaaaatagatgaaatcattaaagtcttacaacaacaaaatgcagatgcagcctggattacgacgccacttaatatttactactttactggataccgtagtgaacctcatgaacgtttatttgccctacttattcaagctgatggggagccagtactattttgtccaaaaatggaagtagaagaagtaaaagcttctccatatgagggaaaaattattggttacctagatactcaaaacccctttgatttatatcctcaaacgtttactacattactgattgaaagtgaacatttgactgttaaacgtcaacgtgaattatctcaagctttcaatgtacaagtttatagtgatatagatcaatctattaaagatttaagaaacataaaatcctatgaagaagtaactaaaattaagaaagccgctgaattagctgataagtgtatagaaatcggcgtcgcttatttaaaagaaggtgttgaagaacgagatgtcgtgaatcatattgaaaatgaaataaaaaaatatggtgttaacgaaatgagttttgacactatggtactattcggggatcatgctgcttctcctcacggaacacctggtaatagaaagttacaacaaaatgagtatgttttatttgatttaggtgttgtttacgagcattattgtagtgatatgacgaggacggtaaaatttggtaaccctagcgaagatgctcaaaatatttataaaaccgtattgaaagctgagcaatctgcgattgaggctatcaaacctggagtaatgattaaagacattgataaaattgctcgagatattattagcgaagcgggatacggcgactatttccctcatcgattaggccacggcttaggattagaagaacacgaatatcaagacgtttccagtgccaatgagaaccctttagaagcgggaatggtgataactatagaaccaggcatttatgtccctgatgttgcaggtgttagaatcgaagacgatattctagtgactgaaaatggatatgaaatccttacaaaatatcaaaaataa

SEQ ID NO: 222 - DNA, 690 bp, Staphylococcus capitis
atgaaactttcatttcatggtcaatcaacaatctattttgaaggaaatggtaaaaaagtaattgtcgatccttttatttctggaaatgacaaatgcgatttagatgaacaaactttagatgtagactacattattttaactcatggacatgaagatcattttggtgatgtagttgaactagcgaacagaaaccacgctgtagttattggttctgcggaattacaaggttacttatcaacttatcacggtgttgaaaatgtacatggtatgaatatcggtggtaaagctaaattcgattttggtactgtaaaatttgttcaagctttccacagctctagttttacacatgaagatggtattccagtatatttaggtatgccaatgggagttgttatcgaagctgaaggtaaaacgatttatcacacaggagatactggcttatttagtgatatgaaattaattgcagatagacatcctgttgatgtatgcttcgtacctattggagataactttacaatgggcattgatgacgcaagttatgcgataaatgaattaattaaaccgcaaatcagtgtaccaattcactacaatactttcccattaatcgaacaggacccaaatcagtttaaggatgctgttaatgtaggtgaagttcaaattctagagccaggtcaatcagttgaattttaa

SEQ ID NO: 223 - DNA, 414 bp, Staphylococcus capitis
atgtataaacatattttacttggtgtagacactcaattaaaaaatgaaaaagcattaaaagaagtgtctcatttagctggtaaagatacagttgtaactattctaaatgctattaatgaacaagatgctcaagcttctatcaaagcaggagttcacttggatgaactaactgaagaaagaagcgaacgtttagagaaaacaagaaaagcattagaggactacggtattgattatgatcaaatcattgttagaggaaatcctaaagaagagttattgaaacatgctaatagtggtaaatatgaaattgttgttttaagtaaccgtaaagctgaagataaaaagaaatttgtactcggtagcgtaagtcataaagtagctaaacgagctacaatccctgtattaatcgttaaataa

SEQ ID NO: 224 - DNA, 1299 bp, Staphylococcus capitis
atgactaaacacgagcaaattttaaattacattgaatcactatctgtaggttctaaaatttctgttagaaagattgcaaaagttttagatgtttctgaaggtacagcatatagagcaattaaagatgcaggtcaacttggcattgttgctacaattgatcgtgtaggtacagtaagaattgagaaacgtaatagggataatatagacaatttaacatttaatgaaattgctaacattgttgaaggtcaaattttaggtggtaagaagggattagggaaaactgtatccaaatttgcgataggagcaatggaacttcaagatattttaaaatatattggaagtcacacattgcttatagtcggaaaccgtgcagatgttcaaatggaagccttaaaacgagacactgcaatattaataactggtggatttcagccttctaaagaagtcgttgaatatgcaaatgagcacgaactgcccattatttcatcaagttatgatacatttctagtcgctaatattattaatagagcaatgtataatcaaaaaattcgtaaagaaattcttgtcgtagaggatattgtcaaacctattaatgagttatcagtattatttgatgacatgaaaattaatgactataaaaagttagcaaatgatacagggcacactagatttcctatagtgaatgaagattttaaattagtaggaatagttacaagtagagaaattattaatatgaatgaagaggatgagttagggaaaataatgacacgtaatcctcttagtgtaaagcttaccaatacagtggctagttgtgcgcatatgatgatatgggaaggcattgaattactgcctgtaactaataataataaaaaagctattggtgtaattaatagacaggatgtattgaagtcaatgcaacttttaggaagacagccgcaaattggtgatacaattaatgatcaaattgctaagcatattacgattaattcaaatggaattactgttgatgtttctcctttagtaacaaatcattatggcacattaagtaaagcagtatttgtgggcattatcgaagaaacgattagacatgagatgagaaagtacaaaaaaggtaatgtaatgattgaaaacttaaatatagtttatatcaaaactgtacctattgaatcatccatcgatgttcattatgaaatgctagatgttggtagaaattttgctaagttagaagtaacaatgattaataataaagaaaaggttgcaaacgcattagtaatttgtcaaatgtttgaaggcttttga

SEQ ID NO: 225 - DNA, 942 bp, Staphylococcus capitis
atgaagaatattatgaatgatatgatgcaagaaattgaacaaaacgatacgatcatcatccatcgtcatgttagaccagaccctgacgcttatggatcacaattaggacttaaatattatttagaggctaaatatccaaataagcatatttatgcagtcggagaaaatgaaccatctttagaatttataggtacttttgatgaaatttcagatgaagtttataaagaagcattggtgatcgtttgtgacactgcaaattctccgcgtattgacgaccaacgttatcagaatggtttaaaagtattgaagatagaccatcatccagcgatagaccaatatggcgacattaattatgtgagtacagaggcgtcttcgacaagtgaaattatctatgattttattacacattttaacgatgagcgtattatagacgaaaaaactgcacgtgtattatatttgggcattgtgggagatacaggaagattcttatttaacaataccactccgcacacaatggaagtggctagtaaattaattgcctttccttttgaccctaatgcagaactaaataaaatgtcagagaaagatcctaaacttttacctttccaaggttacattttacagaatttcgaattagacaatgtgggttattgtcaggttaaaataacccgcgatattttagaggaatataatattcaacctaatgaagcatctcaatttgtaaatactatagctgatattcaaggtttgaaaatttggatgtttggtgtagatgaaggagaccaaattagatgtcgaattcgttcaaagggtaaaatcactattaatgatgtagcaaatgattttggtggtggtggacatccgaatgcttcaggtgtctctgtatatagttgggctgaatttgataatctagctaatgcattaaaacaaaagattaaataa

SEQ ID NO: 226 - DNA, 3204 bp, Staphylococcus capitis
atggttgcgcatttaaatattcatactgcatacgatttattgaacgcaagtttgaaaattgaagatgtggtcaataaagctaaaaatgaaggttatcgtgcgcttgcaattacagatacccatgttttatatggctttcctaagttttatgatgcgtgtatagcaaaagatattcatccgatttttggcatgacgataacattaactgatggtttatatacagttgaaacagtcgtattagctcaaaataatgaagggttaaaagcgctatatcaactttcttctgcaattaagatgaaagaaaaagaggaagtacctttagaatggctaaaacgttacgataaaaatctaattattatcttcaaagatattgataatactcacaaacaaattattgaagcatttaatgataaaatacatgtttatatcaatcatacgagtaatgatattgttaatagaaaaaaagtatggcttaagtcagcaagatatttgaatagagaagacgctgataccatttctgctttacaagccatcaaagataattctaaattagatattattaacgatagtaaagattttggtgagcattttcctgatcagaaggaatttgaagagttagaaatcgatgagaaaataaaacaaaatactgaagacatcgtagacttatgtaaagctgaattggtatatcatcaatcgttactgcctcaatatgtcacacctgatggagaagtttcaaaagattatctatggtcagtattaattcgtaaattaaatgattggaatttaaataacgatcagtatttaaatcgacttaagcatgaatatgaaattataactaaaatgggatttgaagattatttccttatagttagtgaccttatacattacgctaaaacacatgacgtaatggttggacctggtcgtggttcttcagctggttcattagtcagttatttattagaaataacaactaccgatccaattaaatttaacctactctttgaaagatttttaaatccagagagggtaactatgcctgatatagatattgactttgaagatacaagacgtgaaaaagtgattcaatatgttcaagaaaaatatggtgaactccatgtttctggtattgttacatttggtcatttacttgctagagcagttgggcgtgatgtcggaagaattatgggctttgatgaaacgactttaaatgagatatctaaattaattcctcacaagttggggattactctagataaagcatatcaagaagaggactttaagtcttttgttcaccgaaaccaccgaaatgaactatggtttgaaatgagtaaaaaattagaaggcttacctagacatacatcaacacatgcagcaggaattattattaacgatcaacctttatataaatacgcgccacttacattgggtgatacaggtttattaacacaatggactatgacagaagcggaacgtattggtttattaaaaatcgattttttaggtttacgtaacttatctattattcatcaaatagttaatcaagttaagaaagatttagatgttgatatagatgtcgaagcgattccatttgatgataaaaatgtttttaaacttttatctcaaggtgatactacaggtattttccaactagaatcagaaggcgttagaagtgtgctaaaaagacttcaaccagagcattttgaggatattgttgccgtaacatctctatatcgtccaggacctatggaagagataccaacatatattactcgtagacatgacccttcaaaagtagaatatttgcataatgatttagaatccattttaaaaagtacgtatggtgtcattatttatcaagagcaaataatgcaaattgcaagtaaattcgctaactttagttatggtgaagcggatatcttacgaagagctatgagtaagaagaatcgtgcagtattagaaaatgaacgtcaacactttgttaatggcgccaaacaaaatggatacaacgaacaaataagtaaacaaatttttgacttaatacttaaatttgctgattacggtttccctagagcgcacgcagtgagctattctaaaatagcctacattatgagttatttaaaagtgtattatccaaactatttctatgccaatattctaagtaatgttataggtagtgaaaagaaaacttctgccattatagatgaagcgaagcatcaaaaattaaatattttaccacctaatatcaatgaaagtcattggtattataaagcaacttcaaaaggtatttatttatctctaggagctataaaaggtgtaggataccagagtgttaaaacgattgttgatgaaagatataataatggcaagtttaaagatttttttgattttacacgaagaattcctaaaagggttaaaagtagaaaattattagaagatttaattttagttggtgcgtttgatcattttggtaaaaatagagctactctattacaaactattgatcaagttttagatacagcctctgatgtcgagcaggatgatatgcttttcgacatattaactccgaaacaagcttatgaagataaagaagagttacctgataaaatgcttagtgattatgaaaaagagtatttaggcttctacatatctaaacatccggttgagaaagaatttgataaaaagcaatacttaggaatttataaattaggtaatgctcaaaatcaccaacctatattagtacaatttgatgcaattaaacaaataagaactaagaatggacagaacatggccttcgtaacccttaatgatggaatgttgttaatggacggtgtgatatttcctgataaattcaagaaatatgaaacttcaatatctaatgaagaaatgtatatagtcatcggtaaatttgaaaaaagaaatcaacaactacaacttattataaatcagatcattgaagtgaatgaatttaaaaatcaaaagattaaagcatctaaaaaagtgattctacgtgatacgcaattgatttcagataagttgcaagaaatgatagtagacacaccaattgagaaaaataacattttagagattagttcgtttaatgaacaaaataatgatataaaacacttaggatatataaataaagatgatgagacaatttatcaacttatcgagtctgtaaaacctagtgatattaggtttatataa

SEQ ID NO: 227 - DNA, 1230 bp, Staphylococcus capitis
atgtctttaagagacgatgcattagagatgcacaaagagaatcaaggtaaattagaaattacaccaaatataaaagtaactaataaagaagaacttagtttagcttattcacctggtgttgctgaaccttgtaaggagattcatgaagattcaagaaaagtttatgattatacaataaaggcaaacactgtagcagtggtaactgatgggactgctgttcttggtttaggtaatattggagcagaagctagcattcctgttatggaaggtaaagcggtattgtttaaaagctttgctggtatcaacggcgtacctattgcattagatacgacagacactgatgaaattgttaatactgtgaaattactacagcctaattatggtggtattaatcttgaagatatttcagcaccgagatgttttgaaatagaggaaacattgaaaaaagaaactaatatcccagtattccatgacgatcaacatggtacagcaattgttactatggctggtttaatcaatgctttaagaattgttgataaagatttatcagatattaaagttgtactaaatggagctggagctgctggaattgctattgtaaaacttttatattcttatggtgttagagacatgattatgtgcgactctaaaggagctatttatgaagggcgacaacatggtatgaatgatactcaagcttatgttgctaactggacaaacaaagataaaatcgatggttctttagaagaagttattaaagatgcagatgtatttattggtgtatctgtagcagacttattaactaaagatatggttaagagcatggcagatgatccaattatctttgctatggcaaatcctaaccctgaaatcaaacctgatgatgctaaagaagcaggtgctaaagtcattggtacaggacgttcagattttcctaaccaaattaataatgtcttagctttccctggcatttttagaggtgcattagatgttgaagcaactcacatcaatgaagatatgaaaaaagcggctgtagaagcaattgcagacttaattgaagaggatgaacttaatcctgattattgtattcctggaccttttgataaaagagttgcgccatctgttgctagaagcgtagccaaagctgctatggaatcaggggttgcaagaatcgaagttaaccctcaagatatttatgataaaacaatgaaagtgacagatttaaaataa

SEQ ID NO: 228 - DNA, 858 bp, Staphylococcus capitis
atgtttaaagatttttttaatcgaagtaagaaaaagaaatatttaacagttcaagattctaaacaaaatgatgtgccagctgggattatgactaaatgcccaaagtgtaaaaaaattatgtacactaaagaattagctgaaaatctaaatgtgtgcttcaattgtgatcaccacatcgcactcactgcacataagagaattgaagctatttcagatgaagggacatttgtagaattcgacaagggcatgacctctgcgaatccattagatttccctggctacattgaaaaggtagagaaagatcaacaaaagacaggattaaatgaagctgtagttactggtacttctgaacttgatggtattaaatatggagtggccgtaatggatgcccgttttagaatgggaagcatgggatcagtagtaggtgaaaaaatctgcagaattatagattactgtactgaacaccgtctaccatttattctcttttcagcaagtggtggtgccagaatgcaagaaggcattatttcacttatgcaaatgggaaaaacaagtgtatcacttaaacgtcattctgatgcaggcttattatatatctcatatataactaacccgacaactggaggggtttctgcaagttttgcttcagtaggagatattaatttaagtgaacctaaagcgcttataggttttgctggtagacgtgtcattgaacaaactattaatgaaaagttacctgatgacttccaaacggctgaatttttattagagcatggtcaattagataaagttattcatcgtaaagatatgaaagaaacgctttctaatatcttaaatatccatcaagaggtgagtatataa

SEQ ID NO: 229 - DNA, 945 bp, Staphylococcus capitis
atgttagattttgaaaagccactttttgaaataagaaataaaattgaatcgttaaaagaatctcaagagaaaaatgaagttgatctacaagaagaaatagatatgcttgaagcgtcgcttgagagagaaactaaaaaagtttataccaatttgaagccttgggatcgtgtacagattgctcgcttacaagaacgtccaactactttggattatataccttatattttcgactcatttattgagcttcatggagatagaaattatagagatgaccctgccatgattggtggaattggttatctaaacggacaagctgtcactgtagtcggccagcaacgtggtaaagatacaaaagataacatttatcgtaattttggaatggctcatccagagggatatcgtaaagctcttcgtttaatgaaacaagctgaaaagtttaaccgtccgatctttacttttattgatacaaaaggtgcttatccaggtaaagcagctgaagaacgtggtcagagtgaatcaatagctaaaaatctaattgaaatggcatcactgacagtccctgttatcgcaatcgttattggtgaaggcggtagtggtggtgcgcttggtataggtatatctaataaagtacttatgcttgagaatagtacttattcagttatttcacctgaaggcgctgctgctttactttggaaagatagtaatttagctaaaattgctgctgaaactatgaaaattacagctaatgatcttaaaggtttaaatattgttgatgaagtgattaatgaacctttaggtggtgctcataaagatatagaatcacaagcttcaacaattaaagaagtttttgtgaaacacctaaatgaattgaaccaaaaatctggtgaagatttagctaatgatcgtttcgagaaatttagacatataggatcagttgtagaataa

SEQ ID NO: 230 - DNA, 969 bp, Staphylococcus capitis
atgaaaaaaattgcagttttaactagcggtggagattcaccaggtatgaatgctgcagttcgagcagtcgttcgtacagcaatttacaataatattgaagtttatgggatttatcatggttaccaaggtttacttgacgatgatattcacaagcttgaattaggctctgtaggggatacaattcaacgtggaggtacgttcctattttcagctaggtgccctcaatttaaagaagaagatgtgcgtaagaaaggtattgaaaaccttcgtaaacgtggtattgaaggcttagttgtcattgggggcgatggtagttatcgcggtgctcaacgtattagtgaagaatgtaaggaaattcaaactattggaatacctggtactattgataatgatattaatggtacagatttcactataggttttgacactgctttgaatacaattattgaatcggtcgataaaattagagatactgcatcaagtcatgctcgtacttttatagtagaagtaatgggtcgagactgtggtgatttagcgttatgggcaggattgtctgttggcgcagagacgattgtagtacctgaagttcatacagacattaaagatgttgcagaaaaaattgaacagggtataaaaagaggtaagaaacattctatcgttatggtcgctgaaggatgtatgagtggccaagaatgtgctgatgaattaatgaaatacatcaatattgatactcgagtatcagttttaggtcatattcagcgtggaggaagcccttctggagctgaccgtgtgttggcttcaaggttaggtggacacgctgtagaattacttaaacaaggtgaaactgctaaaggtgtgggtattaaaaataatcaattaactgctacaccatttgatgatatctttggagaaagtaatcataaatttgataaagatatgtatcaattagctaaagaattatcaatataa

SEQ ID NO: 231 - DNA, 1758 bp, Staphylococcus capitis
atgagaaagactaaaattgtatgtactataggaccagcttctgaatcggaagaaatgcttgaaaaattaattaacgcgggtatgaacgttgcgcgtttaaacttctctcatggtagtcatgaagaacataaagcaagaattgatacaatacgtaaagttgctaaacgtttagataaaactgttgcactattattagatactaaagggcctgaaattcgtacgcataatatgaaagatggcgttattgaattagaaaaaggtaaagaagttattgtaagtatgaatgaagttgaaggtactcctgagaaattctcagttacttatgaagacttaattaacgatgtaaatgaaggttcttatatcttattagatgacggtttagttgaactacaagttaaagaaattaataaagataaaggcgaagttaaatgtgatatcttaaatacaggagaattaaaaaataaaaaaggtgttaacttaccaggagtaaaagttaatttaccaggtatcactgataaagatgctgatgatatccgctttggtatcaaagaaaatgttgattttatcgcagcaagtttcgtaagacgtcctagtgatgttttagatattcgccaaattcttgaagaagaaaaagctcatatcacaattttccctaaaattgaaaaccaagaaggtatcgataatattgacgaaatattagaagtttctgatggtttaatggttgctcgtggtgacatgggtgttgaaataccaccagaaaaagtacctatggttcaaaaagatttaattagaaaatgtaataaattaggtaaaccagttattactgcaactcaaatgttagattcaatgcaacgtaatcctcgtgcaactcgtgcggaagcaagtgacgttgctaatgccatttatgatggtactgatgcagttatgttatcaggtgaaactgcagcgggattatacccagaagaagcagttaaaacgatgagaaatatcgcagtttcagctgaagcagcgcaagattataaaaaattattatctgaccgtactaagttagttgaaacatctcttgttaatgccattggtgtttctgtagcacatacagcgcttaatttaaatgttaaagcaattgttgctgcaacagagagtggatcaactgcacgtacgatttcaaaatatcgtccacactctgatattatcgctgttactcctagtgaagaaactgcacgtcaatgtgcgattgtttggggcgttaatcctgtagttaaagaaggacgtaaaaacactgatgcattactcaataatgcagtagcaactgcagttgagactggtagagtttctaatggagacttaatcattattactgcaggtgtacctactggtgaaaaaggtacaacaaacatgatgaaaattcacttagtaggtgatgaaattgctcgtggccaaggcgtaggtcgtggatcaatagtaggccatgctattgttgctgatagtgcaagtgacttagagggtaaagatttatctgataaagtcattgttactaactctgttgatgaaacattagtaccttatgtcgaaaatgctattggtttaattactgaagagaacggtatcacttcaccaagtgcaatcgttggtttagaaaaaggtattccaacagtagttggtgttgaaaaagctactaaagaaattaagaacgatatgttagttactgttgatgcagctcaaggaaaaatctttgaaggctacgctaacgtactataa

SEQ ID NO: 232 - DNA, 1356 bp, Staphylococcus capitis
atggctgaaaatttacaaagagaattgagcaatcgtcatgttcaattaatcgccattggaggcgctataggaacggggttattccttggtgccggtcaaacaattgcaatgacgggtccctcaatattgcttacctatatcattataggatttatgttattcatgtttatgcgtggattgggagaaattataattcaaaacactaattttaaatcatttgcggatgttactaataaatacataggaccatttgctggatttattacagggtggacatattggttatgttggattattactggtatggctgaagttacagcggtagctaaatatgttagtttttggttccctgaaatacctaattggattagtgctttattttgtgtattaatcttaatgtcatttaacctactaagcgccaaattatttggtgaattagaattttggtttgcaatcattaaaattgccacaattattgctttaatcgttgtaggtattgtcatgattctttttgctttcaaaacacaattcggacatacaagtttaactaatttatacaaccatggaatattccctaaaggggcttcagggttcttcatgtcattccagatggcactattttcattcgtaggaatcgaaatgattggtgttactgctggagagacgaaagatcctgaacaaactataccaaaggcaatcaatagtgtacctattagaatattaattttctatgttggggcattagcagtaattatgtcaatcattccttggtacaaagttgatccagataacagccctttcgttaaattattcgctttaattggagtaccatttgcagctggaataattaactttgtggttttaactgctgctgcatcatcatgtaatagtggtatcttttcaaatagtagaatgctgtacggactatctaatcaagaacaagctccaccagccttctctaaaacgaacaaaaacggtgtaccacacacagctattatagcttcatcagcattattgctaattgcagcgttgttaaattatattttccctgacgctactaaggtatttacttatgttacaactatttcaactgtactatttttagttgtatgggcattgattattattgcttatatcaattacagtagaaataatccagagttacataaaaaggcaacttataaattacctggtggtctatatatgggatatgcaatattaattttcttcatttttgtcttcggcttattatttgtaaatgtcgatactagaagagctatctatttaacacctatttggtttattattttaggtctcatgtatttacgatacaaaaaggtaagcaaacacgcgtaa

SEQ ID NO: 233 - DNA, 1119 bp, Staphylococcus capitis
atggcagaattacaaagaggtttagaaggggttattgcagctgaaactaagatcagctcaataattgacagtcaattgacatatgcgggctatgatattgatgatctcgcagaaaatgcccaattcgaagaaattattttcttactttggaattatagacttccaaataaagaagaattaaaagaattgaaagaaaaattatttgagtttatgactctaaacgaaagagtttataaacactttgaagagtatgtaactgatgatgttcatcctatgacagcgttacgtacatctgtatcttatattgctcatttcgatccagatgctgaagatgaatctgaagataaaaagtatgaaagagcaattcgtattcaagcaaaaattgcttcattagttacggctttcgcaagagtaagagaagggaaagaacctgttaaacctaattcagaattaagttatgcagcgaacttcttatacatgttaagaggcgaacttccaactgacattgaagttgaagcattcaataaagctttaattttacatgccgatcatgaattaaacgcatctgcattcactgctcgttgtgctgtttcatcactatctgatatgtattcaggtattgttgctgctgtaggttcattaaaagggcctctacacggtggtgcaaatgaacgtgtaatggcaatgttaaaagaagtaggtagtactgataatgttgatagttaccttgatgagagattcgctaataaagataaagtaatgggctttggtcaccgtgtatataaagatggtgatccacgtgctaaatatttacgtgaaatgagccgtaaaattactgaagaaactggtcaaagcgaattatttgatatttcattagctattgaaaagcgtatgaaagatgaaaaaggcttaattccaaatgttgatttcttcagtgcaactgtttatcacagtatgaacattcctcatgatttatttacaccaatctttgcagtaagtcgtacttctggttggattgctcatatattagaacaatatcgagacaacagaattatgagaccaagagctcaatatattggtgagaaagatcgtaaatatgttcctattgaagaaagataa

SEQ ID NO: 234 - DNA, 1269 bp, Staphylococcus capitis
atgtcagcagaaaaaattactcaaactaatgaaggtttaaatgtaccaaacgaaccaattattccatttattattggtgatggaattggaccagatatttggaaagctgcaagtcgcgttattgatgcagcagtagaaaaagcttacaacggcgaaaaacgtattgaatggaaagaagttttagctggacaaaaagcttatgatgaaacaggagaatggttacctcaagaaactttagacacgattaaagaatatttaatcgctgttaaaggacctttaactacgccaattggtggcgggatccgttcactaaatgttgctttaagacaagaattagatttatttacttgcttacgtcctgttcgttggttccaaggtgtaccatctccagttaaacgtcctgaagatgtagatatggttattttccgtgaaaacactgaagatatctacgcaggtattgaatttaaagaaggaacttcagaagttaaaaaagtaattgatttcttacaaaatgagatgggagctactaacatccgcttcccagaaacttcaggtattggtattaaacctgtatctaaagaaggtacagaacgtcttgttagagcagctattcaatatgctttagataacaatcgtaaatctgtgactttagtgcataaaggtaacattatgaaattcactgaaggttcattcaaacaatggggttatgacttagctcataatgaatttggtgataaagtatttacttggcaacaatatgatgaaattgttgaaaaagaaggtaaagatgcagcaaatgaagctcaagataaagctgaaaaagaaggcaaaattattatcaaagattcaattgctgatatcttcttacaacaaatcttaactcgtccagctgaacatgatgtagtagcaactatgaacttaaatggtgactacatttcagatgctttagctgcacaagttggcggtattggtatcgctccaggtgctaatattaactacgaaacaggccacgctatctttgaagcaactcatggtacagctccaaaatacgctggattaaataaagttaatccatcatcagaaattttaagttcagttctaatgttagaacacttaggttggcaagaagctgctgataaaatcactgattcaattgaagcaactatcgcttctaaaattgtaacttacgattttgctcgtttaatggatggcgctgaagaagtttcaacttcagagttcgctgacgagttaattaaaaacttaaagtaa

SEQ ID NO: 235 - DNA, 711 bp, Staphylococcus capitis
atgtcacaaaaagtattagtggttgatgatgaacaatcaatcgtgaccttactaaagtataatttagaaacagcaggatacatagttgaagtcgcgtatgacggcgaggaagcattaaaaaaggttgaagaagagcaacctgaacttattgtattggacgtcatgttacctaagaaggatggtattgaggtgtgtaaatcaattcgatctgacaaaaatttagtacctattttaatgttaaccgcaaaagatgatgagtttgatcgtgttttaggacttgaactaggtgctgacgattacatgacaaagccattttcacctagagaagtggttgcaagagttaaggctattttaagacgttctaagtttgttaatgaaattgagaaagaggacacagatgaggaagacatcatcatcgactctattcgtatacgtcctgaattctttgaagtatataaagatgaagaattattagagttaactcctaaagaattcgaattattattatacttaattgaaagacaaggccgtgtcattacacgagagcatatgctcaattcagtttggaattatgaatttgctggcgactctcgaatcgtcgatgtacatattagtcatttaagagataaattggaagagaatccaaaacaacctaaattaattaaaacagtgcgaggattaggttataaattggagagacctaaagcttaa

SEQ ID NO: 236 - DNA, 1698 bp, Staphylococcus capitis
atgctaaagtttcatcatcgtctattattattaattagtactataacaataattagttttattggtttaggtgcaattattcacaacacaatttatcaaactttaactagcaatcaaatcaatgaattaagaaatgaagcacataattatgtcaatttactaaatcataaaaaaggtgaagagattgacaaccttgctgataatcaacaaaatatcgttgttataaaaaacgaagctgatggacacatcattttttcatcaggtgatagtaaaaagatagatagtagaattgataatgcagccaatccttctaacttaattactaaaaaaactaatatcggtacacgctatacttttaaagataatataggtaacaaaaccgtatacataagtggaattaatgatgaaatcatagatttacaaagagaaatgtggaaatacctttctataataggcgtcatagtgttattcacagtttacttagctagtagaagtatcaatcgaacatatataagacctattaatgaagtgacgtatgcaacatcattattggcagatggttattatcatgttcgtgttcctgaaagtaatgttaaggaaacacgagcactttttgtaacaacgaatgagctagccagaagattgcagaaattgaacaatagtcaaaaaatacaatcaaatcgtttgaaaacaacacttgagaatattccaagttctgttttaatgattgataaacatggcgaaatagttgttgcgaaccatgcttactatgaagtatttagtccggatcaacaggttgaaaataagaattatattggttttatagatgatagtattgagaagctaataatagaaagctttagaactgagaaggtaatctatgatcaaattgaagtagacataaataatgtacatactaaatactttgatgtatcatgtgtcccaattttgtccaaatctaagaagaaattacaaggtatggttgtcgtacttcatgatattactaaccttcaaaaattagaaaatcttagaagagagtttgtggctaatgtgtcacatgaattgaaaacaccaattacttctattaaaggttttgcggagacgcttattgaaggtgctaaaaatgatgagcaatctcttgatatgttcttgaacatcattttgaaagaatctaatagaatagaatcgttagttatggatttattggatttatcgcatatcgaacaacaaaccgagattgaaacgaactatatgaatttatctgaattagcttataatacgattgataacttgcagactcaagctataaataaaaatattgaaattcaacctgaaattgaaaaagatgtcataatagaagctcatgaaaataaaattgctcaagttattactaacttactttcaaatgcgattaattattctcttgaggacaataaggttattgtacgagtatttagagagggtaaaaaggttaatttagaaattcaagatttcggaattggtattagcgccaaggatcaaaaacatatctttgaacgtttctacagagtagataaagcgagaagtagagattctggcggtacaggtttaggtttatcaataactaaacatattgtcgaagcccataacggacgaatcaacataaatagtagacttggagaaggttcgaccttcaaagttacttttatagatgaataa

SEQ ID NO: 237 - DNA, 2631 bp, Staphylococcus capitis
ttggataaattagtgttaatagatggtaacagtttaagctttagagcgttttatgctttaccattactttctaataaagctggtattcatacaaatgctatatatggctttgcgatgttgcttgagaaaattattaaagaagaacaacccaatcactttttagttgcatttgatgctggtaaaactactttcagacattctaagtacagtgaatataaaggtggacgtcaaaaaacaccaccagaattaagtgaacaatttccttatattcgtcaattattagatgcttatcacattaaacactatgaattagaaaattatgaagcggatgacattattggcacgctaagtagagaggctgataaggctggtttcgaaacgattattattacaggggatcgagatttaacacaattagctactgataatgtcacaatttattacactaaaaaaggtgtgacagatgtagatcactacacgccaagttttatagctgaaaaatatgatgggctacaaccgaaacaaatcattgatatgaaaggtctcatgggagatacttcagataatattccaggggttgctggcgttggtgaaaagactgcaatcaaacttcttaaacaatttacttctgtagaaggtgtttatgaacatattgatgatgtcacagctaaaaaattaaaagaaaaactcgtgaatagtaaagatgatgccttgatgagtaaagacttagctacaattaatgttgaaagtcccattgaggttaatctaaatgatacaaaattagaaaatcaagatgataatactaacaaaatagaattgtttaaaaagcttgaatttaaacaattattggcagatattgatgaaaaagctaataacgatgtagttaacgaaaagacctttgaaattgaatcggattttcaacatatcaactttgatagtttagagcatgcaattattcattttgaattagagggcacaaattatcttaaagataatatcctaaaattcggtttttatgctgatgattcacatgtggtcattaatgctgaagatattaagcaatatcaagatttagtccaatggttagaagataaaaatacgactaaaactgtatacgatgccaaaaaaacttatgtggctgcgcatcgtttaaatatcgatattcaaaatgtgcagtttgatgtaatgttgtctagttatattattgatccttctcgttcaatagatgatgtaaaatcagtagtttcactttatggacagaattatgttaaagataatgtgtcagtttacggtaaggggaaaaaacatcaatttcctgaagaagaagtattaaataaacatgtagcttcaatcacagaggcaattgctaactctaaacctgaaatggaggctcaattagaagagtataatcaagttgagttactcaaagatttagaattaccacttgctaaaattttaagtgaaatggaagaaattggtatttatactgatgttgaagacttaaaacaaatggagaacgaaatccaagaaaaattagatgttttaattaaaaacattcatgaagctgcaggagaagaatttaatattaattctcctaaacaattaggagtagttttatttgaaacgctaaaactacctgttatcaagaaaactaagacaggctattcaacagcagtagacgtattagaacaattgcagggagagcatccaattattgaacatatattggagtatagacaattgtcaaaattacaatcaacttatgttgaaggattacaaaaagtgattagtaaagatcagagaattcacacacgttttaatcaaacgttagcacaaacaggtagactttcaagtgtagatccaaacttacagaatatacctattcgtttagaagaaggaagaaaaattagaaaagcctttaaacctacagataaggatagcgtaatcttatcggctgactattcacaaatagagttacgtgtgcttgcacatattactcaagatgaaagtttgaaagaggcatttattaatggtaacgatattcatactgcgacagctatgaaagtatttaacgtagaagctaatgaagtagatagtttaatgcgtagacaagccaaagcagtaaactttggtattgtgtatggaattagcgattatggcttaagtcaaagtttaggaattacacgtaaaaaagcgaaagcttttatagatgattacttagctagttttcctggtgtaaaacaatacatgtctgacattgttaaagatgcaaaagcagatggatatgttgaaacacttctacatcgacgtcgttatattccagatattacaagtcgtaatttcaacttaagaagttttgcagaaagaacagcaatgaataccccgatacaaggtagcgcagcagatattattaaattagctatggttaagttttatgaaaaagttaaagatactaattatcacgcgacattattattgcaagttcatgatgaattgattttcgagttgcctaaatctgaagtcgaagattttagtaagtttgttgaagaaattatggaacaagctttagatttagatgtacctctaaaagtagattcaagttatggaccaacatggtatgacgctaaataa

SEQ ID NO: 238 - DNA, 873 bp, Staphylococcus capitis
atgccagaattaccagaagttgaacatgttaaaagaggtatagaaccttttgtaataaatgaaaaaattgataaagttattttttcagagaaggtaatcgaaggtaaaaataatcaaagagaaacaattataaaaggtatagagttagatagttttaaaaaattaactgaaggttatgttatatctgaagttcttaggcgtagtaagtacatcgtttttcatattgaaaaagacaatgatcatagaattttgataagtcatttaggtatggcaggaggattttttgtagtagatgatttagaagaaattggaacgccaaattaccgtaaacattggcaagtgattttcgaacttaacaatggtaaaaaattagtttactcagatattagacgttttggagaaattagaaatattgccaattatgaaagttatcctccttttctagaaatagctccagaaccatttgataaagaagcaatgatacattatctaagttgttttgatattaataaatacgctaataaacctattaaacaaatgattttagatcataaagtgattgccggtgctggtaatatttatgcttgtgaagcactttatagaactggtattcgacctgataaaattgctaactcattgagtcatcaacaaaaagagatgttattttattatgttcgagaagttcttgaagagggtattaaatacggtggaacaagtatttctgattatcgccatgctgacggtaaaaccggagaaatgcaattgcatttaaatgtttataaacagaaatactgtaaaacatgtgggcatgaaatagaaacaaaagtgattgccactagaaatagtcatttttgcccaaattgtcagaaataa

SEQ ID NO: 239 - DNA, 600 bp, Staphylococcus capitis
atgccaaagattattggactaacaggtggaatcgcaactggtaaatcaacagtctcagaattattaactgcttatggatttaaggttgttgatgcggatgttgcatctcgaaaagctgttaagaagggttcaaaaggattagatcaaataagagagaaatttggtcaagaagcaattgacgacaatggtgagatgaatcgtaaatatgttggagaacttgtctttaataatccagaacaacgaatagaacttaataagatagttcatcctattgttagagaaataatggaagaagagaagaatcactacctaaatgagggatacaatgtcattatggatattcctttgttatttgaaaatgatttacaagatactgttgatgaagtttgggtagtttacacttctgaaagtattcaaattgaacgtttaatggaaagaaatgatttatcacaagaagatgctaaggcacgtgtgtatagtcaaatatctattgataagaaaagtagaatggctgatcatgtcatagacaatctaggtgataaacttgaattaaaacaaaatttacaacaacttattgaaaaagaaggttatatcgattaa

SEQ ID NO: 240 - DNA, 1026 bp, Staphylococcus capitis
atgtcaacgaatatcgcgattaatggaatgggtagaattggaagaatggtgctacgtatagctttaaaaaacaaaaacttaaatgtcgtagcgattaatgcaaattatccttctgaaactattgcacatttaattaattatgatacaactcatggtacatatgataaaaaagttgaagcaacagaaaatggtattaaagtagataatcatgaaattaaacttgtttctgatagaaatccagaaaacttaccatggaatgaattagatatcgacattgttattgaagctactggtaaatttaatcatggagataaagccattgctcatattaatgcaggtgcaaagaaagtattactcacaggcccttcaaaaggtggagaggtacaaatgattgttaaaggtgttaatgatgacaaacttgatattaatcaatacgacatctttagtaatgcttcatgtactaccaattgtatcggtccagttgcaaaggtcttgaatgataagtttggcattgtaaatggtttaatgacaactgttcatgccattactaacgatcaaaaaaatattgataatcctcataaggatttacgtagagcacgttcttgcaatgaaagtattattccaacttcaactggtgccgctaaagcgcttaaagaagtgttaccagaagttgaagggaaacttcatggaatggctttacgtgttccaactaagaatgtctcacttgttgatttagtcgttgatttagaaaaaaatgtcactgctgaagaagtaaatgaagcatttagacaatcgggcttagatggcattttagatgttgaagatgcacctttagtatcagtagactttaatacgaatcctaattctgcagttttagattctcaatctactatggttatgggtgagaataaagtaaaagtaattgcttggtatgataatgaatggggttactctaatcgtgttgtagaagtagctgaacaaattggagaactgattgagaaagaggccactgttaaagcagtataa

SEQ ID NO: 241 - DNA, 471 bp, Staphylococcus capitis
atgaaatgcccaaaatgtaattcaacacattctagagtagttgattctagacacgcagatgatgcaaatgcaataagacgaagaagagaatgtgaaaattgtggaactcggtttactacttttgaacacattgaagtaagtccgcttatcgttgttaaaaaagatggtactcgagaacaatttttaagagaaaaaatattaaatgggttagtaagatcttgtgaaaagagaccagtaagataccaacaattggaagatattaccaataaagtcgaatggcaattacgtgacgaaggtcaaactgaaatatcctcaagagatataggagagcatgtaatgaaattattaatgcatgttgatcaagtctcatatgttagatttgcatctgtctataaagagtttaaggacgttgaccaattacttgcttcaatgcaaggaatcttgagtgataataaacggagtgattattaa

SEQ ID NO: 242 - DNA, 1386 bp, Staphylococcus capitis
atgggattacagtcgtatgagtatgggttaagacctcaagatagcttcgaggtcatcaaagaatttcaattaacgacagaacatttagaaatattgaaccgtctctttacgccgttaatcggtccgcaatctatagggctttatcactttatcaatcaatttgtagacgtccatcatcattatccactcactcactacatatttatgaatgagttaaaaatcaatcttttagactttagaaagcagatggattatttagaagctatcgggttaattaaaacctttgttaagcatgaagagcagcaaacacgatttgtatatcaattaatacaacctcctacagcttatcaattttttaatgatcctatgttatctgtttttttatatagtgaagtagataaaaatcgttatcagtctttaaagtatcattttgaaaaagacaaaaaggatttaagtcgttataaacaaacgactaggaagtttactgaagtttttaatgtacccaaaaaggttttaaatcaagatttatctaatcttaaacaagctaatcactatagtggtattgatttatccaatgagacatttgatttcgaaatgttgaggcatatgttaaatcaacactttatcagtaatgaaatcgtaactaaagatgctaaagaattaattattcaattggctacgttatatggtttgactgccgatggaatgaaaaaagttatattaaattcaattactagtgcacaacaattatcatttgaagaaatgcgcaagcaagcacgatcatattatttgattgaaaacgaaaatcatttgccaaaattacaattgaaaggtgagtcttttgataaatcacctcaagaaaaagatacacccctagataatactgatgaatggttacaactactggacgaaactagtcctatagatatgttagcgagttggtcaggttctgaacctacgcaatcacaaaaaagtatgattgaagaattaattgatagagaaaaaatgagtttcggtgtgattaatatactgttgcaatttgttatgctaaaagaagatatgaagttacccaaatcttacatattcgaaattgcatcaaattggaagaaaaaagatattaaaacagctaagcaagcttacaactatgcacttcaagttaatcaacctaaaagttatgaccaaaatttcaaagggaatagaaactattccaaacaaaacaagcaacttatttcaaaagagaaaactccaaaatggcttgaaaatagagaggctcaatcaaattcatcagctacaaaagattcaaccacaaaagatgaaaaattagaaaaagatcgaaaagcattcttagaacgtttgaataaaaaatgggaggagggcaatgagtaa

SEQ ID NO: 243 - DNA, 921 bp, Staphylococcus capitis
atgaaaagtttcaagaacataatgggtgcgtcagacgacttaaataaacgtattgagaaaatcaagcaaaatgttataaaagacccagatgttaaagagtttttagagcaacatcaatctcaacttacgaatgcaatgattgatgaagatttaaatgttttacaagagtataaagatcaacagaagcattatgatggtcatcgttttgaagaatgtcctaattttgttaaagggcacgtacctgagttgtatatagaaaatgaaagaattaagattagatatttgaaatgtccatgtaaaattaaacatgatgaagaacgctttaactctcaactcatcacctcacatcatatgcaacgtgatacattagatgcaaaattaaaagatatttacatgactgaacgtgatcgtttggacgtagcgatggctgcagatgaaatatgcacaaatatagctaataatgaaaaagtaaaaggattatatttgtatggcccatttggaacaggtaagtcatttatattaggtgcagttgctaatcaactcaaatcgaagaagatttcatccactattgtttacttacctgaatttattcgtactttaaaaggtggcttcaaagacggtagttttgaaaagaaactagaacgtgtgcgtgaagctaatatacttatgcttgatgatataggtgctgaagaggttacaccatgggtaagagatgaaattatcggaccattattacattatagaatggttcatgagttacctacgtttttcagttcgaacttcgactatagtgaattagagcatcatttatctatgacgagagatggagctgagaaaactaaagcagctagaattatcgaacgtgttaaaacactatctacgccatattatttagaaggtaaaaattatagaaacaattga

SEQ ID NO: 244 - DNA, 1938 bp, Staphylococcus capitis
atggatcaaattaatattcaatttccagatggtaattcaaaagaatttgataaaggtactactactgaagacatcgctcaatctattagcccaggtttaagaaagaaagctgtagcaggtaaatttaatggtcaaatggtagatttaactagaccacttgaggaagatggatcaattgagattgttacaccaggtagtgaagaggctttagaggttttacgacattcaactgcgcatttaatggcacaagctttgaagcgtttatatggtgatgtgaaatttggtgtaggtccggtggttgaaggcggattttactatgactttgatatggatgaaaaagtatcatcagatgattttgaaaaaatagaaaaaacgatgaagcaaatcgttaatgagaattataaaatagaacgaaaagttgtaagtagagatgaagctaaagaattcttcaaagatgatccatataaattagaacttattgatgcaattccagaagatgagagcgttactttatactcacaaggtgaattcacagatttatgtcgtggtgtacatgtaccttcgacttctaagataaaagagtttaaattactatcaactgcaggtgcttattggcgtggtgacagtaacaataaaatgttacaacgtatatacggtactgcgttttttgataaaaaggatttaaaagcgcatttacaaatgcttgaagaacgtcgtgaaagagatcaccgtaaaatcggtaaagatttagaattatttactaatagccaacttgttggtgctggattacctttatggttaccaaatggcgctacaatcagacgtgaaattgaacgctatattgtagataaagaagtgagcatgggatatgaccatgtatatactccagtattagcaaatgttgatttatataaaacttctggtcactgggatcattaccaagacgacatgtttccacctatgaaattagatgaaactgaagaaatggtattaagaccaatgaactgtccacaccatatgatgatttataataataaaccacactcttaccgagaattaccaatccgtattgcggaattaggtactatgcatagatatgaagcaagtggtgcagtttcaggtttacaacgtgttcgtggaatgactcttaacgattctcatatattcgtgagaccagatcaaattaaagaagagttcaaaagagtagtcaatatgattcaagaagtttatgaagacttcggttttaaggattacactttcagattaagctacagagacccagaagataaagaaaaatatatggatgatgatgaaatgtggaataaagctgaatcaatgctcaaagaagcagttgatgaaatgggtctaccatatgtagaagctattggtgaagcggcattttatggtcctaaacttgatgttcaagttaaaactgcaatgggtaaagaagaaactttatctactgcgcagcttgatttcttactacctgaacgttttgaactcacttatattggtagtgatggtgaacaacatagaccagtagttattcaccgaggtgttgtttctacaatggaacgtttcgtcgcattccttactgaagaaactaaaggagctttcccaacatggttagcaccaaaacaagtcgaaatcattccagttaatgtagatttacattatgattacgcccgccaattacaagatgaacttaaatcgcaaggcgttcgtgttgagattgatgatcgtaatgaaaaaatgggttataaaattcgtgaagtgcaaatgcaaaaaataccataccaaattgttgtaggggataaagaagtagaaaataatgaagtcaatgtaagacaatatggttcccaagatcaagaaacacttgaaaaagatgaatttatttggaatttggtggatgaaattcgtttgaaaaaacatagataa

SEQ ID NO: 245 - DNA, 1500 bp, Staphylococcus capitis
atgagtaaaaaagaaaatcaaaatgacggtgtccaaagaggattaaaagaccgtcatatttcaatgatcgctataggcggttgtattggtacaggtctattcatgacatctggtggtgctattcatgatgctggtgcgttaggtgctttaattgcttatgcaattattggtgcaatggtattcttcctgatgacatctcttggggaaatggctacttatttaccagtttccggttcatttagtacatatgctacacgctttgttgatccatcactgggatttgcattaggttggaactattggtttaactgggtaataactgttgctgctgatgttaccatagctgcacaggttatacagtattggtcacctatgcaaggtataccagcgtgggtttggagttgtatctttttagtaattatatttgccctaaattctttatcagtgagaatttatggtgaaagtgaatattggttcgctttaataaaagtaataactgtagttatatttattgtcattggtttattaacaattgttggaattatgggtggtaaatacgtcggttttgatacatttaacaaaggtgatggtcctattctaggtggaaatttaggtggtagcctattatcaattttaggagtattccttgttgcaggtttctcattccaaggaacagaattaataggtatcacagctggtgagtctgaaaatccagaaagagccgtccctaaagcgattaagcaagtgttttggcgtatcttattattttacattctagcaatattcattataggtatgttaattccttatgatagtaagtctctaatgggcggtggagatagcatttctacttctccatttacacttgtgttcaaaaatgctggtcttgcttttgcagcatcatttatgaacgccgttatattaacgtctgttttatctgctggtaactcaggaatgtatgcatcaactcgtatgttatattcaatgagtaaagacaaattagcattttcttcttttggtaagactaacaaaagtggcgtaccttatttatcattaattgctactggtgtacttgttgtaatcatctttgctttacagcatataagtggagatgcatatgaatatattgttgcagctagtggtatgacagggtttatcgcttgggtaggtatagcaataagtcactatagattcagacgagcatttgataaacaagattatgataaaagtaaacttaaatataaggctaagctgttcccatttggccctatatttgcaggtatattatgtataattgttatcatcggacaagatgtagactttataaaaacaggacattttgatcttaatcgttttgttattacttatatgggaatacctgttttcttagcattcttcatttaccataagctacgctataaaacgaaaatgattccacttaaaaaagttgatttaagacaagatgtttcgatggatgaaattagacatcacaataaataa

SEQ ID NO: 246 - DNA, 528 bp, Staphylococcus capitis
gtgtcaaccatagcaaaagatcaaactcaagttaatgagagaattcgtgcaaaagaactacgtttaatcggccaagatggtgatcaaattggtgtgaaatcgaaacgtgaagctttagaaatggctgaacgagttgatttagatttagttgttgtcgcaccaaatgcgaaaccacctgttgcgagaattatggactacggtaaatataaattcgaacaacagaaaaaagaaaaagaaatgaagaagaaacaaaaagtcattaatgttaaagaattacgtttaagtccaacaattgaggaacatgatttccaaactaagttgaaaaatggacgtaaattcttatctaaaggcgacaaatgtaaagtttctattcgtttcagaggtcgtgcgattacgcataaagaaattggtcaacgcgtattagaacaatttgcagatgaatgtaaagatatagcaacagttgaacaaaagcctaaaatggaagggcgtcaaatgtttatcatgttagcgcctatcaatgaaaaataa

SEQ ID NO: 247 - DNA, 201 bp, Staphylococcus capitis
atgcctaaaatgaaaactcaccgtggagctgctaaacgtgttaaaagaactggttctggtcaattaaaacgttcaagagctttcacatctcacttattcgcaaacaaaaacactaaacaaaagcgtcaattacgtaaagctaaattagtttcaaaaagtgatatgaaacgcgtaaaacaattattagcttacaaaaaataa

SEQ ID NO: 248 - DNA, 357 bp, Staphylococcus capitis
atgccacgagttaaaggtggaacagtaacaagagcacgtcgtaaaaaaacgattaaattagctaaaggttacttcggttcaaaacatacattatataaagtagctaaacaacaagtaatgaaatcaggtcaatatgctttccgtgaccgtcgtcaacgtaaacgtgacttccgtaaattatggattacacgtattaacgctgctgcacgtcaacacgacatcagctattctcgtttaatgaacggtttgaagaaagctgaaatcgatattaaccgtaaaatgttatcagaaattgctatttcagatgacaaagctttcggtgaattagttactaaagctaaagaagctttaaaataa

SEQ ID NO: 249 - DNA, 609 bp, Staphylococcus capitis
atgtctaaatttgatgaacaaattatcgttgttccacgaaaagtactttttaatgatgagaaaaatgcttttaatggatttttacataaaaataatattaaaggtaaagatatctttaatgcactaagtgaatacgaagtaaaaagacgtggagatatggaagaggattccaaatttaaacagcttatttcatattgtttattagaaaatgaaaaaggtgaaatccttgtatatgagcgcttatctggcggaggagaagaaaggttgcatggtcaatcttcaataggagtaggtggtcatatgaacgacgttatgggagcagactctatcaatgaagtactaagagttaatgctcaaagagaattagaagaagaagttggccttgcaaaagaagattctcaaaacatggaatatcttggatttattaacgatgataataatgaagtaggaaaagttcacatgggcattgtttttaaaataactgtaagtactactgatgttgaagcgaaagagacagatacccttagaattaaatgggtagaaaagggaagtattgagtcgtatgatgattttgagacatggagtgctttaattcttcaagatttataa

SEQ ID NO: 250 - DNA, 924 bp, Staphylococcus capitis
atgtcaaatgtaattccatttccacaatcagaggagaaaataagaaagcaaattaatgaagctcaaacgagtcttgatcttgatttaatgtatgatttgtttgagaagtatgaaatgcattttgaacttagtgaagaattagcattgaaaaaatgttggatgcttcatcagatgagctcttttttagaattaagagaagaagcaattatattattaaagcgtggattaaattgctatgacgatttaatgatttattatataaaaagtttaaatgggttaggtcaatattaccaagcggtcgaagtaattaatcaaattatcgatgaagttaaaaatcataaaacgagaatggaattatttccattgaaagaatatgcacaatctaaacttgatcaagatagaaaaatgatttcaacttctttatctcaatttgatgagttcaatagtagagaacagacagcactaatcctccaacttattgataacggtcattatcaatttaaagaaagtatcgctcatttattaacaacattagatttacctaataatataaaaagcttgatgctagaatatttaagatttgcgggttatcaacgaacaattgatattaacaaatatcgtcttagtgcagaagttataccatcgaaattatgtggacttgaacatacaataatgaagaaactagttattcctcaagtaattcaaaggcttgaagatggggttttgcatattgtagatgaggctcatcatatcatgaataatcactcgattcttctatatccattaaatattgaagatttgtatgatatagaagattggataaatgcatacgatgtttatttcaaagcgttacttggtatagatataactgttgaaaacttaaacacacttgaattcataaaatctttagatattgaaagctaa

SEQ ID NO: 251 - DNA, 1302 bp, Staphylococcus capitis
atgacagcaacttgggaaaaaaaggaaggtaacgaaggcgtattaacagttacagttccagcagaaaaagtagacaaagcattagatcaagcattcaaaaaagtagttaaacaaattaatgtgcctggtttccgtaaaggtaaagtgcctcgtcaaatttttgaacaacgttttggtgtagaggcattataccaagatgcagttgatatcttattacctgaagcttacggtgaagctattgatgaaactggtatcaacccagtagcgcaacctgaagtaagcgttactcaaattgaaaaaggtaaagactttattttcgatgctacagtaacagttgaacctgaagttaaattgggcgactataaaggtcttgaaattgaaaaacaagatactgaacttacagatgatgaattgcaagaatcaattgatcatagtttaggtcatttagcagaaatggttgttaaagaagatggagctgttgaaaatggcaatacagtaaacatcgacttcacaggttctgttgacggtgaagaatttgaaggtggacaagctgaaggttacgacctagaagttggttctggttcattcattccaggatttgaagaacaattagaaggtatgaaaactggcgaagaaaaagatgtagtcgttacattcccagaagaataccatgctgaagaattagctggtaaggaagctactttcaaaactaaagtcaatgaaattaaatataaagacgttccagagcttaatgatgaaattgcgaacgaattagattctaatgctgaaacagtagatgagtataaagaaaacttacgcaaacgtttatctgaacaaaaagctactgaagctgaaaatactgaaaaagaagaagccattaacaaagcaactgagaacactacaatcgacattccagaggctatggttaacactgaattagatcgtatgattcaagagtttggccaaagaattcaacaacaaggtttagatttacaaacttattatcaaatctcaggtcaaaatgaagatcaactaagagaacaaatgaaagacgatgcagaacaacgcgttaaaacaaacttaactttaactgctattgctgatgctgaaaatgttgaagtttcagacgaagacatcgataaagaattagaaaaaatgagtgaacaatttaatatttcagttgaagatattaaatcaacattaggtaatactgacattgttaaaaatgatgttcgtatccaaaaagttattgacttattaagagataatgctaaatatgttgaatcaacaaaagaagactaa

SEQ ID NO: 252 - DNA, 1263 bp, Staphylococcus capitis
atgttcaaattcaatgaagatgaagaaaatttaaaatgttctttctgcggtaaagaccaagatcaagttaaaaaattagtcgcaggaagtggcgtatatatttgtaatgagtgtattgaattatgctctgaaatcgttgaagaagaattagctcaaaatacgtctgaaggatttactgaattaccaactcctaaagaaataatggatcatttaaatgaatatgttatcggccaagaaaaagctaaaaaatcattagcagtagctgtatataatcattacaaacgaattcaacaattaggaccaagcgatgatgatgttgaactacagaaaagtaacatcgctttaataggtccaacgggtagcggtaaaacattattagctcaaacattagctaaaacgcttaatgtaccttttgctattgctgatgcaacaagtcttactgaagccggttacgttggtgatgatgttgaaaatatactattacgtttaatccaagctgcagactttgatatagataaagctgaaaaaggtatcatttatgtagatgagattgataaaattgctcgtaaatctgaaaatacttcaattacacgtgatgtttcaggtgaaggtgtacaacaagcattacttaaaattttagaaggtacaactgcaagtgttcctccacaaggtggccgtaaacatccaaatcaagaattaattcaaattgatacgacaaatatattatttattttaggcggtgcctttgatggtattgatgaagttatcaaacgtcgtctaggtgaaaaagttattggctttgctagtaatgaagcagacaaatacgatgaagaagcactattagaacaaattagacctgaagatttacaatcatatggtttaattccggaatttatcggacgtgttcctattgttgcaaaccttgaaacattagacgttgcagcacttaaaaatattttaactcaacctaaaaatgcattagttaaacaatatactaaaatgcttgagttagataatgttgagttagaattcactgaagaagcgttatctgctataagtgaaaaagctattgagcgtaagactggtgctcgtggtttacgttctattattgaagaagcacttattgatattatgtatgacgtgccatcaactgaaaatgtaagtaaagttgttataactgaaaatacaattaatgaagagattgaacctgaattatatgattcagaaggtaatcttgttaatgaagataaaacttctgcttaa

SEQ ID NO: 253 - DNA, 588 bp, Staphylococcus capitis
atgaatattaatcctaataatattgaattaataattagtgctgttcaagaggctcaatatcctgagacaaatttgtcagaagttgctttaagcggtcgttcaaatgttggtaaatcaacatttatcaatagtatgataggacgaaaaaatatggctcgaacatctcaacaacctggtaaaactcaaacacttaatttctttaatatcgatgaacaacttatctttgtagatgtaccagggtatggctatgcaaaagtgagtaaagcacaaagagaaaaattcggaaaaatgatagaagagtatttaactcaacgagaaaatctaagacttgtcatacaactcgttgatttaagacataatccgactgaagatgatgtgcttatgtataattatctcaaacattttgatatacctactctagttatctgcactaaagaagataaaatcgctaaaggaaaagtgcaaaagcatttaaaaaatattaaggataaacttgaattagaacctgaggacagtattattagttattcttctattaaaaataataagcaacaaccaatttgggatctcatctcaacttatttataa

SEQ ID NO: 254 - DNA, 1347 bp, Staphylococcus capitis
atgcattttattgcaattagcataaatcatcgaactgctgatgtagcactaagagagcaagttgcttttagagatgatgccttgcgattagcccatgaagatttatatgaaactaaatctattttagaaaatgtcattttatctacatgtaatcgtactgaagtatacgccgttgttgatcaaatccatacaggacgctactatattcaacgatttttagcacgttcatttggattcgatgtagatgatattaaagtaatgtcagaagtcaaagtgggggacgacgcagtagaacatttattgcgtgtgatttctggtcttgattcaatagtacttggtgaaactcaaattttaggtcaaatgcgtgatgcattcttccttgcccaagaaacaggtactactggaacgatatttaatcatttatttaaacaggcaattacttttgctaaacgcgcacatagtgaaacagatattgcagataatgcagtaagtgtttcatacgctgcagttgaattagctaaaaaggtattcggtaaattaaaaagtaaacatgctgtcattattggtgcaggggaaatgagtgaattatcactcttaaatcttttaggttctggtatctcaaacattactattgtcaatcgtactctagctaaagcagaaattttagctaataaacataatgtatcatttgattctttagatgctttaccttcattgttagagcaaactgatattgtaatcagctctacaagttctcaagattatatcattactaatgaaatgattaatcaaatttctgatcgtagaaaagttgattcattagttatgattgatatagcggtaccgcgtgatattgaaccaggtatcgatgcaatcactaatatttttaactatgacgttgatgatttaaaaggtttagttgacgctaatttaagagaacgtcaacttgcagctgaaacgattgcacaacaaattccagctgaaattgactcacacaatgaatgggttaatatgttaggtgtcgtacctgtcattcgagcattacgtgataaagctatggatatacaatcagaaacgatggatagtattgaccgtaaattacctcatctttcagaaagagaaagaaaagtaatttctaagcatacaaaaagtattattaatcaaatgttgaaagatccaatcaaacaggctaaagaattaagtagtgataagaaaagtactgaaaaattagagctatttcaaaacatttttgacattgaagccgaagatcctagagaaaaggctaagctagaaaaagagagtaaagcacaggagatttctgctcgtcgaatttttagttttgaataa

SEQ ID NO: 255 - DNA, 813 bp, Staphylococcus capitis
atgcaagaaaccctgtttattcgatttcatgaaattatattaattatatatattctaagtatagtgttctattttatagattttattagtaaaagttataaagttaggactttaggcgtttattcattagggattgtttgggtattacaaacaatctctttatctgtttttatcattcaaactcaaaaagtgcctttaaattcgatatttgatgtctttttcacacttacgtggattattatttcactttctttaatattgaatttaattaaagttcttaatttctccgttttctttttgaatttagtaggattagcacttatggcgatgaacacgtttcagcctgaacactatcaaacacaggtacaacaagtagctgtgatcaatgaacttttacttgttcatattggtttagctgtgttaagttatgccttttttgcagtagcatttgtgaatgctttgctatacattattcaatatagaaacttaaaagagaaaatttttgatcaaaattactttagaattggtagcgtcgctactttagagtcgattatattttactccacactaataggcattatcgttcttattttgagtattattttaggtgctcaatggggcgtttttgccatcggtaatcgtatttttatagatccaaaagttatcttttcttcaattattactttattatatggtgtttacatcctgttacgtattagaaaatggattacacaaagaaatttaatttattttaatatcattctattctgtcttagtatgattaatttattctttacaacgcactttaattaa

SEQ ID NO: 256 - DNA, 930 bp, Staphylococcus capitis
atgcgtaaactcgttgttggatcacgtagaagtaaactagctttgactcaaagtcaacaatttatagataaattaaaaaaagtcgatcctgatttagacatcgaaatcaaagaaattgttacaaaaggggaccaaattgtagataaacaactatccaaagttggaggtaaaggtctatttgttaaagaaattcaaaatgaattatttaataaagaaatcgatatggctattcattctctgaaagatgtgccaagtattattcccgaaggtcttacattgggatgtattccagatcgtgaagttccattcgatgcttatatttcgaaaaaccacaccccactgagtgagttaacagagggtagtatagtcggtacaagttcacttcgtcgaggcgcacagattttatctaaatatcctcatttagaaattaaatggattcgcggtaatatagatacgcgtttaaaaaaattagaaacagaagattatgatgcaattatactcgctgcagcaggtctaaaacgtatgggttggtcagacgacatagttacaacttatttagataaagatgtccttctaccagctattggacaaggagcactaggtatagaatgtagaagcgatgataaagaacttttagagttgcttaaaaaagtgcataatcaagatgtcgcacaatgtgttactgctgaacgtaccttcttgtcggagatggatggcagttgccaagtacccatcggtggatacgccactatagatggtgataagcaaatcgagttcacaggattaattatgacaccagatggaaaagaacgttatgaacatactgccaaaggtttagatcctgttgaattaggtcaagaagttagtcgcgtattgaaagaacaaggcgcttatgaaattattagaaagttaaatgaggaaaataattaa

SEQ ID NO: 257 - DNA, 684 bp, Staphylococcus capitis
atgatgaaaccagttatagttatgacccaaacaagtaaagttcaaagtaatttagtcaatattattcataaaccattgattcaaatacaagaactttcgtttaatgagcatttgcttaatcatgactatgactggcttattttttcttctaaaaatgcagtcaaatacttttatgagtatttaaaaagcgttaaagttaagaaggtagcagttatcggcgagaaaacggctcaatactgtgaggatttaaatataaatgttgattttattccaagtgatttttctcaagaaggatttcttaaagagtttaattctatgaatcagcgaatcttacttccttctagtcagcttgcacgaccgaaattagcacatcaattgaataataataatgttgtgattaagattgatttatataaacctatacctcaccatcaaaatattaatgaggttaaacaacttgtaaaaaataatgaattagatgctataactttctcaagctcatctgcagttcgttattattttgaaaatggagatactccagagtttcaccattactatgcgataggtaagcaaacagctacagttcttaaaaattataatcaaaatgtgcaagttgctgattcacaaacttcggaatcaataatagccaaaattttagaaagtagggagaataatgaaatttga

SEQ ID NO: 258 - DNA, 975 bp, Staphylococcus capitis
atgaaatttgatagacatagaagactacgttcttctcatacaatgcgagatttagtgagagagacacacgtgagaaaagaggatttaatttatcctattttcgtagtcgaacaagatgacattaaatctgaaattcattcactacctggtgtatatcaaattagtttaaatctattacatgaagaaattaaagatgcttatgatttaggcattagagcaataatgttctttggagtgcctaataacaaagacgatgtaggttcaggtgcatacgatcataacggtgttgtacaagaagcaacgcgtattgctaaaaaaatgtatgatgacttgttaattgttgcggatacttgtctatgtgaatatacagatcacggccattgtggcgttattgatgatcatactcatgatgttgacaatgataagtcattacctttattagttaaaactgctatatcacaagtagaagcaggcgcagatattatcgctccaagtaatatgatggatggtttcgttgcagaaattaggaaaggcttagatcaagctgggtacgaaaatattccaattatgagttatggtattaaatatgcgtctagtttcttcggtccgttccgtgatgcagcagattcagctccatctttcggtgacagaaaaacttatcaaatggatccagcaaatcgtttagaagcattgagagaattagaaagcgatcttaaagaaggttgcgatatgatgattgttaagccagctttaagttacttagatattgttagagacgtaaaaaataatactaatgttcctgttgttgcatacaatgtcagtggtgaatatagcatgactaaagctgcggccctcaatggttggattgatgaagaaaaaattgtgatggaacaaatgatttctatgaaacgtgctggtgcggatttaatcatcacttactttgctaaggatatttgtcgctatttagataagtaa

SEQ ID NO: 259 - DNA, 1284 bp, Staphylococcus capitis
atgggttatgaaaaatctataaaagctatggaaacagctgaaaatttaatgcctggaggtgttaatagccctgtcagagcatttaaatcggtagatacacctgctatttttatggatcatgcagacggttctaaaatatatgatatagatggcaatgaatacattgattatgtactaagttggggaccactaattttaggacataaaaataaacgtgtgatagaaaagcttcatgaagcagttgataacggtacaagttttggtgcttcaacgttacaagaaaataaactagcagaactcgtgattgacagagtgccatcaatagaaaaagtaagaatggtgtcttcaggtactgaagctacacttgatactctacgtttagctagagggtatacaggtcgtagtaagataattaagtttgaaggttgctatcatggtcatagtgattctttattaattaaagctggttctggcgtagctacattaggattacctgactctcctggtgtaccagagggaattgctaaaaacacaataacagttccttataatgatttagaatcattaaaattagcttttgaaaaatatggtgacgatatcgctggtgtaattgttgagccagtagcaggtaatatgggtgtagttccgcctttagaaggattcttacaaggtttacgtgacattacaaatgaatatggttctttacttatttttgatgaagtaatgactggtttccgcgtaggatataattgtgctcaaggttactttggtgttactccagacttaacttgtttaggaaaagttattggtggcggattaccagttggtgcatttggtggtaaaaaagaaattatggatcaaatagctccagtaggaaatatttatcaagctggaactctatcaggaaatcctttagcaatgacgagtgggtatgaaacattaagtcagctaactcctgagtcttatgaatattttaatgaattaggggacattcttgaaaaaggtctaaaagatgtgttcgctaaacataatgtacctattactgtaaatagagcaggctcaatgataggatacttcctaaatgagggccctgttactaattttgatgaagcaaataaaagtgatttagaactatttagtaatatgtatagagaaatggcaaaagaaggtgtattcttaccgccatctcaattcgagggtactttcctttcaatggctcatactaaagaggatattgaaaaaacaattcaagcatttgataacgcactaggccgtattgtatga

SEQ ID NO: 260 - DNA, 1068 bp, Staphylococcus capitis
atgaataatatacagagaaataactttattgtcttagcattagctataataataagtttaatattgaagatttctcacatactgttgcctttcatgtttggaccaattattgcagcggttatttgtgtgaaagcatttaaattggagatcaaatggcctttttggttaagtcaaatcggtttaatatttcttggcgtacaaattggttctacttttacgaaaacagtgatcggtgatataaaaaatgattggttaacaatcatcatagtaactgtacttttattagtcttagcattattaatagcttatttctttaagaaaatagctcaagttaattcggaaacagctattttaagtgtaattccaggtgcattaagccaaatgttaattatggctgaggaagataagaaagctaatattttagttgtaagtttaactcaaacatctcgtataatatttgtggttatattagttccgttgatatcatatttttcccaagattcccataataccactggggaacatgtaagcaaagcgccagcattgacacatgctcttgatttttggcaaatattcataatatttttagctgtagcaatagtttatttcttgatggcgaaaattaactttcctactaaacaattgttagctcctatatttgtcttaattgtttggaatatgactacaaatttaaatttcactttagataattggttactcgcatctgcgcaagtgatttatatgatacgtataggccttcaaattgctcatctacttaatgatttaaaaggtcgtatcgcagtagctattgcttttcagaatataatgttaattatttcggcttttataatggtggttatcattcatcttttcacgcataattcaattaatgaattattcttaggtgcagccccaggaggtatgagtcaaatagttttagtagctatagctactggtgctgatgtagcaatgatttcaagctatcacatctttagaattttcttcattcttttcttagttgcacctgtgattaattacttcttaaaatttagagcgaaatctcgttaa

SEQ ID NO: 261 - DNA, 561 bp, Staphylococcus capitis
atgaatgagtgcgcctttggtactaaagatgaaacatatttagaatatcatgattatttttggggtcaacctttatatgatagtaaagaactttttaagttaatcgccttagaatcccaacatgccggtttatcatggcttaccatcttaaagaaaaaagaatcctatgaagaagcattctataatttcgaaccaaaaaaggttgccaaaatgtctgataaagatattgatcgccttatggaatttcctaatatagttcataatagaaaaaagttagaagctattgttagccaagcacgaggttacttacaaattgaaaaagattataaaagttttagtgattttctttggtcatatgttaatcatcaacctattaatatgggttataaaaaacccagagatcgtaaaacagtagatgatagagctacacaactttctaaagatttaaaaaaatatggttttaaatttttaggtcctgtcactgtattttcatttcttgaggctgcaggattatacgattcacatcttgaaggatgccctgttaaaccgagtcattcttag

SEQ ID NO: 262 - DNA, 2631 bp, Staphylococcus capitis
atggaaatgaaaccgaaatacgacccaagagaagtagaagctggtcgttatgaagaatgggtaaaaaatggttattttaaaccatcagaagataaatcgaaagatacatatactattgttattccgccgccaaatgtgacgggaaaattacatttaggacatgcgtgggacacaacgttacaagatataattactcgtatgaagagaatgcaaggatatgatactttgtatcttccaggtatggatcatgctgggatagctacacaagcgaaagtagaagcaaaattaaatgaacaaggtatttcaagacatgaattaggtcgagaaaaatttctagaacaagcttgggattggaaagaggaatacgcttcatttattagacaacaatgggctaaactaggcttaggattggattatagtagagagcgtttcactcttgatgacggtctaagtaaagctgttagaaaagtatttgttgatttatataacaaggatataatttatagaggcgaaagaattattaactgggatcctcaagctagaacggctttgtctgacattgaagttattcatgaagatgtgcaaggtgcattttatcactttaaatatccttacgcagatggtgaaggttatattgaaattgcgactacccgtcccgagacaatgttaggtgatacagcgattgttgttaaccctaatgatgaacgttataaagatgttattggtaaaaaagtaattttaccaattgttggtagagaattgcctatcttagctgatgaatatgttgatatagaatttggttcaggtgcaatgaaagtcacacctgcgcatgatccaaacgactttgaaattgggcaaaggcatgatttagaaaacatcatagtaatggatgaatacggtaaaatgaatgagagatctggtaaatatgaaggtatggatcgtttcgaatgtcgtaaacaactcgttcaagatttaaaagatcaagatttagttattaagatcgaagagcatacgcattctgtaggtcactcagaaagaacaggtgcaatcgtcgaaccgtatttatcaacacaatggtttgttaaaatgaaacctttagctcaaagagcactagataaccaaaaaacagacgacagaattgatttcttcccaggtcgtttcgaaaacacatttaatcgttggatggaagaaataagagattggactatttctcgtcaattatggtggggacatcagattcctgcttggtatcataaagaaactggtgaaatctacgtaggggaagaagcaccaaatgacattgacaattgggagcaagatgcagatgtattagatacttggttctcaagtgctttatggccattttctactttaggttggccagatactgaatctgaagactttaaacgttattatccaacgaatgctttagttacaggttatgacattattttcttctgggtagcaagaatgatattccaaggattagaattcacagatagaagaccatttaatgatgttttactacacggtttagtaagagctgaagatggacgtaaaatgagtaagtcattaggtaatggtgtagacccaatggatgtaattgatgaatatggtgcagatagcttgagatactttttagctactggttcatcaccaggtcatgacttacgctattcgactgaaaaagttgaatctgtatggaattttataaacaaaatttggaacgctgcgcgctttagtttaatgaatattggtgaagagtttaaagtagaagatatcgatttatctggaaacttatcgcttgctgataaatggattttaactcgcctaaatgaaacaattaaaaccgtaacagatttaagtgacaaatatgagtttggtgaagtagggcgtgcgctttataactttatttgggacgaattctgtgattggtatattgaaatgagtaagataccaatgaatggtgatgatgaagctcagaaacaaactacacgttcagtgttaagttatgttcttgataaaattatgaagatgttacatccatttatgccttttgttacagaaacaatctggcaaagtttacctcatgaaggtgaaactatagttaacgcagattggccaactgttaactctgaatatatgtttgacgaaagtaaacaaacaatgcagcaacttgttgaaatcattaaatctgttcgtcaatcaagagttgaagtgaatacgccactttctaaatcaataccaattttaattcaaactaaagatgataacgttaagcaaacattgaaagataatgcgagttatttacacaaattctgtaacccaagcgaactcactattgatacagaagttgaaattcctgaaaaagctatgacatcagtagttgtagcgggtaaagttgtgttaccgcttgaaggacttattgatatggataaagaaatcgctcgcttagaaaaagaactagataaacttcaaagtgaattagatagagtagacaaaaaattatcaaacgaaaactttgtaaataaagcacctgagaaaattattaatgaagaaaaagaaaaacaacaacattatcaagagaagtataatggtgttaaatcacgaatcgaacaattaaaagcatag

SEQ ID NO: 263 - DNA, 1266 bp, Staphylococcus capitis
atgaattacctagacagcttgtattggatacatgaaagatcgaaatttggtattaaaccaggtgtcaaacgtatggaatggatgttagaacaatttaataatcctcaagataaaattagaggtatacatgttggcggcaccaatggtaaagggtctacggtagcatatctaagaactgctttggttgaaaatggttatgatgtcggaacctttacatctccgtttatagaaagttttaatgaacgcattagtttaaatggcacaccaattactaatgatgaaattgtagatttagttgagcgtgttaaaccagttagtgaagctttagaaaatgaaacagaacttggtggagcaacagagttcgaaattattactactatgatgttcctttacttcggtgaaatccatccagttgatttcgttatcatagaagctggtttaggaattaaacacgattcaacaaatgtatttaaaccaattttatcaattttaactagtattggattggatcatactgatattcttgggtcaacttatctagatatagcaaaagataaatcagcaataattaaaccatatacaccagttatctatgctgtgaaaaacgatgaagctcttaagtatgtgagagactatgctttagaacaaaacgctaaaccaattgagttagatagagaagtaaccatcatttcacaagatgatgagtttacttaccgatataaggattatgaactagaaactatcattttaaatatgatgggtgaacatcagaaagaaaatgcttccttagcaattacggcgcttattgaacttaatgaagcggatattattgatttagattttaataagatgattgatggtattgaatctgtaaattggactggacgtattgaacaagtgaaagaacagccgcttatggttatcgatggtgcacataataatgaaagtgtagaagctttaatcgatactattaaacattactatggtagagataaaattgatgtactcttctcagcaattaaaggcaaaccaattaattcgatgattcataatttaagtgaaattgcctcgcagttttatttagcggatttcgattttcctaaagctttaactaaagaagaaattgctgatgaaactaatttagataatgtagaacttgtagaagattatgtacagtttattgaaaattacactggtgaaggtttaatcatcacgggtagtttgtattttataagcgaaataaaagcaaaaattaaatttaactaa

SEQ ID NO: 264 - DNA, 711 bp, Staphylococcus capitis
atggctttactggcttattcatgtagtgtgatatttagttttttataccaatttagtcacaagggtacattaaaatttaattatttcttttcaagatccgtttgtgatcattgtaatcaaaatgttaagccttatgacttattaccgattttgagctacatattactcaaagggcgcgctcgctgttgtcacaagaaattacaaatatattatttgataggggaagttttagcgcttataccaatatttttgtattacttttcacatggtaatatcaatttttctcatttcttattaacttttctttttttactcagtttctctatatacgatattaacaatctatcgatcgacataagattgtcctcagtctatgttatagtagccttcttttgttcacatttatatcttcatacttttataattacttttttaatttcgcaattgttatatctaattctacgtaaatatataggttacggagatatcgtaatttttaacatgctgtctttattcttacctttaaattttcttatttatttatgtatgtttacttttatttttggcggttttatatccatttttataaaacttttgattaataaagatttaaaatatattccattaattccttttgtcttcctctctttcattttcacttcgcttttctataatgatttaaatattgtattaggaggaacatattattga

SEQ ID NO: 265 - DNA, 684 bp, Staphylococcus capitis
ttgaaaataaatgaaatggcaatttccgagaaacctagagagcgtcttatgaattacggtgcaaaaagcttatcaaatgtggaattgctggcaatacttattaatactggtagaaaaggcttctctagcattgatattgctaatgaacttataaaaagtcatcattctattagagatttaaaaaaattatctatcaatgatttattaaaagtaaaagggattggattgtataaagcaattatattgcaagcagcttttgagttaggagaaaggctaaatgcatcaagcacgatagataaagttaaaattactcatccgagtgacgtggctgatttgatgatgtcttctatgaaagatttagatcaggaacattttgtagtattactacttaattcaaaaaatatagttataaaacaatcttggatctttaaaggaacacttaatagttcgattattcatccacgtgaggtatttaatattgcaattagagaatcctctaatgctatcattattgttcacaaccatccttcaggtgatgtaacaccctctagagaagacattactacgactttacgtttaaaagagtgtggtgctattttaggaattgatgtacttgatcacatcatcattggagataatcaatttacaagtttggttgaagcaggctattttgaggagcattaa

SEQ ID NO: 266 - DNA, 282 bp, Staphylococcus capitis
atgagtttatttctaattttaggtataatcatgccagtggtttacgtaataagacttaatatcctagataatataatgactattagacgtggtttcataacgattattttatcgattataggtatagttacagcatctttgttaggtagtatagtaacaaagcaattgaatgaattaatatttataatcattggagctataataacaggtgtattgtggggattacttctagtggggagttatatattaataaattggttatctaaattaattaaaaaataa

SEQ ID NO: 267 - DNA, 483 bp, Staphylococcus capitis
atgagatttatatttagtatagttaagaatattattgctgtgctagctattattgctattatttatatagcattgaagtatgcccctttccttagagatcaagaatggaatcctttacatgaaagtactaattatattcaacaaaatatgcatgatactccggcaaataacagactacctgctcagccacaaaacggcaaaagttattcattaaaagaaaacgacatcatcaataatgtcccttctagtcaaattaaaaatgtatttaatatgattgataagaaagaatttatgtcagtatctggtataggtagaatgggctataataataaatacttagcaggccaaagaggggacgaattcataatatataaatttggttcagattctataagagtatataacacagagtttgaaatgcaacaggatctaaataaattaggacaacatatagagttaaaaccatcagaagcttttaagtaa

SEQ ID NO: 268 - DNA, 141 bp, Staphylococcus capitis
atggctgaacaatcaaaagaaaaacaagctaacgaacaagcaaaagcacaaaatctttttgctcgttggagaaaagaagaaacactatatagcgaagacgaaaagaaagataaaaatgatagcgaagatgaaactaaataa

SEQ ID NO: 269 - DNA, 843 bp, Staphylococcus capitis
gtgcttaattttttcaaaaataacaagctcattgttgttttatgtgcaattatcgtttttatagcgttaattggtttatccattcgttcccaaaaccaatcacctcctgaacaatatgtaggagactcagtttctttaggacaaagagttgtgagttatcctattcattttgtaactggagctattggaaatattttcaataatggtggatcgaaagaagataaaaataaaattaaacaacttgaggcaaagaatcaaaagttagaaactgaaaataaaaagtttaaaaaagaattagacgttaaagatttatcaaaatatgagcctatttcaacaacagtgattgctagaaacccagatcagtggatgaatacaattgtgatagacaagggttctaaatctggcattaaaaataatatggcggttatgacttctgaaggtttagttggtagagtcacaaaggtaaatcaattttctgctcaagtcgatctaatttccactcatacgagagcaggtaaactttcagttaacgtacaacacggttctaaaaatgtttttggtttgattgatcattatgatgctaaaaacgaagaattagtgattagtgatattaacaacaaagatagtgtgaaaaaaggagataaggtagtaaccagtggcttagctgaccagttaccaagtgatctttacataggtgaagttacagatgttgaaaatgatcaatacggacttgccaaagaggtaagagttaagactggtgctgatttagctgacttaaatcatgtatatgttgcaaaacgtgatgtgagcacgattcccgatgatgaaagcagggataactaa

SEQ ID NO: 270 - DNA, 522 bp, Staphylococcus capitis
atgcgaacgctttattatttactaattggagtacttttattttatatagatacggctataggattagttattccattgcatttcggtaaaatcgacattatctttgttcctcatttaactttaatgtacatattgataatgactgtatatagaggtcttggtgtatcaattgttcttgctatctttttcggaatagttacagatttatattttggaagtatatacggtttatatatgtttggttacattatattagttgtgattgtagataaattctttaaagtgttttatcgagaccatacaatgctatttagcatcgtgttgttaagtacagtgatacttgaaatttatgtagcagccatatatgcagtaattggatttattcaatttgattttattgattttattttattcagattaatctcaacgtttataattaattttatcttattattaattttatatcctatcatcataaaatttacgcgaaaaatgcaaaacgcaattgacagtaaagcttag

SEQ ID NO: 271 - DNA, 309 bp, Staphylococcus capitis
atgtttgctattattgaaacaggtggaaaacaaatcaaagtagaagaaggtcaagaaatcttcgttgaaaaattagatgtaaatgaaggtgactcattcacttttgataaagtattatttgtaggtggagattcagtaaaagttggtgcgccaactgttgaaggtgcgtcagttactgctactgttaacaaacaaggacgtggcaaaaaaatcactgtattcacttacagacgtcgtaaagactcaaaacgtaaaaaaggccatcgtcaaccatttactaaattaactatcgataaaattaacgcataa

SEQ ID NO: 272 - DNA, 321 bp, Staphylococcus capitis
atgattactgttgatattacagttgatgatgaaggcaaagtcacagatgtgatcatggatggtcatgcgaatcatggtgaatatggtcatgacattgtctgtgctggtgcctcagcagttttatttggtagtgtgaacgcaattatgggattgacatcagaaaagcctgacatcgattacgatgatgatggtggtcattttcatataagaagtgttaatactaataacaaagaagcgcaattaattcttcaagcgatgttagtttctttacaaacaattgaagaagaatataatgagaatatcagattaaattataagtga

SEQ ID NO: 273 - DNA, 285 bp, Staphylococcus capitis
atgttaaaattaaacttacaattcttcgcatctaaaaaaggggtaagttctactaaaaacggacgtgactctgaatctaaacgtttaggtgctaaacgtgctgacggtcaatatgtatcaggtggttcaattctttatcgccaacgtggtactaaaatctaccctggtgaaaatgtaggtcgtggtggcgatgatacattattcgctaaaatcgacggcgttgttaaatttgaacgcaaaggtcgcgacaaaaaacaagtttctgtatacgcagttgctgaataa

SEQ ID NO: 274 - DNA, 1293 bp, Staphylococcus capitis
atgtttgtcgatcaagtcaaaatatctctcaaagcaggtgatggaggtaacggaatcactgcttatcgaagagaaaaatatgtaccttttggtggaccagctggaggtgacggtggtaaaggtgcctcagttgtatttgaagtagatgaaggtttaagaacacttttagactttagatatcaaagacactttaaagctaaaaaaggtgaaaatgggcaaagtagcaatatgcatggtaaaaatgctgaagacttagtattaaaagtgcccccaggtacaattattaaaagtgtagaaactgaagaggttttagctgacttagttgaagacggtcaaagagctatcgttgcacgtgggggccgtggtggtcgtggtaactcacgttttgctactccacgtaatccagcacccgatttcagcgaaaatggtgagcccggtgaggaactagatgtaaccttagaacttaaattattagcggatgtcggtttagttggtttccctagtgttggtaaatctacgttattatctattgtttcaaaagcaaaacctaaaatcggagcttatcattttactacgattaagccaaacttaggtgtagtttctacgccagacagtagaagttttgttatggctgatttacctggtcttatagaaggtgcttcagatggcgttggtctaggtcatcaatttttaagacatgtagaacgaactaaagtgattgttcacatgatagatatgagtggttctgaaggaagagatcctattgaagactataaaatcatcaatcaagaacttgttaattataagcaacgacttgaagatcgcccacagattgtagtggctaataaaatggacattcctgacgctaaagataatttagaactttttaaagaggaagttggcgaagatattacaattgttccggtatcaactatcacacgagataacatagatcaattgttgtatctcattgctgataaactagaagaagttaaagatgttgacttctcagttgaagaagatgaaaatataggcgtcaatcgtgttttatataaacacacgccttcccaagatgcatttacaattactagagacgacgatggtgcttatgtagtaagtggtaatgcaattgaaagaatgttcaaaatgactgatttcaatagcgatcctgccgttcgtcgattcgcaagacaaatgcgttctatgggtattgatgatgcgttaagagaaagaggatgtagtaatggagatatcgttagaattctaggtggagaatttgaatttgtcgaatag

SEQ ID NO: 275 - DNA, 456 bp, Staphylococcus capitis
atggacaataaagactatagaaagttttatttaattagagaagatgtattacctgaatctgttgttaaaactttgaaagttaaagatgctttaaaaaacaatcctgaattgtccatttatgatgcagttaaacagttcaacttatcccgtagtgccttttataaatatagggaaactatatttcctgtagatgaaaagatgctagatcatagggagtttacactcattttatatgttaatgatatagtaggaatgttagcacaagtattaaatacaatttcaagacttcaattatctgtattaacgatacatcaaagtgtacctatggaagataaagctacgattactttatcacttaacgctcaatcatcctatctctcaattgatgatgtagtcaatacacttagagaaatagagcatgtttcaaaagttgagttaattagtatgagtatgtaa

SEQ ID NO: 276 - DNA, 603 bp, Staphylococcus capitis
atgtatgcttatgtaaaagggacattaacgcaattatttccaactcatgtagtggttgaaacttcaggaataggttatgaaattcaaacacctaattcttatcgttttcaaaaatatttaaatcaagatgtacaaattttcacttctttgattgttagagaagatgcacaattgttgtatggattcattagtgaagaagagaaagatatgtttcatagtttaattaaagttacgggaattggtcccaagtcagctttagctattttagcagctagttctccaaatgaagtgaaaagagcaattgaaaatgaaaatgatgcttatctaactcagttccctggcattggtaaaaaaacggccagacaaatcgtattagatttaaaaggtaaagtcaccattactgaggaagattcagaatcattgcttcaagtcgatgttaataataatgaacaaagtcaagttgttaaagaagctatgttagcattagaagcattaggatactcaaaacgtgaactttctaaggttgaaaaagtgttaaacaagcaaagtgtatctagtgtagacgaagctgtaaaattaggcttacaaacgttagtttcttaa

SEQ ID NO: 277 - DNA, 1005 bp, Staphylococcus capitis
atggataaaagaatggtcgatcaacaatttcataatgaagattcggatttcgaattatcattgagacctactaaactcaaacaatatattggtcaaacctctattaaaagtaatttagaagtgtttattaaagctgctaaattaagagaagaacctctcgatcatgtgcttttattcgggccaccaggattaggtaaaacaacactttcaaatattatagctaatgaaatggaagttaatatacgtacaatctcaggtccttcattagaaagacctggagatttagctgcaattctttcaggactacagccaggtgatgtgcttttcatagatgaaattcatagattaagtagtgtcgttgaagaggtactctatccagcaatggaggatttctttttagatattattattggtaaaggtgacgaggcacgtagtattagaatagatttaccaccatttacactagtgggtgctacaaccagagcaggtagtttaacaggaccgttaagagatagatttggggtgcacttgagacttgagtattataacgaaaatgatctcaaagaaataattactcgaactgcagatgtacttggtactggtattgatgaagagagtgctttagaattagctcgacgttctcgtggtacaccaagagtagcaaatcgtttattgaaacgtgttagagactttcagcaagtcaatgaagatgatcaaatttatattgaaacaacaaaaagagcattacaattacttcaagttgataaagaaggtttagattatatagatcataaaatgatgaactgtattatcaatcaatataatggtggcccggttggtttagatacaattgctgtatctataggtgaagagcgcattactattgaagatgtttatgaaccatttttaatacaaaaaggctttttagagcgaacaccacgtggacgaaaagcgacgcctttcgcttacgagcattttaataatacgaatgaaaagagggagtaa

SEQ ID NO: 278 - DNA, 1026 bp, Staphylococcus capitis
ttgaatattgaagaatttgactatcatttgccagaatctttaatagctcaaacacctttaaaaaatagagaccaaagtcgtttgcttgtgcttcaaagagagactggtaaaatgactcacctccattttaaagatgtcattgattatttaaatcctggagatacactggttttaaatgatacgcgagtgatgcccgcaagactatttggcttaaaagaggaaactggcgctaaagtagaaatgcttatgcttactcaaattgagggaaacgattgggaagtattgctaaaacctgctaaaagaatcaaggtgggtaatcgcttatcatttggcgacggaaaaattgttgctgaatgtattaaagaattagaacaaggtggacgtattatgcgtctacactatgatggtattttacaagaacgacttgatgagcttggtgagatgcctttacctccatacattaaagaacgtcttgatgatccagataggtatcaaactgtatacgctaaagaaagtggttctgctgcagctccaactgcagggttacattttacggatgatttattaaatcaaattaagcaaaaaggggtcaatatcgcttttataacattgcatgtagggttaggcacgttcagaccagttagcgttgataacattgatgatcacgaaatgcacagcgaatattatcaaatgactcaagaaactgctgatttacttaatcaaacaaaggccaaaggtaaaagaataatttcggtgggaacaacatctacacgtactttagaaactattagaagagaccacgagcaatttgttgaaaaaagtggctggacggatatatttatttatcctggatttgaatataaagcgattgatggattaattactaattttcatctacctaaatctacattagtaatgctagtttcagcatttagtactagagaaaatattttaaatgcatatcataaagcggtagaaatggagtacagattcttcagttttggagatgcaatgttaattatttaa

SEQ ID NO: 279 - DNA, 1140 bp, Staphylococcus capitis
atgcctgcggtaatttatgagcatattaaaacatgtaaacaatcaggggcaagattaggtattgtacatacaccacatggttcatttgagacaccgatgtttatgcctgtgggaacaaaagctacagttaaaacgatgagccctgaagaacttaaagatattgaagcaaaaatcattttgggcaacacatatcatttgtggctacaacctggaaatgatatcatcaagcatgctgggggcctacatcaattcatgaattgggatggtccgattttaacagactctggtggatttcaagttttcagtttgagtaatttgcgtaaaataactgaagagggcgttgaatttagacatcatactaacggttctaaacttttccttagccctgaaaagtctatgcaaatacaaaatgatttaggttcagatatcatgatggcgtttgatgaatgtccgcccatgccatctgaatacgattatgttaaaaactctattgaaagaaccacacgctgggcagaaagatgtttaaaagcgcatcaacgtcccgaagatcaagcattgttcggtattattcaaggtggagaatacaaagatttacgtgagcaaagtgcgaaagagcttgttgaccttgattttcctggttatgctatcggaggtctgtctgtgggagaaccgaagccagttatgtatgacatggttgaacataccgaacaatttatgccgaaagataaacctagatatcttatgggggtaggctcacctgatgcattaatagagtgtagcatcagaggcatggatatgtttgattgcgtgcttcctactagaatcgctcgaaatggtacatgtatgacttcaaaaggtcgtgtagttatcaaaaatgcaaaatatgcagatgaccttggaccattagatgataattgtgactgttatacttgtcgtaattattcaagagcatatattagacatttaatcaaagcggaagaaacttttggtatccgtcttactactattcataatttacattttctgctaaaattaatggaagatataagacaagccattcgagaagaccgtcttttagactttaaagatgcgttctttgaacagtatggattaaatgtagagaaccctaagaacttttaa

SEQ ID NO: 280 - DNA, 264 bp, Staphylococcus capitis
atgggccaattcacatcattgattttaccaattttattattggtattaatgtggttctttttaatcagaccacaacaaaaacgtgctaaagagcatcgtgaaatgattagccgtgtagaatcaggacaaaaggttactacaataggcggtattaaaggtactgttaaatctgttgatgaaacaacagttgtcattacagtaaatggtcatggtacggaaatgactttcgagaaaccagccatcaaacaagttgacccttcataa

SEQ ID NO: 281 - DNA, 2292 bp, Staphylococcus capitis
gtgaagaaaactagtagattaattgcattcatactacttgtggctcttctttttacaggaatgggacttacatataagaatgtagttaaaaatgttaatttaggacttgatttacaaggtggtttcgaagtactttatcaagttaatcctttagataaaggagaaaagatagacaagaaagcacttcaagcaacatcaagaacactcgaaaaccgagttaatgttctaggtgtttcagaacctaaaattcaaattgaagatcctaaccgtatacgtgttcaattagctggtattaaggaccaagctcaagcacgtaaattgttatctacgcaagcgaatttaacaattagggacgctcaagaccatgttttaatgtctggttcagatatcaaacaaggttcagccaaacaagaatttaaacaagaaactaatcaaccaacagtaacatttaaggttaaaagcaaagaaaaattcaaaaaggttactgaaaagatttcaaaaaaacgtgacaatgttatggttgtctggatggactataaaaagagtgatagttacaagaaagaggctaagaagcaacaagaaggtaaagaccctaaatatgtttctgccgcaaacgtagatcagccaattaattcagatagcgtcgaaatttccggtggtttcaatggtaaaaaaggtgttaaagaagctaaacaaatcgctgaattactaaatgccggttcgttacctgtagatcttaaagaaatttattctaattcagttggcgcacaatttggtcaagatgctctagataaaacaatattcgcttcatttatcggtgtaggaataatttatctatttatgctaggcttctacagattaccaggtttagtagcaattattgcattgactacttacatttacctaacattagttgcatttaactttatttctggtgtgttaacattaccgggacttgccgcacttgtgcttggtgtaggtatggctgttgatgctaacattattatgtatgagcggattaaagacgaactaagaataggtcgaacgctcaagcaggcatattctaaagcaaataaaagttcattcctaacaatctttgactcaaacttaacaactgttattgctgcagctgtgctgttcttcttcggtgagagctcagttaaaggtttcgcgacgatgttactattaggtattctaatgatattcgttacagctgtcttcttgtcacgtggactattatcattattagtatcatctaacttctttaagaaaaaatattggttatttggagttaagaaaaaagatcgccatgacattaatgaaggtaaagatgttcatgaccttaaaacatcatttgaaaagtggaatttcgttaagttagcaaaaccgcttatcgcgttaagtattttaatcgtcatagttggtttagttattttatcaatttttaaacttaatttaggtattgatttctcttctggtacaagagcagatattgagacaaatcaatcactcactcaaggtaaagtcgaaaaagctgttaaagatgtcggcttatcgccagaccaagttcaaattaatggcagcggtcataaaaatgctactgtacaattcaagaaaaatttaacaagggcagaagataacaagctaagtgataagatgaaatcagagtttggtgatacaccacaaattaactcagtatcaccattaatcggtcaagaactcgctaaaaatgctatgacagcgttaatcctagcttcaataggtattattatttatgtatcacttcgatttgaatggcgaatgggcttatctgcagtacttgcgttattacatgacgtatttataatcgtagcagtatttagtttatttagattagaagttgacttaacatttatcgcagctgtattaacaattgtaggttattctattaatgatacaattgttactttcgaccgtgttcgagaaaacttgcataaggttaaggtggttacgtcacctgagcaaattgatgatattgttaatagatcaattagacaaacaatgacacgttcaattaatacggtcttaacggttgtagttgtagttgttgctatactcatctttggtgcaccaactatatttaacttctcattagcgttattaattggtttaatctcaggagtattctcttctgtatttatcgctgtaccgctttggggtatcatgaaaaaacgtcaattgaagaaatctccaaacagtaaattaacggtttataaagagaaaaaatcaaatgatgaaaaaatcttagtttaa

SEQ ID NO: 282 - DNA, 2274 bp, Staphylococcus capitis
atgattaaatcaagatatcattgggatttagcccagccaactgaatacataacagatgatcttgctaagaaacttaaactttcacctattgtaaaaaaagttttggaaagcaagaatctagttcaagaaaataatattttagatgtattagaagataaagtacttgaccatgatccttggttattaagtgatatgcaaaaagcaattgatcgcataaatttagctattgataaaaatgaacgtattttagtctatggcgattatgatgctgatggtgtcacttcaacaactattcttgttaatacattacagcaattgggtgctcaagtaggatggtatattcctaatcggttctctgaaggttatggacctaatgaacatgcctttcgtaatgcatatgatgaggggatctcactaatcataacagtggataatggaatacaagggcatgatgaaattaaaatggttcaagacctcggtgtggatgtcattgtgacagatcatcatgagattggacgtactttaccagaggcattagccattgtacatccaatgcacccggattttgactatccgttcaaatatctttgtggtgctggtgtggcatataagttatcgcaagctttattaagtcatccacctcagcaatttatagcattagcagctataggaacgattgcagatttagtgtctttaacagatgaaaatcgttcaatagttaaaagaggattgaaaatattaaatgatcagacacctgtttctatcaatgctatattgaaacaagcaggttataatgatcaaatcaacgaagaaacaattgggtttatcattggacctcgactcaatgcggtaggtagattagaagatgcatcactagctgctgaattattaatggtagatgagtttgaggaagcagaatttttagctgaacaagtggagcatttcaatcaagaaagaaaagatattgtagcagaaattactgaagaggcgctttcattagctgaggaacaagttcaacaaggaaatttatttttattattagctaaagagaattggcatgaaggagtactcggtattgtagcatctaagattgttgaaacttatgctctgccaactctaatcttgaatattgatttagagcaaaatcatgctaaaggctctgcacgctcgatagaccaggtgtcaatgtttgaaattttaaatgctcatcaggatttaattactaaatttggtggtcatcatatggctgctggtatgactatggatatagaaaatattgatgaactacgaaaaggtcttaacgaatggatgaagcaactttcagaatcaacatctttagcaccacgtaaacatgtagatgtactgctcaatgaaagtgaaattactgttaaaaatattcaagatatacaaaaattgcgtccatttggtacagactttaatagtcctacatttgaagttaatgatttaaatgttaaatcgattaaagctattggccaggaaggtaaacatttaaaagtggcacttggagagaatcaattagcggcactttactggagttatggacatcttgctaaagaaattgaaatggggcaaccacttaatttaataggtaaccttcaaatcaatgaatggaatggaaatcaatcaccccaattaattattcaagatattgctacagaaacaatacaaatcttagattatcgaagcaaacgtaagcatcttcaattcactgaaaataattctaatacagcatatgtgattcatcctaaaaaggataaacccaatgagcatcattattattatagtgaaactatagaatcacaatatgataaagtagttctcagagatttacctacaacaatgaatgaaattgaagaaacgcttaaacaattacaattttcccagctttatcttgttttacaacatgatcaatcaatttattttgaaggtatgccaagcaaagcattatttaaagaatgttttaaagctttaattaacaaacaagaaacaaatttagctaaagagggtatgatgttgtgtgagtttttaaaagttaagccagaaatattaaagtttatgcttaaagtttttaatgagcttaattttatttacaacgaggatggtcttattaaaataaattcacactctagtaaaaaagatatcgagacgagtcgtctttaccaattaagacaatctcgaatagaagtagaaaaaagattactgtacgatgacttttcaaatattaaaaaatggataaagtctcaattgagttaa

SEQ ID NO: 283 - DNA, 519 bp, Staphylococcus capitis
atggatttaaaacaatatgtctcagaagttcaagattggccaaaaccgggagtaagttttaaagatataactacaattatggataatggtaaagcatatggatacgcgactgatcaaatcgtggagtatgcgagagaaagagatgttgatgttgtagtagggccagaagctagaggatttattattggttgtccagtggcatactctatggggattggatttgctcctgtgcgtaaagaaggtaaattacctagagaggttattcgttacgaatatagtttagagtacggtacaaacattttaactatgcacaaagatgcgattaaaccaggtcaacgtgtgttgattacagacgatttactcgctacgggtggtacaattgaagcggcaattaaacttgtagagaaattaggtggcatcgttgtaggtattgcatttattatcgaattaaaatatctacatggtattgaaaagataaaagattatgatgtcatgagtcttatttcatatgatgaataa

SEQ ID NO: 284 - DNA, 2190 bp, Staphylococcus capitis
ttgaacaacgaatatccatatagtgcggatgaggttcttcataaagctaaatcatatttatcggcaagtgaatatgaatatgtacttaaaagttatcatatcgcttatgaagcccatcagggtcagtttagaaaaaatggcttaccttatatcatgcatcctattcaagttgcaggtatattaactgagatgagactcgatgggcctacaatcgtagccggcttcctacatgatgtcatagaagacacgccttatacatttgaagatgttaaagatatgttcaatgaagaggttgctcgtattgtagatggtgtaacaaaacttaaaaaagttaaatatcgctctaaagaagagcaacaagctgaaaaccatagaaaactatttatagccatcgctaaagatgttcgagttattttagtgaagttagcagaccgtctgcataatatgagaacattgaaagcaatgcctagagagaaacaagtcagaatttcaaaggaaactttggagatatatgctccacttgcgcatcgtttaggtattaacacaatcaaatgggaattagaagatacagcattaagatatattgatagcgtccaatacttccgtattgtaaatctaatgaagaaaaaacgtagtgaacgtgaagcatatatagataatgcgataaacaaaattgaagcagaaatggaaaaaatgaacctttctggtgagattaatggtagacctaaacatatttatagtatttatcgtaaaatgatgaaacagaaaaaacaatttgatcaaatttttgatttattagcaatacgtatcattgttaattcaattaatgattgttacgccattttaggtcttgttcatacattatggaaacctatgccgggtaggtttaaagattatatagctatgccaaaacaaaatatgtatcaatctcttcatactacagttgtaggtcctaatggtgatccactcgagatacaaattagaacatatgaaatgcatgaaattgccgaacacggtgtagcggctcactgggcttataaagagggaaaaacggttaatgagaaaactcaagatttccaaaacaaacttaattggttaaaagaactagctgaaacagatcatacctccactgatgctcaagaatttatggagtctttaaaatacgatttacaaagcgacaaagtttatgcgtttacacctgcgagtgacgttattgaattgccatatggagcagtgcctattgatttcgcttatgccatacatagtgaagtaggtaataaaatgatcggtgcaaaagtaaatggcaaaattgtacctattgattatgtactacaaacaggtgatatcattgaaatacgtaccagtaaacactcatatggaccgagtcgtgattggttgaaaatcgtaaaatcttcaagtgcgaaaagtaagattaaaagtttctttaaaaaacaagaccgctcctcaaatattgaaaaaggtaaatttatggttgaagcagaaattaaggaacagggattccgtgttgaagatgttttaaccgaaaagaatttagaggttgtaaatgataagtatcattttgcaaacgacgaggatttatttgcggctgtaggatttggtggcgtaacttccgtacaaattgttaataaactaactgaaaaacaacgaatattagataaacagaaagctttaaatgaagcccaagaagttacaaaatcagttcctattaaagaagatattattactgacagtggtgtatatgttgaaggattagaaaacgtccttatcaaactgtcaaaatgttgtaatcctatacctggtgatgatattgtaggatatatcaccaaaggtcacggtataaaagttcaccgtacagattgtccaaatataaaaaacgagacagaccggttgatttctgtagagtgggttaaatctaaagattcaactcaacgttatcaagttgatttagaagtgacagcatacgatagaaatggtttacttaatgaagtgctacaagctgttaattcgacagcaggtagtttaattaaagtttcaggtcgttctgatgtagacaaaaatgctgtgataaatattagcgtgatggtgaaaaatgttaacgatgtttatcgcgtcgttgaaaagataaaacaactaggtgacgtatatacagtatcgagagtttggaactag

SEQ ID NO: 285 - DNA, 453 bp, Staphylococcus capitis
atgaagataattgtacaaagagttaaacatgcaagagtaataaatgattctatcgataatgaaatcgagagaggattttgtttactagtaggtgtaggcaaagattctactgaagaagatatcaaaatcgttgccaaaaaaattgctaacgctcgattatttgaagatgaaaataacaaattaaaccttaatattcaacaagttgatggacaaatcttatctgtatctcaattcacactttatgcagatgttaagaaaggtaatcgtcctggattttcaaattcaaaaagccctgaagaagcgaaacaactttatgaaagatttaatgaggaattagaatcatacggtttaactgttaaaacaggcgaatttggtacacacatgaatgttgaaattaacaacgatggtcctgttactataatctatgaatcacaggatggaaaaattctatga

SEQ ID NO: 286 - DNA, 876 bp, Staphylococcus capitis
atgaacaaaatagatgcttggttaacacgacatggcctaaaaaattggcttacacttgtagtagtcatagcattcattctatttattatcttgttatttatgtttctcaatcaaggtgatgaggatactggtcagattacaatcactgaaaatgctgaattaagaacaggtcctaatgcagcctatcctatcatttacaaaattgaaaaaggtgatagctttaagaaagtagataaacaaggtaaatggatagaagtccaaaatcgggctggaacagaaaaaggctgggttgccggttggcatactaacttaaatatacatgctgacaactctaaagcttctaatcctcttaaaggtaaaacaattgtacttgatcctggtcatggtggtagtgaccagggtgcatcaagtaacaccccctctaaaagtttagaaaagaattacactttgaaaactgctaaagaacttaaaaaattacttgaaaaagaaggtgccaaagtcaaaatgactcgcaccacagataaatatgtgtctttagatgatagaaatataaaaggtgacgcatttatcagtatacataatgactctttagattcctctaatgctaacggtgcaaccgtttattggttacaagataatcaagaatcgctcgctcaaacattaaattctaatatccagaaaaaagccttgcttactaatagaggtgcgcgacaacagaattatcaagtactccgacaaactgatgtgccagctgtattgttagaactcggatatattagtaatccaaccgatgaaaatatgattaaagaccaactacatcgtcatgtcgtagagcaagcagtagttgatggtcttaaacaatatttctcatcatag

SEQ ID NO: 287 - DNA, 1263 bp, Staphylococcus capitis
atgatcaagattccaagaggcacacaagatatcttacctgaagattcaatcaaatggcgccacattgagaataaattagatgaactcatggaattatataattataaagaaattcgcacacctatatttgaaagtactgaactattcgcaagaggtgttggcgattctaccgatgtagttcaaaaagagatgtatacctttaaagacaaaggagatcgtagtttaactttacgacctgaaggtactgcagcggttgttcgttcttatatagaacataaaatgcaaggtaatcctaatcaacctgttaaattatattataacggtcctatgttcagatatgaacgtaaacaaaaaggacgttatcgtcaatttaatcaatttggtgtagaggcgattggtgctgaaaatccgagtatagatgctgaagttttagctatggtaatgcacatttacgaatcttttggtttaaaacatcttaaactcgttattaatagtatcggtgatagtgaatcacgaaaagaatataacgaagcgcttgttaatcattttgaacctgttattgatacgttttgttcagactgccaatctcgtttgcacacaaatccgatgcgtattttagattgtaaaattgacagagacaaagaagcaatcaaaaccgcacctcgtataacagattatcttaatgacgattctaaagcatactatgaacaagtaaaacatcatttagatgacttaaatattccttacgtagaagacccaaatctagtaagaggcctggattattatactcacacagcatttgaacttatgatggataatccaaactatgatggagctatcactacattatgcggtggcggtcgttataatggtttactacagttattagatggaccaagtgaaactggtattggatttgctttaagtattgaaagactcttacttgcactagaagaagaaggtattgagttagatattgaagaaaactttgatttatttatcgtaacgatgggtgaggaagctgatcgttatgcagtgaagcttttaaatgacttacgaaaaaatggtgtgaaagctgataaagattatctcaatagaaaaattaaaggacaaatgaaacaagccgatagattaaatgcaaaatatacaattgtcattggcgatcaagaacttgagaataattccattgcaattaaaaatatgactacaggcgagtcagaaaatatacaacttgatcagttaattaattattttaaaaagtag

SEQ ID NO: 288 - DNA, 1767 bp, Staphylococcus capitis
ttgagtaagagaacaacatattgtggtttagtcacagaagatttattagatgaaaaggtaactttaaaaggatgggtacacaatcgccgtgatctcggaggattaattttcgtagatttaagagatcgtgaaggtattgttcaaatcgttttcaatccggacttttcagaagaggccttaaaagtagctgaaacagtacgttctgagtatgttgtagaagtacaaggtgttgttactaaacgtgacccagaaacaattaatcctaaaattaaaacaggtcaagtagaagttcaagtttcaaatatagagattattaataagtcagaaacgcctccgtttgcaattaacgaagaaaacgtcaatgtagacgagaacatccgcttaaaatatagatatttagatttacgtagacaagaattagctcaaactttcaaaatgagacatcaaacaacacgttcaattcgtcaatatttagatgataatggcttcttcgatatagaaacgccagtattaactaaatctacaccagaaggtgctcgtgactatttagtaccttcacgtgttcatgaaggtgaattttacgctttacctcaatcacctcagctgtttaaacaattattaatgataagtggttttgataaatattatcaaatcgttaagtgtttccgtgatgaagatttacgtgcagaccgtcaacctgagtttacgcaagtagatattgaaatgagttttgttgatcaagaagacgttatttcaatgggcgaagagatgttacgtaaagttgttaaagatgttaaaggtatcgatgtagagggaccgttcccacgtatgacatacgctgaagctatggaccgatatggttcagataaacctgatacacgctttgatatggaactcattaatgtatctcaattaggtaaagacatggatttcaaagtctttaaagatactgttgaaaatgaaggcgaaattaaagcaattgttgctgaaggtgctgcggatcaatatacacgtaaagatatggattcattaactgaatttgtaaatatttacggtgctaaaggattagcttgggttaaagtagtcgaagatggcttaagtggcccaatcgctagattctttgaagatgctaatgtagaaacattgaaaacattgactggagctaaacctggtgatttagttatgtttgtagccgataaacctagtgtggttgctcaaagtttaggagcattacgtattaaattggccaaagaattaggattaatcgacgagtctaaattaaacttcttatgggtaactgattggccattacttgaatatgatgaagatgctaaacgttatgttgctgcacatcatccattcacatctcctaaacaagaagatatttctaaactagattctgaacctgaaaatgttcaagcaaacgcatacgatatcgtattaaatggttatgagcttggtgggggatcaataagaatacatgatggtgaattacaacaaaaaatgttcgaagttttagggttctctactgaacaagcaaaagaacaattcggcttcttacttgatgcatttaaatacggtgcacctccacacggcggtatagcattaggattagacagactagtgatgttactcactaacagaacaaacctaagagatacaatcgcattccctaaaacagcatcagcaacatgcctattaacagacgcaccaggagaagtatcagacaaacaactagaagaactctcactacgaatcagacactag

SEQ ID NO: 289 - DNA, 774 bp, Staphylococcus capitis
atgaaacatcaattttccagaaatgaattggcaattggtcaagaaggcttagatttattaaaaaataaaactgtagcagttcttggtatcggaggagtcggatctttcgctgcagaagcacttgctagaacaaatattggtcatattatacttattgacaaagatgatgttgatattacaaacgttaatagacaaattcatgcattaacatctacgataggtcaaagtaaggtcacgcttatggaagagcgaattaaattgattaatccagattgtaaagtaacgtcgcttcatatgttttatacagaagaaacatatgaacaaatttttaataattatcatatagactactttattgatgcgagtgataccattatttataaagtacaccttatgaaagaatgtctagagcgtggaattgatatgatttcaagtatgggtgcagcaaataaaacggatcctacacgttttgaaattgcagatatttctaaaacgcatacagatccaatggccaaggtgattagaaatagattaaaaagacaaggcattagaaaaggagtcaaagtcgtattctctgatgaaagtccaattgtgattcgtgaggatgtaaaagaaactgttggcgataaaaatgcgattaatcgtaaaggtcaaatgccaccttcatctaacgcctttgtaccaagtgtggtaggactcatatgtgcaagctatgttattaatgatattttaaaagatattccagttagacgtattaaagataaaggtcagtaa

SEQ ID NO: 290 - DNA, 1233 bp, Staphylococcus capitis
atgaatatagatgagattatatcacaacagcatctcgttggtcctaaaggtattattagaagaatggttgagactaaacgactttcttccatgatattttatggacctccaggtattggtaaaacgagtattgccaaagccatttctggaagtacgcagtttaaatttagacaattaaatgctgtaacaaatactaaaaaggatatgcaaatggttgttgaagaagccaaaatgtctggccaagtcatcttgctacttgatgagatacaccgtttggataaagcaaagcaagactttcttttgcctcatttagaaaatggcaaaattgtcttgataggagccacaacgtctaatccatatcatgcaattaacccagctatccgttctagagctcaaatttttgaactttatcctttagatgaccatgatgtaagaattgcacttgatcgtgcaattgaggatagtgatagaggtcttaaaagttatcatcccattgtagacgaagatgctatggagtacttttccactcaaagccaaggtgatgtaagaagtgccctaaatgctttagagttagcagttctaagtgcagaggtagttgaaaaccaacgtcacattacattagatgatgctaaagattgtttacaaaaaggtgcttttgtgagcgataaagatggggatatgcactatgatgtaatgagtgcttttcagaaatcaattcgaggtagtgacgttaatgcagcattacattatttagcacgacttattgaagctggcgacttacctaccattgtaaggcgtttattagtcattagttacgaagatgttggcctagcttcaccctctgcggggcaacgaacattagcggcaattcagtcagctgaacgtcttggatttcctgaagctagaattccacttagccaagctgtgatagaactgtgtttatcacctaaatctaattcaggaatcacagctatagatagtgctttgagtgatatcagaaaaggtttagtaggacaaataccagactatttaaaagatggtcattactctggcgctaaagacttaggaagagcaattggctataaatatcctcacaattatgaaaatggtcacgtcgtgcaacaatatttaccagacaaacttaaaaatagaatttactatgaacctaaaacaacgtctaagagtgagcaacaatttaaagatgtttatgaaaatttattaaacaaaaaataa

SEQ ID NO: 291 - DNA, 423 bp, Staphylococcus capitis
atgaaaatatcaacaaaagggagatacggattaacattgatgatttctcttgctaaaagagaaggtcaaggttgtgtatctttaaagtctattgctgaagaaaataaactaagtgatttatatcttgaacaattagtcggccctttaagaaatgctggattaattcgaagtgtgcgtggtgctaaaggtggttatcaacttagagtaccagctgatgaaatcacagcaggcgatattattcgcttacttgaaggtccgattacgtttgtagaaagtattgaatctgaaccacctgcacagaaacaattatggttgagaatgagagattcagttcgagatgtgttagataacacaactttaaaatatcttgctgattataaagaaaccaatgaagatttagatggctatatgttctatatttaa

SEQ ID NO: 292 - DNA, 141 bp, Staphylococcus capitis
atgagtttcatggataaagcaaaagaagcagcagaaaaattcaaggatagcgataacgaacaagttaacaaagcaaaagataaaattaacgaatacactggtggcggagacgacgacaaaaaagacaaagacgacaaataa

SEQ ID NO: 293 - DNA, 996 bp, Staphylococcus capitis
atgaaagatattaaattatcagcattaaatcttgtacctattagagaaggtcaagacgataaagacgctattaatgacatggttaaattagctcaaggtttagatgaattaggttacgaacgttattggatagctgaacatcacaacgctccaaatttagttagttctgctacggcattacttattcaacatactttagaacatacggaaagaattaaagtaggttcaggtggaattatgttacctaatcacgcaccacttatagtggccgaacaatttggcacgatggaaacacttttcccacatcgcgttgatttaggtttaggtcgcgcgcctggtacagatatgatgactgctagtgcattaagacgtgaccaacataatggtgtataccaatttcctgaagaagtcgaacaactagagaaatacttcggaccggggaatcaacaagcatatgtaagagcttaccctgctgtaggtaaaaatgttcctctatatatactaggctcttctactgattctgctcatgtggctgctagaagaggattgccatatgtatttgccggacattttgcgcctcaacaaatgaaagaagctattcaaatatataaagagttatttgaaccttctgatgtgttaagcgaaccttatgtcattgtatgtttaaatgtgattgtttcagatacagatacgcatgcagaatatttagcaagcacaatggctcaagtaatggtaagtattacaagaggcagaatgcaacctgttcaaccaccaactgatgatttaaaaggattacttactccgagagaatatgaactagctaaacaacgtttcagtggctctttaattggctcagaggattctgttaagcgtcaacttgaaggctttataaaggaatatggagaaattgatgagctaatggcaataagttacatttatgaccaagataaacaacttgaatcttatcaaagattacaaaaagtaattcagtcataa

SEQ ID NO: 294 - DNA, 1143 bp, Staphylococcus capitis
atggaagtttatgcagattatgccgcgaccacaccagtaaaaacagaagtcgttgatgcaatgatggaaatctataaagaacattatggtaatccatcttctattcactcaataggtagagatgcacgtaaatatttagatcaatcacgccgaaaagttgcacaactattaggtgcaaaacctcatgaagtgatatttacaagtggtgctacggaatctaataatactgcaatcaaaggattagtaaaagcgaatgaacaattaggaaatcatattattacttctaaaattgaacatcattccgttttacatgtatttgagcaacttgaacgagaaggctatgacgtaacatatttagatgtagatgatactggagcggttgatttagatcaattacgtgaaacaatcacagataaaacaattcttgtatcaattatgtttgttaataatgaagttggtactgttcaaaatatgtatgacattgaggacattattgctgaaactaatgcgttattccatgttgacgctgtacaagctattggtcatttagaaattgactttcatgatttcaaaattgatactatgagtgtaactggacataaatttgggggccctaaaggagctggtatactcttagtaaaggaccatactccgcttgaatttaatcagctaggtggggaacaagaaacgaaacgtcgagctggtactgagaatgttcctcaaatagttggacttactaaagctttggaattagcagttcaacatcgtgacgcaaataatgttcatttaatgaatttaaaagaattattcttagttagtttgcaagaacgtgtgatcccgttcgaacttaatggttctatgacagactcaacaggtcatattttaaatctttatttcccatttattgatgttgaaacaatgttaactctactagacctctctaatgtatacgtatcatctgggtcagcttgcacagcaggttctacaacaccgtcacatgttttagcagcaatgtttgaagatgaagaacgtgcaaaacattctgttagatttagctttaatgaacaaatgaacgaacaacaaattaaatatatagtagccgaaattcataaaatttatcataaatttaaggaggaatcatag

SEQ ID NO: 295 - DNA, 1119 bp, Staphylococcus capitis
gtgtcaaataaagatatacgcgtagtcgttggtatgtctggaggtgttgatagttcagtaactgcacacctattaaaagagcaaggttatgacgttataggtatttttatgaagaactgggatgacactgatgaaaatggtgtatgtaccgccacagaagattacaatgatgtcattgcagtatgtaaccaaattggtataccatattacgcagttaactttgaagaagaatattgggacaaagtatttacttactttttagatgaatataaaaaaggacgcacaccaaatcctgatgtaatgtgtaataaagaaattaaattcaaagcattcttagagcatgctttgaaattaggtgctgactatgtcgcaactggacattatgctcgtatacgtcgacacgaggatgggcatgtagaaatgttacgcggtgtagataataataaagatcaaacttactttttaaaccaactatcacaagaacaactttctaaagttatgttcccaattggtgacattgaaaaaagtgaagttagacgaatcgcagaagaacaagatttagctacagccaagaaaaaagattctacaggaatctgtttcattggtgaaagaaacttcaaggaatttttatcgcaatatttaccagcacaatcaggtgacatggtaacattagatggtaaaaaaatgggacaacatagcggtttaatgtattatacaattggacaacgtcatggcttaggaataggtggagatggagatccatggtttgttgtaggtaaaaacttagatgacaattttttatatgttgagcaaggcttccatcatgatgctttatatagtgattacttaatcgtttcagatttctcatttgttaatgaaaatgaaattgacttagagcatggtttcgaatgtactgcgaaattccgttatcgtcagaaagatacaaaagtattcgttaaaaaagaggatgaatcttcaattcgtgtaactttcgaccaacctgtacgcgcaattactcctggacaagcggttgtcttttacaatgaagaagtctgcttaggtggagctactatagatgatgtatacaaaaatgaaggtcaacttagttacgtagtttaa

SEQ ID NO: 296 - DNA, 672 bp, Staphylococcus capitis
atgatgcatgaacagaatcagatttatcaatatattaaagatggtaagttcgaagatgctttaaaagcgcttttcgaaaatattgaagaaaatcctaatgcagttgaaaactacattaatgcaggaattgtgttatctgatgcaggagaaatagaaaaagccgagcgtttcttccaaaaagcgattactattgatccgtctaatggtgctgtatattataatttagcgaatgtttactataatcaagttcgctttaaagaagcaattaaattatatcaaaaggcattaaaaaacaatgtagctactgtagattgtaattatatgattggaatgtcatttaaccaattagaagcttttaaagaagcattaccattcttgatgactgcagctgaaaaagacgataacgatgatgttgagattcaatttcaatatggacttgtcttatgccagctcgaaatgtttgaacaagccattaatcagttaaatcacgtattaaaaattgaccctaaacatgtagatgctatatataatctcggcctagcaagctatatgaaaaaagaagatgttgatgaagctattgcttattttgaacaagcagtttctattgatgaacagcatttattaagtcaacacgctttaaaaacgtttaagacgatgaaagaggaggagtaa

SEQ ID NO: 297 - DNA, 2451 bp, Staphylococcus capitis
atgtctgaccctacactttttgataaatcaatgatcaaaggtactgtagatgctatattatttcaaaataatgataatttctatacagttcttaaagtagacacgattgaaacgaatgagtcctttgatagcatgccaactgttgtagggtttcttccaaatgtagttgaaggagacgtctatacgtttaaagggcaaattgtcgaccacccacgttatggtaaacaattaaaagctgaaacttttgaaaaggaacttccacaaaccaaagatgcaattattagttatttatctagtgatttatttaaaggaataggaaagaaaactgctcaaaatattgttaatgcattaggcgagaatgcaatcaatgatatattaaataatcctgaagtgttagaaaaagtccctagtttacctaagaaaaagcaaaagcagattgcagaacaaataagttcgaatcaagaatcagaaaaaataatgattcggttacatgatttaggatttggtcctaaactttcaatggcaatttatcagttttatatgggagatacattgaaaatactagacgaaaatccttatcaactcgtttatgatattaaaggaataggttttaataaagctgatcaattagcgcgaaacattggtattgcagcagattctgaagagcgtttgaaagcaggattgctttatacacttgaagaagaatgtatcaaacaaggacatacatatttgcctaattcatatgtgattgaatcaacgcaaactatgcttaacgatagctctgaagttgtaatttctactaaaatgctagagcaaaagattgagcaactctctgaagagaaaaaattgattcaaagcgaagaacaagtttcaattccaagtttgtattattcggaattaaagagtgttcaaaatctttatcgtattcaaactaataataaaaagttaaaagaaatcgaacaatcagatttacaaatgcatattggtgaaattgagtcactaaatcaagtaaattatgcaacttcacagaaagaagctttagagacggcaatcaattcaaaagtgatgcttcttactggtggtcccggtactggtaaaactactgtcattaaaggcatcgtagagctttatgcagaaatacatggattatcattagattatgatgattacaacgaggatgattatccagttgtacttgctgcaccaactggacgcgcatctaaaagacttcaggaatctactggattagaagcaatgacaattcaccgtttaataggttggaatcaagaaacacaacctgaagatattttaaataatgaaattaatgcacggcttatcattatagatgaaatgtctatggtagatacatggttatttcatcaatttttaagtgctgttccattagatgctcaaattgtatttgtaggagatgaagaccaactcccttcagttggaccgggtcaagtgtttaaagacctcattgattctaaaagaattccgcgtgttaatcttacggaagtgtatcgccaacaggatggctcaagtattgttgatttagcacatcgtatgaaagtaggcgaacccatagatataactcaacgttttcacgatcgcagtttcattaactgtacttcagaccaaatacctgatgtagtagataaagttgttaaaagtgcagtgagtaaagggtataatatgagtgatattcaagtccttgctcctatgtataaaggtaatgcaggaataaaacgtctcaatcaagtattacaatctattttaaatccaaaggaaaaagatagtcgtgaaattgaattcggagatgttgtatttcgtaaaggagataaagtacttcagttggtcaatagacctaatgacaatatatttaatggtgatattggtgtaattgtaggcatattttgggctaaagaaaatgctcttaataaagatgtaatagtagtagattttgaaggaaatgaaattacctttactcgacaagacttacttgaacttactcatgcttattgtacatctattcataaatctcaagggtcagaatttccaattgttattatgcctatagttaaacaatactttcgtatgttacaaagacctatcctttatacgggtctgacccgtgctaagcaatcacttgttttacttggggatccccaagcatttgatataggactgaagacaaaaggccaagaacgtttaactcagttgaatcacttattaaaatcttattttggtgatgagcaagaagttataggtagttcaggtcattcatctgtaaatagcactgaaaaacatgatactacacaaactgaagaagagagcgcaacaactgacgcaccacaaaatgacattgttcttagtgaaaccactatatttaaaattgatcctatgattaatatgggagaaatgacgccttacgattttgccgagcattga

SEQ ID NO: 298 - DNA, 2631 bp, Staphylococcus capitis
atgaaaaatttaaaagctagtgaaattagacaaaaatatttagatttcttcgttgaaaaaggtcatatgattgaaccttctgcaccacttgtacctattgatgatgattcattactatggattaactcaggtgtagcaacactaaaaaaatactttgatggtcgcgagacgccaagaaagccaagaattgtaaactcacaaaaagccattcgtactaatgatattgaaaatgttggctttacagcgagacatcatacattttttgaaatgcttggaaatttctcaattggagattattttaaacaagaagcaattgaattcgcttgggaattcttaactagtgagaaatggatgggtatggaaccagaaaaattatatgtaacaattcatccagaagatacgggtgcttataaaatttggaatgaagatattggtttagatgaaactcgtattattcgaatcgaaggtaacttctgggatattggcgaagggccatcgggacctaatacagaaattttctatgatcgtggtgacgaatatggtcagaatgatcctgctgaagaaatgtatcctggcggagaaaatgaaagatatttagaagtatggaatttagtatttagtgaatttaatcataataaagacaatacgtatacaccacttcctaataaaaatattgatactggcatgggattagagcgtatggcttcaatctcgcaaaatgtcagaacaaattatgaaacagatttatttatgcctattataaatgaagttgaaaatgtttcaggaaagaaatatttagaagttgaagagcaagacgtagcatttaaagttattgcagatcatattagaaccattgcgtttgctattgctgatggtgcattacctgcaaatgaaggacgtggatatgtcctacgtcgtttattacgtcgtgcagttagatttagtcaatcactaggtattaatgaaccatttatgtttaaacttgtggatattgttgctgaaattatggaaccatattatccaaatgttaaagaaaaagccgattttattaaacgagtgactaagtcagaagaagaacgattccatgagacactcgaggaaggcttatcaattctaaatcagttaattgaaaaagctaaaaaagacaatcatgaaattaaaggggaagatgcatttaaactgtatgatacttatggtttccctgtagaattaaccgaagaattagcaactcaagaaggtttatcagttgatatgactacttttgaaaatgaaatgcaacagcaaagagaccgtgctagacaagcacgtcaaagctctcaatctatgcaaatacaaagtgaagtgctaaaaaatattactgatgatagtacatttgttggatatgaaacaactgattaccaatctataatcacgcatttaatatacaatggtgaagaagtcgagtcagtggaagctggagagactgtttatttcacactaaaagctacgccattttatgctgtcagtggtggccaagtagcagacgaaggtacaattggaaatgataaatttgaaattgcagtatctgaagtgacgaaagcaccaaatggtcagaatctacacaaaggtattgtgcaatatggacaagctacagttggagcagaagtggatgctagtgttaataaagaagaccgtcgtgcaattcaaaagaatcatagtgctacgcatttattacatgctgctttaaaagaagtattaggtgatcacgtaaaccaagcaggttcattagtagaagcagatcgattacgttttgacttctcgcacttcggcccaatgacgcaagaagaattagatcaagttgaacgaagagtgaatgaagaaatatggagaggcattgatgttcgtattcaagaaatgggtatagatgaagccaaatctatgggggcaatggctctcttcggtgaaaaatatggtgatattgttcgagtagtaaatatggctccattttctatcgaattatgtggtggtattcatgtaagtaatactgcagaaattggtttatttaaaattgtaagtgaatctggtactggtgcaggagttagacgtatcgaagcgttaacaggaaaatctgctttcctttatctcgaagatattcagtctaaatttaataccattaaaaatcatgttaaagtcaaatcagatgaacaagtagttggtaaagtaactcagttacaagaagaagaaaaatcattacttaaacaattagaacaacgtaacaaagaaatcacctctcttaaaatgggaaatgttgaagaccaagttgaagttatcaatgacttgaaagtattagcaactgaagttgaagttccaaacactaaagcgatacgctcaacgatggatgattttaaatctaagttacaagacacgattattgtgttagcaagtaatgttgatggtaaagtttccataatagctactgttcctaaatcacttacagatcaagttaaagcaggagacattataaaaaacatggcacctatcgtaggtggtaaaggcggtggtcgtccggatatggctcaaggtggcggcacacaacctgaaaacataacagaagcattacacttcattaaagattacattaaaaatctataa

SEQ ID NO: 299 - DNA, 261 bp, Staphylococcus capitis
atggaaaactttgataaaacgatgaaatttgactatgaagagattccaaaagaagatgtcaaatcagtacttaacaatgtgcaccgtacattagaagaaagagggtataacgcagtaaatcaaattgtaggttatttactctctggtgatcctgcctatattcctcgccaaaatgaagcgagaaatcaaattcgtcatattgatagagatgtgattatggaagaacttgtttcttattatttaaaagagtctgaccattaa

SEQ ID NO: 300 - DNA, 429 bp, Staphylococcus capitis
atgttacaacataaaattataggtttagacgtaggaagcaaaactgttggcattgctataagtgacctaatgggatggactgcccaaggtttagacacactccgtatcaacgaagaacaaaacgaattaggcatagaagaattagtcgatattattaaaaaaaatcaagtcggtactgtagttataggattacctaaaaatatgaacaattctattggatttcgaggagaggcttcgttacaatacaaagagaaacttcaagaagccttgccttccatagaaattataatgtgggatgaacgattaagtacgatggctgctgaacgttcattactagaagcagatgtttctaggcaaaagagaaagaaagttatagataaaatggcagctgtgtttatattacaaggctatttagactctatccaataa

SEQ ID NO: 301 - DNA, 321 bp, Staphylococcus capitis
atgacagaacataaccacgaacaaaatcatgaatcagatttaagcattaataacgaagaagaattattaactttattcgatgaagacggcaatgaagttttatatcgtaaaatgttagaattttaccatcctgaattcaaaaaggaatatgttgtattagccgaagaaggtgctcaatctgatgaagatgatatgattgaactcgtacctatgattaatgaacctgatgaatctggagatggtggtaaattagtacctatcgaaacagatgaagaatgggatatgattgaagaggttgtaaatactgagattaatgaatag

SEQ ID NO: 302 - DNA, 636 bp, Staphylococcus capitis
atggatttgaaccaaaactatttaactcaattgcatcaaaagttagatacaaacatagagaatttaagaccttatgcagaagacaatcaagttcctattgtagataaattaactttagatatgattaaacaattaataagaatgaatcataccaaaaacattctagaaattggtgctgctattggctatagttcaatgcaattttcttcagtagcaaatgatatacatgtaactaccattgaacgtaacgaagatatgattgctttggcgcgaaattattttcatcaatatggttacaatgaacaaataagattgattgaaggtaatgcgctagaaacataccaacaagtcaatgatagagaatatgatatgatatttatcgatgcagccaaagctcaatccaaaaagttctttgagttatatacgcctcttttaagaaaaggtgggattgtagtaactgacaatgtcttataccacggttttgtatcgaatatagacattgtgagatctagaaatgttcgtcaaatggttaaaaaggtacaacaatataaccagtggttaatggagcaatcagggtatacaactaactttttaaatatagatgatggtttagcaatatcaattaaaggagaatga

SEQ ID NO: 303 - DNA, 924 bp, Staphylococcus capitis
atggttgaattattagttactcctaagtcaataactcatatggaaacactaatagaaaaaggtgcagatgcatttgttattggtgaacaaaaatttggtttaagacttccaggagaatttaatcgtgaaatgatgaaagaagctgttgaaatagcacatagaaacaataaaaaagtttatgctgcggtcaatggtttgtttcataattatcatttagatgctttagaagattacatacattttttacatcaaattcaagtggatcgaattattttcggtgatccagcagtaataatgtttgttaaaaaacaatcaaatcctatccctttacattgggatgctggagcattagtaacaaattatttccaatgtaattattgggggaaaaagggtgcatcaagagctgttttagctaaagagcttagcttagaagagatgattaatattaaaaagaatgctaatgttgaaatcgaagtccaagtacatggaatgacatgcatgtttcaatcgaaacgaatgttgttaggtaattactatacattccaagacagacaaatgaagattgagcgcaataatgcacaacaagatttacttttatatgatgaagaacgcgataacaaatatccagtttttgaagattataatggaacgcatattatgtctccgaatgatatttgtttaatcgaggaattagaaccattttttgaagcgggaattgacgcattcaaaatcgatggcgttctacaatcagaagactatatcaatgtagtaacagagcaatatagagaagcaattgacttatataatgaagaccctggagcatatgatgatgaaaaattcatgttaatcgatcctatagaggaaattcaacctgaacatcgtccattcgatgaaggtttcttatataaacaaacggtttactaa

SEQ ID NO: 304 - DNA, 1269 bp, Staphylococcus capitis
atgaaaactctagaagaagttcactcaagttcgaaaccaaaaatgaaaaagccagaattacttgctccagcaggaaatttagagaaacttaaaatagctgtacattatggtgctgatgcagtatttttaggtggtcaagagtatggtttacgttcaaatgcagataattttactatggatgaaattgctgaaggcgtagaatttgcaaatcgttatggtgctaaaatctacgttacaacaaatattattgcacatgatgaaaatatggatggattagaggaatatctacgtcagttagataaaacaggcgcaactggaattattgtagctgatccattaatcatagaaacatgcaaagaggtcgcaccaagacttgaaattcatttatctactcagcaatctctttcaaattataaagctgttgaattttggaaagaagaaggtttagaccgtgttgtgttagcacgtgagacaggcgctatggaaatgaaagaaatgaaggaaaaagttgatattgaaattgaagcttttattcatggtgcaatgtgtatagcatattcaggacgttgtacattaagtaatcatatgacagctcgtgattcaaaccgtggaggctgttgtcaaagttgccgttgggactatgatttacttcaagtagataatgatggagaacttgatttattttatgaagatggagatgttacaccgtttgcaatgagtccaaaagatttaaaattaattgaatctataccacaaatgatggaattaggaatcgactctttaaaaattgagggtaggatgaaatctattcattatattgcaactgtcgtatcagtttatcgaaaagtcatagacgcttatgctatggatcctgagaattttaagattaaacctgaatggctcaaagaactggataaatgcgcaaatcgtgatacagcgccagctttcttccaagggacacctggatatgaagagcaaatgtttggagaagaacaatctaagaaatcagcttacgatttttgcggactagtactcgactatgatgaacaaacgcaacttgctaccatacaacagcgaaaccatttcaaaccaggacaagaaattgaattctttggtcctgaaattgatagtttcaggcaaattgttgatgctatttatgatgaggaaggtaatagtttagatgccgcacgtcatccactgcaaattgttcaaattaaagtcgacaaacctatttatgctaataacatgatgagaaaggaaatcggctaa

SEQ ID NO: 305 - DNA, 624 bp, Staphylococcus capitis
atgaatcaaacgacaattattggtattgctggtggctctggttcaggtaaaaccactgttactaatgaaattatgaagaatcttgaaggccacagtgttgcacttttagctcaagattactattataaagaccagtctcatttaacttttgaagaaagacttgagacaaattatgatcatccattcgcattcgataatgatttacttatacaaaatcttaaagatttaagaaatggtgtggccatcgaagttcctacttatgattattcgaaacatactcgtagtgatgaaacgattgcatttgaaccaaaagatgttattatcgtagaaggtatctttgctttagaaaataaaactttacgagatatgatggatgtaaaaatttatgttgatacagatgcagatttaagaattttacgtagacttacacgtgatactcaagaacgtggacgttctatggagtctgtaattaatcaatatttaaatgtagtcagaccaatgcatgaacaatttattgaaccaacaaaaaaacatgcagatattatcatacctgaaggtggcagtaataaggtcgcaattgatattatgactacgaagattcaatcactcgttagcaaaaaatag

SEQ ID NO: 306 - DNA, 477 bp, Staphylococcus capitis
atggaaaaccaaaaacaatacccaatgactcaagaaggttatgaacaacttgagcaagaattagaagaattaaaaacggttaaaagaccagaagttgttgaaaaaattaaagtagctcgttcttttggtgacttatcagagaactctgagtacgatgcagcaaaagatgaacaaggattcatcgaacaagatattcaacgtattgaacatatgattagaaatgcgcttatcattgaagataatggtgataataacgttgttcaaattggtaaaacagtcacttttgttgaattaccaggtgatgaagaagaaagttatcaaatagtaggttctgctgaagctgacgcgttcaaaggaaaaatttcaaatgaatctcctatggcaaatgctttaataggtaaaggattaaatgacgaagttcgtgttcctcttcctaacggcggagaaatgaacgttaaaatcgttgatatcaaataa

SEQ ID NO: 307 - DNA, 732 bp, Staphylococcus capitis
ttggaaactcaaattataaatgaacaaactgtgatgatttattttgataatgaaattagtgaaagcacttaccaactcgttcaatcaacagtacaatacataaagaaacagaatcattcagagataacagaaatcattccatcttatagagcaattctaatatacttcgataataagaggatagaaggaaatgaattgttagaaaatttagaacttaaccgcttacaaaacgagtcagatgctagaactcgaaataagcgtattattcaaattcctgttttatatggtgaggaatatggacctgacttggctgaagttgcagaacataatcatttaactaaagaagaagtcaaacagattcacactcgtcagccataccttatttatatgttaggctttatgccaggatttccttatttaggggggcttgacgaacgtttacatacaccaagacgttctgagccaagacttaagattgaggctggttctgttggaatagccaataatcaaacgggattatatccaatggactctccaggagggtggcaaattattggtcgtacacctcttaaggtttttgatctcaatcgaactccgatgacaatgtatgaagctggagattatattcagttttatgagattgatcaacatgaatataacaatatatctgaggaaattgaaaatggaaaatttgatatagataagtgggtgacaaataaagatgagtattaa

SEQ ID NO: 308 - DNA, 1005 bp, Staphylococcus capitis
atgagtattaaaattttacaacctggcttattttcaacaatccaagacgaaggacgtataggttatcaagatttaggattttccggagctggtgctttagacttttatagttttaaaatggctcaaaaattaattggtaatgatggacctgcgattgaatacactgttattggccctaaagtacagtttcttaaagaaaatacttttgcatttattggtggaacatccaatgcaaaattaaacggtaattccattgattcacaagtagtatataaagtacagactaacgatgtattagaaatcggtcaggttactgaaggtgcgagaggatatcttgtgtttggtcatccgttaaaaatagaaaggattgcagagagttattctactcatactagaagtggacttggtggttttgaaggacgagcgcttaaaaagcatgacattatacctactcaaagtaatgcatcttataatgagaatttaggtaaagcaaccgactataaaccattagtagaggataatactattcatgttattaaaggtcctcaatttagttcattttcagaggaagcagtagatacatttatcaattctgaatttaaggtttcagatcagtcagatcgtatgggttacagattagttggtccatccgtttcacctttgaaaacggctgacattatttctgaacctgtagctttaggaagcatccaagttcctaatgacggaaacccaattattctattaaatgataaacaaactgtaggtggttatactaaaattgctacagttactcaattagatttaaaaaaattagcgcaacttaaaccaggagaaactattcgatttgaatggatatctacagaagaagcgtttaaacaattaatagaatttgaaaatgattttgatcaaaaactaaaaaacgtgtcagaacaaccattatttaatttaagtaatgtaagaaacacttctaagaaattagcatcactaattaaggaggacaaataa

SEQ ID NO: 309 - DNA, 456 bp, Staphylococcus capitis
atgaatcttgaaagaatagaagaaattataaatttagtaaaatcaaatgatgtaaaaaagtttaaatataaagactttgagaatgaaattgaacttgatttcacagagggtaattcatcacaaggtttatctcaaactgcaaatgtacaatcaaatgaaatgacacaaactaataatgaaactcaagatactaacaaccaaacgcaagattctagtgatgacaaagaaattaaatcttctatggttggtacgtttttcttacaagatagtaaagaattaacggatccccaaattaaagttggtgatcaagttaaagaaggagatatcattggttacatagaagcaatgaaggtaatgaacgagatcactagtgacgtaagtggtgaggttactgaaattgttgtagaacatggtactaatgttgaatatgatcaagtattagtcaaagtgaagtaa

SEQ ID NO: 310 - DNA, 1362 bp, Staphylococcus capitis
atgtatcgttgtttgattgcaaacagaggggaaatagcagtaaggattattcgtgcatgtagagagatgaaaatcgaaacagtagccatctatgccaaaggcgacgaagatagtctgcatgtaagtttagctgatcaagcgatttgtattggagaagctaatcctttagatagctatttaaatatagaacgtattatctcagcagcagaaattaccggagcaaatgcgatacaccctggttacggtttcttatctgaatcaactacttttgctgaagctgttgaagaaaatgatatccacttcattggccctaataaaaagacaatggaaatgatgggggataaaattacagctcgtcagaccgttcatgctgcaaatgttccagtaatccctggatctgacggcgaggttgaatctgttgatgaaattaaaaaactcgcggaagaaataggatacccccttgttcttaaagctgcaagtggcggtggaggtaagggtatccgtatcgttaaagaacctgaacaattagaaaaatcattaaaagaagctaaaagtgaaggtcaaaaatattttaatgatgatcgtgtatacgttgaagcttttattcccgttgcaaagcatgtagaggttcaagtcatcggtgatggtaaaaataactatgttcatttaggtgaacgtgattgttcagtgcaacgaaaaaatcaaaaacttattgaagaatcaccttgtgctgcattaacagatgaaagacgagaacggatttgtaatgatgctgttaaagtagcaaaggcatctaattatagaagtgctggtacaattgaatttttagtaacagaggatgctcactactttattgagatgaatgcacgtatccaagtcgaacatacagttactgaaatgcgagcagatagagatcttttacaagcacaattatatttattacaatatggtgaattaccgttccaacaagaagatatagtatttaacggacatgtaattgaagcacgtattaatgctgaaaatccagaaaagaaattccagcccactcctggtaaagtgaagaaattacatttaccacaaggatttaatattcgagtagattctttattatattccggttatcaagtatcaccatattatgactcacttgtagcaaaagtgattgtaaaagactcaaatagacaaacagctatcaataaattgaaagtagcattagatgaaatggttattgaaggtttcactacaacagcagatttcttatacgcagtattaagttatccgttatatgcagatggtgatgcaagcgaagttgatattaaattcttagagaagcatcaaatcattaaaggggtggatttataa

SEQ ID NO: 311 - DNA, 753 bp, Staphylococcus capitis
atgcaaatcgatttgaattgtgatttaggtgaagcatttggaaattattcatttggtggcgacaaagatattattccattaattacttcggcaaacattgcttgtggttttcacgccggtgatgaaaatgtaatgaatgagacaatacaacttgctaaagaaaataatgtaggcataggagcacatccaggtttacctgatttacaaggtttcggcagacgcaaaatagatattaaacctaaagaaatctacaatttagttgtctaccaattaggtgctttgaatggtttttgtaaaattcatggagctcgtataaatcatgttaaacctcatggtgctttatataacatgggcgctaaaaataaagaaattgctcaagctattgcacaagcggtttatgatttcgataaatccgtagtgctagttggactatctaatacattgttaatttcagaagctgaagcgcttggtttacgtactgcttcagaagtttttgcagatcgtcgttatgaagatgatggtcagcttgtaagtcgtcaagaatcagatgcgacaattacaaatacggatgaagcattacaacaagtgttaaaaatggttactgagaataaagttgttagtaaaaatggtaaagaaattgatttacaagccgatacaatatgtgtccatggtgatggtgctcatgcacttgattttgtaactcaaattagaaaaaaattaacgaaagaaggcattgatattcaatccttatag

SEQ ID NO: 312 - DNA, 1257 bp, Staphylococcus capitis
atgggagaaaattttaaacaaagcaacaatcaagaaacaaaacaaagtgggaaagactttaaatttacaaaaggtcatagacgtttattatatggttcagtatttttgatggctacttctgccattggtccggcatttctaactcaaacggctgtttttacagcacaattttatgctagttttgcattcgctattttaatatcaatattaattgatattggtgctcaaattaatatttggcgtgttttagtagttactggattgcgtggtcaagaagtttcaaataaagttgtacctggattaggcacagtgatatcaatattaatagcatttgggggacttgcatttaatataggtaatattgcaggtgcaggtcttggactcaatgcaatgtttggtttagatgttaaatggggtgcagctataactgcaatattctctatcttaatctttgtaagtaaaagtggccaaaaaataatggatgtagtatctatgattctaggggtagtaatgattttggtcgttgcatatgtgatggtagtttctaatcctccatacggtgatgcattagtacacatggttgcacctgaacatccaatcaaacttattttacctataattactttagtcggaggcactgtaggtggttatataacttttgcaggagcacaccgattattagactctggcatgaaaggtaaagagtttttacctttcgttaacagatctgcgattgcaggtattttaacaacaggagttatgagaactttacttttcttagcagttttaggtgtggttgttactggagttacgttaagtgcagaaaatccacctgcttcagtgtttgaacacgctattggtccaataggaaaaaatatatttggtgtagttatttttgcagcagcgatgtcatctgttatcggttcagcatatacaagtgcaaccttcttgaagacattacataagtctttatttaataaaaataatttaatagtcattatgtttatagttatctcaacattaattttcttattcattggtaaacctgtaagtttacttataattgcgggagcaatcaatggttggattttaccaattacactaggggctatcttaatagctagtcgtaaaaaatctattgttggagattataaacatcctacttggatgcttgttttcggaatcatagcagttatagttacgattatcactggtattttctctctacaagatttagcaagcttatggaaaggttaa

SEQ ID NO: 313 - DNA, 687 bp, Staphylococcus capitis
atgataggcataattggagctatggaagaagaagtaggtatactcaaagataaaattgtcgacttaagtgaaattagtgtggcacacgtaaaattctatactggtatacttaataataaagacattgttttaactcaaagtggaataggtaaagtgaatgctactatatcaacgactttattaattgaaaaattcaatccagatatagtaattaatacaggttctgctggcgctcttgatgagagtttaaaagtgggtgacgtattagttagtaatgaagtcatttatcatgatgcagatgcaacagcatttggttatgcttatggtcaaatcccacaaatgccagagcgttatgagtctagtgaaaaattattagaaaaaacaattgatatattaaaacagcaacagctaaatggtaaagttggcatgattactagtggcgatagttttattggtagtgctcaacaacgaaataaaattaaatcacaatttccagatgcaatggcagtagaaatggaagcgacagctattgcacaaacatgtttccaatttaacgttccatttattgtgacgagagcagtttcagatttagctaatggagaagcagatatttcatttgaagaatttttaggtcaagctgcgatttcttcgagtgagacagttgaattgttagttaaatcattataa

SEQ ID NO: 314 - DNA, 525 bp, Staphylococcus capitis
atgggtattattaaaaatttatttatgccaaatgcatacgtacaatctgtattcgatatagatatagaaaaattagcgagtatgggagttaaaggaatcattacagacctagataacacccttgttggttgggacgttaaagagcctaccgagagaattaaagagtggttctctaaagcgcgtgagcttggtattacaattacaattgtgtcgaacaataatgaagaacgtgtatctagtttttctaaagatttagaagtagattttatattcaaagcacgtaaaccaatgggtaaagcttttaaaaaagctattaaacaaatgaatatacaagctaaagaaactgttgttattggagatcaaatgcttacagatgttttcggtggtaatcgcaatggactatatactattatggtcgttccagttaaaagaactgatggctttgtgactaaatttaatcgtctaattgaaagacgcttattaaatcattttagaaaaaaaggttatatcaaatgggaggaatag

SEQ ID NO: 315 - DNA, 1101 bp, Staphylococcus capitis
ttgagtgaattactaaaatgtattggttgtggcgctccactacaatcagaagataaaaatgctccaggctatgtacctgaacataatatgttccgtgaagatgttatatgtcaaagatgttttagattaaaaaattataatgaagttcaagatgttgggatggacagtgaggatttcttaaatttattaactggtctttctaataaatctggtattgtagttaatgttgtggatgtttttgactttgagggttcatttattaatgcaattaagcgtattgtaggtaataaaaaaatcattttagctgcaaacaaacttgatctactacctaaacaaatcaatcagcgtcgtgtaaaagagtggttaaagaaaactgctagaaaatacggcttagaagccgatgatgttgtacttatttcagctgataaaggttggggcattgaagagttgatgcagtcaattaatcaagtgagaaataatgaggacgtttatgtcgtaggtacgactaatgtagggaaatctactttaattaataaattaattgaaattagtgttggtgaaaaagatgtagtaactacttcaagatttccaggtactactttggacatgattgatattccgcttgatgaaactacgtttatgtatgatacacctggtattatacaagagcatcaaatgacaaactatgtctctgataaagaattaaaaaccattatgcctaaaaaggaaataaaacaacgcgtatatcaactaaatgaagaacagacattattttttggtggtttagctagaattgattatgtatctggaggtaaaagatcattagtatgtttcttctccaatgatttaaatatccatagaacaaaaactgaaaaagctaatgaattatggaaaaatcaattgggttcacttttaacaccaccacatgacgcaagtcaatttgatttaaatgacgtaaaagctgttagattagaaactggtaaagctaaacgtgatgttatgatatcaggcttaggatttatcacaattgacgaaggtgcaaaagtgatcgtgcgtgtacccaaaaatgtagacgtcattttaagaaattctattttataa

SEQ ID NO: 316 - DNA, 810 bp, Staphylococcus capitis
atgaaatttgcagtaattggccacccgatttctcattctttatcacctataatgcatagtgctaacttttcaaatttaagtttaaattacacctatgaaccactagacattcctaatgacgaattccacttacttagagacatcattactgaaaagaaacttagtggatttaacgtcactatccctcataaagagcggataataccttatctagacgaggtagatgagcaatctaaaacagtaggtgcggtaaatactgttttaattagagatggtaagtggataggctataatacagatggtataggttatgtaactggcttaaaacaaatttatgatgatttaaagaatgcttatatactcattttaggtgctggtggtgcaagtaaagggattgctaacgaattaactaaatttgttgaacccaaattaacaattgctaatcgtacaatgtcaagatttgaagattggaatttagatattaatgctatttctctaaatgacgctgagaagtatttggatgaatttgatatcgttattaatacaacacctgctggaatggataaaaataatgatagtgtgataaatctaagaaatttatctcctcatacgttagtaagtgatatagtgtacattccttataagactccaatcttattagaagctgaaagtaaaggtaaccccatttataatggtttagatatgtttgtgtatcaaggtgctgaaagctttaaaatttggacaggagaacaacctaatattcaaatcatgaaaaatactgtattagataaattaaaaggagatttataa

SEQ ID NO: 317 - DNA, 291 bp, Staphylococcus capitis
atgttaactggaaaacaaaagagatacttacgtagtttagctcataatactgatccaactttccaaataggtaaaggtggaattaacgaaaatatgatttctcaaattgatgaaacgatagagaaaagagaactcattaaaatacatgtattacaaaataattttgatgataaaaatgaattagctaatgaacttagtcaagcaactaaaagtgaattagtacaagtaatcgggtcaatgattgtactttataaagaatctcaagaaaataaagacatcgttttaccctaa

SEQ ID NO: 318 - DNA, 498 bp, Staphylococcus capitis
gtgttccatgaattacaacctgatgaattttatttcttacctagttacatggctccgttgaaagaacatcaagatttcctagatgcttcttatcgtatgaagatgattgaatttgtcatagaggaattaggttttggaaaaatttgtactagtgaattagatagaaaaggacaaagctatacttatgacacgttgtctgaaataaagcgtaacaatcctaaagatgaattttattttgtaataggaactgatcaatatgagcaacttgataagtggtttaaaattgacgaattaaaaaagttgatcaccttcgttatagttaatcgtgagtcagattatcaaagtgtcgaaactggtatgatatcggttaaaatacctcgtattgatattagttcaacaatgattcgagaccgtgttaaaaatcataaatctatacaagcactcgtccctaataaagtggaggactatattgaggaggaaggactttatggaaattag

SEQ ID NO: 319 - DNA, 585 bp, Staphylococcus capitis
atggaaattagtgaagctaaaaagctagtgaaagaaaaattgcccgagaaacgttataatcactcgcttagagttgctgagacagctgtaaaattagcagaaatatatgatggagataaagataaagcagaattagctggtgttttacatgactattgtaagtatgatgatttaagttcaatgtaccaaattgttagacaatgtgaattagagagtgacttacttagttatggaagtgaaatcttacatggacctgtttgcgctgcaatcatggaacatgattatcacattgaagatgaagaggttttactagctataaaatatcatacaactgggcgtcagcaaatgactaaaacagaaaagcttatttttattgctgattatattgaacctggtagaaaaaccccaggagttgaagaaattagagatatggcatacaatcaaggtagcttagataaaacaatttatgaaatttctaagcgaacagttttatttttaatcggtaaagacattacggtatatggcgctacgattgcatgcttgaattattataattatagtgacgaaagaataaaggatgattaa

SEQ ID NO: 320 - DNA, 354 bp, Staphylococcus capitis
atgagttcagaagaattattaaatattgctgtcgaagcgacagaaaacaaaaaagcagaagatgtaatttctcttaatatgcaaggtatcagcgatatgactgattactttgttgtgtgtcatggtaacaatgagcgacaagtacaatccattgcaagagctgttaaagaagctgttcatgagcaaggtattgatgttaaacgtatggaaggttataacgacgcaagatgggtattaattgatttagctaatgttgtggttcatattttccataaggatgagcgaaattattataatatcgagaaattatatcaagatgctccatatgagtcatatggtcaggttgcttattaa

SEQ ID NO: 321 - DNA, 720 bp, Staphylococcus capitis
atgagtcaatacgaagatttgagtttggtctatgaccagcttactcaagatcaaccatatgatgcttggttcaatatagttcaaaccttttcaaagagagaatctaatgacattctagatttaggttgcggtacaggaaatttaacacatatgttggttccattaggcaatgttatcggaatggatttaagtgttgatatgttaactatcgctaatcaaaaatctaatgaagttagatggttagaaggagatatgacaagttttaagttgaaccaaaaattcaatatcattacaatattttgtgattcactgaattatttatcttcaagtaaagaagttaaagaaacctttaataaagtttaccagcatttaaccgatgatggagtatttctatttgatgtgcatactgtacataagatgaatactttatttaataatcaaagttatattgatgaaacagaaaatgtcttcttaggttgggaagcaattcaaggaaatgaaccattaagtgtttatcatgaaatgacttttttcattcataataataatggaagttatcgacgctttgatgaatcccattatcaacacacatatgaagaagatgtttataaaaggttactcaatgaggctggttttaaagaaattaaaactttcaccgattttgattttaatcaaaaagaagaagatgctgatcgattatttttcgttgtaaaaaaatag

SEQ ID NO: 322 - DNA, 681 bp, Staphylococcus capitis
ttgtttaacataggtaataagtatattgaatttattattaaatggaaaatttatttaattataggtctagtagttttagcaatgatagttttaagtctatttaatcattatgaagacaatagcaaagaggacgaatttaacaaagagattaatagcaagcaggttaattctaagagatatagttcaactaacaaagataataatgaaaaagaaagacaatctcaaagaggaaacaacaatgaaaaaatttttatagatattaaaggcgcagtagaacatccaaatgtttatcagatgacaaacactgaaagagtcatagatgcaattaataaagctaaaccttataaggatgcagacttatcacaagtaaacttatctgaaaggttaatagatcaaaagctaatttatgttcctaaaaagggagaacacagtcaatataatacggtgaataatatttcaaataataatatcaatcaaaatgagggaaataaacaaattaatttgaataatgccactgaaacggatttaaaaagcattccaggcgttgggccttctaaagcaagagaaataattaattatagagagcaaaatggagggttcaagaatatagaagatttgaaaaaaattaaaggatttggcgaaaaaacatttgagaaacttaaagaacatcttgttgtttaa

SEQ ID NO: 323 - DNA, 462 bp, Staphylococcus capitis
atggaacgaattaaatgggaagaatattttatggctcaaagtcatttacttgctttgagatcaacatgtcagagactatctgtaggagcaactattgttaaagataatcgaattatagcaggaggctacaatggttcagttgccggtgaagttcactgcatagatgaaggttgcctaatagaagatggacattgtatcagaacaattcatgcagaaatgaatgcattacttcagtgtgctaaacaaggcgtttcaacagagggagcgacaatatatgttacacatttcccttgtttaaattgtactaaatctattattcaagcagggattaaaacaatttattatgctgaagattaccacaatcataattatgcgattaagttactaaatcaatctggtattgaatataaaaaaattccatttacaccggaatatgtagctcaatatttaacacaggggtaa

SEQ ID NO: 324 - DNA, 2217 bp, Staphylococcus capitis
atgatatacatagcactatcatttttagtagggatactttggatgaatttcaaagttatctctatctctttatttttccttttaatcttattaatcttcatcaaaaaacttaaacttccaataatcttacttattgttgtgtgtcctttcttttcaaattatattacacaaacatataaccaacgtgttgaccatgaacaacgcatactaatgtataatcccaaagttaatgattacgtaaaatttaaaacatttaaagttcaaaataattttattactggaatattagtttataaaggtaaaaattataatttcttttataataacaataataagacaaacattacctccctcaaacatcacacttgtagtataaatggggaattcaagtttgataaagttcctccatcaattacactgaatgaaattcacactaattcatgtacttataatgataggtttaaattcatttatctccatcaagactatataatcgataagattcaacattcaggtgtaaaatatccaaatcgaattttagcactgattacaggtaatccattattaatcaatgctgattatagagataaagtgaaggatataggtatatatcatttactagcagtgagtgggactcatgtagcagcaattatacttctcattcatcaacttttagtgagatttaacacgccacttgtcattattaaaacaatgattattaatgttttagtactatacgctgtttatactgactttgttcctagcgcagtaagagcaatttcaatcgcaatattagttttaatccttcctaaaagattcagaaaatcttctattgatttgctttctatcatatttattatgatgtttataagcaatccaggttatgtttataatataggttttcaattttctttcttaatttgcttttttattttactatcacaaccttatttaaaaaaattaacttcatttcaaagcatattagccattacctgtatagctcaatatagttctattattataagtacatatcattttaatcaatttcaatggattggtttcctcccgaatttagtttttgtgcctttctacagtttcatactttttccttcaataatttgcttttttattatgactcacattgtatcaaattttgaaattctaaatgtttacacgaataaaatttatgaaatacatgatttattactccacttctttttgaaatttaataattataagtggtttataccttctttaagcgaaatttatctactaatattgttaataaatatattgattgcttattatttattagtgtacaaaaagatttttaaatccctaatatactttttaattaccttagtaataatatctacattgagtaaaccttcaaacgtagagttaacaatttttgatgtaggccagggggatagcatacttttcaaaagtaatacaaataaaactgtattaatagatactggagggaaaggagaagaaaactttgaatttaaacatcataatattgctaaatacaaaattctcccaagtttgaagcgaagaggtattactacgattgattatttaattattactcatccacatgcggatcatatgggggaacttccttatatcatagaccatgttaaaattaaaaatttaatattaaacagtgatggttttcctaagcatttattaaatcaagttcacaacgaatgcaagaaaaaaaggataaatataattgaagctaaaaatatacctcaaataaagattgatgatactgaattagaaatttacgatacatttatatcctcaagttccgataaaaatgagtattcaatcattacattaataaaatataacaatagaaatattttactcatgggtgatgccactaaaaacaatgaggatattttattgaagaaatatcatttgcctacaatagatattttaaaagtaggacatcatggtagtcgaacaagtagctctgaagaatttattaagaaaattcaaccaaggttaagtttgatttcaagtggaaaacataataaatataaattacctaatgacgaagttattgaacgtttaaagagatatggaagcttagtgtatgacacgcaacaaaacggtgaaatgacgattaatttagataaacaccatttaagtgtgttaaatgttaaagatcatctaaaaactatcgctagagaagtcactcaataa

SEQ ID NO: 325 - DNA, 975 bp, Staphylococcus capitis
atgagcgacaatatcataactatctatggcgaagtacctgaacttgttgagaagaaaagttcagaaatagtaaataattatctcggacaagaaaaagatgattttaactacgttaaatttaatatgtatgaaaatgatctaacgcccatcattgaagaaacattaactatgccttttttttctgataaaaaagctattgtagtaaaaaatgcatacatatttacaggtgaaaaaggtgcaaaggaactcaatcataatccagagcagttaatggaatttatagaaaaatatgacggggataatctgattctttttgaggtttatcaaaataagttagatgaacgtaaaaaattaacaaaatcacttaaaaaaaatgcgcaactcaaaaaagttgaacaaatgtctgaagaagaaataaaaaaatggattcaaaataaattacacgaaaattataaagatattaaacaagatgctttaaatctatttattgaactaacaggaattaatttcaacattgtttcacaggagctttcgaaacttatgctgtatataggagatagacctacagttaataaagatgatgttaatcaaattataaatagaagcttagagcaaaacgtttttcttttaactgaatatattcaaaaagggaaaaaagataaggctatacaattattgaatgacttaattactatgaaagaggaacctataaaacttttagctttaataactagtaattacagattatattatcaatctaagattttagaacaaaaagggtacagtggccagcagattgcgaagacagttagtgctcatccgtatagagtgaaacttgctctaaaccaagcacgatactatcaattaaatgatttattaaacattattgattcatgtgcagaaaccgattataaattaaaatctgcttatatggacaaacagttaattttagaattattaattttatctttatag

SEQ ID NO: 326 - DNA, 252 bp, Staphylococcus capitis
atgccaaacattaaatctgcagttaaacgtgttagaacaactgaaacagctgaagcacgtaatatctctaaaaagaatgcaatgcgtacagcagttaaacgcgctaaaacagctatctctactgatgctgaaaacaaaaacgaattattaagttttgcaattaaacaagttgataaagctgctcaaagcaacttaattcactcaaacaaagctgatcgtattaaatctcaacttatgacagctaacaaataa

SEQ ID NO: 327 - DNA, 1824 bp, Staphylococcus capitis
atggataagcaagaacgctataatagaagagaaaatatcagaaatttctctatcattgcacacatagatcatgggaaatcaacgttagcggatagaatccttgaaaatacaaaatcagttgaaacacgtgaaatgcaagatcaactacttgattccatggaccttgaaagagaacgcggtattactataaagttaaatgctgttcgtttgaaatatgatgctaaagatggtcaaacatatactttccatcttatagatacaccaggacatgtcgactttacatatgaagtgtcgcgttcattagctgcatgtgaaggcgcaattttagttgtagatgccgctcaaggtattgaagctcaaactttagcaaatgtatatttagctcttgataatgacttagagttattaccagttgttaacaaaattgatttacctgcagctgaacctgaaagagttaaacaagaattagaggatgttattggtttagaccaagatgatgtagtacttgctagtgccaaatcaaatatcggtatagaagaaattttagaaaaaatagtagaagttgtaccagctcctgatggagatcctgatgcacctttaaaagctctaatatttgattcagagtatgatccttatagaggcgttatctcatctattagaatcattgatggtgtagttaaagccggggataagattaaaatgatggctacgggtaaagaatttgaagtgacagaagtaggcattaatacacctaaacagcttcctgttgaagaattaacagtaggagatgtaggatatatcattgcaagtattaaaaatgtagatgattcacgtgtaggtgatactatcacattagctaatcgccctgcagataagccactcaaaggttataaaaaaatgaatccaatggtttattgtggtctattcccaatagataataaagattacaatgatttacgtgaagcgttagaaaaattacaactcaatgatgcttcactcgattttgagcctgagtcatcacaagcattagggttcggatatagaactggtttcttaggcatgttgcatatggaaattattcaagaaagaattgagagagagttcggtattgaattaattgcaacggctccttcagttatatacgaatgtattttaaaggatggaactgaagttactgttgacaatccagctcagatgccagaaagagacaaaatagaacatatttatgaaccatttgtaagagctacaatgatggtacctaatgattatgttggtgcagtgatggaactatgccaacgtaagcgaggtcaatttgtaaatatggattatttagatgatataagagtaaatattgtttatgaaattccattatctgaagttgtgtttgacttctttgaccaacttaagtctaatactaaaggttatgcttcatttgattatgaattcattgaaaataaagaaagtaatctagttaaaatggatatcttacttaatggagataaagtggatgccttaagtttcatcgtccatagagactttgcatatgaaagaggtaaagcacttgttgaaaaattaaaaacacttatacctagacaacagttcgaagtacctgttcaagcagctataggtcaaaaaattatagcccgtacaaatattaaatctatgggtaaaaatgttttatctaaatgttatggtggcgatattagtcgtaaacgtaagcttttagaaaaacaaaaagcaggtaaagcaaaaatgaaagctgtaggaaatgttgaaattcctcaagatgctttcctagctgtgcttaaaatggaagatgaatag

SEQ ID NO: 328 - DNA, 1125 bp, Staphylococcus capitis
ttgacagttaaaagtgcttatatacatataccattttgtgtaagaatctgtacttattgtgattttaataagtattttatagataagcagccagtagatgaatatttagatgcgctcattaaagaaatgcaagttgaaaataatagaaagcttgagacaatgtatgttggcggagggacacccactgcattgaatattgtacaacttgaaaaactactaaaagctattaataacacgtttactattcatggagaatattcatttgaagctaatcccgatgaattaacttatgagaaagtagtacttttaagaaaatatggtgttaatagaatttcgatgggagtacaaacgtttaagccagagttgttagaaattcttggacgaactcataaaactaatgatatctatagcgctgtaaacaacgctcgcaaggcaggtattaattcaattagccttgatttaatgtatcatttaccccagcaatcattagaagattttaaacaaagtttagaattagctttagaaatggatattgatcatatttcgagctatggtcttattcttgaaccaaaaactcaattttacaacatgtatagaaaaggacatttaaagcttcctaatgaggatttaggggcagatatgtaccaatatttgatgaaacgattagaggattctaatttaaatcagtatgagatttctaatttcgggaaaaaaggtcacgaatcaactcataacaaagtctattggcttaatgaagaatattatggttttggtgcaggagcaagtggttatgtggatggtgtaagatataccaatctcaatccagtcaatcattatattaaagctatttataacaatgaggaacctatacttacaaagaacaccccaacttttgaagagagaatggaagaggagatgtttcttggcttaagaatgaagcaaggtgttagcatatcgagatttaagagaaaatttggtataaatattgaagaggtatttggtcaaacaattacggatttaataaatagaaatttattagaaaataaatgcggttatatatcattaactgaacgtggtaaagtcattgggaatgaggttttcgaggcttttttactcaacgtataa

SEQ ID NO: 329 - DNA, 978 bp, Staphylococcus capitis
atgattacagaaagacaattaagcattcttaatgcgattgttgaagattatgttgattttggacaatcgattggttctaaaacattaattcaccgacataatttagaggtaagcccagcaactattagaaatgaaatgaaacagcttgaagatatgaacttcattgagaagacgcatacttcatctggcaggactccctcagaattaggttttagatactatgtcaatcgtttattagaacaaacatctcatcaaaatcaaaacaaaattcaacgtttaaatcaattattgattgagaatcactatgatatttctacagcattgacatactttgctaatgaactatctatgaaatctcaatatgcaacgttggttgtacgtccaaatcacaatcaagatattattaataatattcatttgattcaagccaatagtcatttggttatattagttatggtcttttcatccggacatgtcgaaaatattcatgttgtaactcaaatacaacttaatcatctcaatctaaacagaatagctaactttttaactgtccatttcaataaacataaccaagatattcaacacgagattaaaagttttgttaattctagtgatgaacaagagttagtaaatgagatgattgaattaattaatattcatattaataatcaaagtaataacatttacatgggtggaaaggttaaacttattgatgcgttaaacgaaactaacgtatcatcgattcaacctatattgcagtacattgaatcaaatagaataactgaacttttagatgatatttctacttctcaaatcaatgttcgaataggaaaggaaattgatgagagcttaagtgatatctccatagttactagtcagtatcatgttgatgaatcacttaaaggacaaattgcggtcataggaccaactgcgatgcattatcaaaatgtaattcaattacttaaccaaatatggtag

SEQ ID NO: 330 - DNA, 636 bp, Staphylococcus capitis
atgacagaaaaagatcaatcagtgaataatactgaggaagaagttaattcagaagagaatgtagaaactcaaaatgttgataattctcaagactcagttgaaaatactgacaatagtgaagtaaatgaagatcatttgcaagaagattctcaggaagaagttcaaactgaggatgtagatcctaaagatgagaaaattcaagaattagaaaagctagcaaatgataatgaagagaaatatttaagattgtacgctgaatttgaaaattataagcgtcgaattcaaaatgaaaatcaaattaacaaaacttatcaagctcaaggtgttttaactgacatccttccgtcaatagataatattgaacgtgcattacaaattgaaggtgatgatgaatcatttaaatcactacaaaaaggtgtccaaatggttcatgaaagtttacttagagctttaaaagataatggtcttgaagaaattgaagctgaaggtcaagaatttgaccctaatcttcatcaagcggtggttcaagatgataatcctgattttaaatcgggggaaatcactcaagaacttcaaaaaggttacaaactaaaagatcgcgtcttgagaccatcaatggtaaaagtaaatcaataa

SEQ ID NO: 331 - DNA, 1830 bp, Staphylococcus capitis
atgagtaaagtaatcggaatcgacttaggtacaacaaactcttgcgttgccgtattagaaggtgacgaaccaaaagtaattcaaaatccagaaggcgcacgcactactccttcagtagttgcttttaaaaatggtgaaactcaagtaggtgaagttgctaaacgtcaagcaatcactaaccctaatacagttcaatcaattaaacgtcatatgggtacagactacaaagtagatatcgaagataaatcatacactccacaagagatttcagctatgattttacaaaacttaaaaagtactgctgaaagttatttaggagatacagttgataaagcagttatcactgttccagcttacttcaatgatgctgaacgtcaagctactaaagatgctggtaaaatcgctggactagaagttgaacgtattatcaacgaacctactgcagctgctttagcttacggtttagacaaaactgaacaagatcaaaaagttcttgtatttgacttaggtggcggtactttcgacgtgtcaatccttgaattaggtgacggagtatttgaagtattatctactgcaggtgacaataaacttggcggtgacgatttcgaccaagtaattattgattacttagtttcagaatttaaaaaagaaaatggcgtagatttatctcaagataaaatggcactacaaagattaaaagacgctgctgaaaaagctaaaaaagacttatcaggtgtatctcaaactcaaatttcacttccatttatttcagctggagaaagtggtccattacatttagaaattagcttaactcgttctaaatttgaagaattagcagattcattaattagaaaaacaatggaaccaactcgtcaagcactaaaagatgctggcttatcaacttctgatattgatgaagttatccttgttggtggttctactcgtattccagcagtacaagaagctgttaaaaaagaagtaggtaaagaccctcataaaggtgtaaaccctgatgaagtagtagctatgggtgctgcgatccaaggtggtgtcatcactggtgatgttaaagacgtggtattactagacgtaacaccattatcactaggtattgaaatcatgggtggacgcatgaacacattaattgaacgtaacactactattccaacatctaaatcacaagtttattcaacagcagctgataaccaaccagcagttgatattcacgtgttacaaggtgaacgtccaatggcttcagataacaaaactcttggtcgtttccaattaactgatattccacctgctccacgtggtgtacctcaaatcgaagtaacatttgatattgataaaaatggtatcgttaatgtaactgctaaagatttaggaactaacaaagaacaaaatatcactattcaatcaagctcagcattatctgatgaagaaattgatcgcatggttaaagatgctgaagaaaacgctgaagcagataaaaaacgtcgcgaagaagtggacttacgtaacgaagctgatagcttagtattccaagttgaaaaaactatcactgatttaggcgacaatattagtgaagatgataagaaaaatgctgaagagaaaaaagatgcgcttaaatctgcacttgaaggcgaagatatggaagacatcaaatctaaaaaagaagaacttgaaaaagttgttcaagatttatcagctaaagtatacgaacaagctcaacaagcacagcaacaagctcaaggagaacaaggttctcaagacagctctgtagaagatgcggactttaaagaagtaaaagatgacgaagataaaaaataa

SEQ ID NO: 332 - DNA, 1137 bp, Staphylococcus capitis
gtggccaaaagagactattatgaagtcttaggcgtaagtaaaagcgcttctaaggacgaaattaaaaaagcttatcgtaaattatcaaaaaaatatcatccagacattaataaagaagaaggcgcagacgaaaaattcaaagaaatctccgaagcttatgaagttttaagtgatgataataaacgtgcaaattatgaccagtttggacatgaaggcccacaaggaggattcggtagtcaaggtttcggtggcggagactttggcggatttagcggaggtggatttgaagacattttcagttcattcttcggtggtggttcaagacaacgtgatcctaatgcgccacgtaaaggtgatgatttacaatatactatgactgttacctttgaagaagctgtttttggtactaaaaaagaaatttctattagaaaagatgtaacatgtcatacgtgcgatggtgaaggcgcgaaacctggaacaagtaaaaaaacttgtagctattgtaatggagctggtcatgtttccgtcgaacaaaatactattttaggtagagtcagaactgaacaagtttgtcctaaatgtgaaggtagtggtcaagaatttgaagagccatgtcctacttgtcacggtaaaggaactgaaaataaaactgttaaattagaagttacagttccagaaggtgtagatactgaacaacaaattcgtttagctggtgaaggttcaccaggtgtaaacggtggtcctcacggtgatttatatgtagtgtttagagttcaaccttccgatacatttgaacgtgatggagatgacatttactacaatttaaatgtgagcttccctcaagctgccttaggcgatgaaatcaaaataccaactttaaatagtaatgtagtgctaacaatacctgcaggtacacaaacaggaaagcaattccgtcttaaagataaaggtattaagaacgttcacggttatggttatggagatttattcgttaatattaaagtagttactccaactaaaatgaacgatagacaaaaagaaattatgaaagaatttgctgaaattaatggcgaagacgtgagtgaacaaccttctaattttaaagatagagcaaaaagattcttcaaaggagaatag

SEQ ID NO: 333 - DNA, 939 bp, Staphylococcus capitis
atgaattggacggaactctcaattgtagttaatcacgatgttgaatttgaagtaactgatatacttgaagatcatggttctaatggtgtagtcattgaagattcaagagacttagaaacaccaccatcagataaatttggtgagatttatgaattaaatcctgaggattatcctagtagtggtgttcgtttaaaagcttattttaatgaacttacattcaatgatgaactcagaaagagtattaagaataatattttaaatgtatcaaatttagataaagaagtacttacattttcagaaaaggaaattgcggagaaggattgggcgaatgaatggaaaaattattttcatccctttaaagcttctaatagatttaccatagttccaagttgggaaacttacacaaaagaaaacagtgatgagttatgtattgaactcgatcctggtatggctttcggtacaggtgaccacccaactactagtatgtgtttaaaagctattgaagaatatgttcaaccaactgattctattattgatattggaacaggttcaggtatattaagtattgctagtcatctcgttggtgttaaaagaattaaagcattagacattgatgaaatggcagtaaatgttgctaaggagaacttcaaaaagaatcgttgtgaagacgcaattgaagctgttcccggtaatttattaaaagaagaaaaagagaaatataatatcgttattgcaaatattcttgctcacattattgaagaaatgatagaagatgcttataatacattatttgaagaaggatattttattacttcaggtattatagaagaaaaatatgaagagatagaatctcatatgaagcgtgttggttttaatatcatttctgtagaacatgacaacggttgggtctgcatcgttggtcagaaagtgagtgattaa

SEQ ID NO: 334 - DNA, 753 bp, Staphylococcus capitis
ttgcaaagatattttattaatcaaagcgctgataaacttcagcgcttttttattgaaaataaagaagatattcatcatataaaaaatgtcatgcgttttagtgaaggtgattcagttatcgttacatttctagatcaaacagtgtacaagtgtcaaataaaagctttaaacgataattatgttgaactagagttaaaagataaacaaaacattgatacagaattacctcaacatatcactatttgtagcggattgattaaggctgataagtatgaatggatgattcaaaaagcaactgaaatgggcgctaatgaatttattgcagttggtatggaccgttcagtagttaaattgaatgaatctaaagttgctaaaaagttagaaagatggcaaaaaattattaaagaagctgcagaacaaagttatcgtttaacaattcctaatatttattttaagtcgaatttacaggaaatttatgatattataagtcattatgactatgttcttatagcatatgaagaacaggctaaacatggtgatttaagtcattttaaacaaattataaagcaatttaaaacacaagatcgtgttttaatgatatttggacctgaaggcggtttatctgataaagaagtgtctttattcagtgaaaatagtactttagtaggcttaggtccacgtattttacgggcagaaactgcacctctatatgctttaagtgcagtgagttttgaaaaagaattattggggtga

SEQ ID NO: 335 - DNA, 1347 bp, Staphylococcus capitis
atgtcaacagttgcatttcatacattaggttgtaaagtcaatcactatgaaactgaagcaatatggcaattatttaaagaagcagattacgatagagtagattttgaaacaaatgcagatgtatttgttattaatacttgtactgttacgaatactggagataaaaaaagtagacaaattattagacgtgcgatcagacaaaatcctgaagcagttgtatgtgttacaggttgttatgctcaaacatcttcagctgaaattatggaaattcctggcgtggatgtagttgtcggtactcaagaccgtcataaattattagactatattgatcaattccaagaagagagacaaccaattaacggtgttggtaatataatgaagaatcgtacatatgaggagttagaagttccttactttaccgatagaactagagcctctttaaaaatccaagaaggatgcaacaatttttgtacgttttgtattataccttgggcacgcggcttgatgagatcacgtgatcctgagaaagttgtagaacaagcttcacaattagtaaactctggctataaagagattgttttaactggtattcatactggtggttatggtcaagatttaaaaaattataatctagcgcaattgttaagagatttagatgaaattgaaggcttagagcgtatacgaatctcatctatcgaagcgagtcaattaactgatgaagtaatagaggttattggcaattcaaacaaagtagtaagacatttacatgttccgttacaatctggttcagattcagttttaaaacgtatgagacgtaaatatactatggaacatttctctgagagattaacagaattacacaaagcattgcctgacttagctgtaacaagtgatgtaatagtaggattccctggagaaactgaagaagaatttcaagaaacatacgattttattgtcaaacatcaattctctgaattacatgtgttcccatattcaccaagaatcggtacaccagcagctcgaatggacgatcaaatcgatgaatctgttaagaatgaacgtgtgcataaattgattgctttaagtgaccaacttgctaaagagtatgcctctaaatttgaaaatgaagtgcttgaagtaatacctgaagaaaaaggcgaagaaccgaatacattggtaggttatgcagataactatatgaaagttcaatttgaaggtgatgaatcactaattggacaaattgttaaagtaaaaattcttaaagctgactatcctctaaatgatggtaaagccattagagtagttgagcatgctacgaataaatctgaagaagaagtacttgtctaa

SEQ ID NO: 336 - DNA, 177 bp, Staphylococcus capitis
atgtctaaaacagtagtacgtaaaaacgaatcactagaagatgctttacgtagatttaaacgttcagtatcaaaaagtggaacaattcaagaagtacgtaaacgtgaattttacgaaaaaccaagcgttaaacgtaaaaagaaatcagaagctgcacgtaaacgtaaattcaaataa

SEQ ID NO: 337 - DNA, 540 bp, Staphylococcus capitis
ttgattggaattattgcttcactagcattattacttttatttttaggattccttatcaatggagatgtaaatgttttatcagtattattgtttactattggtgtcatactagttattatagaactgtttatcattggtgccgtgataggtattattggtatgctactcataactctcagtatcatcatgctaggaaataatattatactcatgctcggtaatgtaatagttgcgttaattttatcaataattgaatgggtgatattagtgaaaattttcaacaagaaaataccatttcttgataaagtgatcttaaaagattcaacaaattcagatgctggttatcgttcacatgacgaccgctctcaccttgtaggtaaaactgctcaaacaatcactgaccttagacctgctgggattattacttgtgacgatgaaagaatagatgcagtttcagacggcacatttattttaagaaatagacaagtaaaaattcttgaggttgaaggtacgcgtgtagttgtgagagaaatagaataa

SEQ ID NO: 338 - DNA, 990 bp, Staphylococcus capitis
atgtttggtattggttttataatcattgctgtaattattgtagtagctttactcatactattttcttttgtacctataggattatggatttctgctatagcagcaggcgttcacgtaggtattggtacccttgtaggtatgcgtttaagaagagtttcaccaagaaaggtcattgcacctttaattaaagcacataaagcaggtttaaaattaacaacaaatcaattggagtcacactacctagctggtggtaatgttgatagagttgttgatgcaaatatcgcagcacaacgtgcagatattgatttaccatttgaacgaggagcggcaattgatttagcaggtcgtgatgtactcgaagcagttcaaatgtcagttaaccctaaagttattgaaacaccatttattgctggtgtagcgatgaacggtattgaagttaaagcaaaagctcgtattaccgttcgcgcaaatatagcaagattagtcggtggtgctggagaggaaacaattattgcccgtgtaggcgaaggtattgtttctacaattggttcaagtgagcatcacactgaggttctagaaaatccagacaatatttctaaaactgtgttaagtaaaggtttagattcaggtactgcttttgaaattttatctattgatattgcagatgtagatattagcaaaaatatcggtgctgatttacaaactgagcaagctcttgcagataagaatattgctcaagcgaaagctgaagagcgccgtgctatggcagtagcttctgaacaggaaatgaaagctcgagtacaagaaatgagagcgaaagtagttgaagctgaatcagaagtaccattagcaatggctgaagctcttagatcaggtaatattggagttaaggattattataatcttaaaaatattgaagcagatactggcatgagaaatgctattaacaaacgtactgatcagaatgatgacgaatcaccagaacaataa

SEQ ID NO: 339 - DNA, 708 bp, Staphylococcus capitis
atgaatatcggtattatcatatttataatatctgttattgtaaccggtattagcgcgctacgtgataaaagtcatgaaagcagacaaaatcaaaagccacctcaaaatacgcaaagtgataatcaacccaaaaaaggtggtttctttgaagaattagaaaaaacatttaaagaaattaacgatgaattaaatgatgaacccgagaaaaagcaacgaagagaatttgaagagacgcttccacctttaagtaaaaaccttgaagatgaagatgctaactctcaaacagaaaataaatcgtctaaagaaacgcataaacaatcggaagtcaaaaatcatcctaaacctgacccaacaccatataaccaggataatcctagacctcaacctgttacttcaacttcacgagatgaaagtgcagaaaaattaagaaaagaactcgagtccaatttgactcaggatttaaaaaatgttcgcaacgaaattgatagagaaaaagaaaaacaactcgaattgattgagaaaaaagcaagagacattattgaggataagtatttatcagagagaactaaacgttatcgcttaaaacaattacttaattctcaaaacattgaacgtaatatgtctcattctgcttttcaatttgataaagatgaagtaataaatggtttgatttggtcagaagttttaagtaagccaaagcaactttaa

SEQ ID NO: 340 - DNA, 948 bp, Staphylococcus capitis
atgccaggaataattcaaattgacgacattaatcaatcacaagctttaatgggaaataatgatgagcatttaaaaactattgaagataattttgatgtcgtgatacatgctagaggtcaagaaatagctgttaaaggcgaaaaattagagcatgttgaaaaagcagaattagttctcaccaatttacttaaagttatagaattaggtaatacaattacacttaaagacgtagaggctgctattaaaatggcagacaatgatacaattcaacatttacttgatttgtatgatgaagagattactaaagatgcatttggtaaaacgattcgtgctaaaacaatgggacaacgtatgtatatcaatgctatgaagagaaatgacttagtatttggaataggtcctgctggtacaggtaaaacttttttagcagttgtatatgcagctaaacaattacgtaaaggttcagttaaacgtatcgtattgactaggccagccgttgaagcaggagaatctttaggtttcttaccaggtgacctaaaagaaaaagtagatccatatttacgtcctctatatgatggcttaaatacagttttaggtagagagcaaactgaaagattcatcgagaggggtattattgagattgcgccacttgcttatatgagaggtagaacattagatgatgcgtttgttattttagatgaagctcaaaatacaacgcacgcacaaatgaaaatgttcctaactcgtttaggttttggttcaaaaatggtagttacaggtgaccaaactcaaattgacctaccaaaaggcgtaaaaagtggcttaaaagaagcaattaaaaaattatatggagtcaatggaattagtattatgaaattagatcaaagtgacgttgtaagacatccacttgtaagtaaaattatagatcgttatgaaggagttgagtaa

SEQ ID NO: 341 - DNA, 471 bp, Staphylococcus capitis
atgtttacaattgactttagtgaccataccgatttagtaaagaatgaatggtatgaacaaatagattcattacttacctttgctaaaaaacaagaacatattgatagtgaggctgaactttcagtaacatttgtagataaagatgaaattcaaaatatcaataaaatgtatagagataaagataaagtcactgacgtcatctcattcgctttagaagaagacgagccagaaatcgatatgaatgaacttgatatacctcgagttttaggcgatattattatatgtacagatgtagcacatgaacaagctgaaaattacggacattcttttgaacgtgaattaggtttcttagctttacatggttttttacatttattgggatatgatcatatgacagatgaagatgaaaaagaaatgtttggtcgacaagatgcaattcttaatgcatacggtttaacaagagaatcataa

SEQ ID NO: 342 - DNA, 357 bp, Staphylococcus capitis
atgagacgttttaaatacgcttatgatggcttcacagccattttgaaaaaagaccaaaatttcttacttcacatattagcaggaattatcgctattattatggggtttatttttcatatcaatcgatctgagtggatgtttatattattctcaatagctttagtattgagtctagaagctatcaatacatcaattgaatttgtggttgatttggtaacaaccgattatcatgaatatgctaaacacgctaaagatatcgctgcttttagtgttgtaattgtgtctgttttagcattatgtattggattaatagtttttgtaccacatattttaagtttatttttgggaggaaaataa

SEQ ID NO: 343 - DNA, 405 bp, Staphylococcus capitis
atgagttatcaatcgcattactttaaggaagttagggaggcacaaagtaaagcttatgctccatatagtcgcttcaaagttggtgcctatttaagaactaaggacggacgtacttttcatggagcaaatgtagaaaatgctgcatattccatggcaatttgtgctgaacgttcaagtcttgttgcagcaatctcagaaggatataaaccaggggattttgaatcgataaccgttactgttgattcggataaaccctcctcaccatgcggggcttgtagacaagtacttaaagaactttgcgatgatgatatgcctgtgtatatgactaatcataaaggtgaaatgattaagtctactgtaaacgaattattaccattaggattttcaggaaaggatttaaattaa

SEQ ID NO: 344 - DNA, 903 bp, Staphylococcus capitis
atgacagaagaacataaatcaggatttgtatccatcattggtcgacctaatgttggtaaatctacatttgtaaatagagtaatagggcataaaattgcgattatgtcagataaagcacagacaacacgtaataaaattcaaggcgtcatgacaagagacgatgcacaaatcatcttcattgatacgccaggtattcacaaacctaaacataaacttggtgattatatgatgagagttgccaagaatacactatcagaaatagatgcaattatgtttatggttaacgtaaacgaagatattggtcgtggcgatgaatatatcatggaaatgcttaaaaatgttaaaacgcctatctttttggtattaaataagattgaccttgtgcatccggatgctttgatgcctagaattgaaaaatataaagaatatatggacttcacagaaattataccaatttcagcacttgagggattgaatgtagatcactttatagatgtgttgaaatcttatttacctgtaggtccgaaatactatcctgacgaccaaatttctgatcacccagaacaatttgttgttagcgaaattatccgtgaaaagatattacatttaacaagtgaagagatacctcacgcaataggcgttaatgttgatagaatgattaaagaagatgaagacagagttagagttgaagcaacgatttacgttgagcgtgattctcaaaagggtatagtcatcggtaaaggtggtaaaaaacttaaagaggtaggtaaacgtgcacgtcatgatatagagatgctattaggatctaaagtttacttagaactctgggtaaaggtacaacgtgattggagaaataaagtaaactttatacgacaaattggttatgtagaagaccaagattga

SEQ ID NO: 345 - DNA, 756 bp, Staphylococcus capitis
atgaaacaaaaaggcatcataatcaaatcagtagattatggtgaatctgataaaatcatcacaattttaaatgaatatggcgctaaaatacctttaatggctcgacgtgcgaaaaaagttaaatctggattacaagctcatacacaaatgtttgtgtatggcttatttatttataataaatggcgtggtatgggaacactcaattctgtagatgtgattgatcaacattatgaattacagcttgatttatttgaaagtagttatgcatcgttatgcacagagactattgaaagatctatggaagaaaatgaagtttcgaagtacaattatgacttactctattttgtacttactaaaataacagagggcacatcagcacaactcatgtctatcgtagtattattgaagtgtatgtctaaatttggatttgcagcttcatttaatcattgtgtgattactggaaatgaagatcaatctaaattagtaggttatagtttcaaattcgatggagcaatctctgaagaagtattatatcaggatccacacgctttcaaattaacaaatcgctcgctttatctattagatatactacaaaaactacctatcaataaaatgaattcactgagtattcataaagaaatcttagatgagatgtcagaacttattatcatgctctatagagaatatgctggtatgttttttaagagtcaaaaattaattaatcaacttaaaagattagaaagtgatccacactaa

SEQ ID NO: 346 - DNA, 1392 bp, Staphylococcus capitis
atggcaaaagatatggaaacaattgttcaattagcaaaacatagagggttcgtcttccctggtagtgacatttacggtggtttatcaaatacatgggattacggaccattaggcgttgaacttaaaaataatattaaaaaagcttggtggcaaaagttcatcacacaatctccatataatgtgggtatcgatgcagctattttaatgaatccaaaaacttgggaagcttcaggtcacttaggcaactttaatgaccctatgatcgataataaagatagtaaaattcgttatcgtgcggataaattaattgaagattacatgcaaaaagaaaaaggtgatgaaaacttcatcgctgatggattaagctttgatgaaatgaaacaaattattgatgatgaaggtattgtatgtcctgtaagtggcactgcaaattggactgatattcgtcaatttaatttaatgtttaaaactttccaaggtgtaactgaagattccactaacgaattgttcttacgtcctgaaacagctcaaggtattttcgttaactataaaaatgtacaacgttcaatgcgtaaaaaattaccgttcggtattggtcaaatcggtaaatctttccgtaacgagattacacctggtaacttcattttcagaactagagaatttgaacaaatggagttagaattcttctgcaaacctggtgaagaaattgaatggcaaaacttctggaaaacatttgcaagtcaatggttaaaagatttaaatattaatgaagaaaatatgcgtttaagagaccatgatgcagatgagttatctcactactctaacgctacaactgatattgaatacaaattcccatttggttggggcgaattatggggtatcgcaagccgtacagacttcgatttacaaaagcatagcgaacactctggtgaagactttaaatatcacgatccagaaacaaatgaaaaatatgttccgtattgtatcgaaccttcattaggtgctgatcgtgtaacgttagcattcttatgtgacgcatatgaagaagaaggtgttgaaggaagtaaagatgcacgtactgtaatgcatttccaccctgccttagcaccatataaagctgcggtattacctttaagtaaaaaattatcaagcgaagcgattaaaatctttgaacaattaagtcaaagcttctctattgatttcgacgaatcacaatcaattggtaaacgttaccgtagacaagacgaaatcggtacaccatattgtattacattcgactttgattcattagaagataatcaagtaactgtacgtgacagagattcaatggaacaagtacgtatgccaatttcagaattagaaacattcttagcagagaaagttaaattttaa

SEQ ID NO: 347 - DNA, 492 bp, Staphylococcus capitis
atgtctggttttatagaagcgagacctagagtaggttattactattcaggtaaatcgaaaaataaaattattaatgaacaattgagacaatatgtggttaaagattatatgtctcaaccagttgtcattaaggaagaaatgtcagtttatgatgcaatatgtactatatttttagaagatgcagggacattatttatcactaataatgacaatgactttgtaggcgtatgttctagaaaagatttattaagagcatctatgattggtgaggatatacatacaatgcctatcagtgtaaatatgactagaatgccacatgtgacatatttagaagaggaagaacttgtaatatacgctgccaatcaaatgatagataacgagattgactcactaccaattgtaaggaagaaagacaataaaaaatacgaggtaattggtcgaatctctaaaacaactataactaaattattcgtatcattattcaaagaatag

SEQ ID NO: 348 - DNA, 819 bp, Staphylococcus capitis
atggacattataaagataattgtagcctcagattcaattggtgaaactgcagagttagttgcaagagcaggagtatctcaatttaaccctaaacaatgtaaacatgaatttcttcgatatccatatattgaatcatttgaacatgtagatgaagttattcaagttgctagagataccaatgcaattattgtatacactttggttaaaccagaaattaaaaaatatatgcttgcaaaagtcgaagaattttcattaaaatctgtcgatattatgggacctctaatggatttattatcggattcaattgatgaaacaccatattatgaaccaggaatagttcacaggctagacgatgcgtattttaaaaaaattgatgcaattgaatttgctgtgaagtatgatgacggaaaagatccaaaaggattaccaaaagccgacatcgttctgttaggtatttctagaacttctaaaacgccattatctcagtatttagcacataaaagttataaagtgatgaatatacctatagttcctgaagtaactccgcctgatgcattatttgatattgatacctctaaatgtattgctttaaaaataagtgaagagaaactaaatcgcatacgtaaggaaagattaaaacaattaggtttaggagataaggctaggtatgccacagaggcacgtattcaagaagaattgaattattttgatgaattagttaataaagtaggttgtccggtcatagatgttactgacaaagctattgaagaaacagcgaatgacatcatacatttaattgaagaaagtaaatcgaaatga

SEQ ID NO: 349 - DNA, 1785 bp, Staphylococcus capitis
ttgcgtatagatcaatcggtcattaatgaaattaaagataaaacagatatattagatttagtaagcgaatatgtaaaattagaaaaaagaggacgcaattatatcggcttgtgtccttttcatgatgaaaagacaccttcgttcacagtatctgaagataaacaaatttgtcactgttttggttgtaaaaagggtggcaatgtctttcaatttacacaggagattaaagatatacctttcgtagaagctgttaaagaacttggcgaacgtgtagatattaaagttgatgtggggcaaactcaatataatcaacaatctcaaatggcctcagacgatttaaaaatgatagaaatgcatgagttaattcaagattactatcattatgccttgatgaaaactgttgagggtgaagaggctttaaactacttgcgtcagcgtggttttactgacgaactcatcaagcagagacaaattggatatgcgccagatagctctcatttttgtcatgattttctagagaagaaaggatatgacatagaattagcttacgaagcgggtctattgtctcgaaatgaagaaaattttagttactatgatagatttagaaaccgaatcatgtttcctttgaagaatgctcaaggtagaatagttggatattctggaagaacatatacgaaccaagaacctaaatatttgaatagccctgaaacacccatctttcaaaaacgtagactcttatataatttagataaagcacgtaaatcgatccgccaaaacgacgaaattgtattattagaaggatttatggatgttattaaatcagattacgctggtttaaaacaggttgtagcgagtatgggtacacagttgtcccaagaacatatgacgtttctaaaaaaattaacaaataacattacattaatgtttgatggagattacgctggtagagaggctactttaaaaacgggtcaagctttattacaacaaggtctaaatgtatatgcgattcaattaccatccggtatggatcctgatgaatacattggcaaatatggaaatgaggcttttttaaactttgttgctaaggataaaaaggcatttgtgctgtttaaagtggagtcacatcaagatgaaattaataataatgatttagcttatgaaagacattttagagaagcaactcatgacatcgctcaagttcaatcaacaattttacgtaataagttaatacaagatgttgctaatatattcaatatgagcccagaaatgatctatcatgaagttggttctaaaaatatgccacaagtggcaccagcagaatatggatattctccgcaatctggttcacaattgtttaataatttaactaaacatgaaaaagctgaaagagctctattgaagcattttatgaaagataaggatacctttataaattattatcaaaaaattagtgatgaagactttacaaataaatattttaagagtatatttaatattttgcatgactatttttcagaacatgataattatagtatcagtgatgttatgcaatacattgattccaatgagcttagagaggcatttattgaacttgaacaatataccctcaatgatgaaccttacgagaatgaaatagaggactacatactaattattaataataatgatgatgagtcaattgaatcattaaatcataaactaagggaagcatcgcgcattggagatgttgaattacaaaagtattacttacaacttattgtcgataaaaacaaaaatagaatgtaa

SEQ ID NO: 350 - DNA, 1107 bp, Staphylococcus capitis
atgtctgataaccaagtgaaaattaaaaagcaaacaattgatccgactttaacattagaagatgttaaaaaacaattaattgacaagggtaaaaaagaaggtcatttaagtcatgaagaaattgctgagaagcttcagaatttcgaaatggattctgaccagatggatgatttcttcgatcaactaaatgataatgatataacgcttgttaatgaaaaagatagttcagatacagatgagaaattaaatccaaatgatttaagtgcccctcctggtgtcaaaattaacgacccagttcgtatgtatcttaaagagattggtagagttaacttattaagcgctcaagaagaaatagagttagctaaaaaaattgaacaaggcgatgaagtagcaaaatctcgtctagctgaagccaacttacgtcttgttgttagtattgctaaaagatatgtaggaagaggtatgttattccttgatttaattcaagagggtaacatgggcttgattaaagctgtagaaaaatttgactttagtaaagggtttaaattttcaacatatgcgacttggtggattagacaagcaatcactagagctattgctgaccaagcacgtactatccgtattcctgtgcatatggttgaaacaattaataaattaatacgtgttcaacgccaacttttacaagacttaggccgagatcctgcaccagaagaaattggtgaagaaatggatttaccacctgaaaaagtacgtgaaatcttgaaaattgctcaagagcctgtatctcttgaaacgccaattggtgaagaagatgacagtcatttaggtgacttcattgaagaccaagaagctcaaagcccatcagaccatgcagcttacgaattgttaaaagaacaacttgaagatgttcttgacacattaactgatagagaagaaaatgtattacgtttaagatttggtttagatgatggacgtacaagaacacttgaagaagtaggtaaagtatttggcgtaacacgtgaacgtatacgtcaaatcgaagctaaagctttaagaaaattaagacatcctagtcgtagtaagagacttaaagatttcatggattaa

SEQ ID NO: 351 - DNA, 693 bp, Staphylococcus capitis
atgattaatttaaaccaaagattattgcgtgtgtgttcatttttaaaagaaggaacgctagctgatattggttcggaccacgcatatctacctatttatgccatccaaaataagatatgtaacagtgcaattgctggagaagtcatcaaaggaccgtacaaagctgcgctaaataatgtagctgaaaataacttaggtgattcgattgaagttcgcttaggagacggtttagcagttatcaatcatgatgatgaaattgataatataacgatttgtggcatgggaggacctctcattgctaaaattttaaaagaaggtcaagaaaaattagcacatcactcaagacttattttacagagcaacatccaaacacaagttttaagaaatgtattaacttcactgaattatgaagttataaacgaggttatccttgaagaaaaagggcatatttatgaaattgtagttgctgaatttaaccaatctataatgccactttctacaaaagaagaaaaatttggcccgtatttattagaggaaaaaaatgaacatttctacaagaaatggaatagagaacttgaagcactttatcacattaagtcacaattgaattcatcaacgcatcatgagagactaaaagaaattgacagtgaaataaatctcatacaagaggtgttagataatgaaattgagtaa

SEQ ID NO: 352 - DNA, 1101 bp, Staphylococcus capitis
atgaaattgagtaaactcatgtccattttagattatcatgtcccattttccactgcagaatcatgggataatgtcggattattaatcggtgatgagaatcaacaagtaaatggtatattaaccgctttagattgtactgaagaggttgtcaatcaagcgatagataaaaatatcaatacaatcattgcacatcatccactcatctttaaaggtataaaaaatattgttcaaactggttatggcaaaattatacgcaaattgattcaaaatgatattaatcttatcgcaatgcatacaaatttagatgtaaatcctagtggcgtcaataaaatgttggcagatacacttgatttaaataacgttaaccagattaaccaacgttacacgacatattataaggttcaaacttttattcctaaagaaaatgttgaaaactttaaagaccaattaaaccaactcggcttagctaaagaagggaattacgaatattgtttctttgaaagtgctggaaagggacagttcaaacctgttggagaagctaacccttaccttggtcaacttgatagtatagaatatgtagatgagattaaacttgaatttatgatttctgaaaatgaaaagcaaattacagaacaagcaattataaactatcatccttatgaaacacctgtatatgattttattaaactacaaaaacaaagcgaatttggattaggtattataggtgaacttcctcatactatgactttagatgagttttctagttacgctaaagagaaattaaatattaatagtttaagatatactggtaattctgacgcggtgattaataaagttgcaatgatcggtggttcaggtataggtttcgagtatgaagctcacagtaatggtgcagatgtatttgttactggagatatcaaacatcacgatgcattagacgctaaaatacaaggagtcaatctacttgatatcaatcactatagcgaatatgtaatgaagcaagggttaaaattgttactagaagattggttatttgagtataaagatatgttccctatcgaagtctcaaatattgatactgatcctttcacttataaataa

SEQ ID NO: 353 - DNA, 1344 bp, Staphylococcus capitis
atggcaaaacatccatttgagcattttaatttagacgaaagtttaattaaagcggttcaagatcttaattttgaaaaacctacagaaatacaaaatagaattatcccaagaatattaaaaggcactaacttaataggtcaatcacaaactggtacaggaaagacgcattctttcttattacctttaatacaaatgattgatgttgatcttcaagaaccccaagccattgtagttgcaccaacacgagagcttgctcaacaattattccaagcagtgagtcacctttgcaaatttaaacaagaagtgaacgttaaattgtttataggtggtacagatattgaaaaagacaaacaacgctgtaatagacaacctcaattaattattggtacacctacacgtattaatgaccttgctcaaggcggacatcttcatgcacaccttgccagcaatttaattgttgatgaggctgacttaatgattgatttaggattaattgaggatgtagattatatagcagctagattaaatgatgaagcgcacattgctgtatttagtgcaacgattcctaaatcattgcaaccatttttaaataaatatttaagccaacctgaattcgttgaggttgatcataagtctcaaaataaaaagaacattgaattttatttaatacctacaaaagggactgctaaagtagataaaacgctaaatctaatagatattttgaatccatatctttgtattattttctgtaatagtagagaaaatgcaaacgaacttgcagattctctaaataaagaaggtatcaaagtaggtatgattcacggtggtttgacacctagagaacgtaaacaacaaatgaaacgtattagaaacttagacttccaatacgttattgcaagtgatctcgcttcgagaggtatcgatattgaaggggtaagtcacgtcataaatttcgacgtacctaatgatattgatttctttacacatcgtgtaggtcgtacaggaaggggtaattataaaggagtagcaattactctttatagccctgatgaagagcacaatatttcattaatcgaagataaaggctatcactttgaaaatgtggacattaaaaatggagaacttaaaccgattaaagcacacgatacaagacgcactagacaacgaaaagatgatcacttaacaaatgaagttaagcataaagttcgaagtaaatcgaaaagaaaagttaaaccaggatataagaaaaagtttaagcaagaagtagaaaaaatgaaacgccaagaaagaaagatttatagtaagagacaaaataaacaaaaacgtaaaaacaataaaggatag

SEQ ID NO: 354 - DNA, 891 bp, Staphylococcus capitis
atgctattaggttctcatgtttcaatgagtggtaagaagatgttacaaggctctgcagaagaagcccataaatttggagaatctacgtttatgatatacacaggagctccacagaatacgagaagaaaaagcatcgaagatttaaatatagaaaaaggacatgaggccatgaaagaatatggtttatctaatatcattgttcatgcaccctatattatcaacatcgcaaatacgactaaacctgaagtattcaacttaggtgtcgattttttacaaaacgaaattgaacgcacgcaagcaatcggcgcgaaagatattgttcttcatcctggttctcatgttggagctggtgccgacgtaggtattaaaaagattattgaaggacttaatgaagtattaactcatgacaatgatgtacgaattgcccttgaaacgatggctggtaagggttcagaagtaggccgttcgttcgaggaaatcgctcaaattattgatggcgttacacataatgatcgtttatcaatttgttttgacacatgtcatacccatgacgctggttataatgtcaaagaagacttcgatggtgtgttaaatgaatttgataaagttattggtgtagaccgtattaaagttgtacatgtgaatgatagtaaaaatgaaatcggtgcacataaagaccgtcatgaaaatataggatttggtcatattggattcgatgcgctaaattatgttgtccaccatgacgcatttaaagatatacctaaaattttagaaacaccatatgtaggtgaggataagaaaaataaaaaaccaccgtataaattcgaaattgaaatgttaaaggcacaaaaatttgattcagatcttaagaataaaattttaaatcaataa

SEQ ID NO: 355 - DNA, 789 bp, Staphylococcus capitis
atgacaacgccagttttcgaattacgaaatataaattactattttgataataaacatgtacttgaaaatattaatattaaaatcaacaaaggtgagtttctagccatcgttggtcctaatggagcgggaaaatccaccttattaaaagtgatacttggactattacctttacaaaaaggcgagatttttgttgaaggaaaaatgtataaaggaaataaaacttcattaaaaattagttatgtttctcaaaaagcaacagcttttaatgcggggttcccagcaagtgtgaaagaggttgttctgagcggactaacaaagactaaaagactgtttcaaagatttaataaagaagataataagaaagttgaacaagtgctaaaaaaattaaatattgcacatttaattaacaaaaacattgcagagttatcaggtggccaacaacagcgtgttttaattgctagagcattaatatctaatccaagtgtattagttttagacgaaccgacaaatggcattgatgccaaacatgttagtgagttttatgctacattagatacgctaaaaaaagagggtattactattattttagtaacgcatgatatcggagttgtagctgatactgctactgaagttgcttgcttaaacaaacatcttcatttccatggtacaactgaagattttaaatctttagatgaagttgaaatttcaaaaatatatggtcatccaatacaatttgttgatcatcaacacaatcgtgattgttgtaatgaaaatattgaaactggataa

SEQ ID NO: 356 - DNA, 864 bp, Staphylococcus capitis
gtgattgatgcgttattaaattttgattttatgagatattctcttattagcggtattttaattggctttatcgcacctttaattggcgcttttattgttgttagaagactatctcttattgctgacgctttaagccatgtcactttaggcggtatatcctttggtatgtttttacttacaatattacctacactttcatttgttaatcccatgtggtttggaatactttttgctgttataggtgcacttttaattgaaaagctaagaacatctttttcaaattatcaagaaatagcaatacctattattatgagtgccggcatcgcactgagtgccatctttatttcattagcagatggatttaatcaagaaattgtcggattactttttggatcaattagcgctgttaatttaagtgatttaaataccattatcataatcgcaattatagttgtattttttataatattattttataaagaattatttatcttatctttcgatgaagaatatagtaaagtcattggtattccaaaatggatacaattcttatttattattattgttgcaatggttatctctgcttcaatgagagttgtaggaattctgctagttagtgcattgattactttgcctatagcaatctcaatgagaataactaaaggttttaaacagctcatagcactaagtgttgcgctaggtgagttatccgtaataatgggattagtacttgcattttatatgaacatttcacctggtggtgttattgtagtattattagtaatcatgcttataatcacgatggcttaccaaaagttaaaagttaagtttaaaaagggagcaatttcaaatgaatacaaatga

SEQ ID NO: 357 - DNA, 417 bp, Staphylococcus capitis
atgaatacaaatgatgctattaaaattttaaaagataatggattaaaatatacagataaacgtaaagacatgttagatatattcgttgaagaggataagtatcttaacgctaagcacattcaacaaaaaatggataaagattatccaggtatatcttttgatactgtataccgtaatcttcatctttttaaagatttgggtattatagagagtactgagttagaaggtgaaatgaagtttagaatagcttgcacaaaccaccaccatcatcattttatttgtgaaaattgtggagatactaaagttatagacttttgtccaattgaacaaataaagcaatatttacctaatgtgacaattcatacccacaaattagaagtgtatggtgtatgtgaatcatgtcaaaaaaatgcttaa

SEQ ID NO: 358 - DNA, 600 bp, Staphylococcus capitis
atggcttttgaattaccaaaattaccttatgcatatgatgcattagaaccacacattgataaacaaactatggaaattcaccacgacaaacaccataacacatatgtaactaaattaaactcagcagttgaaggaacagatttagaagctaaatcaatcgaagaaattgttgctaatttagatagcgtaccttcagatattcaaactgcagtacgtaataatggtggcggtcacttaaaccactcattattctgggaattattatcaccaaattctgaagaaaaaggtgaagtagtagacaaaattaaagaacaatggggttctttagatgaattcaaaaaagaatttgcagataaagctgctgcacgctttggatctggttgggcatggttagtagtaaataacggtcaattagaaatcgttactactccaaaccaagataacccattaactgaaggtaaaactccaatcttaggtttagatgtttgggaacatgcttattaccttaaatatcaaaataaacgtccagattatattagtgcattctggaacgttgttaactgggaaaaagttgacgaattatacaaagcagcaaaataa

SEQ ID NO: 359 - DNA, 2085 bp, Staphylococcus capitis
atgaataagaggattaatttcgtattcgcttttatcgtgttaatcttcgcaattttagtgttaaggttaggttatttgcaaatagcacaaggatcacattataaacaattaataaagaatgatgaaaacataactgttaacgaatcagtgcccaggggccgcatattagatagaaatggcaaagtccttgtagacaatgcttcaaaaatggcaattacatatactcgaaatcgaaaaacaactcaacaagaaatgttagatactgctaaaaaattatctgaacttattaaaatggatacagataaaattactgaacgagataaaaaagatttctgggtacaaatacatcctgagaaagcaaaacgattaatgaagaaagaacagtcattgttagagagtggtaatatcactcaagaacaatatgataatcaacaaagagacaaaattggtaaaaaacaattagatgaacttagtaaaaatgatttacaagttttagccatttatcgtgaaatgaacgcaggatctactttagatccacaaactataaaaaatgaagacgttacagaaaaagaatatgctgctgtatcccagcaactttcaaaattacctggggtaaatacttcaatggattgggatagaaaatatccatatggagactcactaagaggaatttttggtgatgtatctacttcaacagaaggtatccctaaagaactaacagaacagtatttatctaaaggatattcaagaaatgatagagtaggtaaatcatatttagaatatcaatatgaagatgttctaaaaggcactaaaaaacaaatgaaatatacaacagataaatcgggcaaagttataaactcagaggtcattaatccaggttcaagaggtcatgacttacaattaactattgatatcgatttacagaagaaagttgaatctttacttgaaaaagaaatttcaacattaagaagccaaggcgctaaagatatggataatgcacttatagtggttcaaaatcctaagaatggtgacatattagcgatggctggtaaacaaattaataaacaaggtaagttaaaagattttgatattggtaactttacagctcagtatgcagtaggctcctcagttaaaggcggaacattattagctggctaccaaaaccatgcaattaaagttggagaaacaatggttgatgaacctttaaaattccaaggaggtcttactaagcgttcatactttaataaaaatggcagagtcacaataaatgataaagaagccctaatgcactcttcaaacgtatatatgtttaaaacagcattaaaattagctggagacccttatttctcaggtatgccactacctaatgatatagcgatagctggacaaaaattgcgtaaaggattaaatcaagtgggtctaggtgttaaaacaggtgttgatttacctaacgagactcctggacaaatcgaaccattgactaataatccaggtaattacctagacttgtctataggacaatatgacacatatacgccattacaactatcacaatacgtatcaacgattgctaataatggttatagaattcaaccacatatcggtcttgcaatacatgaatctacaaataaagatgatttaggtccattaaaacgaaaaattaaaggaaacgtcttaaataaagtgaacaactccgaaaatgaaattaaagaagtacaagatggatttaaaatggcgtttaatgagaaagacggtactggttacgctagtttcaaaaatactgtggttccttcggcaggtaaaacaggtacagcagaggtattccaaaacggagaatctagagttaactcaacatatattggttatgcccctattaaagatcctaaattatcattctctattgtttatactaaccagcctgtaccaccaccttggttaaatggcggagacctaggccgagatgttatcaactattatttcagagacagagacaaaaaagatgataaagatgaatctcactctgacaataaacaacaaaacgaaagcactaatgaaaatagtaacgctgataacaatgataattag

SEQ ID NO: 360 - DNA, 150 bp, Staphylococcus capitis
atgcgcgtaaacgttacattagcttgtactgaatgtggagatagaaactacatctcaactaaaaacaaaagaaacaaccctgaacgtattgaaatgaaaaaatactgtgcacgtgataataaacaaactttacaccgtgaaactaaataa

SEQ ID NO: 361 - DNA, 561 bp, Staphylococcus capitis
gtgaaaatgttgagtaaaaaacatataagacgagcaacaattgaaaaacttaaaggttttaataaagataaaaaaagtatcgcagatcaatggttagctaatgaattatttaatacacaagcttatcaagatgctaaatcgataggttttgtgttatcaatgccacatgaggtcgacacttatcacttaatagagtcctctataatgaatgataagaaagtctacgtacctgagacagattataaaaataaacgtatgtcattcaaacgcttattatctcttaatgatattgaaaaagatgaaaaaggaatctatcatgctgtttcaaatactgaacatactaatgacatggatttattagtagtcccaggtgttgcctttgaagagaatggctatcgtatcggttacggtggcggttactacgataaatttttaactcaatttaaaactcgaactgttagcttgctatatgattttcaacttactacatttgataaagaatcattcgatcaacccgttgatcaactaattatatataacaataatgtagtggaggaataa

SEQ ID NO: 362 - DNA, 1464 bp, Staphylococcus capitis
atgattatcgataaactttattggaaaaccttatactactggattagatatttaaattatgatttgttaagcagtgaaaaggaaaataatgaaatttggctagtacataaaagaaaaaaatctgtagtggtttttagaagagatgttactacctcacaagaaatcagatttgataagtctaaagttaaagagaattttaaccaattagaacaaactataggttttaaaccaaagtcattcaatttttattatttcactgataaagactttctagaagaaaaaaataatgagagtcatcctataaaaattcaatttcacattattagaaatgttaaagatataaaagcaattaccccacattttgtactttacaaaatgcttgtaaacaacgaggataaaaagacttattctcactataaaagaaaagttttaaccaataatcctcttgatagacacatgcaaagattcacaccggctacatatgtcttaattatcacaaatgtaatcatatggttatgtatgattttatatcttaatcgattctcagatgttaaattactagaagtaggtgggcttgtacattttaatgttgttcatggagaatggtataggcttatttcttcgatgtttttacattttaattttgaacacatattaatgaatatgctttccttattcatttttgggaagattgttgaatcattagtgggttcttggagaatgttagttatatattttgtgtcaggattatttggtaattttgtatccttatcatttaatacctccacaatttcagtaggagcgagtggggcaatatttggattaataggttcaattttcgcaataatgtacttaagtaagacttttgatagaaaagttattggccaattacttatagccttactaattttaatatgtttatcacttttcatgtctaatattaatattatggctcacttaggtggatttattggtggccttttaattacacttataggatattactttaatgtaaatcgtaatttgttttggatattattaattgttttactattgatatttgttatattacaaatcagaatatttactattaaagaagacaatatttatgacaatcttattaaagatcaaatgctaggtggtcactacggagaagcgagaaacgtggttaaccaaacattaaataaaaattatgctgatgatgaaacctattatttgagcggtttaattacagcaactgaagaatcgcaatctgaggctatcgcagaatgggaaagaggaataaaaaaatatcctaattctggtatactcaattatgaattagccatcgcaaatcgctcattaagtgatgacaaaaaagcattgaaatatgctaaaaaagctgcaaagagcgatcctagtaatacaaattataaaaatttacaaaaagagttgagtgaatcaagtgactcgaaagataaataa

SEQ ID NO: 363 - DNA, 213 bp, Staphylococcus capitis
gtgaatcaagtgactcgaaagataaataacttttatgatgttttacagttactaaaaaaatatggtttcatcatttactttaaagatccagaagatatgtatgaaatgatgttacaagaggtaaaatctttatataactttcaactattatctaaagatgaatatctaaaatgtattttgataattaatcagagaaggaatgaacataaatga

SEQ ID NO: 364 - DNA, 987 bp, Staphylococcus capitis
atgacaaatattattttagcggccgatattggcggaacaacttgtaaattgggaatttttgatactcatctagaacaattacataaatggtcaattcatacagatactagtgatcatacaggtgaattattgctgaaaaatatttatgattcttttgtagagaaagtaaaagaatttaactatgattttactaatgttcaaggagtaggaattggggtgcccggaccagttaatttcgaaactggagtagtgaatggtgcagtaaacttgcattggacaggaaacgttaatgttagagaaatattccaaaaatatgtagattgcccagtctatgttgataatgatgcaaatgttgcagcgttaggcgaaaagcataaaggtgctggagaaggttcagatgatgttgttgctattacattaggtactggactaggcggcggtatcatttcaaatggagaaattgtacatggtcacaatggatcaggagctgaaatcggccacatgcgtgcagattttgatcaacgttttaattgtaattgtggtaaagctggttgtatagaaactgtagcatccgcaactggggtagttaatttagtaaatttctattatcctaaacttacttttaaatcttcaattttacaattaataaaagataataaagtaacggctaaagctgtttttgatgctgctaaagctggtgatcaattctgtatttttatcacagaaaaagttgcaaattatattggttatttatgtagcattataagtgttactagtaatcctaaatatattgtactaggtggtggcatgtctacagctggaccaattctaattgaaaatattaaaactgaatatcgcaatttaacatttactccagctcaatttgaaacagaaattgtacaagcacaacttggaaatgatgctggaatcacaggtgccgcaggattaattaaaacatatgtactagataaagagggtgttaagtaa

SEQ ID NO: 365 - DNA, 327 bp, Staphylococcus capitis
atggcaattgtagatgtcgtagttattccagtaggaacagaaggtcctagcgtaagcaaatatatagcagaaatacaaactaaacttaatgaatttaaagaagaaggtaaaattgattaccaactaacaccaatgaacacacttatcgaaggtgatctaaagaacctattcgaagtcattcaagcaatacatgaattacctttcaacaaagggttagacagagtatgtacaaatattcgaattgatgatcgtcgcgataaatcaagaaagatgaatgataaactcaaatctgttcaaaaacatttaaataatagtggtgaacaataa

SEQ ID NO: 366 - DNA, 624 bp, Staphylococcus capitis
atgagaatttcaaatttaactttaggtttagtggatacaaacgcatatttcattgaaaatgaagaaagtgttatattaatagatccttcaagtgaaagtgataaaatcattaaaaaattaaatcaaattaataagccattgaaagcgattctattaactcatgctcactacgatcacataggagctttagatgacattatttctaaatatgacgttcctgtttatatgcatcaagaggaatttgattttttacaagatccagaaaaaaatggtgcatctaaatttaaacaatatggtatgcctcaagttataagctatgctaaaccttcaaaattagaagaaggatcaaaagagattgagggcttcaaatttgacgtattacacactccaggacattctccaggtagtttaacttacgtttttgatgaatttgctgtagtgggtgacactttatttaataatggcattggtagaactgatctttatagaggggactacgaaacattagttgattctattaaagataagatatttgaacttgaaggcgatttaccgttattccctggtcacggtccatatactactgttgatgatgaacaattaaacccttttttaaatggttaa

SEQ ID NO: 367 - DNA, 975 bp, Staphylococcus capitis
atgaaaatgttattccaagagatagttaattatgctataaagcacgctgcaagtgatatacattttattcctactgagcaccatactttaattaaactaagaatcaacgatcaacttattaattacgatacactggcacatgctatttacaaaaagttacttgtttatatgaagttcaaatcaggcttagatgtttcgacccaacagctagcccaaagtggaagatatacttataaattgcaaaatatgtattacttaagaatctctacactgcctttatctttaggtaatgaaagttgcgttataagaatcgtacctcaatatttccaacaaagacgtgactcatatgaatttaaagattttaagcacttaatgaataaaaaacaaggattattactttttagtggtccaactggctctgggaaaagcactttaatgtatcaaatggtaatgcatgcccatcaaaatttaaatttaaatgttatttcaattgaagatcctgttgagcaattattagatgggataactcaaatttcagttaatgaaaaggccggaataaattatactaactctattaaagccatacttagatgtgaccctgatgtcattttgattggagaaattcgtgatgcttatattgctaaatgtgttatacaagcaagtctaagtggtcatttagtgcttacaactttacatgccaatgattgtaaaggggctttacttcgtctactagaaatgggtgtaacagtgcaagaattatgtcaatctataaatttaatatctaatcaaagacttatcaccacacaaactaatacgcgtgaattagtttgtgaagtaatgaaccaaaatcaagtagaatacttttttgagcacaatcatgaactaccaaatagcttcactaagctggctacacatctaactaatctatctaaggaaggggtaatttgtgaagaggttgttaataagtatacttaa

SEQ ID NO: 368 - DNA, 1068 bp, Staphylococcus capitis
gtgaagaggttgttaataagtatacttaaacctaacagaaaaaagaatcttaccgaagctcaatccattgaactacttcaacgactaaaacatttatttgaacatggattcacattgtatgagagctttcaatttctaaatttacactttatttatagagataaaaacataagtaaaataataatagaatctattcaagcaggtggaacatgttatgaagtattgaagatgattggttaccccgaaattatacttactcaagtaaaatttgcagaacagtatggaaatttagaagttgctatggcagacgccattgaatatatgagaagaaacttgaaggctaaaaaggcatttctaaaaactattcaatatccaatagcgctgataagtatatttctaatcatgctaatcgtgttaaatatgactgtgatacctcaatttcaacaattatacgcgactatgaatgttcaactatctactttacaaaatatacttaccgttttcgttacaaagttgcctgcttttgtattattgcttacattttgttcaattgtgatatatataattatttataaactcctaaacaaaattcccataaataaaaaaataaaatatatagttaaaatcccctttgtcaattcttactataaaatattcagaacttatcaaatatctaatgaactctctcttttttataaaaatggtataagccttcaacatattgttcatatatatagaaatgagcaaaacaatgaattttttaaatatttaggtgactacttattagaaagtattgataaagggatgtcactaccgtctatattaaatagcttaaaatgctttcaacctgatctaatcaaatttattgagcaaggggaaaaaagcggaaaactagatattgaattaaagttatatagccaaatgttactacatcattttgaagataaagttctcaagcaaactaaatttattcaaccagtcattttctttatattaggtctatttatagtttctttatatcttgtaatcatgttacctatgtttgaactaatgcaaaccatcaaatag

SEQ ID NO: 369 - DNA, 318 bp, Staphylococcus capitis
atgaaaatattaaaaaaactaaaaaaatctaaagctttcactttaattgaaatgttacttgttttattaattattagtttattacttattttaattatacctaatattgccaaacaaacagcacatatccaatctactggttgtgatgctcaagtaaaaatggtaaatagtcaaattgaagcatatacattaaagcataatcgtaaccctaataatattgaagaattaattgctgaaggttttataaaagaaggacagaaaaattgtaaatccggacaaactattagtatttcaaatggtgaggctgttgcgaactaa

SEQ ID NO: 370 - DNA, 336 bp, Staphylococcus capitis
atgaacgtacaaatgattaatgaagaacatgaaattaaacaattcattactagacttaattactttaaatctaaagcaattgcctctcaaagatcgatagccttagtttttacaaataattcaaatgttatccaagttgtagaagaaaaagggagcaaatataaatttaaagtccctcacgggaaaatcactaatattgctagaattaatacgttgaatttcaatagagaaggaaatattaaccgttttggttctctaacaattgcaatgaataaagctacctataaaattattttacatattgaaaaaggacgtattagatatgtcaaaatttaa

SEQ ID NO: 371 - DNA, 300 bp, Staphylococcus capitis
atgtcaaaatttaaactaagagcttcattattactcgatagtttattaggtttactaatcatcggattaatcacacttattttgataccaacactctccacaatgaataataactataataataacttaaaaaccatagaaattaaaaagtctattattaccagcttgtataaatatagtaaggaacaacttaaacaaggagttgtaatggatcaatatgaaatacaactatatcaaaagaaaatatgtggaaaagatagagactttaacattaaaacatgtgtttcatttgaaaattaa

SEQ ID NO: 372 - DNA, 420 bp, Staphylococcus capitis
ttgaaaattaaagcctttactttcgttgaaatactcttcgcattatcagtaaccttattatgtctttctttaacacctaatattattaatctcacttcttactacctacatttagctaaaaataatgatgatttagactttgaatttttttgtagagatattcttaaagatgtacaaacttccaagtattcgccgagtaaagataatgattcaacaatcaaaattagaaaaaaggatgaggaaattagatatatctataataataaaaaaatatataaaaatatcaatcagagaggtaacatcactctattaaacaatgtagtttctttcaaaataataaatacgaacaataatattttaaaaataaaaataaagcaaggagatacgaactattataaagagaaaaacctctatttatag

SEQ ID NO: 373 - DNA, 513 bp, Staphylococcus capitis
ttgattaaaagtaaagcacctattatatttgttggcttcatgggtactggtaaaacaacgattggacgatatctttctgatttacaaaatttaagttatatagacttagatgaatatatcgagagaaatgaaaacaaatcaattcccgatatatttcaggaacatggagaacaaaaattccgtgatttagaatttaagtatttaaaagagtgtttgaatacattcgaaattatatctactggtggaggaataatcgaaaataaagattctttgaaactacttaaaaatgaaaagagtgttatatggcttgattgtgatatcaatgttatttatcgacgtatagttagtgatcctcatagacccaatgctaaagataaatctctagaacaattaaataccttgtattgttcaagggtttcaagatataatgaaaccgcattcatgaaggtgaatagcgcactcactgtttctgaaatatatgaaaagattttacaaaatttattttgcgattga

SEQ ID NO: 374 - DNA, 1092 bp, Staphylococcus capitis
atgacaactgaacttaaaaagacacctttatatcaaaactacgttgataatggtgcgaaaatagttgaattcggtggatgggctatgcctgttcaattcactagtattaaagaagaacataacgctgtgagatatgaaattggtctttttgatgtaagccacatgggagagatagaaattactggtaatgaagcatttaactttgttcagtatattttatcaaatgatgctaacaatcttacagatactaaagcgatgtatacagctttatgtaatgaagaaggtggtattatagatgacttagttacatacaagttagcagaaaaccactttttattaatagtaaatgcggcaaatactgataaagattttaattggatttctaagcaaagtagcaattttgatgttaatgtgaataattcttcaaatatatatggtcaacttgctattcaaggaccaaaatctagacatcttgtgaatgaacatactgatgtggatgttagtgacatgagtatgtttgaatttaaacaagatgtgaagttttttgataaaaatatcattctttcacaatcaggctatacaggggaagatggtttcgaaatctattgtaaatctgaagacacagtagacatttggaatcaattattagaatatgacgttgttccttgtggtttaggtgctcgtgatactttacgccttgaggcaggtttacctctacatggtcaagatttaacagaatctattactccttatgaaggaggtattgcttttgctgctaaacctcttattgaagaagaatttattggcaaatctgttcttaaagatcaaaaagaaaatggttccactaaaagaactgttggattagagataataggtaaaggtattgctagaacaggttacgaagtatttgatttagaaggtaaccacattggagaggtaacatccggaactcaatctccctcttcaggtaaatctatcgcactagctattataaatagagatgcattcgaaatgggtaaagaagtgcttatacaagttcgtaagcgccaagttaaagcaaaaattgttaagaaaaatcaaattactaaataa

SEQ ID NO: 375 - DNA, 1347 bp, Staphylococcus capitis
gtgagtcatcgttatatacctttaacagatcaagataaacaagaaatgctagatactattggagcaaaatcaatttcagaattatttggtgatgtcccagccgatattttattagatcgaaatttaaatattgctaagggagaggcagaaactagtttagtaagaagacttaatcttcttgccaatagaaatatcacaaaagaaactcacgcttcatttttaggtgctggtgtatatgatcattatgctcctgcagttgtagatgccatgatttctagatcagaattttatactgcgtacacaccttatcaacctgagatttctcaaggtgagttacaagcaatttttgaatttcaaactttaatctgtgaactaacagatatggatgttgcaaattcatctatgtatgatggtatgactagttttgctgaagcttgtattttagctttcagtcagactaaaaagaataaagttgttgtttcaaaaggtttacactatcaagctttacaagttttacatacttacgctaaaacacgtaaagagtttgaagtagttgaaatcgatttaaatggaacaataactgatttacaaaaattagaacaagcaattgatgatgatactgccgcagttgcagtacaatatccaaatttttatggttcaattgaagatcttgaaaaaataaatagttttattgcagataaaaaagcattatttatagtatatgctaaccctctagctttaggtcttttaacaccaccaggtacttttggagcggatatagttgttggagatactcaaccgttcggtataccaacacaatttggtggacctcattgcggctattttgctacaactaaaaagttaatgcgtaaagtacctggacgtttagtaggtcaaactcaggatgatgaaggcaatcgtggatttgtactaactttacaagctagagagcagcatattagaagagataaagcgacttcaaatatatgttctaaccaagcacttaatgcacttgcatcttcaattgctatgtcagctcttggtaaacaaggtatatatgatattgctgttcaaaatttaaaacatgctaattatgctaaacaactatttaaacataaaggctttgaggtattagatggtaattcatttaatgaatttgtagttaaatttgatgaacctattaaagaagtaaatttaaaattagctgaccaaggtattattggtggttttgatttaagtgaagtttctgatgacttcaacaatcatatgctagttgccgtaactgaattaagaactaaagaagaaattgataattttgttcagaaagctggtgaattaaatggttag

SEQ ID NO: 376 - DNA, 1485 bp, Staphylococcus capitis
atggttagtaaatcaagtccattaatctttgaaagatccaaaaaaggtagatatgcgtattctttacctcaaagtgatattgaggacattacaatttcctctgtattagatgacaaatatattcgtaaagataaagccgagtttcctgaggtagctgaactagatttagttcgacattacacagaactctccaataaaaattttggtgtagacactggtttttatccattgggatcatgcacgatgaaatataatcctaaagttaatgaaaaagttgctagaatacctggatttagtgaatctcatccattgcaagaggaagaacacattcaaggttcacttgaaattatttatagtttgcaagaagagctaaaagaaattacaggtatggatgaagtaacacttcaaccagcagcaggcgcgcacggtgaatggacagctctcatgattttcaaagcttatcatgagaataatggacaaggacatagagatgaggttattgtacctgattctgctcacggtacaaaccctgcttcagcctcatttgccggatttaaatcagtcactgttaaatctaatgagcgcggagaagtagatattgatgatttaagaagagttgtaaatgagaatacagctgctatcatgctaactaatccaaatacattaggtatatttgagaagaatattatggaaattagagaaatcgttcatgaagctggtggtctactttattacgatggcgcaaatttaaacgcaataatggataaagttagacctggagacatgggctttgatgcagttcatctgaacttacacaaaacgtttactggacctcatggtggcggtggccctggttcaggaccagtaggtgtggtaaaagagttatctagctacttacctaagccgatggtcattaaagatggcgagttctataagtatgataataacattgaaaactcaattggaagagttaaaccattctatggtaactttggtatttatttaagagcctatacgtatattagaactatgggtgctgaaggacttaaagaagtttcagaggctgctgtgctgaatgctaattatattaaagcacgtctaaaagaccatttcgaaatcccatatgaccaatattgtaaacatgagtttgttttgagcggaacgaaacaaaaacaatttggcgtccgtacattagatatggcaaaaagacttttagattttggagttcatcctccgactatttatttcccacttaatgttgaagagggaatgatgatcgaacctacagaaactgaatctaaagaaacattagatcattttgtagattcactaatacaaatttctaatgaagcgaaagataatcctgatgtagtgcttgaagcaccgcacacaaccattatagatagattagacgaaacaactgcagcacgtaagccaattcttaaattcgaagatttaaaacaagaaaaaacaattgaacattaa

SEQ ID NO: 377 - DNA, 387 bp, Staphylococcus capitis
atgggtatctctttgtacattgcaattggaatcatcgtgattatcattgcgtatatggtcatccaacaaattcttaataaacgagctgttaaagaattagaccaaaatgaattccacaaaggcttgagaaaagctcaagttatagatgttagagaaaaagtggattatgattatggtcatattaatggtgcgcgtaacattccaatcacaacttttaaacaacgttaccaaggtttaagaaaagaccaaccaatttatttgtgtgatgctaatggaatagcgagttatcgtgctgctcgtatattaagaaaaaatggctataaagatttatacatgcttaaaggcggatacaaaaaatggacaggtaaaattaaatctaagaaataa

SEQ ID NO: 378 - DNA, 831 bp, Staphylococcus capitis
atgactgaaacttggaactttattaatacaggaagtcaagatccatattataatatggctatggatgaagcattacttaattttgtttctagaggagagattgatcctgttataagattttatacgtggaatcctgcgacactttccattggatattttcaaagattacaaaaagaaatagatattgaaaaggttaatgaaaaaggattcggtttagttcgacgtcaaacaggggggagaggcgtcttacatgataaagaattaacttatagcgtgatagttcctgagtcccatccaaatatgccttcaacaattacagaagcctatagagtgatttctcaaggtttattagaagggtttaaaaatttagggtttgagacatactttgccgttcctcgttcaaaggaagagcgagaaaagttaaaacaacctagaagttcagtatgttttgatgctccgagttggtatgaattagtcgttgaaggtagaaagatagcaggaagtgctcaaacaagacaaaaaggcgtcattttacaacatggttcaattttacaagatattgatattgatgaactatttgatatgtttattttcaaaaatgatagacttaaagctaaaatgaaggaagctttcgttgaaaaagcagtggcaattaatgacatttctgacactcatattactttaagtgaaatggaaaaagcctttgaagaagggttcaagactggattaaatattgagttcaaacctttagaattatcagaacaacagcttgctgaggtaaaagaacttgaagaaaaatatcgttctgacgattggatgtttcgtaaataa

SEQ ID NO: 379 - DNA, 219 bp, Staphylococcus capitis
atgcgttatatcatcttttatattatattggctattgctgcttttggattaataatgaatttagatgaatttcttttttcaataattaagactttaataagttttgcagtagtagctttaatcatttatctcatttattatttctttttcttaactgaagatcaaaggaagtataagagagctgctcgaaagtacaaacgaaaaaatagaaagcattaa

SEQ ID NO: 380 - DNA, 582 bp, Staphylococcus capitis
atgaaaaaatttatattagtgctaggagcatcttgtttgttagcaggttgtggaagtcaaaacttggctccattagaggataagactactaaattacgagatgataatcaccaacttaagttagatatacagcaacttaatcaagatataagtaaccaaaaatcaaaaattgctggattaaaacaagataaagaaaatagtaaaaagacatcctctaacaaattgaaaatcaaaaatttaaaagcatcgtccaattattatgataaagtagctgaggctataggagattataagaatatagaggcagatgttacaaagaacaaaggtaaaaaagatattcaagataagttagataaaattacgaataaaattaatgaagctttttcaacttataaaagttcggttgacaatgattctaattctgaagaagataaacagaaaagaaaagagattagcaaatttgataaagatttatcaggtgcgatgaataaaattagaaacggctatcaatcaaaagacgctaaacaaattaaaaaaggtcaacaaaaacttactaccgtaagttcaaatattagtagttaa

SEQ ID NO: 381 - DNA, 1062 bp, Staphylococcus capitis
atgaataaattaaaacaagttcatgaaatcttggagcataaacgtttggatgcacttattgttctatctgattttaatcgaagatatctttcaggattcacgggaacaagtggcgctttgataataacccctgataaaaattatcttgtaactgattttagatatattgaacaagcgactaatcaagcaactgaatttgaaattattaatcgtcaaagtgggttaatttcagaaataaaacaaatattagaaagtaaaaagttaacgaatgtcggttttgaaggacactttattagttatgatacatatgttgaacttaataaaggtataattactttgattagtataagggattctattgataagataagagaagtgaaaaataaagaagaaattcaacttataaaaaaatcagcagaaattgtggataaaacatatgaatatattttatcaatagcaaaagtgggtatgagtgaaagagaaatcaaagcgcgcctagaaagtaaaatgttagaattaggtgccgatggtccatcttttgatacaattgtagcatcaggttatagaggcgcattacctcacggagtagctagtgacaaacgcatcgaaaaaggtgatatgattactttagattttggagcgtactatcgtggttattgttccgatataacgcgtactttcgctataggtgaacctgatccaaagatgaaagaaatatatgaaatcgtgctacaatctcaaattaaggcaatcgaagaaataaaacctggtatgactgttcaacaagctgacgctttatcaagagattatatcgagtctcatggttatggaaaggaatttggtcattctcttggacatggtataggtttagatattcatgaaggaccattgctatctaagaatagcgaaggtgaattgaaagttaataattgtgtaacaattgaaccaggtatatatgtcgatggacttggtggcgttagaatagaagacgatatattaatcacagaaaatggctgtgatgtctttactaaatgcacaaaagaccttattattttagagtaa

SEQ ID NO: 382 - DNA, 558 bp, Staphylococcus capitis
atgatttcagtaaatgattttaaaacaggcttaacaatttctgtagataatggaatttggaaagttattgatttccaacacgtaaaaccaggaaaaggttctgcatttgttcgttctaaattaagaaacttaagaacaggtgctatccaagaaaaaacattccgagcaggagagaaagttgaacaggcgatgattgaaaaccgtcgcatgcaatatttatatgctgatggagataatcatattttcatggataatgaaactttcgatcaaatcgaattacctggtgattatttaaaagatgaattaaactatttaaaagcaaatatggaagttcaagttcaatcatatgaaggagaaattattggagttgaattacctaaaacagttgaattagaagtaactgaaactgaaccaggtattaaaggtgatacagcaacaggcgcaacaaaatctgctactgtagaaactggatatactttaaatgtgcctttattcgttaatgaaggagatattttagtaattaatacaggcgacggaagttacatttctagaggctag

SEQ ID NO: 383 - DNA, 474 bp, Staphylococcus capitis
atgaactttaaagaaataaaagaattaattgaaattcttgatcaatctaatttaactgaaattaacattgaggataacaaaggtagcgttgttaatcttaaaaaagagaaagaaactgaaatcattacacctcaagtagctcaacaacctgcacaacagatttctcaaccacaagcagcgccacaacctcaatcaactactcaatcaggggaagaaactcaagaatctgctagtgataattacgaaacgattaatgcgccaatggttggtacattctataaatcaccttcgccagaggaagatgcttatgttcaagtaggggataaagtttcaaacgacacaactgtatgtattcttgaagcaatgaaattatttaatgagatacaagctgaaacatcaggtgagatcgtggaaatcttagtagaagacggacaaatggtagagtatggccagccgttatttaaggtgaaataa

SEQ ID NO: 384 - DNA, 1356 bp, Staphylococcus capitis
atgaataagatattaatcgcaaaccgtggggagatagctgttagaataatcagagctgctcacgatttaggtatccaaacagtagctatttattctgaaggggacaaagatgcattacatactcaaattgctgatgaagcatattgcgtcggtccaactttatctaaggactcttatttgaacatacctaatatattatctattgcgacttctactggttgtgacggagtacatcctggttatggatttttagctgaaaatggcgactttgcagaattatgtgaagcatgtcaacttaaattcattggtccaagttatgaatctattcaaaaaatgggaattaaagacgtagctaaagcagaaatgattaaagctaatgtacctgtcgtacctggtagtgaaggacttatccaaagtatcgatgatgctaagaaagtagctaaaaaaattggttatcctgtaataattaaagctactgcaggtggtggcggaaaaggtattcgtgttgcacgtgacgagaaagagcttgaaacaggtattcgtatgactcaacaagaagcagaaactgcctttggtaacggtggtttatacctagagaagtttatcgagaactttagacatattgagattcaaattgtcggagatagttatggtaatgtcatacatttaggtgagcgtgattgtacgattcaacgtagaatgcaaaaattagttgaggaagcgccttctcccattttaagtgaagaaaaacgtcaagaaatgggaaatgcggctgttagagcagctaaagcagttaactatgagaacgctggtacgatagaattcatttacgatcttgatgatgataatttctatttcatggaaatgaacactcgtattcaagtagaacatcctgttactgaaatggtcactggtgtggatttagttaaattacaacttaaagtagctatgggtgaagctttaccattcaaacaagaggatatttcaattaatggccacgctatagaattccgtataaatgctgagaatccatataaagactttatgccttcaccaggtaagattactcaatatttagcaccaggcggttttggagtgagaatagaatcagcatgttatactaattatacaatccctccatattatgattctatggtagctaaacttattgtacatgaacctactagggatgaagccattatgactggtattcgttcactaagtgagtatcttgtattaggaatagatactactattccgttccaccttagactactaaataatgaaatctttagaagtggtgaatttaatacaaaattcttagaaaaatacaatattatggatgatgatcaatag

SEQ ID NO: 385 - DNA, 363 bp, Staphylococcus capitis
atggtcaatgtagcagattattctcaatcgaatttaggtaaaattgaaattgcgccagaagttttatctgttattgctagtattgccacgtcagaaatcgatggaatcacaggccattttgctgaattaagcaagacgaatttagagaaaattagtcggaaaaacctctatagagatgtaaaaattgaggctaaagatgatggtatatacattgatatttattgtgctttaaagcacggagtaaatatttctaaaacagccaataatattcaatctgcaatttttaattcaataacaactatgacagcaattgaaccaaaacaaattaacattcatattacacaaattatagtagaaaaataa

SEQ ID NO: 386 - DNA, 390 bp, Staphylococcus capitis
atgagtcgtaaagaatcaagaattcaagcttttcaaactttatttcaattagaaatgaaagaatctgatttaagtatcactgaagcaatcaactttataaaagatgattatccagatttagactttgattttattaactggttagttacaggagtaaaagatcatgaagctgtattagatgagaagtttaaaccatatttaaaagattggtcaattgaacgtttactaaaatctgaccgtattatcttaagaatggctacatttgaaatgttacacagtgacactcctgaaaaagttatcatcaatgaagctgttgaacttactaaacaatttagtgatgatggtcactataaatttattaatggtgttttaagtaatataaataattaa

SEQ ID NO: 387 - DNA, 1338 bp, Staphylococcus capitis
atgactgaatatttaagtgttactactttaactaaatacattaaatataaatttgatcaagatcctcatttgcaatctgttttaataaagggagaattatcaaactttaagaaacattcaagcggacacttatactttaacgttaaagataaagagagtgtgattagcgctatgatgtttaaaggtaatgcttctaaattaggctttgaacctaaagaaggtgatgaagttctactcgaagctcgtgtctccgtttatgaaagaaggggcaactatcaaatttatgtaaataagatgcaacttgacggaattggaaatttatatcaaaagttagaagaacttaagaagaaacttacaaaagaaggttatttcgatagcagcgttaagaaacctatatccaaatttcccaaaagaattgcggtcctaacagctagtactggtgctgcaattagagatattcattcaacaattaacagtcgatatcctttagttgaacagatacacatcagtacattggtacaaggtacgcaagcaaaacaagatattatagagaaaattgaacatgctgacacacttgatgtagacaccatcatagttgggcgtggtggtggttctattgaagatttatggaactttaatgaggaagaagtagttaaagcaatatatagttgtaatacaccaattatttcagctgtgggacacgaaactgactttactttaagtgattttgtagctgatgttagagcagctactcctacacaagcagctgtaatcgcaacacccgaccaatatgaattaatgcaacaaattaaacaatatcaattttcattaactaggtttattaaacaatatatcgaacaacagaagaaacaattaaatcatctaaattcttattataaatttaagcaaccttcactattgtatgatcaacaaattcaaaagcgtgatgaccttgaaaaacaacttaagcaattgatgtcgacatatcttgaaaagcatactcaaaacctcaagctattgaaacaacatttcaatttaaaaacactcaataacaacatttctcaagataaaatgcatgtgtcccaatatcgtgaacgtatgactcaagcaataacaaatgaattatcaaaattacaaacagatttaaaaaataaaattgaaaatctaaataatttgagtcctactaatacaatgttacgtggctatgcaattgtaaataaggatgataaagtagttacaagtacacatgatattactgagaatgatacaatcactttaacaatgaaagatggcaacgttgatgctactgtaaagaaagtaaggtgtaatgatgagtaa

SEQ ID NO: 388 - DNA, 231 bp, Staphylococcus capitis
atgagtaaagaaaagcaaagctttgaagaaatgatgcaagaactagaaaatatcgtacaaaaattagataatgaaacagtttcattagaggaatcactagacttatatcaaagaggaatgaaattatcaactgcttgtgatacaactttaaaagatgcagagaaaaaagtgaacaaattaatgcaagaagaagctgaggaacaagaaaatgaagaagctaacaatgagtaa

SEQ ID NO: 389 - DNA, 867 bp, Staphylococcus capitis
atgagtaatttaatcgaagaagttaatactaatcttaagcaggcaattcctgaatctcatctaaataccgatttagaagagagcatgatgtactcacttcaggccggaggaaaaagaattcgacctgtattattattacttactttaaatatgctaaatgaaaattatcataaaggacttcaaagtgctttagctttagaaatgattcatacatactcactcattcatgacgatttacctgcaatggatgatgacgattaccgtcgtggtaaactaactaatcacaaagtctatggtgaatggaaagcaatattagctggagatgcacttttaacaaaggcatttgaattagtctcaaatgacgatttaattgaagataatgttaaagtaaaagtcttacaacgattatctaaagcaagcggacacatcggtatggttggcggacaaacattagatatgcaaagcgaaaatcaaacagttgatttaaaaactttagagtctattcataaagctaagacaggtgctcttcttacttttgcagtaatggctgctgtagatattgctcaagtagatcagaagacgtctcacaatctaaatgaattcagcgaacatttaggacttatgtttcagattaaagacgatttattagatgtttatggcgatgagaaaaaaataggtaaagcggtaggtagtgatgaatcgaataataaaagtacttatgtttccttattaggtaaagagggtgctgaagacaaactggaatatcataagaatcaagctttggaatgtctgaataatatatcttcacaatatcaaacttcagaattaataaaaattgttgatttattttacaatagagatcattaa

SEQ ID NO: 390 - DNA, 453 bp, Staphylococcus capitis
gtgccaaaaaaatcagttagacatataaaaattagagaaattatttcgaacgaacaaatagagacacaagatgaattggtaaaacgattaaatgaatatgatttaaacgtgacacaagcaacagtttcaagagatataaaagaattacaattaattaaagttcccgcaccttcaggtcaatatgtttatagtttaccgaatgatagaaaatatcatcctttagaaaaattaggacgatatttaatggattcttttgtaaatatagagggaactggaaacttacttgtacttaaaacacttccaggtaacgcacaatcaattggagctatacttgatcaaattgattgggatgaagtacttggtaccatttgtggcgatgatacatgtctacttatttgtagaaatgaagaagcaagtgaagagataaaaactagaatttttaatttattataa

SEQ ID NO: 391 - DNA, 1677 bp, Staphylococcus capitis
atgttacaaaccttatcaataaaacagtttgctatcattgataaacttgaaatacaattttcagatggattaacaatcctaagtggcgaaacaggctcaggtaaatctatcatcattgatgcaattggacagctaataggaatgcgcgcttcttctgattatgtgcgtcatggcgagaaaaaagctatcattgaaggtatattcgatatagatgaaagcaaagatgcaatatctattctagaagatttatccattgatattgatgaagactttttattagttaagagagaaatctttagttctggtaaaagcatttgtcgtatcaataatcaaattgtcacacttcaagatttaagaaaagtgatgcaagaattattagatattcatggccaacatgaaactcaatcattactcaagcaaaaatatcatcttcaattactcgatgattatgcagaaaatcaatattctgatttgctacaacaatataaaaatattttcaatcaatataaagataaaagaaaagaattagaagatttggaatcagccgatcaagcattgctacagcgtcttgatttgatgaaatttcaattcgaagaacttacagaagcttctttaaaagaagatgaagtagaacaactagaagttgatattaaacgtattcagaattctgaaaaattgagcctagcattgaataatgcgcatcaagtactaacagatgagaatgctattccggatcgattatacgaattaagtaatcatcttcaatctatcaatgatattgttcctgaaaaatacgaaaaattgaaaaaagatattgaccaattctactatgttcttgaagacgcaaaacatgatatatatgatgaaatggcaaacaccgaatttgatgaacaagtattaaatgaacttgaatcaaggatgaatcttttaaataacctaaaacgaaaatatggaaaagatgttcctgaactcattgcttatcaaagtaagttagagaatgagattaataaaattgaaaactatgaacaaagttcatcacaattaagagaagaaattaaccaactttatcaagaagtaattgatataggtaaagcattatcaaaagaacggcgacgcgtcgctagggaattacgtgaccatattgtttctgaaattcaaaatttacaaatgaaagatgcaaatttagaaatatctttcaaacctcttgatgaacctaactacgaaggaatcgaatttgtagaatttttaattagccctaataaaggagagcctttaaaaagcttgaataaaattgcttcaggaggggaattatctcgaataatgcttgcattaaaaagcatatttgttaaatcacgtggccaaacagcaattctatttgatgaagtggattcaggtgtttctggacaggcagcacagaaaatggctgaaaaaatgagagacatagctcaattcatacaagtcatatgtatttctcatttacctcaagttgcttcaatgagtgatcatcatcttctaataagtaaagcctcacatgatgacaggacaactactcaagttaaagagttattagatgacgatagaattaacgaggtagcgcgaatgatttccggagctagtgttactgatttaacaagagaaaacgctaaagaaatgattgctcaaaatcacagagattaa

SEQ ID NO: 392 - DNA, 1422 bp, Staphylococcus capitis
atgtcagaaaaacaatatgatttagtcgtccttggtggaggaactgctggttatgtagctgctatcagagcttcgcaattaggtaagaaagtagcaatagttgaaaaatctttattaggtggcacatgtttacataaagggtgtatacctactaaatctttattaaaatctgctgaaatacatcatactattaaaaatgctagtacttttggtattgatgtaagtaattttaatgttaattttgaaaatattttaaaacgtaaaaatgatattgtgaatcaaatgcatacaggagtaaaccagttaatgcaacaccatcacatagatatatataatggaactggtagaatattaggaacatctatattttcacctcaaagtggtacgatttcagtggaatacgaagatggtgagtctgatttaataccaaatcaatttgtattaattgctactggctctacaccgaaattattaccatttattgaatttgatcatgaacgtattttatcaagtgacgatatcctttcaattgagtctttaccagaacatttggcgattataggtggtggtgtcatcggattagaatttgcttcactaatgaatgacctaggaacttcagttactgttatcgaagcaaatgaccgtattttaccaactgaaagtactcaaatcgcttcatcattaaaaaaagaattatctcatagaggtgtaactttctacgagaatatccaattagatgaaaatagtattaaaaaagatgatgatagtgttacaatttattttgaaaataatgcaattaaagtagataaagttttaatatctgttggtagaacaccaaatacacaagatattggtcttaataatacaaaaatcaaaacaaataaagcaggacatattatcactaatgaatatcaacaaactgaagataagcatatttattctgcaggagattgcataggtaaacttcagcttgctcatgtaggttcaaaagaaggtttagttgcagttgaacacatgtttgatgggcgtcctatacccgttaattatgacctggtaccaaaatgtgtttacacatatccagaaatcgcttcaattggtaaaaatattgaagaagccaaagctcaaaacattaaagcgcgtgcttataaagtatcatttaaagcaattgggaaagcgatgattgatgatattggtgagcaaaatggtttttgcgaagtgattattaataaagaaaatgatgaaatcattggtcttaacatgattggacctcatgtaactgaattgattaatgaagtttcattattgcaatttatgaatggctcatctttagaacttggattaactacccatgctcatccatctttatctgaagttttgatggaattaggattaaaagttgaaggtagagcgattcacgtatag

SEQ ID NO: 393 - DNA, 999 bp, Staphylococcus capitis
atgattgattataagtcagcaggccttactgaagaagacctcaagatgatgtataaatggatggacttaggaagaaaggtagacgagagattatggcttcttaaccgcgcaggtaaaattcctttcgttgtaagtggtcaaggacaggaagccactcaaattggtatggcatacgctatggaagaaggggatatttcttctccatattatcgtgacttagcatttgttacatatatgggtataacacccttagacacgatgttatctgctttcggtaaaagagatgatatcaattccggcggtaaacagatgccatctcactttagtcataaagataaaggcatcttatctcagagttcaccagtagcaactcagattccgcattcagtaggtgctgcccttgcattaaaaatggataataaacaaaatattgctaccgcaactgttggggaaggaagttcaaatcaaggcgacttccatgaaggtcttaactttgcaggtgtgcacgatttaccttttgtctgcgtgattattaataataaatatgctatatcagtaccagattcattacaatacgctgctgaaaaactctctgatcgtgctttaggttatggtatgtatggtgaacaagtagatggaaatgatcctattgctgtttataaagctatgaaagaagcacgaaatcgtgctttaaatggagaaggcgctactttaatagaagctgttacttctcgaatgacaccacattcttcagatgacgatgataaatatcgtactcaagaagaacgtgatagtcttaaagaaggagactgtaatattaaatttaaatccttcttacttgaaaatgagattatagatgaacaatggctttctgatttagaacaagaacacaaagaattaattaataaagcgacgaaggccgctgaagaggctccatatccttcaatcgaagaagcatatgcacacgtttatgatgaaggaggccaagaaaatgactaa

SEQ ID NO: 394 - DNA, 984 bp, Staphylococcus capitis
atgactaaattatcctatttagaagcaattcgccaagctcatgatttagcacttgaaaaaaataaaaatactttcatcttaggtgaagatgtaggtaaaaagggtggcgtatttggcgttacacaaggcttacaagaaaaatatggaaaagaacgtgtaattgataccccacttgcagagtcaaatattataggaactgcaataggcgcagcaatgatgggtaaacgtcctatcgcagaaattcaattcgcggatttcattctaccagcgactaatcaaataataagtgaagctgctaagatgagataccgttctaacaatgattggggctgtcctataactattagagcaccttttggtggaggtgttcatggtggtttgtatcactcacaaagtattgaaagcattttcgcttcaaccccaggattaaaaatagtaattccttcttcatcttatgatgcaaaaggattattattatcatcaattgaatctaatgatccagttttattctttgaacacaaaaaagcttatcgatttttaaaagaagaagttccagaagattactatacagtacctttaggaaaagcagatgtaaaaagagaaggcgatgatatcactgttttcacttatggtttaatggttaattattgtttacaagcagctgatattttagctgaagacggtattaatgttgaagttgtagacttaagaacggtatatccattagataaagaaactattattgatcgtgctaaacaaaccggcaaggttttactcgttacagaagataatttagaaggtagcgttatgtcagaggtttcggcaattatagcagaacattgcttatttgaactagatgcaccgattatgcgtttagctgcacccgacgttccatctatgccattttcacctgtcttagaaaatgaaataatgatgagtcctgaaaagatacaagaaaaaatgcgcgaattagcggaattctaa

SEQ ID NO: 395 - DNA, 1308 bp, Staphylococcus capitis
ttggaaattaaaatgcctaaattaggtgaaagtgttcatgaaggtacaatagaacaatggttagttgctgtaggcgatgaagtaggagaatatgaacctttatgtgaagtaattacagataaagttaccgctgaagtaccttctacagtttcaggtaaagttaccgaacttatagttaatgaaggagaaacagtaagcgttgatgcagtaatttgtaaaatcgatacaggagaagaaagagatgatatagatagtgagacagaagcaaatcattcttatgaagaacaatcttctagtcataaaaaaaatttgtctcaatcggaaataaatgaaaatactaatgattcatctttacaacctaaaaataatggtcgtttttcacctgttgtcttcaaattagcttctgaaaacaacatcgatttaactcaagtagtgggtacaggtttcagtggacgtgtcactaaaaaagatattgaaaaagtaattaataatcctgaaattattgaaaatacaactagcaattccactagtaatcagagtcaaaacaaccaatcatctcaacaaactttacaatctcaaagtcaatctgagtccgatataacatacaatcaaggaagtacaattcctgttaaaggggttcgtaaagcaattgctcaaaatatggtgacaagtgttactgaaattcctcatggttggatgatgatagaagctgatgcaacgaatttagttaaaacaagaaatcatcacaaaaacacatttaaacaaaacgaaggttataatctgacattctttgcattctttgtaaaagctgtagctgatgccttgaaagcacatcctttactaaatagcacatggcaaggtgatgaaatagttattcataaagatattaatatttcaattgctgtagctgataaagataaattatatgtgccggtcattaaacatgctgatgaaaaatctatcaagggtattgctagagaaatcaatgacttagctacaaaagctcgcaatggccaacttactcaagcagatatggagggtggcacatttacagtaaataatactggttcatttggctcagtgtcttcaatgggaattattaaccatcctcaagccgcaatattacaagtggaatctgtggttaaaaagcctgttgttatagatgatatgattgcaattagaagtatggttaatttatgtatttcgatcgatcatcgtatccttgacggactacaaacaggtcaatttatgaatcatattaaaaaacgtattgaacaatattctattgagaatacaaatatctattaa

SEQ ID NO: 396 - DNA, 438 bp, Staphylococcus capitis
atggatttaaatttcgatttatatatgaacggggttgttgaacaagcacgtaatgaaattgaagaagcaggttatgaacaattaacaactgctgatgaagtagatagtgttttaaaacaagatggcacttctttagttatggtcaattcagtttgtggttgtgctggtggtattgcacgtccagcagcctctcacgcattacactatgataaattaccagatcgactagtcacagtttttgctggacaagataaagaagcaactcaacaagcaagagattattttgaaggatatgcaccttcaagtccttcttttgcattaattaaagacggtaaaattactgaaatgatagaacgtcatcaaattgaaggtcatgatgttatggatgtaatcaaccaattacaaggcttattcgaaaaatattgtgaagaaagataa

SEQ ID NO: 397 - DNA, 978 bp, Staphylococcus capitis
atgttaaagttaaatccttataagattggatttagaactctcaaaactgcagtaggaatgacgctaggagttataatttgtaagttactaggtttagataattatgcttctagtgcgattttagtcgtattatgtatcaagcatactaaaatgcattctgtacaagctattgtttcacgcctagtctcatgtttattaattttgtttttaggctcagctatttttagtttattaggtcaacatgcattagttttaggtttaattgtccttttatttattcctttaacagttgttctcaatgctcaagaaggcgtaataacgagttgcgtcattttattacatgtttttaatgctaaagaaattaatgggcacttgatgattaatgaaatactacttttaacagtaggtttaggtattgcctttattatgaatctcatgatgccaagtttagacaaaaatttaaaacgttataaaaatgatattgaacatcaaattacagatattttcactatttttagtcatgcttgtacaatgcgcaaagatcaactagatattaaattcgacgcactactattgaacatcaagaaagcaaagtccttagcttttagggatgttaaaaatcattttgtcagaaatgaaaactcctactatcactactttgatatgagagaagaacaagtagagttattaaaaagaatgacgcatcttatagagagtatttctactgatgaccctatccttgaaaaaatatctcaattaatgtcagaaataggcagcaacgttaatagtaacgattatacagcattgcgacttcactcactttatgagattcgactatccttagatcaattaccgttaccaactacacatcaagcattaaattcacgagcaaatgttatacagatattaaatgaattagaagaatacttaaatatcaaatcacaatttggttcgttaaaattgcatagtgaaatatga

SEQ ID NO: 398 - DNA, 1125 bp, Staphylococcus capitis
atgattaacaaagaacgtatattgaatacttttctagagttagtaaaaattaattcagaaacaggttatgaacaaactattcaacctatacttaaagaaaaatttgaaaatctagggctaatcgtcaaggaggataacgcttcagaacaagaaggattaggcgctaacaacctaatatgcactttacctagtaatttatcaaacaaacagataccaaagctttatttcactagtcatatggatacagtagtgcctggtgtaaatatacgacctcaagtgaaggacgatggttacatttactctgatggtacaactattctaggcgcagatgataaagcaggcttagctgctatactcgaaacaatcgaacagataaatgagcataatttacctcatggacaaattcaatttgtcattacagttggtgaagaatcaggtttattgggagctaaggcattaaatacgcaattactagatgcagactttggctatgccgttgatgcaagtaaagaggtaggtacaactgttgtcggtgcccctacacaaatgaagatttatactaccattaaaggtaaaacggctcacgcgagtaccccaactaaaggtattagtgctattaatatcgctgctaaagcgattagtagaatgaatttaggccaaatcgatgatttaacaactgcaaatattggtaaattccatggtggctctgcaacaaatattgttgctgatgaagttgttcttgaagctgaagcacgatctcacaatgaccaaagtattgaagtacaagttcaacatatgaaagatacctttgagagcactgctaaagaatttggtggtgaagctcatgtagaaatagaaacaagttatccaggatttaaggtggaagatcatgaagacgtgacaaaatatgcaatagcaagtgcagttgctttaggacttaatggtgatacttgtattgctggcggtggttctgatggaaatataatgaatagatatggaattccttcagttattttaggagtaggttatgaaaacatccacacaacatctgaacgtatcgctactaaagatttatgtatgttatcaagtcaaattttaaaaattatagaacttgttagcgaataa

SEQ ID NO: 399 - DNA, 1407 bp, Staphylococcus capitis
atgacacaacaaataggagtagtaggtttagctgtaatgggtaaaaaccttgcttggaacattgaatctcgaggatatagtgtttcagtatataaccgctcaagacaaaaaacagatgaaatgattgaagaatcacaaggtaaacaaattcacccaacttactctttagaagaatttgttaattcactcgaaaagccccgtaaaattttactaatggtcaaagctggatctgctactgatgcaacaattgatggcttattacctttactagatgatgatgatatattaatcgacggaggcaacacaaactatcaagacacaatccgtcgtaataaagcacttgctgaaagtggcgttaatttcatcggaatgggagtgtctggtggagaagtaggtgcattaactggaccttcattaatgccaggtggccaagaagacgcatataataaagtaagtgatattcttgatgcaatcgctgcaaaagctaaagatggtgcatcatgtgtgacttatattgggccaaatggcgtaggacattacgtcaaaatggttcataatggaattgaatatgctgacatgcaacttatcgcagagagctacgcgatgatgaaagacttattaggaatgtctcatgaagaaatttctaatacctttaaagaatggaatgctggtgaattagaaagttatctaatcgaaatcactggtgatattttcacaaaattagacgatgataaggaagcactagttgaaaaaattcttgatactgcagggcaaaaaggtactggtaagtggacttcaatcaatgcacttgaattaggtataccgttgacaattattacagaatcagtatttgcgcgttttatttcatcaattaaacaagaacgtgttaatgcttctaaaacattgaatggtcctaaagcttcttttgaaggtaataaagaagaattcttagaaaagattcgcaaagcattatatatgagtaaaatttgttcatatgcacaaggttttgctcaaatgcgtaaagcaagtgaagatcatgaatggaatttaaaactgggcgaattagctatgatatggagagagggttgtatcattcgcgctcaattcttacaaaaaattaaagacgcttatgataataactcagaattacaaaacttattactagatccttacttcaaaaatattgtaactgaatatcaagatgcactacgtgatgttgttgcaacaggtgttcaaaatggtgttcctacacctggtttctcagcaagtattaactactacgatagttatcgttcagaagacttacctgcaaatttaattcaagctcaacgtgactacttcggtgcacatacttatgaacgtaaagatcgtgaaggtgtattccacacacaatgggttgaagaataa

SEQ ID NO: 400 - DNA, 1653 bp, Staphylococcus capitis
atgaacagaaaatggtggaaagaagcagtagcttaccaagtgtatcctaggagtttcaatgatagtaacaatgatggtatcggtgatttgcctggtgttatcgaaaaattagattaccttaaagatttaggtatcgacgtgatttggttaagcccgatgtatcaatctcctaatgatgataatggttatgatattagtgactatagagctatcatggacgaatttggcaccatggaagattttgatcgtttacttaaagaagtccatcataaaggtatgaaattaatcttagatttagttgtaaatcatacatcagatgaacatccgtggtttatagagtctaaatcaagtaaggataaccctaaaagagagtggtacatttggaaggatcctaaagaggatggttctgagcctaacaattgggagagtatcttcaatggatcagcttgggaatatgatgaattaacaaaccaatactatttccacttatttagtaaaaaacaacccgacttgaattgggataattcagaagtacgcaatgctgtatttgaaatgatgaactggtggtttgataaaggtattgatggctttagagttgatgcaatcactcatatcaaaaagacatttgaagctggagatttacctttgccagagggaaaatcatatgcgccagcctttgatgttgatatgaatcaacctggtatccaaccatggcttcaagaaatgaaggataaatcactaagtcaatacgatattatgacagtaggtgaagctaatggtgtaaaccctgataacgctaaagaatgggttggcgaagaagaaggcaaatttaatatgatttttcaattcgaacacttaggtttatggagtacaggagattcaaaatttgatgtaaaatcttacaaaactattttaaatcgttggcaaaaaagcttagaagatgttggttggaatgcattatttatcgaaaaccatgaccaaccacgtcgtgtatcaacatggggagatgacaaacagtattggtacgaatctgctacaagtcatgctgtaacatactttttacagcaaggcacaccatttatatatcaaggtcaagaaataggtatgactaattacccatttgatagtatagaaacgttcaatgacgttgcagtaaaaaacgaatacaacatcgttaaagctcagggtggcgatgttaatgcacttttaaataaatataaaatggagaatcgtgataattcaagaacacctatgcaatgggatcaatcaactaacggaggttttaccaatggcacaccgtggttcccggtgaatcctaactataaaacaatcaatgttgaacaacaaatccatgatcctcaatcaatactacaattctataaagatttaattcaattaaaaaaatctgatgaagtatacacatatggacagtttaatttagtggttgaagacaatcctaatctctttgcatacactcgtaaactgaataacaagaaggtacttgtagtaggaaaccttactgatcaagtttcaaaactcaatgtcccttatctcattgaaaatgaacagcaagtcatgcttcacaactatagtagccatgttatagactttgacaaaatacagccatatgaagcgtttgtcattaaagtctaa

SEQ ID NO: 401 - DNA, 876 bp, Staphylococcus capitis
ttggacgttatcaagcaaatacaacaggcaatcgtatacattgaagatcgtctattagagccttttaatttgcaagaactcagtgattacgttggtctttcgccatatcatttggaacaatcattcaaaatgattgttggtcaatcgccagaacaatatgctcgcgctcgtagaatgacgattgcagcaacagacgtcatgcacggcgcaagtcgtttaatggatgtagctaaaaagtatagatatgctaattctaatgaatttgctaatgactttagtgattttcatggcatttcacctatccaagcctcaacaaaaaaagatgaacttaaatttcaagaaagattatatataaaattgtcaacgacagaaagagctccgtatacatacaggcttcaagaaacagaggatatttcacttgttggatactctaggttcatccctactaaggacttatctaatccttttaatgtccctgattttttagaggatttattggttgagggccttattaaagaacttagacgatataatgatgtgagtccatatgaattatttgtcgttagttgtccgcttgaccaaggtttagaacttttcgttggtgttcctagcgaacgttatccagctcacttagaaagtagattcttaccaggacggcactatgcgacatttaatttacaaggcgaaattgattacgctacgaatgaagcgtggtactatattgaatcgagcttacaactcacgttaccttatgaacgaaatagtttgtatgttgaggtttatccattcgatatttcatttgacgacccattcactaaaatacaattatggttgcctattaaacaagaagcttacgattttgatgaactagattaa

SEQ ID NO: 402 - DNA, 1485 bp, Staphylococcus capitis
ttgagtactaaaagtaaacacatcccttgtttaataacaatattcggtgccactggtgaccttagtcacagaaagctattcccttctatatttcatttgttccaacaagataatttagatgagcatattgctatcattggtataggtcgtcgtgattattcaaatgaggagtttcgtgatcaagttaaatcatcaattcagaaacatgttaaagacacgaatagaattgatgaatttatgaatcatgtcttctatcataagacggatgtaagtgatgaaagaagttatgaatccttactacaatttagcaatcaattggataaagaattaggtttacaaggtaatcgtttattctatttagcgatggcacctcaattctttggagttatctctgatttcttaaagtcatctggccttactaatacaaaaggttttaaacgattagtgattgagaaaccatttggtagtgatttaaaatcagcagaatcattgaataaccaaattagacgttcatttaaagaagaagaaatttatcgtattgatcattatttaggtaaagatatggtgcaaaacattgaagtactacgctttgcgaatgctatgttcgaacccctatggaacaacaaatacatttctaatattcaagtaacgtcttcagaaattttaggagttgaagatcgtggtggttattatgaatcaagcggtgctttaaaagatatggtgcaaaatcacatgctacaaatggttgccttattagcgatggaagcacctattagcttgaacagtgaagacattcgtgctgaaaaagttaaagttcttaaatcattacgtcaatttaaacctgaagaagttagaaagaacttcgtacgaggtcaatatggtaaaggaactatagaaggtaaagaagttaagtcttatcgtgaagaagatcgtgtggccgaggattctaatacacctacatttgtatcaggaaaattaacaattgataactttagatgggctggtgtccctttctacattagaactggtaaacgcatgaaatcgaaatcgattcaagttgttgttgaatttaaagaggttcctatgaacttgtattatgaaacagataaattattagattccaatttactagtcattaatattcaacctaatgaaggcgtttcgttacatttaaacgctaagaaaaatattcaaggcatcgatactgaaccagttcaattatcttatgctatgagtgcacaagataaaatgaatacggttgatgcatatgagaacttgttatttgattgtcttaaaggtgatgctactaactttacgcattgggaagaattgaaatcaacttggaaatttgtagacgctattcaagatgagtggactatggttgaaccatgcttccctaactatgaagcgggtactaatggccctcttgaaagtgatttattattaagtcgtgatggaaatcactggtgggacgatattcattaa

SEQ ID NO: 403 - DNA, 921 bp, Staphylococcus capitis
atggaagttacatttttcggtacgagtgcagggttaccgactaaagagagaaacacacaatccatcgctttaaatttagaaccatattcaaattcagtatggttatttgacgttggcgagggaacgcaacaccaaatcctacatcattcaataaagttaggaaaagttgatcacatctttattactcatatgcatggcgatcatatatttggtcttcctggattacttacaagtcgctctttccaaggcggagaaaataaacctttaactctaattggtcctaaaggaattcaaaattatattgaaacgtctttaaagttatcggaatcacatcttaattacccaattacatatatcgaaattaatcaacaatttacatatcatcatgagggttttacggtacaagcagaagtgttaaatcatggtattacatcttatggctatcgtatagaagcaccaaccacaccaggaacaattaatgttgaagctctaaaagccattgggttagaacctggtccaaaatatcaagaagtaaaaatacaagatacatttgaacataatggtttgatgtaccaatctgatgactttaaaggagaagcgaaacctggcccaatcattgctatatttggagatacgaaaccttgtgataatgaatatgtattagctaaaaacgcagatgtcatggtacacgaagctacttatatagaaggggaaaagacacttgccaacaattatcatcacagccacatagatgatgtctttcaattgattaagaacgctaatgttggtaaaagtcttattactcatattagcaatcgatacaacttagaagatgtagaatccatttataaagaaattaacaatcaatctcagattccacaattttatttcgttaaagatttcgagacatataaaatataa

SEQ ID NO: 404 - DNA, 816 bp, Staphylococcus capitis
atgaaacttgtattctatggtgcaggtaatatggcacaagctatttttacaggaattattaattctaataatttagatcccaatgacatttatttaacaaataaatcaaatgaacaagctctgaaagatttcgcggaaagattgggagttaattatagttatgacgataaagaattattgaaaaatgctgactacgtttttcttggaacgaagccacatgattttgaagcattagcagaaagaattaaagatgatattaccgatgataatcgctttatttctattatggctggcctatcgattgattatattagacagcaattagatacgaataacccattagcacgtattatgccaaatactaatgcgcaagtgggacattctgtaactggaattagcttttcaaataatttcggacctaaatctaaagatgaagttaatgaattaattaacgcatttggatcggttatagaggtttctgaagatcatttacatcaagtgactgcgattacaggtagtggtcctgcatttttatatcatgtatttgagcagtatgttaaggcaggtactgaactaggattagaaagagatcaagtagaagaatctattcgtaatttaattatcgggacaagcaagatgatagaacgctctgatttaagtatggaacaattaaggaagaatattacttctaaaggtggaactactcaagcaggcttagatgccctatctcaatacgatattgtatcaatgtttgaagactgtttaagttctgctgttaatcgtagtgtagaattatcaaataaagaatctgaataa

SEQ ID NO: 405 - DNA, 756 bp, Staphylococcus capitis
atgataggacaacattatatcgtgacaggaggaacgagtggtcttggattatccctcgttcaccaacttcttaaaagaggcgctcatgtcactgttttagctagaaatatttctaaatttaatcaaattgatttcagaagtcattctaaaaatataaatgtcattcaatgtaacttacaacaacgagaagatatttaccaactctcagaaaaaataaaagcgccagtcaatggtttcatatacagttcaggtttaggttattttaaatccattaataaccatactttagacgaagtcattgaaacatatgacgttaatctcgtaagttttaatttaatgtaccaaattctacgaccaaagttagtaaaacatgcacatattatcggcatttcaagtcaagcggcctttgttacgcaagctaacgcggcacactatggagcttctaaagctgcattgactgccgttcttaacgcattgagattagaagaacccgaacttcatattatggcagtacatcctggacctatcgatacaccatttcataaaaaggcagacccgtcacttgctttttttaataaatataaatttataatgattgatgctgagcaacttgccgagcgcatcattttaggaattttaaagaataaaaaagaaatcaatcaacctggttggatgcataatattttaaaattatatcaccttgcaccgagaacactggaaaattgtttaccgaatttatttaaaaacaaagaatag

SEQ ID NO: 406 - DNA, 243 bp, Staphylococcus capitis
atgatatgtagcatcgatggtattattaataaagcaatcgctaattctaaacgactaccaattaataagatttttactttagaatatttagttggtactgaattttataacacgctcagtgatgctgaaattgaatatattgaggcaaaattttatcaacttgtaattcaacatcagattcttggaatagaagtgaatgcaaagacgactcaaaagccccatgtttacatcaaacaattttaa

SEQ ID NO: 407 - DNA, 909 bp, Staphylococcus capitis
atgcaaaaaaatattttaaaaagtggcatcgaaatttctgaacttggtttgggttgcatgagtttaggtacagattttaataaagcgcaacctatcattgaaagtgcaatcgaacagggtattacatattttgatactgcagatatgtatgatcaaggaattaatgaggaaattgtaggaaaagctttaaagaaatatcaaaatcgtgatgacatcgtaatcggtacgaaagtcggcaatcgactaactgacgatggaaacgtaacatgggatccctctaagaaacacattaaagaaggtgtgaaaggatctttaaaacgtttaggactagaccatttagatttatatcaattgcatggtggaacaattgatgatccactagatgaaactatcggtgcttttgatgaattaaaacaagaaggtattattagagcttatggtatttcatccatccgtccaaacgttattgattactatttaaaacatagtcaaatcgaaactttaatgtctcaatttaatttaatagataatagacctgaaagtcttttagatactattcatgagcaacaagttaaagtgttagcgcgtggaccagtgtttaagggattattaacctctaatagtgtcgatgcattagataaaaagtttgaagatggtatttttgaatatacacgtgatgagttaggtgaaaccattgcatcagttaaagaaattgaaagtaatttaagtgccctttcatttaaatatttaacttctcatgatgctcttggttcaatcatcgtcggcgcaagtagtgtagaacaattagaagaaaatgtacgtaactattataaggatgtaagtttagatcaaattaaatctgcgcgtgaacgtgtgaaaaatttagaatatactcaacatctaaaataa

SEQ ID NO: 408 - DNA, 543 bp, Staphylococcus capitis
atgagattaaacgaaaaaacgattgaccgcacagtcatttacaatggaaaaattattgacctagaactacatgatgttgaattacccgacggcagtacatctaaacgtgaattagtttatcataatggtgccgtagcagtgtgtgcagtaacacctgaagacgaagtcctattagttaaacaatttagaaagccagctgaaaaacctttgcttgaaataccagcaggcaaacttgaaaaaggtgaagagcgtgaagaagctgcgaaacgtgaattacaagaggagacaggatatattgcttcaaatctagaatttgtaacagatatgtatggatctccaggtttttcaagtgagaaattatcaatttattttacagatcagttgtctgaaggtgaaatgaatttagatgatgacgaatttgtagaactacataaggtatctattgagaatgtaaaatctatgttagaaaacaaggaactcgaggatgctaaaacaattatcgctctacagcacttattattaaattataatcattctaaataa

SEQ ID NO: 409 - DNA, 450 bp, Staphylococcus capitis
gtggaagaacgtctcaatcgcgtgaagcaacaattacaacaatcatcttataaattaactccacaacgagaggctacagttagagttttaatagagaatgaaaaagatcatcttagtgctgaagatgtgtatttaaaagtgaaagataaagcgcctgaaattggtttagctacggtatacagaaccttagagttgttagctgaactcaaagtcgttgataaaataaactttggtgacggagtagctcgtttcgatttacgtaaagaaggggctaaacatttccatcatcatcttgtatgcatggaatgtggtaaggtagatgaaattgatgaagatttactacctgaagttgaaaatcgtgttgaaaatgaatttaactttaaaatacttgaccatcgtttaactttccatggcgtttgttctgattgccaagcgaaaggtaaaggctaa

SEQ ID NO: 410 - DNA, 888 bp, Staphylococcus capitis
atgaatacaatcattgaagaatatttgaattttattcaaatcgagaagggtttgagtagtaataccattggcgcttatcgtagggatctaaaaaaatatgaagaatatcttgaagaaagaaaaatttcccatattgatttcgtggatcgtcaagtgattcaggagtgcctaggtcatttaatagatttgggtcaatcctcaaaatcacttgcacgttttatatctacaattagaagctttcatcagttcgcattaagagaaagatatgcagcgaaagatccgacagtgttaattgaaacgccaaaatacgaaaagaaactacctgacgtattagaggttcaggaagttttggatttattagaaacaccagatttgagtaagaataatggttatcgtgatcggacgatgttagagcttttatatgctacaggtatgcgcgtttctgaaattattcaattagaagtcgaagatgtcaatttaatgatggggtttgtcagagtttttggtaaagggaataaagaacgtattgttcctttaggtgatgctgttattgagtatttaactacatacattgaaacagttcgccctcaattattaaaacaaactgtcacacatgtattatttcttaatatgcatggcaaacctttatcacgacaaggtatatggaagatgattaaacagaatggtattaaagcgaacattaacaagacattaacacctcacacgttaagacattcctttgctacacatcttcttgaaaatggcgctgatttaagggctgtccaggaaatgttaggccattctgatatatctacgacacagttatatacacatgtatcaaaatctcaaattcgaaaaatgtataatcaatttcatcctagagcttaa

SEQ ID NO: 411 - DNA, 534 bp, Staphylococcus capitis
atggatgacgcgttaattcatttctattatcaatttcataagcatcaacattattttttatgtcatgatattttagaagaagcttggaaattaaatccctctttctctaaaaatgacgcggtagtgagtttaatactatttgccacagcttgttatcattatcgccgggataatattaaaggtgctttaaaatcatatgaaaagtcactgtctgttattaaacaagcaaaagataaaactcaattacatttaaatattgatgagtatcagagcatgattttacatcaaataaattctattagagatcatcatgtatttgtacctgtcaaactacctatacacacatcatttgagaaagttattacacgtgtatatcaagattatagttttactcaatttgtaatatcagagccttacattgttcatcatcatataaaacgtgatcgaacagaagttatacaagcccgtgaagaagcaagacaattacgtcgttcacatactcaacggccttataatacattaaaagaccaataa

SEQ ID NO: 412 - DNA, 732 bp, Staphylococcus capitis
atgtatgaagtaaaactagatgcgtttaacggaccattagacttgttattgcatttaatacagaaatttgaaatagatatttatgatattcccatgaaagctttaactgagcaatatatgcaatatgttcatgcgatgaatcaacttgaaattaatattgctagtgaatatttagtcatggcttctgaacttttaatgattaaaagtaaattattgctacctcaaacgagtgtagaagatgacattgaagaagatccccgtgaagatttagtagggcgtttaatcgaatatcaaaactataaagaatatactgaaatacttaatgatatgaaagatcaacgagaactttattatacgaagtatcctactgatttatcacatttggaaactgatgaatcatgggatccaaatcagactatagatttaacagaactcatcgtagcttatcaaagagttaaaaatagagtagaactcaatactcctaaatctgtagaaattaaaaaagagacatttacaattcaacaagcaaccgaacaagttacaaatcgtctaaaagagcatgaatcatttaatttctttagtttatttactttccacgaaccagtagaacaagtagtaacacattttctagctatattagaaatgtctaaatctggtatcgtcaatattaatcaaaacaatcaatttgaggacatcgatatcattagaggagtgaattacaacattggataa

SEQ ID NO: 413 - DNA, 543 bp, Staphylococcus capitis
ttggataaccaaggaatattagaggctttattatatacttctggtgatgaaggattagagcagaagcaattattggaaattttggagttgaatgaaaatgaactcgaccagttaatcgatacctatcaatctcctggtttggttatccaaaaatttggtacaacatatgttttaacaacgaaaaaagacgcatcgtcttatattgaacagctcatcgaacaaaaatctaaaatgaagttatctcaggcagctatggagacactttcaattatcgcttataatcaaccactcactcgtagcgatatagaaatgataagagggattaattccgatggcgctgttaaaacacttatagctagaggtttagtagaagctaaagatgtcgatcattctagaagtcatcatttaataaccactgatttatttttaaatgtatttggtatagaaagtcttgagtcattaccaacgactgaagaggatgatgctgaaatggatgaattctttagtaatttagttaatcaaaaaggagattcaaatgagtaa

SEQ ID NO: 414 - DNA, 738 bp, Staphylococcus capitis
atgagtaaagaattagagagactacaaaaaagaatcgcgaatagtggttatacatcacgacgcaaagctgaaacactcataaccgaaggaaaagtcaaagtaaatggacaagttgtgactgaattaggaacaaaagtgtctcactcagacacagttgaagtagagggcattaaaatagaacaagaagataaaatgtatatcttattttataaacctactcaagttattacgagtgtatctgatgatcggggtcgtaaagttgtgacagattattttgaagatattgaaactcgtatatatccagttggacgtttagattatgatacatcaggtgttttattgttaacaaacgacggagaattcactaacttaatgactcatccacgttatcacattaaaaagaaatatgttgctaaattaaaaggctatttaatgagagaacaagttaaagaattagaacaaggcattgaattagaagatggttttactcaaccggctcaagtaaaaataaaaagacaagataaagagaaaaacactacattagtcgaaattactataagtgaaggtagaaatcgtcaagtgcgccgtatgtttgaatattttggtcatgaagtgaataaattaacacgtattcaatttggtcctttagacttgaaaggtttaaatgccggagaaggtcgtgtgttgacccctcacgaggtgaaaacgttaagacatttagccgaaaatggtaaataa

SEQ ID NO: 415 - DNA, 726 bp, Staphylococcus capitis
atggctaacgaaattttaatcgtcgatgatgaagacagaatcagaagattgcttaaattatacttagaaagagaatcttttgaaatccatgaagctagtgatggtaaggaagcttatcagcttgcgatggataataactatgcgtgcattcttttagatttaatgctaccagaaatggatggtatagaagtcgcatctaaactaagagaacacaaagatacacctattattatgcttacggcaaaaggagaagaaactaaccgagttgaaggatttgaatccggtgccgatgactatattgttaagcctttttcacctagagaagttgtattaagagttaaagctttattaagacgtactcaatctgcaaactcagaacaaagcgaaccacatgcacgtgatattattgaattcaatcatttagtgattgataatgatgcacatagagtacttgcagataacgagcaagtgaatttaacacctaaagaatatgaattactcatatatctagctaagacacctaataaggtgttcgatcgtgaacaattacttaaagaagtatggcattatgaattttatggcgacttgcgaacagtagatacacatgtaaaacgtttaagagagaaattaaatcgtgtatctaacgatgcagctcaaatgattcaaactgtttggggtgtaggctataagttcgaggtcaaagccagtgatgaaccgactaaatag

SEQ ID NO: 416 - DNA, 1767 bp, Staphylococcus capitis
atgaaccgactaaatagcgtagttataaaactgtggttaactattattttaatagtagcgacagttttaattttattaagtgtatccttaattacctttattcaatattattttacgcaagaaactgaaaattctattaaagaagatgccaaaagaataagttcactcgttgagaaatctcacaataaatcacttgctattcaaaacagtcaaaaacttgtagatggccctggtggtttaatcattatgaataattttaatgataaaccacacgtatcatataataacacgaaaactcaaatgctcaatgaaattaaaaagagccctaaatttaaaagagtcttcaataacggcgaatttgaaactcaaaacgtcacaattaaaaataacggtaatacacaatcatatatactattaggttatccaatgaaaccacaagaagatgctagtagtaagcatagtggcgtgtttatttataaagacttaaaatctattgaagatacaaataatgctataactattatcattttgattactgcaattatatttatagcagctagtacagtatttgcattcttcttatcgaacagaattacgaaacccttgagacaattaaagacacaagcacaaaaagtttctgaaggtgattatagtcaaatatcttccgtatctactaaagatgaaattggcgacttatcaagagctttcaataatatgaattacgagattcaagaacatattgacgctttatcatcatctaaaagtattcgtgacagtttattaaactccatggtcgaaggtgtattaggtataaacgatcaaagagtcgttatcttttctaataaaatggctgatgatatcatccattttattgatgatttttcaaaagaatcaatcgaacaacaaatcgaaaaaacatttgaatccaaaagaactgaatttctcgaaatcgaaattagtacgcgttattacgtctttatcacaagttatatcaatcgtattcagccgaatggcagaagtggtattgtagtgattattcgtgatatgacaaatgaacataatttagatcaaatgaaaaaagactttatcgctaatgtatcccatgaattacgcacacccatttccttattacaaggttatacagaatcaattgttgatggtatagtcactgaaccagatgaaattcgtgattcacttggtgttgtattagatgaatctaaacgattaaatcgtctagttaatgaattattaaatgttgcacgaatggatgctgaaggtctatcggttgagaaagaagtacaaccaataaaaaatcttttagataaaatgaaagctaaataccgtatgcaagcagacgatttaggattaacgatggaatttaactctggcaatgatcatcttctatgggattatgacatggatcgaatggatcaagttttaactaatctcattgataatgcatcaagatatacacaaccaggtgacacaattgcagtaactgcaagtaaagatgagcaatataatattttatatattagcgatacaggtacaggtattgctccagaacatttacaacaagtgtttgaccgcttctataaagtggatgcctcacgtaaacgtggtaagcagggaactggtttaggtctctttatttgtaagatgattattgaagagcatggtggacaaattgatgtaaaaagtgagctcggtaaaggtaccacatttataattaagctccctcaacctaaaaataatgaagcagagtaa

SEQ ID NO: 417 - DNA, 540 bp, Staphylococcus capitis
atgcaacaaaataaacgtcttataactataagtatgttaagtgcggttgcgtttgtattaacatttataaagtttccgctaccattcttaccaccatacttaacgttagattttagtgatgtgccaacgttacttgctacttttttattaggtcccattgcaggtattattgtcgcattcattaaaaatatcttaaactttttatttaacatgggagaccctgttgggcctttagcaaactttttagccggggcaagtttcttattatcagcttattatgtatataaaaacaaacgctcaacacgcactttaatttatggtctaatagttggtacgattgttatgactattgtacttagtatcttaaattactttgtattacttccattatatggaatgatatttaatttaggagatgtcgttaaaaatcttaaaattgtaattgtttccggtgtaataccgtttaatattatcaaaggtatcatcatttcaattatctttgttttactatataaaagactaaaaaatatttttaaataa

SEQ ID NO: 418 - DNA, 249 bp, Staphylococcus capitis
atggctaaatatacaatcgttgatatggatacttgtatagcatgcggtgcatgtggtgcagcagctccagatatttatgattacgacgacgaaggtattgctttcgtaatccttgatgataaccaaggtactgcagaagtgcctgaagagttatacgaagatatggaagatgcactagaaggttgtcctactgattcaattaaaattgaagacgaaccatttgatggtgacgcgcttaaatttgaataa

SEQ ID NO: 419 - DNA, 963 bp, Staphylococcus capitis
ttgtacgatatattatcttatgctattgatcatgcatttaactacaaaacaaataaaagtatttataatattttaataggcaagaagtctcatcaaactttttttgacgcttcgagccaacaacttttgtcattatatcatagtttacccaatttaaaatatcctacttttgagcgatttatactacaaaaggatgattttaatcatgaattagatatcaaaacgcatcctcgatatacatatgatagtttaacccgaacatttagttgtatacaactacttatccaaacattatcgaatactcgcaaagatacatttaaatttattccagtagttcaaaatacttacgtacaacagaaagtgaaacagctatataatcatatcaaactctctcaattggaagcgtcatttatatcagaaatatattcactattcgacgcaatagaacgtcgcaataataagaatgtgctacattactatatacaagggtatgaggaacctatgtatactcgtcagcaaattagtttgatagaggatataaagcaatatgaactatttgaattagagatgaatcaactgatagatttattagatgagattgaagacgaatctaattatcctatactatctcaaacaattatcttacctcagttgttaaatcaaacttttctaagttatcaaaaattactacacggtatgaatatgaacgaaatagcagaacatcaaaacgttaaaataaatactattgaagatcatgtattggaaatatttattaaaggttatcagaatgattacaacacttatgtcaatcaaaaacaaattgatcaatttattcaatattatgatcatcacataggcctaagattaagagaatacaaacaagcatttgaagacttaacttattttcaaataaaattaatcatcgtaggtattgagcgaggtgacttacgtgttagaagataa

SEQ ID NO: 420 - DNA, 1380 bp, Staphylococcus capitis
gtgttagaagataaacttaaagaatggtttggatttgagacttttaaacgtggccaaaaggagattattgaaagcatattagcaggtaagcacaccttaggtattttacctacaggaagcgggaaaagtttatgttaccaacttcctacatatttaattgagaaaccaacgttagtcatatcaccgttaatttctttaatggatgatcaagtgatgcaaatgaaacttaatggtgaatctcacgtctcatatatacattcaggtatggatgaaatcgaaaagagaaaccatattaatcaaatttcacaaagtcgattcatttatttaagtcccgaatttctattacagccacagaatttcaagttaatatcacatttagactttggtttaatagttttagatgaagctcattgtctatcagaatggggttatgactttagaccacattatgcccttattggacaaatcacttctcacttcaaaaatgcgcgtatactagcgttaactgcgacagctccaccacatttagaagaagatttatcacatattcttagtattgatttaaatgtcattaaaacgagtatgaatagagataacatttctttacaacataagaattttaatgatgatgatgagaaaataaagtggctcataccttttttaagctattcaggacccacgattatttatatttcctctaagaaaagatgtctagaattagctaaattaatttatgaggcgggattcttaacgggcatttatcatggtgatttgagttatcaagaacgtcaaactgttcaacaacaatttttaaataatgatatacctattatcgtagccacaagtgcttttgggatgggaataaataaaaaagatatccgaactgtcattcactttcatttatcttcaagtccttccaattatttacaagaaattggtcgcgcaggaagagatggtaaaccgagtcaagccattagtttgtatcaacccgatgatagtttcattttagaaaccttattgtttgcagatatgatgactgaagaggatatctctatgtttgaattaggtgaatttttaccacccgttaaaaaagatattctagatacgttatatcgtcagtttacaattaatgaccttaaatcaatatttaaaaaatcatttcaacgtaaacgtttaggatatatgcgcatactaggttataaaaatttagatcaatgtcgccgtaattatttactcgagttttttggtgaacatccggataaacctgtaagatgttgcgacaatgatactgaattggaagaaataaaaacttttaatcgcaaaaaagtaaaaaggaaaatgaattataaagaaaaattgcaaaacttatttgaagattaa

SEQ ID NO: 421 - DNA, 1422 bp, Staphylococcus capitis
gtgtctaataatagtttcaaagatgattttgaaaaaaatcgtcaatctattgatccagaagaacacaacaatcgtgtaaacgatgaacagcaagatgaatcaaaagaaaatatcgaggataaatcaaatcaacaatttcctcctagaaacgcacaacgtcgtaagagacgtcgtgatgttgctactaatcataataaacaacaagatgaccgtaacgacaactcgaatgaaaataattcactagatgatcgctatgatgaagcatcattacataatggtgaaaacgataattacgacacagcatctcgcacagaccacggtcaacacgatcatgatgaaaatttaaaccgttcaagtaataacgtgcgtgaagaccaaggtgcacaagatgatagattaggtagcggaaaagatgcaactatagctggtggagctgcaggtgctggagctactggtaacgctgctcaacattctaataaaaaaacaggtgctcgtcctggacctaaagttaatgaaggtcataataatgatctaactgatgacaatcatcgtcgtcaacaagaccacgaagagcgagactttgatgaagatagagaacgtcatgataagaaatctggtaaaggtaaaaaagctgctgctgttggaactggcgctgcaggtgccgctggagctgctggattagcaaaacatgaacatgacaaacataaagataatcgcaatcaacatgaccatgggcgtagagacgatagaaacaacaatagagacgaccgcaattatgatcgtagaaatgataaccgtgacaataagaaaaaaggtggaataatgaagatattattaccactgattgctgcagtgcttatacttggtgcaattgctatctttggtggaatggcattaaacaatcataataatagtaaaaacgatgataataaagtttctgaccaaagtaagaaagattctgataaaaaggcaaatgataaagataaagcttcttcagacaaagacaaagataaaaataaagatggcaataaagacagcgacaaagataaagcttcttcaaataatagcgcttcaaattcagatgaaaatggtaatagtgctaacggtggtgctgctggttcagatcaaaatgcaaatagcacagataattcatctaaccaaaacggtactgctaacaaccaaaaccaaggtacacaaaataatcaacaaaataatggtaactctacacaaggtaacaataacaatcaacaaaatacccaaggtcaacaatctcatactgtaaacggtaaagaaaacctatatcgtatcgcaatccagtattacggtgagggtactcagcaaaatgttgataaaatcaaacgtgctaatggtttaagtagtaatgacattcataacggtcaaacgttagttattcctcaatag

SEQ ID NO: 422 - DNA, 987 bp, Staphylococcus capitis
atgcaaagagttgaaagcattataattggtggtggcccatgcggtttaagcgctgctatagagcagaagaaaaaagggattgaaactttagtaatagaaaaagggaatgttgtagaatcaatttacaattatccaactcatcaaactttcttttcatcaagtgataagttgagtatcggagatattccatttattgtcgaagaaagtaaaccgagacgaaatcaagcgctcgtctattacagagaagttgttaaacatcatcaattaaacatacatccatttgaagaagttttaacagttaaaaaaattgataataagtttaccattacaacaactaaagatgtttatgaatgcaaatttttaactgtcgcgacaggttattacggccaacataataaattagaggttgagggcgctgaattacctaaagtatttcattactttaaagaagcacacccatacttcaatcaaaatgtggtaattattggtggtaaaaattctgcagtagacgcagctttagagttagaaaaagctggagcaaatgtaacagtcatttatcgtggtgaaagatatccaaaagcgattaaaccatggatattaccaaattttgaatcactcgttaaccatgaaaaaataactatggaatttaacgctaatgtaacacaaattactgaagatacagtcacttatgaaaaggatggacgtacaattgagattccaaatgattacgtgttcgcaatgattggttaccatcctgattacaatttcctagaatctattggtatagaaatcaatactaatgaatatggtacagcacctgtttacaatcgtgaaacgtatgaaacaaacgttgaaaattgctatatcgcaggagtcattgccgcaggtaatgatgctaatactatcttcattgaaaatggtaaataccacggtggcattattacacaaagtatacttagtaaaaaacaaacaccacttgagtcataa

SEQ ID NO: 423 - DNA, 969 bp, Staphylococcus capitis
atgaaaaaactccttgttatacatactggtggcactattagtatgtcacaagatgcttcaaataaagttgtaaccaatgatgataatcctatatcaaaacatcaagatattattggtcaatacgctcgagtggaagagacacatttatttaatgttccttctccccacatgactatagaaaaagttactcaacttcaacataaaattattcaatgcgttgaaataagtgaatatgatggttatgttattactcatggaactgatactttggaagaaacagcatttctactcgacttattacttaaaattgaagaacctgttgttattactggagccatgagatcctctaatgaaattggttctgacggtttatataatttcatttctgcaataagagttgcttcttctaatgatgcctcaggaaaaggcgtaatggtggtctttaatgatgaaatacatacagctcgaaatgtaaccaaaacccacacttctaatatcaatacatttcaaagccctaaccatggacctcttggggttttaacaaaagatagagtacaatttcatcatcatccctatcgtcaatcttcttttaagatgataaaccatcaattgtatgtgcctcttattaagtcttatatgggaatgggtagtgaccttttagagttttatgcgaaccaaggtgtcgacggtatagtcgtagaagctctcgggcaaggtaacttacccactacatgtttacatggacttaagcaaatccttgataactacatccctatcgttcttgtttcaagatcgtttaacggtattgtaagtcctgtctatgcttatgaaggtggcggtgctgatttgtttgaaaagggtgttatattttcaaatggattaaatggacctaaagcaagacttaaattattagttggtctaagtcaaaacatgaatcatcaaaaattaaaaaattattttgaagaataa

SEQ ID NO: 424 - DNA, 660 bp, Staphylococcus capitis
atgagttcaatcaatattgcattagacggtccagcagctgcaggaaaaagcaccattgctaagcaagttgctagccgtttaactatgatatatgttgatacaggagcaatgtatcgtgccataacatataaatacttacaaaatggcaaaccaagtaattttgacgagttaattcaaagtactgagttagaattaacttatgataaagaaaaaggacaaagaattattttagatgggaaagatgtgactgattatttgagagaaaatgacgtcactaatcatgtttcttacgttgcttcaaaagaacctgttcgttcatttgcagtacaaattcaaaaagatctagcagccaaaaaagggattgttatggatggaagagatataggtacggttgtattgcctaatgctgaacttaaagtttacatgattgcttccgttgaagagagagcagaacgtcgtcaaaaggaaaatgaattacgtggtattgaatctaatctagagcaattaaaacaagaaattgaagatcgtgataactacgacatgaatagagagatttcaccattaaagaaagctgacgatgcaatcacattagatacaactggaaagtctattgaagtagtaactaacgaaattttatctatggtagatcatcttaaataa

SEQ ID NO: 425 - DNA, 1179 bp, Staphylococcus capitis
atgactgaagaattcaatgaatcaatgattaatgatattaaagaaggtgacaaagtcactggtgaggttcaacaagttgaagataaacaagttgttgtgcacatcaacggtggtaaagttaatggtatcatcccaatcagtcaactttctactcaccacatcgaaaatccaagtgaagtagttaaagtcggcgatgaggttgaagcttacgtcactaaaattgagtttgatgaagaaaacgactcaggcgcgtatattttatctaagagacagcttgaaactgaaaaatcatatgaatacttacaagaaaaacttgataatgatgaagtgattgaagctgaagttactgaagtagtaaaaggtggattagtcgtagatgttggtcaaagaggattcgtaccagcttcactaatttcaactgatttcattgaagatttctctgtatttgatggacaaactattcgcattaaagtggaagagttagatcctgaaaacaatagagtcattttaagccgtaaagctgtagaacaagctgaaaatgatgttaaaaaagcatcattattagattcattaagcgaaggtgacgttattgacggtaaagtagctcgcttaactaactttggtgctttcattgatatcggtggtgtagatggtttagttcacgtttcagaactatcacacgaacatgttgaatcacctgaacaagttgtatctgtaggtgacaatgtaaaagtcaaagtcaaatcagtcgaaaaagattctgagcgtatctcattatcaattaaagacactttaccaacacctttcgaaaatatcaaaggtaaattccacgaagatgacgttattgaaggtacagttgtacgtttagctaacttcggtgcatttgtagaaattgcacctgccgtacaaggtttagttcatatttctgaaatcgaccataaacatattggttcacctagtgaaaaattagaaccaggtcaacaagttaacgttaaaatcttaggaatagatgaagaaaatgaaagaatttctttatcaattaaagctacattacctaaagaagatgttatcgaaagtgatgaatctacaacacaatcttatttagaaaatgataatgatgaagataacccaactttaggggatgttttcggagataaatttaaagaccttaaattttaa

SEQ ID NO: 426 - DNA, 1311 bp, Staphylococcus capitis
atgactaaaccgatagttgcaattgtaggcaaacctaatgttggtaaatctacaatttttaatagagtagtgggcgaacgtgtatcgattgttgaagataccccaggcgtaacacgtgaccgtatctattcttctggtgaatggttaactcatgaatttaatatcattgatacgggtggtattgaaattggggatgcacctttccaaactcaaatacgtgcacaagcagaaattgctatcgatgaagcggatgttatcattttcatggtgaatgtaagagaaggacttacacaaagtgatgaaatggttgcacaaatgttatataaatctaagaaacctgttgtattagcagtaaataaagtagataatcctgaaatgcgtaatgatatttatgatttctattcattaggttttggggatccttatccaatatctgggtcacatggcttaggacttggggatttacttgatgccgtagttgagaactttggcgaagaaaccgaagatccttatgatgaagatacaattagactttctattataggtagaccaaatgttggtaaatctagtctagttaatgcaattctaggggaagagcgtgttatcgtttcaaatgttgcaggtacaactagagatgctgtggatactgaatattcatatgaaggacaggattatgttcttattgatactgcaggtatgcgtaaaaaggggaaagtctatgaatccactgaaaagtattcagtattacgcgctttaaaagcaatcgaacgttcaaatgtcgtacttgtcgtcatcgatgctgaacaaggtattattgaacaagataaacgtgtagctggatatgctcatgaagaaggtaaagcaattgttattgttgtaaataaatgggacaccgttgaaaaagatagcaaaacaatgaaaaagttcactgaagatgttagaaatgaatttcaattcttggattatgctcaaattgcatttgtatcagctaaagagagcttacgtttaagaacacttttcccatacataactgaggcaagtgaaaatcataaaaaacgtgttcaaagctcaacacttaatgaagtcgtaacggatgcaatttcaatgaatccaacaccaacagacaaagggcgaagattaaatgtattctatacaacacaagttgcaatagaaccacctacctttgtagtttttgttaatgatgtagaattaatgcacttctcatataaacgttatctagagaatcaaattagaaatgcgtttggtttcgaaggaacgccaatccatattattcctagaaagagaaattaa

SEQ ID NO: 427 - DNA, 999 bp, Staphylococcus capitis
atgacaaaaataacagtttttggcatgggtagtttcggtactgcacttgctaatgttttagcccaaaatggtcacgacgtattaatgtggggaaaaaacaacgatagtgttaacgaattaaatacgcaccatatgaataaaaattatttaaaagatgctaaattagatgaaacgattcaagcaacaactcatcttgaagaagcaacacaacatgcagatgtttatctaatggctctacctacgaaagcaatgagagaagtagttactaatattgataaactgcttacttctaaaaaaacatttatacacgttgctaagggaattgaaaatggtacatttaaacgtgtgtctgaaatgatagatgattctatttcatcagaacacaatgcgggtattggtgttctttcaggtccaagtcatgcagaagaagtagttattaaacaacccactactgtagcagcatcttctaaggatgagaaaatcagtgctttaatccaagatctatttatgaatgattatttacgtgtttatactaataatgacttggtgggtgttgaacttggaggcgcactcaaaaatattatagccgttgctagcggtattgtagcgggtatgggcttcggtgataatgctaaagctgcgctaatgacgcgcggtttagcagaaattagtcgtctaggagaaaaattaggtgctgatccaatgactttcttaggattaggaggtattggtgatttgatcgtgacatgtacctcaacacattcaagaaactatacgcttggctttaaattaggacaaggtaaaacaatggatgaagctttacaagaaatgaaaatggtagttgaaggtgtttatacgactaaatctgtttatcatttagctaaaaaagaacatgtagatatgcctattacaagtgcattatatcgtgtactatttgaagatgtacctgttaatgagagcgttaaagagcttatgggtagaggtaaaaaagctgaatga

SEQ ID NO: 428 - DNA, 273 bp, Staphylococcus capitis
atgaataagacagatttaatcaatgcagttgcagaacaagcagacttaactaaaaaagaagctggttcagcagttgacgctgtattcgaatcaatccaaaaatcacttgctaaaggtgaaaaagtacaattaatcggtttcggtaacttcgaagtacgtgaacgtgctgctcgtaaaggtcgtaaccctcaaacaggtaaagaaattgacattcctgcaagtaaagtaccagcattcaaagctggtaaagcattaaaagatgctgttaaataa

SEQ ID NO: 429 - DNA, 573 bp, Staphylococcus capitis
atggaaacgacaataagcaaactaaataaacaaatagaacaaaggcttaaaggtataaacgattacgaatcaattcatattaattcttctttaggaaatttacttgattcatattctattcctgaaaaagctaagcttgcttgcctcactattgacacttcaatgagtcatctagatgatattgctaagaataacttatctaaaaatggaattttaattggagatttgctaagtgctcattattatacgttattagcagaaattaatgatctttcttaccaattatcaatgagtgaagctattgtaaaagtaaacgaattaaaatcttcacttcatcagcaaacattgtcagaatatgagataaatgaagctatcattgatattgaagtacttttcccttatattacgcttgctcattttggaaagaaagttgataagtacgctttattctatgaattaactaacaatgatgatggctattatccttcatatttaaatcaatatgatgaacaagcaatcgaccaatatttcaatacaattaatcaaagctatataaaaagaagaggtaattaa

SEQ ID NO: 430 - DNA, 726 bp, Staphylococcus capitis
atgggtgaaaatcaagcaaaaaaagaacaagtacatacagtattccaaaatatttctcaaaaatatgatcgattaaataatattattagctttgaacaacacaaagtttggagaaaacacgtgatgaaacacatgcgtgttaaagaaggtagtcaagcattagatgtttgttgtggcactgctgattggacaatcgcattaagtaaagcagtcggcaacaagggacatgtgactggattagattttagcgagaacatgctagaagttggaaaagaaaaaacatcttcattaaacaatgtgaaacttgttcatggtgatgctatgaacttaccatttgatgataatacatttgattatgtgacagttggatttggacttagaaatgtaccagattatcttgttgcattacaagaaatgcaccgtgtactaaaaccaggtggtatggtagtatgccttgaaacaagtcaacctactttaccattattcaaacaagtttatagcttatacttcaagtttgtaatgcctatattcggtaaaatgttcgctaagtctaaagaagagtatgaatggttacagcaatcaacatttaattttcctgataagcaaacgttaaaacgtttattctttgaagcaggatttaatgatataacagtacgtagctttacaggtggcgttgctgcaatgcaccttggctataaagaaaaagattctaccaaaggtgattaa

SEQ ID NO: 431 - DNA, 960 bp, Staphylococcus capitis
gtggcaaagttaaacattaataatgaaataaaaaaagttgaagaacgtttggaacgtgcgattcaaagtacggatcaaactctagaagaggcttctttccacttattatcttcaggtggtaaaagagtacgtcctgtttttgtaattttaagcagtcagtttggcacaagtgaaggtacttcagaagatacctatcgtgtggctgtagcactagaactcattcatatggctacactcgtccatgatgatgttattgataagagtgacaagcgtcgaggacgtcccacaatttctaaaaaatgggatcaaaccactgctatattaacaggaaacttcctacttgcattaggtcttcaacatctatctgagattaaagatgctcgcgttcactctattatttctaactctattgtagacgtatgtaggggagagttatttcaatttcaagatcaatttaatagcgaacaaaatattacaaattatttgcgtcgtattaatcgtaaaactgctttactgattcaattagctactgaagtaggtgcaattacttctggtgcttctaaaaaaactatacgcaaattgaaacttattggtcattatattggaatgagtttccaaatcattgatgatgttttggatttcacaagctcagaaaagaaattgggcaaacctgtaggtagcgatttgatgaacggtcatattactttgccagtacttttagaaatgagaaagaataaggatttcaaacaaaaaatcactaacttaaatgctcaaagtcctcaatctgatttcgatacatgtattcaaactattcgaaaatccgataacattgaagaatctaaagcaataagtgagaagtatttaaataaagcaattgctttaattgaggaattagaagagggacctaataaaaatttatttaaaaaactcattaaaaaaatgggcagtagaaataagtaa

SEQ ID NO: 432 - DNA, 450 bp, Staphylococcus capitis
gtggaacgtacatttttaatgatcaaaccagatgcagtacaaagaaatttaattggagaaattatttcaagaattgaaaacaaagggttaaaacttgttggtggtaaattgatgcaagtacctactgaattagctgagaagcattacagcgaacatgaaggtaaacctttctatgaaaaattaatttcatttataacttcagctcctgtttttgcgatggttgtagaaggtgaagatgctgtcgcagtatctcgtcacattatcggtagtactaatccttctgaagccgcacctggtacgattagaggcgatcttggtttaacagttggaagaaacattattcatggttctgactctgtagaatcagcgcaacgtgaaattagtttatggtttaatagcaatgaaattgctgattatacatcaccaagagaagactggttatacgaataa

SEQ ID NO: 433 - DNA, 1167 bp, Staphylococcus capitis
atgagatacctcacttcaggtgaatcacatggtccacaacttacagtcatcattgaaggtgtaccagctaatttagaaattaaagctgaagatattaataaggaaatgtttaaacgtcaaggcggatatggtcgaggacgtcgtatgcaaatcgagaaggatgcaattgaaattgtttctggagtaagaaatggttatacgcttgggagtccaattactttagtcgtgactaacgatgactttacgcattggagaaaaattatgggcgtagcaccaataagcgatgaagaaagagaaaacatgaagcgtaccattacaaaacctagacctggacatgctgatttggttggaggaatgaaatataatcatcgtgatttaagaaatgtattagagcgttcatctgctagagaaaccgcagcacgcgtcgctgtaggggctgtctctaaaatactcttagaacaactagatattcatatgtacagtcgtgtggttgaaataggtggcgttaaagatgaaggcctttatgatactgaaactttcaaagccaatattgacaaaaacgatgtacgtgtaattaatgaagatatcgcacaacaaatgcgtgataaaattgatgaagcaaaaaaagaaggcgactcaattggtggtgtagttcaagttatggcagagaatatgcctgttggcgtagggagttatgttcactacgatcgtaaattagatggtcgcatcgcgcaaggcgttgtaagtattaatgcttttaaaggtgttagttttggcgaaggatttaaagccgctgaaaaacaaggtagtgagattcaagatgaaattcattacgatagcgatagtggttattatagagctacgaatcaccttggaggatttgagggtggtatgagtaatgggatgccaatcattgtaaatggagtaatgaaacctattccaacactctataaacctttaaactcagtagatatcaatactaaagaggacttcaaagcgacgattgaacgttctgatagttgcgcggttcctgctgcaagtgtggtatgtgaacatgttgtagcttttgaattggcaaaagcattactggaagaattccaatctaatcacatcgatcaattaaaatcacaaatcgaagaacgtcgtcagttaaacattgaattttaa

SEQ ID NO: 434 - DNA, 1065 bp, Staphylococcus capitis
atgaaacttgaaacaacttatgaaaataacaactatccaattattgtggagcacgatgcaattgaatacttggattcttttaccaaagattatgacaaagtattcttcattattgacgctaatgtgtatcaccaattttcagagaaaatagataccttaactaaaaagcatcatgcgcagaaaattatcattcctgctggcgaacaaactaaaacatttgcccaatacaatcaaacaatggagtcattattaagtcatcaattaacacgacaaacatgtattatcgctttaggtggaggggcaacaggtgatttcgccggtttcattgctgcaactctattaagaggtgtaggatttatccaagttcctactacgattctcgcacatgattcaagtgttggcggaaaagtaggtattaattcaaagcatggtaaaaatcttatcggtgtcttttatcgacctaaagctgttatctatgatttaaatttcttagaaacgctaccttatactgaagttttgagtggttatgctgaggtctataaacatgcattattgaatggtaaggaagctacgcaaaatatagaggcgcattttagttctgataaacagttaaaatctttaaatcaactagactattacttatttaaaggcatagaaacgaaattgcacatcgttgttgaagacgaaaaagaaaaaggtatgagaaaatttcttaacttaggtcacacttttggtcatgctgtggaatatgaacataaaataccacatggtcatgcagtaatgataggcattctctatcaatttattgtagctaatgaaatgttgcataccgaatatgatattcaacatttcattaattatctccaatgtttaaattatcctttagaaattatccctaagcttagttttgaagacacatatcaatttatgttacttgataagaaaaataacagtgaaggtattcaaatggtcttacttcaagattggggtagtcctattgtacttcatgttgataaaacgagacatcttaaagcatttaatcaattacagtcatattttaggtag

SEQ ID NO: 435 - DNA, 1302 bp, Staphylococcus capitis
atgactaatagtgaagttatcgacatcaatggccctttaaagggtgaaatagaagttcccggagacaagtccatgacacaccgagcaatcatgcttgcatctctagcgacaggtcaaactacaatttataagcctttacttggagaagattgtcgccgtactatggaaatatttgagttattaggtgttaaaataactgaacatgaagagacaatcattattgactcacctggttatcaacaatttaagacaccacaccaagtgttgtatacggggaattctggaacaacaacacgtttattggcgggactacttagtggtttaggaattgaaagcgtactatctggtgatgtttctattggtaaaagacctatggatcgtgtcctaaaaccattgttacaaatgaatgctcatatttcaggtattgaaggaaattatacccctttaattattaagccatctattattaaaggtatagaatatcaaatggaggttgctagtgctcaagtaaaaagtgcaattttatttgcgagtatcttttcagaggaagcaacaaccgtcactgaaattgatgtgagtagaaatcatacagagacaatgtttgaacattttaatattccaatagagattgagggtaagacgattcgaacttcacctcatgcaattcaacacatcaaagcacaggatttccatgtgcctggagatatttcgtcagcagcgttctttattgtagccgcgctaattacacctggaagcgatattacaattcataatgttggcattaacccgacacgttcaggtatcatagacatcgttgaacttatggggggtaatattgaattaaacaacgtgactcacgacgctgaacctacagcttctattcgagttaaatacaccccaactttaaagccaattactattgaaggtgatatagtacctaaagcgattgacgaacttcctgtagtcgcattattatgcactcaagcttcaggtacttgtattatcaaagatgcagaagaattaaaggtaaaagaaacgaatcgaatagatacaactgctgatatgctcaatatgctaggtttcagcctacaaccaacaaacgatggattgattatacatccttctgaatttaaagcgaatgcaacagtagatagtcaaacggatcatcgtataggtatgatgttagctgtagcttcgttactaagttctgaacctttaacaatagagcaatttgacgcagttaatgtatctttcccaggtttcttaccaaaattaaagcttttagaaaatgagggaaaataa

SEQ ID NO: 436 - DNA, 1245 bp, Staphylococcus capitis
atggaagatatctataaattaatagacgatatcaatctacaaaaattagagaatttagactctcgtgtaaacgaagcattaagttcaaataacgatgacgcgttatttatcttaggcgaaacattatataatttcggtttaacacctcaaggtttagaagtgtttagaacgttatatcataaatatcctgatgaaagtgaattacttatttactttattgaaggattaatgtctgagaatcaaactgatgaagcattagaatatttagctgaagttgaaacatcaactgaaaagttaatgctagaagctgatttatatcaacaaattaatatgttggaagttgccattgataagcttcaagaagcgttagaaattgaacctaacgacccaattatacatttcgctttagctgaattactatactttgatggacaatatttacgcgctacaactgagtatgagacagtactagagacaggcgaataccaagtgaatggcgttaatttattttcaagaatggccgactgtagtttacaaagtggtaactataccgattctattgggttatttgatgaaattagtgaagatgaaatgaactctgaggattatttcaagaaggctattgcttatgaaaagaacgatttaacgcaagaagcgataaaaatcatgaagacattattgtctaaagatcctgactttattcaaggttatttctacttacaatcattatatgaaaatgaaaagaactacccagatgcgattgaaactggtaaagaagggcttagactaagtcagttctacaaagagcttatggtgtctacaggtagcttagaaatagagcatggcgatgcgaatgaaggtgttgaattattaaaacaagcacttgaagtcgacaatgcctatcatgaaccattgctaatattaagtgatttataccgaaatgaagaagattatgaagcaattattcaacttcttacctttgtagatgaggaagacttagaccctgtgtttatgtggcatttagcatatgcttatggtcatgaagaacgcgataaagaagctcaacatttcttcgaattagcatacccgactttaaatacacagtctgaatttttaagcgattattatttctatctattagaaattgggcataaagacaaagcaaaatcaattttagataaattattagaaattgaccctagtaatgaaacttggcatgatgaagctacgagaatccaatcttaa

SEQ ID NO: 437 - DNA, 567 bp, Staphylococcus capitis
atgaatgaatcgctcatacgaatgaagcaaagctttttggaatatttactatttcaataccgtttcaaatcacgcattaccgtttgggtacttaattacttaaaagcaaatcatgacaaactgaaccttgttcatttcgtaagtggaaaaattaaacaacatcatactttagaaattgcagaagtaaacgcacatgcttctgcaattcaatttactaaagacgatcaaacatacattaacacgaacgaaatctttgaatatatcgctaataatacaattcgtctagatattcaaatacattttgcggataatcataagtatgaacctcgctacgacgatttaatcttggcacaattgattcattcaccaagttactccgcatacgtacaagatttatatgcgatttcaatgaatcaaagaaagcaatcttctttgattgaaaatttacaagaaaatattgatttgagtttacaaatgaatgaaccagaaagattttatcaacttacacaaattttaaatgcattgaaaatgaaagacgttgatgctatacacgaggaagaacaatga

SEQ ID NO: 438 - DNA, 600 bp, Staphylococcus capitis
atgagtgactataaatggatatgggaaatgacactttataggaaatgggtgcttattttcttaattatatgtaatgtggcaggaacgatttacggctatgattggtatagtggacaactatatattactccacgttattttaaaccatttgtacctgatagccccacagcatcactttttctaagcttatctatcatgctcatgttgtttaacaaacgttccgcaattttaaatgctctagcctttgtaactttaattaagtatggcgtgtgggcagttatcatgaatattcttatgtttgttgagcagggtgaagtgacaattaacggtattatgttaattgtatcccacggtattatggccgttgaagctatctatttttatccacgctttaaagtaacaatgactgggttcttagtcgctttaatatgggtattgattaatgacataatcgattatggtttcggtcaatttccttattatgactttattgcttcacatacatttcaaatcggagtattatcagtatgtctgagtataagcgccttaattttatacttagttttacaacgttttatgaaagttaaaacatttgattaa

SEQ ID NO: 439 - DNA, 696 bp, Staphylococcus capitis
atgtctttaatatctatgattatatatttcgtaatattaatggtcatccctatgtgggctcaacataaagttaaatctaattatgaaaagtattcacaagtgagatccactagtggtaaaacaggtagagaagttgctgaagaaatactacatgcaaatggtatttacgatgttgatgtcgttaaaggtgacggattcttaacagaccactatgaccctagtaaaaaagttgtttgtttatctcctgcaaactacgatagaccttcagttgctggtacagcaattgcagcccatgaagttgggcacgcaattcaacaccaacaaggttatgcaccattaagatttagaagtgcacttgtaccacttgctaatatcggtagttctttaagttacatggttatcatgttaggtatcgtgttaactgctttcggaagtgcatttggttcaactgcattatggattggtgctggattaatgtcacttgcagtattattctcaatcgtgacattacctgttgagtttaatgctagttcaagagcaatgaagcaaatcactgctttaaatatcgtaaatgagaaagaatacaaacacgctaagaaagtgttatctgcagcagcaatgacttatgttgcttcaacagcagtagcattagctgaacttgcacgtatcattttacttgcaagatcaagcgaataa

SEQ ID NO: 440 - DNA, 318 bp, Staphylococcus capitis
atgaaatcgatggaacaaatgcaaaaagaagttgacgaatatattggtcaattcaaagcaggctacttctcaccactagcaaatctcgctagaatgactgaagaagtaggagagttagcaagagaaattaatcatcattatggtgaaaagaagaaaaaagattctgaagctgacaataccatcaaagctgaattaggagataacttatttgtattattatgtatcgctaattcactagatatagatatgactgaaagttttaatgaaacgatggagaaatttaatacacgagataaagatcgtttcgaaagaaaataa

SEQ ID NO: 441 - DNA, 1131 bp, Staphylococcus capitis
atgaaaatcggtattacttgttacccgtccatgggcggctctggaatcattgcaacagagcttggtataaagatggctgaacgcggacacgacgttcattttattacctcgaatattccttttagaatacgtaaacctttaccgaatattactttccatcaagttgaagtgaatcaatatgcagtatttcaatatccgccatatgatatcacattaagtactaaaatatctgacgtcattaaagaatacgatttagacgttttacatatgcattacgccgtaccacacgcggtttgtggcattttagcaaagcaaatgtccggcaaagatgtaaagatcatgactacacttcacggcacagatattacagtgcttggttatgatcattcgcttaagaatgctattaaatttggtatcgaacagagtgacattgttaccagtgtgagtcattctcttgcacaacaaacatatgaaattattgatacaaataaagaaattgtacctatttataattttgttcgtgaaaatgaattcccaacacgacataatgaagagttaaaggattgctacggcatattacctgaagagaaggtactcattcatgtatcaaacttccgaagagtaaaacgtattgatacaatcattgaaacattcgccaaagtacatgaacgaattcctagtaaactaatattacttggagacggtccagaattactagatatgcgccaaaaagctcgcgaactcaatgtagaagagcatgtactatttttaggtaaacaaaatgatgtaagtgcattttatcaactatcagatctcgtgctacttttaagtgaaaaagaaagttttggtttaactttattagaggcaatgaagacgggtgtattaccaattggtacaaatgctggaggtatcaaagaggtaattaagcatgaagagacgggctttatagtaaatattggtgacagtgaaaaagcagcgcaatatgcgattcagctcttagaaaatcccaatttatataaacaaatgcaatcaaaaatgcttgaagatattcgtgatcgctttgcttcagaattgattactgatcagtatgaacattattataaaaaaatgttagaacaaggtgaaaattaa

SEQ ID NO: 442 - DNA, 1203 bp, Staphylococcus capitis
atgagtaacgagttatttgaacgtgccaaaccaatattagatcatattcagcatcatggatttgaagcatacttcgttgggggttcagttcgtgattatctcatgggacgagacatccatgatattgatattactaccagtgcaacgcctaatgaaattgaagatatttttgagaagaccattccaataggtaaggaacatggtactatcaatgtcgtttatcatcatgaaaattatgaagtaacaacatttcgtgctgaagaagattatgtggatcatcgtagaccgagcgaagtgcacttcgtacgtgatttataccaagacgtacaacgtcgagatttcactgtaaatgccattgcaatggattctaattataaaacctatgattattttgagggtgaacgcgatttaaaagaacggctgattcgtacagtaggtgaacctcgtgaacgatttgaagaggatgcgttacgtatcattcgaggactacgttttcaagctcaactcgattttaagattgtagacaatacatttgatgcgatgcgcaagcagattgctgatattcaatacctatctatagaacgcattgttgttgaactaaagaaactcattaagggtatcaatgttgctcaaagttttaatcaaatgaaggagatagatgcctttaagcacattccattctttaattcatttaatatgcaacgcgttcatatcgatgaaccattagaatttgaaatgtggattgctatcatgctagctcagcaaccgatgactgatacacttaaattactaaagataagcaataacgaaaaatctaatattcacaccttagcgaatttaattaaaacattaccacaggtacaatctaagcaggatttaattattgtgatttatgataatgacataaaaaatattaaaaatgtattagctactaaggaaacaatcaagaaaaacaatcttaacacacctaatcctttaatcttaaatgaacgttctattgaagaagtttataaccagctacctatccatcatcgaaaggaaatggctatcaatggtagtgatattatccaacaccttaatacgaaatcaggaccgtggttaaaagatgtgttaagacaaatagaagtggcaattatcacacaacaaattaagaatactaaagttgaaatactagaatgggtggatgcgaatgtcaaagtatag

SEQ ID NO: 443 - DNA, 972 bp, Staphylococcus capitis
atgtcaaagtatagtcaagacgtagtaagaatgttatatgagaatcaaccaaattacatctcagggcaatttatagctgatcaacttaatatatcacgagcaggcgttaaaaaaattatcgatcaattaaaaaacgatggttgtgacatcgaatccgtcaatcataaaggtcatcagctcaatgcactccccgatcaatggtacagtggcattgttcaacccatcgtaaaagattttgattcaattgatcagatagaagtttataactcagttgattcaacacaaactaaagctaaaaaagcattagtaggcaacaaatcatcatttttaattttaagtgatgaacaaacagaaggacgaggacgctttaatcgcaattggagttcatctaagggtaaaggtctgtggatgtctctagtattaagaccaaatgttccatttgcaatgattcccaaatacaatttatttatcgcattgggaattagggatgccattcaacaattctctaatgatcgtgtagcaattaaatggcctaatgatatttacattgggaaaaagaaaatttgtggttttttaactgaaatggtagctaattatgatgctatagaagcaattatatgtggtataggtattaatatgaatcatgttgaggacgactttaatgatgaaatacgtcagattgcaacaagtatgaggttgcatgctgatgataaaataaatcgttatgattttctaaaaatactactctatgagattaataaacgttataaacaattcttagagcaaccatttgagacgattcgagaagaatatattgcagcaacaaatatgtggaatcgtcaattaagatttaccgagaatggtcaccaatttataggtgaggcatttgatatcgaccaagatggtttcttacttgtgaaagatgacgaagggaatttacatcgactaatgagtgcagatatagatttataa

SEQ ID NO: 444 - DNA, 2703 bp, Staphylococcus capitis
atgggaattgcaacctatgcagttgttgatttagaaacaactggtaatcaactagattatgatgaaattattcaaataggcattactttcgtacgcaatcataaaattattgatacttatcattcaatgattcgcactgatttagaaattcctccatttattcaagctttgacatctattgaagaggacatgctcgctcaagcaccttatttcaatgaagttgctgaggatatttacgaccaaattaaagattgcattttcgtggcacataatatttcttttgatcttaatttcattaaaaatgctttcaataactgtgacattcaattcaaacctaagaaagtgatggatacacttgaattgtttaaaatcgcgttcccaacagataaaagttaccagttaagcgagctcgctcaagcacatgatatacccttagacaaagcacatcgtgccgatgaagacgctacaacgactgcaaagttaatgattaaggccttcaaaaagtttgaaagtttacctttagatacgcaaaagcaactttattatttaagtaaaaatcttaaatatgatttatacaatatccttttcgaaatggtaagaacaaatcaatcgaaaccattggatgaccaatttggtcaattcgaacaaatcatatatcataaacaagtagatttaaaaggtccacaaacaaagtttgaaggttctcttaaaacactttataaaaaagctacgaaagctctaaatatgacttatcgtcctcaacaactttatctttcagaaattattcttgatcaactgatgcatagtgataaagcaatgattgaagcgcctctaggaagtggtaagtcccttgcatatttacttgcagcactcatgtacaatattgagactgggcgacacgtgatgatatctacaaatactaaaatactgcagagtcagttacttgaaaaagatattcctgcattaaacgaggcattaaaatttaaaatcaacgcatctctgatcaaaagtaaaaatgattacatttcacttggtttgattagtcaaatcttaaaagatgatactaataactatgaagttagcattctaaaaatgcaattattaatttggattacagaaacaactacaggtgatatccaagaattaaacttaaaaggcggacagaaaatgtatttcgatcaaaagattgaaacttacgttcctgtacgtcatgacatccattactacaattttataaaacgtaacgctcaaaatattcaaatcggtattacgaatcacgcacatttaattcattcggatgcagaaaattcaatatatcaattattcgacgattgtatcattgatgaagcacaccgattaccagattatgccctaaatcaagttactaatgaattgaactattctgatattaaatatcaattaggcttaatcggtagaaacgaaaatgaaaaactacttaaagctatagacaaattagaacagcaacgtattcttgagaaattagatatagcacctattgatgtattcggacttaaatcaaacatcaatgacatccacgaattgaatgagcgtttatttacaacgatttatgaaattattcagtcatctgaagtctatgacgatgaagttcataagtatcattatgtttaccaatttgagactgataatatattaaaagatttacacgctctcattgataaactaaataaaacgttggaaatttttaatggcattagacataaaacaattaaatcaattcgtaaacagttactttatctcaacgatagatttaaacaaatagagcaaagtttaaaagataatcatacaagttatatttcaatcaaaaatctaactcaaaagtctacaattcgtttgcttgttaaagactttgcagtaaaagatattttaacaactcaagttcttgataaatttaattcgctcacttttatttccggtacgttaactttcaatcattcatttgataactttaagaattggtttaacgatcataccaaatttaatacatttgaagtatcaacatcgatgaaagcctctaaaaatacgagcgtttttattcctactgatgtagcttcttataattataagaatattgaagactacgtggcatcaattgtggattatcttgtcgaatatgtcactatgactcaatcaaaatgtctcgtcttatttacaagttacaagatgatgcatatggttcaagatatgttaaacgaattaccaccatttgaggactacgtgatactcactcaacaacagaatcaaaattataaaattgttcaacaatttaataactttgaaaaatctatcttgttaggtacatcaacattctttgaaggcttcgactttcaagctgatggtattaagtgtgtcatgatagctaagctaccatttatgaataaacacaatacgaaatattggcttatggacactgaatttacgtcaacgttcaaagattacgtccttccagacgctgtcactcgctttagacaaggattaggtcgtttgatacgtaatgaggatgataaagggcttatagtgtcgttcgatgatcgcttagtcaatagtaattttaagaatttctttgctcaaaccttggaaaattatcgccagaaaaaaggggatattcaacaattcaataaattactagggcacattcagaaatcaattaaaaaaggaaaatag

SEQ ID NO: 445 - DNA, 1293 bp, Staphylococcus capitis
atgaagactacgattaaacaggcgaaacaacatctaaaccaagaagtaacgattggtgcttggttaacaaataaacgttctagtggtaaaatcgcgttcttacaattacgtgatggtactggatttatgcaaggcgtggtagtgaaatcagaagttgatgaagagaccttccaattatctaaagagattactcaagaatcttcattatatgtaacaggaacaatcactgaagataatcgttctgatttaggctatgaaatgcaagtaaaatcaattgaagtcattcatgaagcgcatgattacccaatcacacctaagaatcacggcactgaattcttaatggatcaccgtcatttatggttacgttctaagaaacaacatgccgtgatgaaaattagaaatgaaattattcgtgcaacatatgaattctttaacgacaatggctttactaaaattgatccaccaattttaactgcaagtgcacctgaaggtacaagcgagttattccatactaaatacttcgaccaagatgcattcttatctcaaagtggccaattatatatggaagctgcagctatggcacatggtcgcgtattttctttcggtccaacgttccgtgctgaaaaatctaaaacacgtcgccatttaattgaattttggatgattgaaccagaaatggcatttacaaatcatgctgagagtttagaggtacaagaacaatatgtcactcacgttgtacaatcagtgcttaaaaattgtgaattagaacttaaagcacttgaccgtgatacgactaaattagaaaaagtagcaacaccattcccaagaatttcatatgatgatgcgattgaattcttaaaagaacaaggctttgatgatatagagtggggcgaagatttcggagcacctcatgaaactgcaatcgctaatcattatgatttaccagtgtttataactaattacccaactaaaattaagccgttctatatgcaacctaaccctgacaatgaagatacagtattatgtgctgatttaattgcaccagaaggctatggcgaaatcatcggcggttcagagcgtattaatgatttagatttattagaacaacgtattaaagaacatgaattagatgaagaaagttatagttattatttagatcttcgtcgttatggcagtgtaccacatagtggttttggtcttggtttagaaagaacagttgcgtggatttcaggagtagaacacgtgcgtgaaacttcaccattcccacgtttattaaatcgtttatacccataa

SEQ ID NO: 446 - DNA, 693 bp, Staphylococcus capitis
ttggatttgtttcaacttaaaacacgtcctgtcgtaattcgaagagaattattagatcattatgcggaattaggtatagatgaacaagatttagtgattctgattaaattgatttacgcatcagaaacatctaataagcagccctctatagaattgcttcaaaaagggtctcatatgcaacctcgtgaaatcactgccgtcatacaaaatttaatacaacacgaattattagaattaaatgtgagtaaagacgaagaaggtaaattcactgagtatatgaatttagatcctttttatgagaaattaagcctaatactaaagaaacaaaatttaaataaccaagagcaagatagtaaagagcaatttaaacaactatttcaattgatggaacaatcctttgggagaccactttcaccctacgaaatagaaacattaaaccaatggatagatgtggatcaacatgatttatccgtcattcaagcagcattagacgaagcactgagtcaaaacaaattaagttttaaatatatagatcgcatactgttaaattggaagaagaacaatgttaaaacagtagatgactccaaaaaaataagagaacaatttaatcagaagcaacctaaaatgaaacatgtagtcaaacaagttcctaaatttgattggttaaatggagagaaaccagatgataagtaa

SEQ ID NO: 447 - DNA, 660 bp, Staphylococcus capitis
atgataagtaaaaagaaagcattagaaatgatagatgtcattgcgaatatgtttccagacgcagagtgtgaattaaagcatgataatgcattcgaactcactattgctgtattactgtcagctcaatgtacggataatttagtcaaccgtgtgacacgttcactctttgaaaagtataaaacaccggaagattaccttaatgttagcgatgaagagcttcaaaatgatatacgttcaataggactatatcgtaataaagcgaaaaatataaaaaaattatgtcgttcattactcgatcaatttgatggacgtataccagagactcacaaagaattagaaagtttagcaggtgtcggacgaaaaactgcaaatgtggtgatgagtgtagcatttggagaaccttctttagctgtggacacgcatgttgaaagagtttctaaacgtctaggtattaatcgatggaaagacaatgttagacaagttgaggatcgtctttgtgatatcatcccacgcgaaagatggaatagaagtcatcatcaacttattttctttggaagatatcattgtttagctagaaaacctaaatgtgatatatgtcctttattagatgattgtagagaaggtcagaaacgttataaagctagtttgaaggaagcgtga

SEQ ID NO: 448 - DNA, 330 bp, Staphylococcus capitis
gtgattaagaaagatgatttcgaacaattagaaacactactcgataagttagcgagtcagaagaagttaaaatctcaagaggctaaacctattattgatgattattttgagatgatacttaattactttaaacaaattaatgaaatcagtgaaatcaattttgatcacttaaatgagtatcctgtagtacctatgaattttgatgaacggtatcactatatgattgctagaaaatatcattttatgggatatagacaaatgaaaacgttaaaaagtgagttaattaaaatgaatgcctcttatcaaataaggaagaagcgcaatcgttaa

SEQ ID NO: 449 - DNA, 2235 bp, Staphylococcus capitis
atgacggaaaataaagggtcttcccaacctaaaaaaaataatagtaaaaatggtgggaagtccgacgaacaaaagaataggaatgttaagagaacgattatcaagataatcggctttatgattatcgcctttttcgttctgttgttacttggtatcttgttgtttgcttactatgcatggaaagcgccagcatttactgagtcgaaactagaagacccaattccggccaagatttatgataagaatggggatctagttaaaacgttagataacggtcaacgtcatgaacacgtcaacattaaagacgtaccaaaacacatgaaatatgccgttttagcaacagaggataatcgattctatcatcacggtgcgctagactataaacgcttatttggtgctattgggaagaacttaactggtggatttggtgctcagggtgcgtcaactttaacacaacaagttgttaaagattcattcttaacacaacaaaaatctatcggtcgtaaagctcaagaagcttacctttcataccgtcttgaacaagaatatagtaaagatgaaatattccaagtttacttgaataaaatttactattctgatggtgttactggtgtcaaagctgcagctaaatattactttaacaaggacttgaaggacttaaacttagctgaagaagcttatcttgcaggtttaccacaagttcctaacttatataatatttacaataaccctaaagaagcgaatagccgtaaagacacagtgctctatttaatgcataaacatcacagaattactgataaagaatatgctgatgctaagaaacttgatctaaaagcgaacttagtagaacgctctaagaaagatcgtcaagtgaacgctaataataatgattcagagtatgattcttacgttaacttcgttgaatcagaattaatgaataataaatacttcaaagacaagaacttaggcaacgtcctacaaagtggtattaaaatttacactaacatggacaaagacgttcaaaaaacgcttcaagatcgtgttaataatggtggttctaactactataaaaatgatgaccaacaagttggtgctacaatcttagatagtaaaactggtggtcttgtagctatttcaggcggacgtgactacaaaaatgtcgtagaacgtaaccaagctacagatgctcaccctactggttcatcattaaaaccattcttagcttatggtccagctattgaaaatatgcaatgggctactaaccacgcaatccaagacgaatcttcatattgggttgatggttcagaattcaaaaactatgacactaaaagtcatggtaaagtttctgcttatgatgctttacgtcaaagtttcaatattcctgctcttaaaacttggcaacaagttaagaaacaagcaggtaacgatgcgcctaagaaattcgcttctaaagttggcttagattacaacagtaaaataggtccatctgaagtacttggtggttcatcttctgaattctcacctactcaattagcttcagcatttgctgcaattgctaatggtggtacttataacaatgctcactctattcaaaaagtagtcactaatgatggtgacactattgaatatgatcatactagtcacaaagcgatgaaagattatacagcttatatgttagctgaaatcttgaaaggcacattcaaagcatacggttcagcttatggacacggtgtttcaggagttaatatgggtgctaaaactggtactggtacttatggttctgaaatttatcaaaaatataacttaccagacagtgcagccaaagacgtatggattaacggattcagccctcaatattcaatgtcaatttggatgggcttcaataaagttaaacaatacggtactaactcatttgtaggacatactgagcaagaatatccacaacatttattcgaagatgtaatgtctgatatctcttctaaagatggtgaagacttcaagaaacctaatgatgttaatggtagtgattcggataacttatctgttaaaggtcacccagacaacgacactactaaccgtagtgttcacggagatagtgattcgtcatcaggcaatagctcatcttcaaactcaggtaatagttctagcaataacagtagctcttctcaaagtagctctggtaacgcactaactcgtttatttaacttaaatgctatatttgataacaaagcataa

SEQ ID NO: 450 - DNA, 627 bp, Staphylococcus capitis
atgaattatcctaatggtaagccatactcaaaaaataagtcttcggacggacgaaagccttcacccttttcaagtaacattgaatatggtggacgcggaatgtcgcttgaaaaagatatagaacaatccaatacgttctatttaaaaagtggcatagcagtcattcacaagaagcctactcccgttcagatagtcaatgttcactatcctaaacgtagtaaggctgtgattaatgaagcttattttcgtacaccttcaactaccgattataacggcgtttataatgggtattatatcgatttcgaggcaaaggaaacgaagaataaaacttcttttccccttaataatatacatgcacatcaagttgaacatatgaaaaatacatatcttcaaaagggaattgtttttcttatgatacgtttcaaaacacttgatgaagtctatatattgccatattctaagtttgaatttttctgggaaagatatactcaagaaatcaaaaaatcgattacagttgaagaaattcggaaaaatggttaccatattccttatcaatatcaaccaagattgaattacctcaaggcagttgataagttgatattagatgaaagtgaggaccgcgtatga

SEQ ID NO: 451 - DNA, 114 bp, Staphylococcus capitis
atgcaaagtatcattctttcattgattagacatgattggatttataaagattttgttatcggcgaatttgttttgaaagatttatgttacttttatcatttaagtctcgtttaa

SEQ ID NO: 452 - DNA, 333 bp, Staphylococcus capitis
atgcgaaaactaatagaacaacttatctcggatattgatgaaatgaatcatcgttttgaaagagtaaaatcttcagaagttgattatgacttttataaggtagtaaaaccttatgcacattcgattgattcaaaacttaatgaattaaacaattattatcaacaaatcattaatacgccgtatatgacaccattaaaatttaatttacttatatcaaacattcaatcgctatctgtcgaatgtcattttaaacgtacgagtagaaagcttttcacagaaaaaataaaaagcgtacagtatgatttaaaaaatattttaacgtatcatgtttaa

SEQ ID NO: 453 - DNA, 567 bp, Staphylococcus capitis
atggttaaaactgtatatgttactggatacaaatcttttgaattaaatatattcaaagatgatgcaccagaagtttcatatttaaagaagtttatatctcataaattagaacaattattagatgaaggtctagaatgggtgctgattcaaggtcaaatgggtattgagttatggacagctgaggttgttttagacttaaagaaagattatccagaattaaagttagggattatcacacctttcttaggtcatacgcatcgttggaatgaacagaaccaagctaaatacgcttcaatcgctcaacaagcagattttacggagagtattcatcatactgattatcaagggccttttcagtttaaacaagcagatcaattcatgctagatcataccgactataccattctaatttatgatgaagaacaagaggcaagccctaaattcttcaagactatgttagttgaatttatggataaaacaaactatacttgtgatattgtgacgtttgatgaactcactgacttcatcaacgacttgcagtggtctcaagatcaaagtttcgaatga

SEQ ID NO: 454 - DNA, 339 bp, Staphylococcus capitis
atgtcagatgtttcattaaaattatcagcaaaagatatttatgagaaagatttcgaaaaaactatggctcgtggctatagaagagaagaagtagacgcttttttagacgatattattacagattatcaaaaaatggcggacatgaataatgaagttgttaagctatcagaagaaaataataaattaaaaaaagaacttgaagagttaagacttcgcgttgctacaacaagaccacaggaaaataaaaacttttcttctaataatggcaacaactcatcaaacaatgtagatattttaaaacgtatttctaatttagaaaaagcagttttcggtaagtaa

SEQ ID NO: 455 - DNA, 1137 bp, Staphylococcus capitis
atgtttcaattattagcagtctgtccaatgggactggaagcagtcgtggctaaagaaatacaagaacttggttatgaaacacaggttgaaaatgggcgcatcttctttgaaggtgatgaagcagccatcgttaaatgcaacttatggttacgtacagctgaccgcattaagatagtaatggggcgctttgatgctaaaacatttgatgatttattcgaacaaacaaaagctttaccgtgggaaacaattatcgataaagaaggtaatttccccgttcaaggtcgaagcgtaaaatctacattgcacagtgtacctgattgccaagcaattactaaaaaagccatcgtcgagagacttaaaaaggcatacgatgaaaaaggttggttaaatgagactggtgcaaaatatcctgtagaagttgcaatacacaaagataatgttttattaactattgatacatcaggttcaggattaaacaaacgtggttatcgtctagcacaaggggaagcaccaatcaaggaaacattagctgctagtttaattcgtttagcaaattggaaaggtgattctccactaattgatccattctgtggttctggtacgattgcgattgaagcatgtttaattgcacaaaacattgcccctggatttaatagagatttcgtatctgaagaatggaatatcatgcctccaaatatttatgatgaattgcgtgatgaagcagatagaatggcagattatgataaagaaattgaagtttacgcatctgatattgaccctgaaatggtagaaattgctaaacgtaatgctgaagaagttggactgggcgatattattcaatttaatgttaaagacgttaatactttaactattgattcagaaggaccagtagcattagtaggaaatccgccatatggtgaacgtataggtgatcgcgaagaagtagaagaaatgtatcgctatattggttcactaatgaagcaacatccttatttatcaacatatattttaaccagtaataaagaatttgagtatttagttaaccgtaaagcaactaaacgtcgtaaattattcaatggttatatcgaatgtacgtattatcaatattggggtaaaaaacccgattttaaaaattaa

SEQ ID NO: 456 - DNA, 639 bp, Staphylococcus capitis
atgaaaacagtattaatcatcggagctaacggtagagtgtctatcgaagcaactaaaattttccttgaaaactctagttttaatgtagatttattcttaagaaatgcgcaccgtatccctgactatgcttctaaccgtgtaacagtatatgaaggcgatgcaaaaaacttagaagatcttgagaaagcattagatgaagttgatgtagtctttgcaagtttatctggatcacttgatagacaagctaagacaattgttgaagctatggctaataagaatgttaaacatttaatatttgtggcagcacctggtatctataatgaattacctgaacaatttaacgaatggaataaagaacaatttggagataaattaaatctatatcgcaaagcatcggacattattgaaaattcaaatttagattatactatcatccgtccaggttggttaactgataaaaatgaaaatgtttttgaagttactactaaagatgagacattcaaaggtacagaagtttcacgtaaaagtgttgcttcattagctgttcaaatcgctaaaaatccagagctacattctaaagaaaatattggtgttaataaacctggaacagaaggcgataaacctgcatggtttgattaa

SEQ ID NO: 457 - DNA, 3441 bp, Staphylococcus capitis
atggataacactgaacaattagatattttatataagttgaaaaaggaagttgagaaatcgaacaactatgctttagttaacactattaaccaagtaataaaaaaagtatatcttaatcaatttaccgcttctttcgttggtcacttttcagctgggaaatcaacgctaattaatctattacttgaacaaaatatcttacctagctcaccagtacctacaacaagtaatactgcagtcgtgtcagtcgctgaagaaccaggaatcatcgcgaatttacctcaccaacaatacactaaattaaaaacttatgatgatgtgaaacaaatgaatcgtcaaaatgtggatgttgaatcagtagaaattaacttcccatcaaataaattcaacaacggtttcacactacaagatacacctggcgtagactcaaatgttgccacacaccagtctagtactgaacaatttatgtatacgagcaacattctcttctatactgtagattataatcacgtacaatctgcattaaactttaaattcatgcgacgtattaatgaagtaggtattcctatcgtgtttgtcattaatcaaatcgataaacataatgaggatgaaatatcatttgatacatttaaatcacgcgtggagaaatcaattaaagattgggatattgaattaacagatacttattatgtatctaaatttgagcatccagagaaccaaattaatgaattatctaattacctcgtttatatggacaatcaacgagaatctgtcgaagattacgtgaatcgtactatcgattttattactgaagcacaacttgcttatatccaaaatgaaatccaagacatcctcgatacacttgatatcgaagaggaagactttgagcaagcttacatgaagttccaacaaaatcaagaagtaagcgaagaagctcaactattaaacgactctgataaattactcaattatttaaagcagaaacgtaaagatattttagataacgcttatatcatgacacatgatatgcgagaacagttaagatcttatcttgaaagtaaatctgaagacttcaaagtaggcgggcttttcaataagaaaaagaaaaaagaagaagaacaggaacaacgactgaatcaagctactgacgcgttacaagataaagtgaaccaacaaatacgtcagccacttcgagaagacatgtcattcttaacacgctttataaatgacagtgaagttaataatcaaatcctaaaccaagattaccttataaagccatcattaatttctgatttatatcaacctcagacaagtattagcaacacgtatgttcttacattttcagatgaagtagtgaaagctttaaataaacatattgaacatgaatcaaaccctatcttcaaagatgctgtgaatcacgctcaagcaagcgagttaacaacagaagataatgaggataaacaagaatatgaaaaattcattgagttgaaaaatttaagagaatcgttaactactcataattatcaacattattatatccatttagatgattcactggataaattaatcggaagaactgaagcaaatttcgaacttaaagaagaaaattcaacggcttaccaccacaaacatgaacaggtcaaccatgatgaagcagaaacagcaaatcaagttgatattcagaatgcacttcaagtagtcgaagatgtccctctatttgatcgtacgaaaaaggacatcaaagacacaatgcatcgcctcaataatcaaatcactaaaattggtgtattcggaactttcagtgcaggaaaaagtagtttaatcaatgctttattaggcggtcaatatttagtaagttcaccaaatcctacaacagcagcgacaactgaattatcatacggtgaagaaagccaaatcaccttaaaatcatctgagcaattactagatgaagtcaacaatgttcttgaatattacaatgcgtcatatgattcattagaatcatttattaacagtgatttgaagaaacttaagacacaacttgaaaagaatcaactcgcatttattgatgccattgagaaacattatgatatgtatctagacatgttaaatgagggagaagtgcataccgtctctcaagaagacgttaaaaaatggagtgcagaagatgaatacgctacattcgttaagaccgtgcatcttaaccttccacttgaatggttaaaaggtaaaattatcgtcgattcattaggtcttcactctaataatcaacgacacactaacgaaactgagcagattcttacttcttcagatttaatcctctacgtaagttattttaatcattcattcacggataacgataaagcttttatcgagcacatgaaagcgatgaatcaattaaatgagaatcaagcattcaagatggttattaatgcagtagatttagctgaaaatgaagacgacctcaacacagtgcgtgattatgttgcagatgcacttggacaagttaaccttcattctgagatatttagcgtttctagtcgtaaaagcttaaaagagggcgatcaaggtatagatcaattgcgcgatagcattcagcgatttgctgatgtcgaatctaaaaccattttagaacaacagatggttcatcaaattcaacaaatgaatgattcctataaagaaatgattgaagagttccataataataaggaacaaatacaagctagacaagaaaaattattaaacattaaagaccaagatagacttaatagccaattgatcaatactacatcgcaacatactaataacgaagttgatgaacaaatctatcatttaaacaatagactcaatcttcaattattagacgaagtgaaatcagtgtataacagtcaaatgactcaaaatagtgattttaatgaagagaaaaagatttctactaaaacttatcttgatcaaattcatcaacgattatatttagaacaatcattaattactgaaagaatcaaaaagtattttaattctcaattagaagagcaaattgcaccaattatcaagaagttaaatcacatacacgtactagttaaagctcaatttgatgtagaacctgatgtaaaggaaacaccatttttaaaaatagatttaaatgatatgattgcagccttaccgaagcaattaacaaaacgtaaaatactaaatcctaattcacaacgtgatatccaagaacaaattgcaaatgtaacattagaattgttacaagatggtttgagtgaattaaaacaagaactgaacgactatgtgcagcagatgtcacgtcaagctgagacgcaattcaaacaactagagcaacaaattcaagaacaaattgatgaattactatcattcaaattagatgatacgctcatccaacagctggaaactaaatctaaacaacttgatgaaatcatttaa

SEQ ID NO: 458 - DNA, 879 bp, Staphylococcus capitis
atgacaaatagagtattactcgtggacggaatggctctactatttagacatttttatgcaacgagtctacacaatcaatttatgtataactctaaaggtattcctacaaatggcgttcaaggctttgtaagacatatcttcagtgctattaaagaaattaatcctacacatgttgcagtatgttgggatatggggcaacaaacctttcgcaacgaaatgtttgaagggtataaacaaaatcggccagaaccaccagcagaacttataccacaatttgattacgttaaagaaatctcacaacaatttggatttgtaaacattggtgtaactaattatgaagctgatgatgtgattgggagcctcgctcacagttattctgataacaatgaagtttttatcattacaggagatagagatattctccaatgtataaatgagaatgtagaagtttggcttactaaaaaaggatttactatttataatcgctatactctagatcgatttaaagacgaatacggattagaacccaaacaattaatagatgttaaagcattcatgggagatacggcagatggttatcctggagtaaaaggtatcggcgagaaaacagctatcaaattaattcaaaatcatcatagcgttgaaaacgtaatccgaaatatatctacattgacaccagcgcagcaaaagaaaattaacgataacattaacaatttacatttatcaaaatcattagctgaaattcacactcaagtgccacttgaatcagaacagctctttaatgaaatggcatacgcacatgaactaaatgaaatactttcaatttgtaacgaacatgagttgtatgtttcaggaaaatatctagcaagcaacttttaa

SEQ ID NO: 459 - DNA, 8412 bp, Staphylococcus capitis
ttgaataatcgagataaattacagaaatttagtatcagaaaatatgccattggaacattttcgactgtaatcgcaaccctggtatttataggttttaatacaggtcaagctcaagcaaatgaatcagatcaacctgctacaatagttaaaaaaactgcactaaatggaggtgaagaagactccactgcaaaacaacaaactaactctaaaattgaccaaaataaaaatgatgtctatacagtacctgaaaacgagactgaacttttatcaaatgtacaaacatctaatagtaatagtgatgaaattaaagagagcacgggagaaaatactaagaactcaccatctaactatcctaatgataaaaacagtcttaagataaaaacacacgctgtaaaatctttaacaggtgataaagaaaaacaaaaagataatttaaaagaaaaatcaattatcaataaacaatctactaaagaagattcaaataataaaaaagttgaagatactaacaaaccaaaacttgttcaaccgcctttagataagactagactacaagctttatatgatgcgtcataccatgattacagaatgatagatactgataaagctaatacaattgaatataataaagttaaagctacttttgacaaaattaatgattttcttggtaatagtgaaaattctgaatcaaaacagcttgatttgatgtaccaacaattagaacaagcgattgaattagctcgtacgctgccaatgcgtacaactaaaataaataaaaacaaccgttctactagaagcgttaataaagatcgggctagtagtaaatctaattcagcttatttagatgcatggactgaatattatgtatcaagtgatgatgatggttccggatatccaataggaacatttttacacgcttctaataaaggggcgccttatcaattaccatcaacaccctataacacattacatgcatcagatgtaaaaggtatcgcttatataactactaaaagggttaaagatggttacgagtgggatatattatttaacaaaggacactcaaatcatgagaatatgatttattggtttggaatcccacgtgatcaaacaccggtaggtcaagtgacattttctatcataaacaaaaatggaacaagctcagcatatggtggtgtgggctcaggttcaggcgcacctttacctaaattttggcaaactgctgaaggcattgatcccgctgtagctagatattttagacatggttccgctcatggttatccattttataatacgcctaccgttcaaataaataacttttgggattttgctcgaggtagcaacgaatatgatcgtaattcttatttcaatcgaaatggtgcatcatctacagcgcgttattatggtgacgaaaactttgctttcttaaatggtgagagacctgaactaggacaaggtttagattcaatatatagctttattggtaaaggagatgtaagttatagaatttcctttaaaactagtggtcttccaacagaacgtctttattatgcagcaggtggtcgtgcactagaatttagacaattatttaattacaaccaattatatgttgaaccgatgaaagaatatcaaaatcgtattcaatctttcgtagaagttaaaaatcgtactatgcatttaggtaatactaagtatgtatatgatccatctataggtaaaaataccgatcgagctatattggactctgatggagatcatactattgattatgccgacgatcctttaagttatgtaaaacatataagtagatctatctttggttttatgcgatataatgatgcttacgaccaagtccgcattttcggtgcagatgaattaaatccagttgaaatcgagagtacattctcaaagaataatctggaggaagctgctcgcacaggaaatccaattaagctaatgattggatttaacgcgcgagatcgtcaccataacccagaaactctagttccagtaaatttgtatgttaaaccagctcttaaacaaaagatttcttattggcataacaatgaaggacaaagtattgaaagttattcagaatctaaaaaagctggtcatccagtatatgaaattatggctggagatatgcataataattcgcctaaacagcaagatatacgtgttcaactaacgagtaatgaacctattagagataatacttggtcggtatatggatacccaaatacattgagattagaagaatctaaaggtcaaactaataatgccaacgagaaaaacttctctttagtcggaacattagcacctggagattattttattacagtaagtttaggagatagagaagaacaattcgaagtacgtgctaaacctaatcctccgataattgaaacaactgaaatgcaacttagaggaaaagcaggtcaaaagccagaaattatagttactaatgtgccacacgaaactaatgctaaagttttacttgttgttggaggacaaaacggttcaactgatcctttctcagatccttatactaaacctgagaactatacagtgatagcaagtgcagatgctacacctactggaacggttacttttacagctagtgattatgtacagggtcttccaagagccgctgaattaaaagctatcacttattttaacgagaatgttcaatctaactttagtaatatcattactctatctagtgatagcacacctccatcatttggtgagcctgtaggattaaacgcaaaatattatagagataatcatgtctcattctctatacctgtaactgaaaatcacggaggttctggacttaatcaaatacgtgtagaaggattaccatctggatggactcagacctttgttaaaaattctaataacgaaactggtactttaacagtttcaggtactatcagtcgtagtcaagctctaaatagtgttatttcccttagattaacagctacagataatgataataaccaacaaactaaaactatcaatgtaaatgttgggagcttagcgactgactatccacttactcctttgtctgctggtaatagaattcttgtagtaaatcctactaattttactacacaagaaaaaaatcaaggtaaagataaagtacaaagactaaatactaacaaatcgacttacttagcaagctctaatcctttagttcctcaagataacggtaacattcttgtaaattataaagatgggtctcaagggacagtgaatgctggtaacatctacacatatgatccaattcgtaaagacatatatgctgatacagatgtcactgaccctaaaattgcaacaatattcgtacctaaaggctcaagatatgaaataggacgagatttaagaaagtacttctcattgagtaatggtcaagatattccaacaaatacgacatttacagttatgtaccctaatgacacattgccaacaggcgatcagatatctcactttggagctgaaacgcatagttatagtattacagcggttaatgcatataatcaaaatgcaacaacacttacattgcgtgttaaagctgtggatgttatagcgccatctggtaatttacgagtttatcgattaaatccatcaacactaagtgatgaagaggttaacaaggttaaacaagcttttgttgaagccaatcgaagattagacatccaacttagtgatattactgtaaataacccaactagtggtggtgcaagtactgtaaatgttgtagttcgaaaagataaatataataaaacttttacatcacatccaggtgatatgaactttttacgttggacaaatattcgagatgattatactatctcatggtcgaatgataaaatagctcaccgtgatacagatggaggtttatcatggtctccagatcacaaatcgattatttatagatacgatgcaactaaaggatcatcaattactttaaatcaaatattgcctttattaactgctcgcacaagcataccttcattgagaaacgacatatcaggtgacgataaggctttagcaattgctggagggacacctaaatataaaaccactggtttctcaactaaactcaatactttagataacttacgtttttacactaaagatgggcaagtaatacaggtattagatttagttcaggctagtactggaattgaaaatgctgaagtaagtcactctaatcgcatttataatgaaagaaactctcaagtttcaagtggggaagtacctgctgctaatggtgctcaagcattcaatgtcgacaaagttattaaagctaatgggtctaacaatggagttatgggtgttatatacaaagctcaacttgtcctaacgccatatggagctaaacaatatattgataacattacagattcaacagatgactctgctaatctcatggaggtcactaataatgtaatagatgtttatttcgtgccaagtgataacgtcaaacctgtaataagctttggtaattataataaccacgtcgttttttctggtgaaacatttagaaataatatgactgtaacagataattatggagtacaatcagtctcaattccgcaaactagcgatatcgcagtgtcaaaaaataacagtaatacagaaataacaggcacagctcctaatgtaacgagtcaaactactaaggcagtaaaagttattgccactgataaaagtaataatcagacagaacaatcatttaatgtgcttattaaacctttaaaagataaatatcatgttactagtagttcaacaattcagaaccctattagaattagtagtatacgaaatggtaccactttaactcaaactgaaaaaaatactgtaattaattcattaacaattactaacaatgaacctaatagaacttatgtcacagctccaaaaaatgaaattcgttctaaagaagtcagtaacgtcacaaatacaaataataattcaagtgttacagttacaattacttatgcagataatacgacttctcaaataaatgtattagttaaacaaatcataccggaaatatttgcagaacctagatacactgtacagggccaaaatttccctgaaggaaaaggtgctaaccctaaagacttctttaaactaaaaaatggtagtcctatagaagctagagtaacttgggttaataatagaggtccaaatattaatagtaatcaaattggcgtcgaacaaaatttagaagcagatattttatttgacggagaatctacgccaatacgtaaaagtacttcctataaaatagtcaaatctcaacctaaaaggatttttgaaacaacaataaatggacaatttgtttttcgtccagataatgctgattatgctggttcatatgtgcaaccattcaatcattcatggacacaaggtatgaactttgaatggggagacaacctaggaacaccaagttcaagaactcctggggcatttactcgagttgcaacagtcatttatcctaatggcgaaagagaaaatgtgaatgtactttacgaagttaaacctaacaaaccagtcatagatagtaatagcgttatttatagaggcggattaactcatcagcaaattttagttagaaacgtaccaaataatgctaatgtatctctataccaatctaatggttcaattattcaaaatacaacgcaaacagtagattctaatggtgtggctactgtaactattcaaggcatattacctacaggtaatataacagcaaaagtttcaattactgaaaataatttaacttacgcaaaagtcactagtaatggtgtaaataatgtgactgagaatattactgttacctctgatgctagtaatcctgttaatgttacagaaggtatgcatgctaaaaatggtggtattaaatttgtaaaaggttctaatttcaattttaataactttaataactttataagtaatgctccatcaggttcacagttctcttgggtcgacagtcctgacacttggaaaaatactatcggagaatcagaaaaagttataaatgtcactttacctaatcatcaaggtacacgaacagttaatattccagtaatggtttatccaacagtatctgctgttacaccaaatagagataaatttggcattgatttaagtcgaggaactgatgtaaacaactatataatttttgaaggtaataatagatatggagcaacaacttcttggaaggataatcgccaaccagacaaaaatgttgcaggtatacaaaacttaactgctttaattcattatccaggtattgacacaccagtagaagtaccagtaaaagtatgggtgtataaatttgactttgctaattcagtatataaaattcaaatcggccaaaccttccctggaggtacttgggttaaaaaatatgtacatttagaaaatggagacgacttacctacaaacggctttttatattactggaaccctaaaactacaggttcaaataattcacaatggcaaagtttagcttatactagtcaaacgtttgtaaagacaggtacttacgatgtattagatgctaatggttacccttggcaagaatcacaacctggtacattcatagtaacgagtgctcagcctaacaatgcaattatcactgaatctaattcaggagaagttaccataactccaggtgcagtgagagaagtaccaattgaaggcacaacttctcacactcaatcgattgcagataagattgtaattaataaaaacggccacaaactaacaacatttattaaaaataatgaaggtcgatggattgttcaaaatggtgagccaaatgtaagaggagtattggctagcgataatggtagttcaatattaataaatagacctgctatcgcgacaggagacacacttcaagcattagctactgaaggatctggggaaactattagtccaatagcagagagcgggttattcactgtaaaagctcctcagccagagcaagcaagtgctaaagtatgggaaaacggtacatttgaaataacaccagataatagagctcattctaataatccaactgctaaagtagaagttacttatacagaaaaattagaaaatagccatgagttatctaaatcatttacagttactcataataataatggcacttggtcaattactaacaaacctagctatgtttccttcaatcaaagcaacggaataattattttcaatgctaatagcattaaacctgaatcacaagtaacaattatctctagagcaggaagcggaaacactgagagcagcagtactaacacagtagctgcacctccacttcacaccgtagttattaatgaaatcattaaagaacaaggtcaaaatgtaagtaatgaggatgtgaataatgctgttcaagtagccaataaacgtaatgcagtaattaaaaggggtgcaacacttcccactcaccttgcaggaggaagtacaactcaaatacctgtaaccattaactataatgatggtagtacgcaagagatcacagaaactattagaacaaaagttaataaaactgaattaattaatgctcgtaatcacttagatgatactatcagtaaagaaaataaaacaccggctagtattagaaactttgaccaagctatggctcgagctcaagctcaaattaatcaagctaaaaatgaagctgataaagttattaatacagaatttgcaacacctcaacaagtaaataacgctttgagccaagttaaagcagcacaagcaaagattaatgaagctaaaagtttactacaaaatagagctgataatagtcaattagtaagagctaaagatcatttacaacaagttttacaaccagctgcctctacgaatggaatgactcaacaaagtgctcaaaattataatgctaaacgtcaagcagctgaacaagcgatccaaaatgctgctaatgtaattaataatggggatgcaactgctcaacaaattactgaagctaaaaatagagttgaccaagccgaaagagagtatacagaagctaaaaataatttaagagcagataaaactcaattagaaacagcttataatcacttaaatcaacaagtaaacttaacagataaaacaccgtcttctgttacaagatataaacaagccttagaaggttttaaaaatgaattaaacgctgcaaaatctgaagctagtggtgtacttaacaataacaatcctacagtctcacaagttaaaaacgctttggataaagttaatgctgttcaaacaaaagttaatcaagctgaagctttattacaaaataaagagaataattctgcacttgtaaatgctaaacaacaattgcaaaatgccgtaaatcaagttccttctactacaggaatgacttaa

SEQ ID NO: 460 - DNA, 2430 bp, Staphylococcus capitis
ttgagagctaataaagaagaattacaaagcgcttataatcaattaattcaaccggcagatactaataataaaaaacctgcttcaatagaagcttataataataaatttaatcagtttaaaaatgaatataataatgtaaaagcacaggcagataatgttctcaaagctagtaacccaagcgtagcagatgtaagaaacgcattaagtaaagttagagaaatgcaaactaaagttaatgaagcaaaagctttattacaaaataaagaaaacaatactgcattagttcaagctaaacagcaattacaaaatgccgtaaatcaagttccttcaactacaggaatgactcaacaaactgtagacatttataacgctaaacaagcagcagctcgttcagaactcaataatgctcaacatgtaatagatgatggtaatgctagtgctcaacaaattgctgcagaaaaaactaaagtcgatcaagcgttacaagctttaaataatgcaaaagatggtttaagagccgataaatctcaattgcaaactgcttacaacaaattaactgaacatattagcacagagggtaaaacaccagctagtattcataaatacaatgatgctattgctaaaattcgatcacaaattgattctgctaaaaatgaggcaaaacaagtattagatagcagtaacccaacagtttcgcaagttaatgatgctttaaataaaattaaagctgttcaacctaaaataactagtgccaataacttgctagaaaataaagcagataatagtgaattagtttctgctaaaaatcaactacaacgaacattacaaacaactgtatcaactgatggtatgacagcacaaagtactcaaaacttcaataataaacatcaagcagctgaacaagcgattcaaaatgccactaatgttattaataatggggatgctactgctcaacaaattactgaagctaaaaatagagttaaccaagccgaaagagagtatacagaagctaaaaataatttaagagcagataaaactcaattagaaaatgcttataatcatttaaatcaatcagttaacttaacagataaaaaaccatcgtcagttgaaagatatgaacgagaattaaatagctttaaaaatgaactagacagtgctaaagctgaggcaaatagtgtaattaataataataatccttcagttgaacaagttagaaatgcacttaataaggttaatgcagtccaaacaaaagtaaatcaagctgaagctttattgcaacctaaagaaaataattctgcacttgtaaatgcaaaacaactactagaaaacgctataaaccaagtcccttcaacagaaggtatgactgagcagtcaatagctaattacaatgccaaaaaacaagcggcacaaactgaacttcaaaaagctgatcaagtaattgcaaacggcgatgcatcagccagtgaaatttctaatgaaaaaacaaaagttgaagaggctactacagctttaaataaagccaaaaatgatttgagagctgataaatctcaattacaagctgcttataatgaattaacaaaacctgttaatacttctgataaaacaccagctagtattaaagaatataataaagcgatagcacaaattaattcacaaataaacaatgctaaaagtgaagctaattcagtacttcagaatgataaccctacagttaatactgtcaaggaagctcttagaaaaatccaagctattcaacctgaagttactaaagcagtcaacttattacatcaaaaagcagacaatagcgaactagttaacgctaaacaacgattacaacaagctgttgattcaactccttcaactactggaatgactcaacaatctgttcaaaattacaatgccaaaaaacaagcggcacaagctgaacttcaaacagctgagcaagtaattactaacggtgatgctactgctcaacaaatttcagctgaaaaggataaagttgaacaagctttacaagcattgaatagtgctaaaaatgatttgagagctgataagtcagaacttcaaaccgcttacaatacattaactgaacaagttagtactgagggtaaaacgcctgcaagcattaaaaagtatcaagacgctaaagctaagattcaaaatcagattaatgcagctcaaaatgaagctaaacaaattttagataacagtaacccaaccgtttcgcaagttaataacgcattaaacaacattaaagctgttcaacccaagttagacagtgcaatacatttactagaaaacaaggctaacaataacgaattagttactgctagaaatcaattacaggaagcgattaataatcaacctagcactacaggtatgactcaagactctattaataattacaatgctaaaaaagctgatgcataa

SEQ ID NO: 461 - DNA, 5496 bp, Staphylococcus capitis
ttgaatagtgctaaaaatgatttgagagctgataagtcagaacttcaaaccgcttacaatacattaactgaacaagttagtactgagggtaaaacgcctgcaagcattaaaaagtatcaagacgctaaagctaagattcaaaatcagattaatgcagctcaaaatgaagctaaacaaattttagataacagtaacccaaccgtttcgcaagttaataacgcattaaacaacattaaagctgttcaacccaagttagacagtgcaattcatttattagaaaacaaggctaacaataacgaattagttactgctaaaaatcaattacaagcagctttaaatcaacctgatccaacacatggtatgactcctcaaacaattacaaattacaatgccaaaaaacaagcggcacaagctgaacttcaaaaagctgatcaagtaattaataatggcgatgctactgctcaacaaattgcggatgaaaaatctaaagttaatcaagcattgcaagcacttaatgatgctaagcaacatttaactgctgatacaagtaaattacaaaatgcattgaatggattgaatagaacaggtgatactaacaataaaaaaccaaatagtattgaatcttataataaagcgatgcaagcattacaatctcaaattactgctgctaaaaataatgcaaatacagtaattcaaaaggctattcgcactgtaaatgaagtggatcaagctttacaagaagtaaatcaagttaaccaacaattaactgaagcgattaataaacttcaacctttagcaaataatgaagcactgaaagtagcgagaactaaacttgaagataaaataaatgaaattattcatacggaaggtatgacgcaacagtctgtaaatgcttatcaacatgccaaacaagaagctcaagctgagtcaaatttagctcaagctttaattaataatggtaatgctactgatcaagagatttcaacagaaatagaaaaagtaaaccaaaaacttgataatttatcatcagcgataaatggtttaactgttaataaagaacctctagaatcagcaaaacaacaattacaaaacaatattgattctgcccctagtactgtgggtatgacaaagcagtctgttcaagtctacaatcaaaaactgcaagcggctaaagatgaaatcaatactattaataacgtacttgctaacaaccctaatgttgaagctattaatactaataaagcgaccgcagagcgaattaataatgaattaactcaagctaaacaagcgctcaaagttgatatacaacctttaaaaacagctatgaaaaatattcaaacagcaattgacgcaggtactaacactgacggtatgacatccgactcagttgaagattttaatgattcgttgagtgaagcacttagtgaaaaaacaaaaatcaataaattaacaagacacccagatactctaacagtagaacaagtcaaccaagcagtggcagatgctaatcaagtcattaagaatctaaatcacgctcgcgattctttaatacctgacaaagatccactcgaaatagctaagcaagcacttgaaaatagcatcactcagcaaactgatacagagggcatgactacactatctttacaaaactataatgaaaaattagaagccgctaaacaagaattaaataaagataaaggtatattaagcggaagtcctacagtagcagagattagagcagccgcacgtgagacaagtaaaattcaacaggctttagataacgcaagatcccgattagttttagatagacagccatttattacacatatcaatggtgaaggaaatcttaactcaccacaaaaagagaactttattcaacaaattaatagcgctggtaattatcgtgacttaaaagctattcaaaataacgctgacatattaaatcaagctatgaaaactttagctgacagcatttctaattatcaaaatgttaaacaaactgaaaattatatcgatgcatcaaatgataaacgtctagcttatgatgacgctgttaattcagctaatgagattttaaatcaaactcataacccaacaatgagtagtgatgtagtaaatcaaaaagctcaaatggtacaacaaactaaagacgcgttagacggtcaacaaagattagctgaagctaaagaacaagctattaatcatctaagtgatttacatgatttgaataatgctcaacgccaagctttaactgatcaaattaatcattcagataacataacatcagttaatcaaattaaaggcaatgcaaatgccgttaatacagcaatgactggattaaaacaaagtgtcgcagacaacgatagtgaaattcaacaaggcaactatataaatgcggataaagataaacaagacgcttataatagtgcagttaatcaagctaaacaaatcattaatgaatccaataaaattaatgctcaactaaaccctagtgagataagtaaaattactgaaaaagttaactcaactaaaaatgatttgaacggtaataataaactagctgaagctaaaactaatgctaagaatgcaattgatggtttaacatatttgaatgatgcacaacgtgctaaagctaaagagaatgttgagcatgctactactagatcaaatattactagccaattacaagactacgctaacttgaataatgctatgaaatcgttacgcgagagcgtaaataatgttaatcatattaaagcaagtagtaattatatcaacgaagataatgaacctaaagaagcatataaccaagctgtaacaaatgctcagacattaataaatgcatcaagcaatcctgttatgagcgtaaacactgtaaatgaaaaagctcaagctgtgactacagctcaaaataatttacatggtcaacaaaaattacaagaagcacaacataatgcagacactgaaatagataatttaactcacttaacaccagcacaaaaatcagctgaaaaagcattaatcaataacaaaaacactcgcacagaagttcaaacacaacttgatgatgctaaaactttagatagttcaatgggctctttaaaatcattagttaatgatcaaagtcaagttcaatcaacaagtaactatattaatgaagatcaacctcagaaaactgcctataacaacgctattactgagggacaaactatcattgataaaacttctgatccaatattaaataacaatactgttatacaagcaataaataatattaatactaagaaatcagaacttcatggtgaacaaaaattagaagctgataaaactagtgcaaataattctttaaataaattatctaatttaaacacacctcaaaaagaggctattaaaggcgtaatagatagctctaatacacgaactaagatatcatcagagttggaaaaagctaaaactataaacaatgcaatgcatacgctaagacaaaacattactgataacgctaatgtaccgactcaaagtaattacattaatgctgaaccagataaacaacaagcttatacagatgctattaatacagctaaaggtattattgatgaaaaacaagcgactttagatccaaatattattaatcaaaaagcacaagctattataactaccaaaaatgccttagatggtgaagctcagcttcgtaaagctaaagaagatgcggataatacgataaattcattaaatcaacttacaaatgctcagagaactaaagaaaaagaattgattaatggagttcaaacaagaccagaagttgcatcacaattaagtaaagctaaagaacttaataaagtgatggaacaacttaataatcttataaatgataagaataatgttttaagtagtagtaagtatataaatgaagatacagctcaacaaaacgcttatacttctaccatagcgaatgctgaagcaattaaagataaaactcagcaccctgaattagataaaaattcaattcaacaagctattaatcaaattaattcagcgattaataacttaaatggagaaactaaattagctaaagctaaacaagatgctcaagcaacaattaacaatctcaatggtttaactaatgcccaaaaatccaatgaaaataacactataagttcagctaaaactagagaccaagtttctagcactttaagtgaagctcaagcattagatcaatctatgaaaactttgcgtaatttggtcaacgctaaggatcaagttcaccattcaagtgactatattaatgaagatacagctcaacaaaatgcttataataatgcaattgataatggcgaagacattattagcggtcaacaaaatccaattatgaataaaacaacaattgaccaagctattaatcaaatcaataacgctaaaaatgctttacatggtgctaataaattacaacaagctaaaaatgaagctaatcaaactatcaatcaattaggttatttaaatgatcctcaaaaaactggagaagaggctcttgtaaatagttcaactactagaactgacgttgcaaatcaacttaacgaagctaaagctttgaataactcaatgaaacagttgagagataaagttgccgaaagtactagagtaaaacaaagtagtgattatattaatgagactcctgaacataaaagcgcatacgatcaagcgcttcaacaagcacaatcaatcattaatgaaagtagtaagcctactttagataaaacagtaattgaacaaaaagttcaaaacttaactaatgctcaaaatgcattacatggagcacgtcttcttgacaatgctaaaaataatgctattagtgaaattaataaactctcaggattaaacgatgcacaacgtcaaaaagcaatccaaaatattcaagcacaaaccacaattccagatgttaaccaacaattaactactgataaagaattaaataatgctatgaaattgttaagagatgctgttaatcaacaaaatcaagttcatcaacaaagtaactatttcaatgaagatcaacaacctaaaaataattacgatgcagcaattcgagctggacaaaacattattaataaaacacacgatccagtaatgaataaaagtgaaattgaacaagcaactaaccaaatcaacacaactaaaaatgcattagatggtgaaaataaattacacactgatcaacaaaatgctaatagggagatagagggattaacgagcttaaatcctcaacaaataagtgctgaaaagaatcaagtaaatcaagcaacaacaagaactgacgttgcacaagatttagcatctgctaaagcgttaaatgatgcaatgaaagccttaagagatggtattaacaataaagatgaagtaagacatagtagtgcttatatcaatgctgatcctacaaagatctccgcctacgaccaagctctacaaaatgctgaaaacatcattaacgccgcaccttaa

SEQ ID NO: 462 - DNA, 13092 bp, Staphylococcus capitis
atgaaagctttaagagatagcattcaaaatacaaaccaagtcaaacaaggtagtaattatatcaatgaagatccaactcaacaacgtgattataataatgcagttaataatgctgaaagtactattaataacaatactcatccagtcttagataaagcagaaatagaacaattaactcacactgttaataatacggaaaatgctttacacggtattcaaaaactcaaaaaagagcaacaatcagcagaaactgagataagtggtttaacgagtcttaatgacccacaaaaaactgcggaaattgcaaaagttaaagctgcaacaactcgtacagaggttaatcaattacttgaatcttcaaaaactttaaatactgctatgcatggtttaagagaaagcataaaagataaagcagagattaaaaatagtagtaagtatataaacgaagatcaacctgaacaacaagcatatgataacgctgttaccaatgcacaacaggttatcgatgaaactcaagcaacattagatacaaacactattaataatttaactaacgccgttacacgagctgagtcgaatttgcatggtgatactaagttacaacaagataaagatcgtgctaaacaagctatctctcaattaccaaatctcaatgatgctcagaaacacatggaagattcaataatagatagtcaagatacacgtacgaatgtgaatcaaaatataacagcagctcaagaattaaatggtttaatgggtgctttaaaagagagtattaaagataatgccacaattatttcaaatggtaactacattaatgctgaaccaacaaaaaaacaagcatatgatcaagctgttcagcatgctaaagacatcattaatggtacaaatcaaccaactattaataaagacgatgtttcaagagcaacacaaacagtaaataataccaaagttgcattagatggtgatcatagattagaagaagctcaaaatactgcgaatcaaaccataactaacttaactaatttaaataacgctcaaaaaactgctgagaaacaattagttaatcaatcacctacacttgagcaagttcaacaaaacttgcaaactgctcaagatttagatcgtgctatgggagctttaagacaaagtatcgctaaccaagatcaagttaaatccgaaagcaaatatttaaatgaagatccaactgtaaaagcaaattatgatcaagctgttcaacgtgctgaagatattattaatgcgactcaaaatccagaactcaataaaggcactatagaacaagctactcaggctgtacaaaatgctgaacaagcccttcatggagtagaaaaattaaatcaagataaaactactgcttcaaaagagctaaataatttgactaacttaacagatgcccaacgtgagaaacttaaagaattaattaaccattctgatagtagagatgatatcaaacaagaacttgaacaagctaagcaacttaataacgcaatggaacaacttaaaaatcaagttgcccttaaggatagcgttcattcaagtagtaactatttcaatgaagattctgctcaaaaacaagcatatgacgacgcgattaaacatgctgaagacattatcaaaaatactaataatccaaatatcaatccacaagatatcattaaagcattaaataatattaaaacagcaacagataatttacatggtgagcaacgtctacaaaatgaaaaagacacttctaataattcaattgatcatatgacgcatcttaatcaaccacaaaaagatgctttaaaacaagctatcgatggcgctacaactagagagcaagtagcagaaaaacttaaagaagcgaaagcactggataatgccatgaaacaacttgaagatcaagttaatcaagatccagcaattacatctagtagtaagtttgagaatgaagatacagaacaacaaaaagcatataacaacgctataaacgctgctaaagatattatcaatcaaacttctaatccaacattagataaaaataaaattgatgatgcgcttcacaacatccagaatgctgttaatcatttacatggcgagcaaaaattagaacaagctaaacaagaagcaaatgatcaattaaatcatttaaatgatttaactaatgaacaaaaagctcactttaaaccattaattgataacgctgatactagagccgaagttaaaaaacaactagatattgctaaacaattaaatagtgatatgtcagacattaaagatcaaattgcaaaacaaagcatagtacatcaatcaggtaattatgttaatgctgacgatgctactaaacaggcttatgataatgctattaaagaagctaaagaattaatagataatcatcctgatacattagatcatcttaaacttcaaaaattgattaataaaattgatgatgctcaaaacgcattaaatggtcaatcaagatttgacgctgctcaaaaagaggcactcaaagaacttggtacattaaatagccttaatcaaccgcaacgtaaaaaacttgaagataatttaaacaatgcaacgacattagatggattatctcaagaattacaaaaagctaaagagcttaataacgctatgaaggctatgagagttaatattaaggatcaagatcaagtacgacaaagtagtgattatacaaatgcagattctactcaacaacacgcttatgataatgctgttaataatatcaacaatattattactgaaactaatgcgactatggatcctcaaagtgttaatcaagctactcaagcattagagaacgcaaaacatgctttaaatggagctcaaaaacttcaagacgataaaaataatgctaaacaagaaattggaaacttaacaggtttaactgattctcaaaaacacgccttagatgaagctatagatcagttaacacatagaactgagataagtaaaaaattaaaagaagctaaattccttaataatgaaatggaagaattaaaagcagctgtcgcaaaagcttctaatattagacaaactagtgactatatcaacgaggatacacctcaaaaagaagcttatgataatgctattaaaaaaggacaagcaattattgatgcacataacgatccaacaatgaatggaagtgacattagtaatgttattcaacaaattaatagcgctgaacatggattacatggagaacaaaaattacaacaagccaaaaacaacgcaataaatgatgtttatggtttgaataacttaaatcgtgctcaaactgccaaagaagttcaggatattcaagcatctgaaactagaacagctgtggaacatcaattagaacaagctaaagttttaaatcaagcaatgaaagaattgaaacaaagtattgccgacaaaaacgatacgcttaactctagtaactacattaacgaagatccagataagaaaatagcttatgataatgctttgagtaatgctgaacatttgttaaatcaacaaaatgatccaacgatggatccaagagaaattaatgctgctgctcaaaaagtaaaagaaactaaagatgcattacatggtgcagataaattaactcaaagccaaaatgaatctaatgaaactataaatcatttaccgaacttaaatgataaacaaaaacaagctctaaataatttaattaatcaagctacaactaaacaaaaagtagcagaaattgttaaccaagcaaatgaacttaatagcgaaatgggcaaactcaaatcattagttgaacaacaacctagcgttcataagcaaagcaattatttgaatgaagaccctgaaattcaaagaatatatgataaagctattcaaagcggacaagacatcatcagtggaaatactactgatgtattaagtaaaaatgatattagtaatgctattcaaaatatagaactagcaaaaggcgatcttcatggagaacaaaaattacaaaaagctcaacaagatgctaataacgaaatagatcaattaagaaacttgaatgaccctcaaagacaagcagagcacaaagaaattaatagtgcaccttcaagaacagaagttcaaagtgatttaaataacgctaaagcattaaatgaagcgatgcatcagttagagaacgaagttcatctagagaatagcattaaacaatcaagtaactatattaatgaagacccagcctctcaaaatgcttataatgatgctttacaaaaagcgaagaatatcattaatgcagtacctgataaaactttagataaaactacaattgagcaagcattaaatcaattacaaagtgcaagtgaagctttacatggtgaacaaaaactacaagaatcgaaagatcaagctaatagtcaaattgatcgattagaatcacttaatcctggacaagtattagcagaaaaaacattagttaatcaatctcaaactatacctggtgttcaagaggcacttcaaaaagcaaaagaacttaatgaagccatgaaatctcttagagctgaagtagataaagaaaatcaagtcaaaacagaaagtaaatacattaatgctgatcacactaatcaagttaactatgattctgccatcaaccaaggtactcaaattattacaacgtcacaaccaccagagcttaacaaagatgtaattaataaaacgactcagactatcattaatgctcaaaacaacttaaatggggaagctaagttaactgaagctaaaacaactggtaatcaagctattgataaattagatggactaacagaggctcaaaagaataaagaacgtgaattgattaatcaagcgtcaactaaagcacaagtgaataacatcattaatgacgctaatcaattaaatgactcaatgaaacaattgcaacaagctatcaacaacgctagtaacgttaaacaaagtagtgattatattaatgaagatcctactcaaaaaaatgcctacgataaagcaattcaagctgctaaagatttaatcaatgctcaacctcctactatggacaaaggagaaatagataaagctttagcaaatgttaatcaagcacttaataatttacatggtagcgataaattgcttgaagcccaaaaagaggcctcatcacaattaaacaactttaacaatttgactaacggtcaacatggcaagctagttgatgacattttcaatgcaccgactagaactcaagttgctcaagtattggaaaatgcaaaacaacttaacaacacaatgaaagcactgagagattcaattgctgataatgaacaagttcttcatagtagcaaatatattaatgaagaccctgaacaacaagcagcttataatcaagcggtaacaaaagctaagaacattatcaacgacaatcctgaccctacattatccaatagtgatgttcaaaatattgtaaatgaagttactcaagctaaagacaatttacatggagatcaaaaacttgcgactgataagacaaatgcaaaagatactttagatcatttaacgcatttaaaccatgcgcaaagacaagaacttgatgaagaaattcgtgatgcaactacgagacctggtgttcaaagtgtagctaaattagccaaccaacttaacgatgcgatgaaaaaattagaagacgcattagctggcaatgaaactgtaaaacaaactagtaattacattaatgaagatacagctcaaaaaggaaactatgataactatgtaaaccaagctaaacaaattgtagatcaacaagacaaccctaatatgtctccagaaaatattaatgaagttactcaaaaactagacgctgctaaaaatgatcttcatggagaacaaaaattagaacaagataaacaacaagcaactgaacatattaatcaaatgaagagcttgaaccaagctcaaaaagacgagctaaatcatgaaattcaacaagcccaaacacgaccagacatcgttgctacagttaataaagctaaaccattagatacagcaatgaaaaaattaagagacagtattgctgatgctaatgatattaaacaaacaagcaattacatcaatgaagtaccaagtattcaaaatgcttatgacaatgctgtagatcatgctcaacaaattattaatcaaacttctaatccaactatggatcctttagtaatagagcgtgatacttcaaatgttcaaacaactaagaataaccttcacggcgaacgtgtacttaatgatgataaacgcacacaaacatatgcagtaaatcatttagataatcttaaccaagctcaaaaagaagctttaacacatgaaatacaacaagcaactagagtttctgatgttaataatgtctacaacaaagctagagctttagattccgaaatgcaaaaacttaaagacattgtgggacaacaagatagcgtaagaaaaactagcaattatgttaatgaagatagtacagcgcaacaagcgtataacgatgctattgcacagggccaagcaatcattgatcaaacgacacaacctactatgtcaaatgacgaaatcgaaaatacgattaataaaataaaacaaaaagttactgctcttgagggagaacataaattacaagtagctaaagaaaatgccaataacgttatcgatagcttaagtaatttaaacactcctcagaaaattgctgaaaaagcacttattaataaagctacaaccagagataacgttactcagcaaatgcatattgcacaagaacttaatgatgcaatgggtaaactaagaaacagtattcaagatcaagcgactgtaagacaagaaagtagatacatcaatgaaaacgaagataaacaacaagcttataatcatgcagtaactgatgcagaaagtgttatcaatgagcacaatccaacattaaataaagacacaattgaacagttgactcaacaagttaatcaggctaaagatgccttaaatggtgtaaaattactaaacggagataaacaaactgctcatcaaactatttctacattgaatcatttaaacacagctcaacaacaagcatttaatgaacaaattgacaatgcaccaactagagctgaggttcaacaaatcataggacaagcagatgttttaaataacatgatgaaagctttggaaaatagtatcaaagataaagatcaagttaaaaattctagtgattatattaatgaagaccctgccgaacaacaggcgtatgataatgctgtcacaaacgtagagaatatattgcatcaaacgactcaaccaacaatgtctgttagcgacatccaaagtgccattgataatgttcgaaatgtgaaaaataaccttcatggcttaaataaacttaacattgccaaagacgaagctgctaaacaattacgtaaattatcaagtttaacttcacctcaaagtggcgacattgctaaacaaatctatggcgcagatacaagagctgaagtgactcaagctctagataaagcgcaagcattaaataaagctatgaatgcacttaacaatgtcttcgatcaaagtacaaatgtcttgaatagtagccaatttattaatgaagatcaacctgaacaagatgcttataaacaagcacttcaaaacatagaaaaagttatttatagacaggacaaccctgaaatggatccaactgtaataaataacttaacgcatggacttgaagctgctcaaagcaacctacacggtgatcaaaaacttgcccaagcaaaacaagatgctgcaaacacaattaatggtttaactcatcttaatacagcacaacgcgaacaaatcatcaacaaaaatactaattctaaaactcgtagtgaagtagcagaaaacttaaataacgcgcaagcacttgatcaagcaatgaaatctttagaaaatgtcgtagctgaaagtaataatgtgaaaaatagtagtaagtacttaaacgaggattctaaattccaagaccagtatgatcaaaaagtaacagaagctaaagatttgattaatcaaactactaatccaacattagaacctaataaagttgatattataaaaaatagagtattggctgctgagaacaatctacttggcgctgaaaaattagcctacgataaagctaaagcacaatatgacattgatgatatgaaaaaccttaatgacgcacaaaaacaatcaattgttaaagcgattaaaaatgcgcctttaagaacagaagtaaaacaattgctccaacaagctaaagatcttgataacgacatgaaagctcttaaggataaaacccaacaagtgattatagataaagcgtcacctaactatactgagtcttcagatgatagaaaagaaacacttaatcaatcacttaataatgcagaagctataattaataaaactaatggtacagatgctaataaagaacaagtagagcaagttctaaatcaacttaatcaagcttctgaaaaccttaatggtgatcaacgtgtgcaagaagctaaaactgacgcaaataatactatcgatcaacttaaatatttaaatacgagtcaacaacaaacagccaaagataacgttcaacatgctactaaacttgatgaaatagcaactgctaaagcaaatgcccaagctctaaataaagcaatgggacaattaaaacaatttatcgatgatgctgattctgttgagcatggagataattatcgtcaagcagatgatgatagaatcacagcatatgatgatgctttagaacacgctcaaaacgtaattaaaacaaatgcaacacaacaagaaatagaagaagcaattcatcaaattagccacgctaaaaatgacttaaatggtatcgctagattagtggaggctagacctaaagctttagcttacattaattcattagataaaattaatgatgctcaaagaaccgctttagtagataagatcaatcaatctcatgatttgattgaaattaatcacatcgttgatgatggaacaaacttaaatgacatcatgcacgagttagctcaatcaattatcgataactatgcaccaactaaggcgagcatcaactatattaatgcagatacacaattaagagataactttaaacaagcgattaacaatgctagaaatgttcttaataaaactaaaggtcaaaacctagatttcgaagctgttgacgcacttaaagatgcaatttcagaaactaaagactctttaaatggtattgaacgtttgaaagctgcaaaactgaaagcagataaatttatagaaggtttaaatcacattaataaagctcaattaactcatgcactcaaagatgtagcaagtacagattcattaactaaattatctcgtctaattaacaaatctatgaacttagacgacgctatgaatgcattaaaagatagcttaatcaataatgctgcacctgttcaagcgagctcaaattatattaatgctgataacgatcttaaaaatcaatttgatgaagcattaaataacgctagaaaagccctagccaaatcaacaggtaaagacttagatgaaaatcaagtagacggtttaaaacaagcaattatagatacgaaagatgctctcaacggggaagaacgtcttgctaaagctaaagctaaagcacaagaatacgttcaaacattatcaaatttaaataatgctcaacgtaaagttgctgaaaatagtatcactaattcagaagatcttaattcactagctgaatcaatctcgaaagttactgaattaaataaagctatggaagatttacacaatgctttaataagtaatgcaacacctgttcatgcgagtgttaactacatcaatgcagacgaggatttacaaaatcaatttgatcaagcgcttcaacaagcaagaaatacattgtctaaagctacaggtaaacctgcttcaattgaagaagttcaaggcttaattcagtctattaaagatactaaagatgcattaaatggtgatcaacgtcttgctaaagctaaatttaaagctgagatatttattaatcaattaaaagatttaaataatgctcaacgtgtagactcaattaaacaagcaaatgatactgataatctaaaagatttatcgcaaatcgtttctactgcatcagatttaaataatgctatgtcagaattaaaagccaaattaaaagaaacagttaatcctgttaaatcaagcatcaattacattaatgccgactatgatttaaaacgtcaatttaataaagcaattaaagacactagagaagcattaagtaaaactaaaggcgccaacctcaacgaaagatatattcaaggattatctcaagcaattgatagcactaaagatgcattaaatggtgaacaacgtcttgccgaagctaaagagaaatctaaacaatttataaaacaacttgatactcttaataatgctcaaaacaattatttaacaaatgagattaataaatctgataatattaaagatataacaaacatagtagataatgcttcaagtctaaatgatgcaatgaaagaccttagagataccgttgcacaattaaaccaatctaataaagatagtattaattatcaaaatgcagacgaagatttaaaattacaatttgataatgcgataaatatagctaataatgttttaaacaaaaaagatggcgacaacttagatatcactgttattgaaggtatgactcaagcgattaaagatgctaaagacgcacttaatggtgaacaacgccttaaaaatgctcaacaagctgcacataaagctattgacgatgcacttaaacatcaacttgatgaaatcaatcatgctaatgctacagatgaatcaaaagcacaagctattaaatctgtagagaatgcagctaaacatgctaatgctgatattgatcatgcaagttctaatacaggcgtttataacgctgaaaatgaaggaacaacagctattaaacatacgcatgctgatgaattaccaaaagctaaaattgatgctaataatgatatcgatcaaaaattaaaaggtttattgaataatattgatcaaaaccctaatttatctaatcaagaaaaagagaaactcaaagatgatttaaatcatgcaatcgagaacattaaaaacgagattgatcgtgctactaataaacaagctgttgcagatgaaaaagctaaagcagatcaattaatgaaaggtactcaagatatcatatctgcaaaagaacaagctaaacaatcaattaaagatttagcacaacgtaagcgagatgcaatcaataacaatcctgatttgactgaccagcaaaaagcacacgcacttgctgaaatcaataaagcggaaaaagaggctattaaacaaatagagaactctaattctgtagatcaaattaacaaagttaaagatgatagtcttaaccacattgcgaaaattgtaatatgggatactgatcaacagccatcaatacttcatcgtcctgatttaagcatacaagatgcgttagttacaggaaaagtcatcgtgcatagaggtgctacgattacacttagtgaaattgaaagtgccatgactttagctgatggtcttaaagttagaatcatttcattacctaacacagataaagttgcagataacctaactgcgaaagttgaagtgactcttgcgaacgatacatcagttattgtcgatgtccctgtagatgttattgaaaaagaacttcaagttgcaaaagatgaagcatcacaacaaattgatcaagctactaaacaaaagttagatgaaattgataatgataaaattttaaccgaacagcaaaaagaacaagctaaagctgaagttcaaaaacttaaagatcaagctattgataaaattaacaattcaactaatgtaaaagatgttgaaaataatcaaaataaagatttaaatgatattaatcattttgatcctagacaatttacattggacaaagctaaagaagctaataaagctgaagttaataaacttacacaagaaggtgtacaagaaattaaacatatttctgatttatcacctgaagaacaagctcaattcaatcatcaactaaaagatcttgaatctaaagtttataacatgattaaaaatgcaaaaaatctagacgaactcaaacgcattctcaaagatttcaaagcgcaacgcgatcacatcattgcacaagctcatttattcggtgaaaaacataaagctgaacgtagactcaataacgttgttaataatagaactcaacaaattattaatgatatgtcagcaagtcaataccaaagacaattggcaatcaatcgtattagacaaatagaattagatactatgaatgcaattcatcgtgctaaatcaatcaaagaagtccaagacgcgttactgaatggtattcgtaaaatcatggaagtaggtttagaaggttcatttgattcaatttccaatcaacaacgcgctgctaacaacgcttataaacaagacgtccgtctaagagaaaatgatgtaaaaagtcatataggtcaaacagaatcttacaaagaagtattaagtcactcaggtattaaatcaggtaagaataaacataaagaagatgatcctaaacatgttaaacatcatgataataatttcatcaatcgagttatcgatgactttggcaaagcagtaggcttcatcacactaactggtttactttcaggattctggctagcgcttgctaaaagacgtaaaaaagaagaggaaaaagaaaaactgaatgataagaaggatcttcatatttccgattctaaaaaagtagaaccattgattatagctaaacgaaaaaaagataaagaagaagaaactgttattgaagaagacaataaaaaagcaattcctgtagtgaaaaataaaagagaaaaagaggagaacaaacagatgagaagagagacatgttcttcgaaaaaagcaaaaacaaataaaactcaacgtccttcttcaaacactaagtcaaaaaagggtactactaaaaacaaaaagcgctcaaaaaagtaa

SEQ ID NO: 463 - DNA, 393 bp, Staphylococcus capitis
atggcaaaaatatactttgatgcggcaactaaaggtaatccgggtagaagtgcatgtgcagttgtaattaaagaagaatctgaacgtcacgtgtttactcatgatttaggagagttagataatcatagtgcggaatgggcagcaatgatttatgcgttagaacatgcaagagagctcaatgttagaaacgccctacttcatactgattcaaaattaattgaagatagtgttaatagtggtcgtgtaaaaaatgctaaatttaaaccttattatgataatatggaaattctcgaacaaagttttgatttaatgtttgttaaatgggttcctagagataaaaataaagaagcaaaccagcatgcgcaacaagctttatataaattgattaaataa

SEQ ID NO: 464 - DNA, 705 bp, Staphylococcus capitis
atgtttaatgagatttttggtgtagcttcgtttatagttacatttattttaatggttctcatgtatcgcttttttgggaagcatggtttaattgcatgggtagcaatgggaacaattatagctaatattcaagtcataaagacagttcatatatttggcatttcggcgacattagggaatgttatgttcgcctctatctatcttgctactgacatattgaatgatatttacggcagaaaagtagcaaaacgtgccgtttggttaggtttttcttcaacattagtaatgattatggtaatgcaaatgtctttacactttatacctgcacctgaagatactgctcaaggtgcgcttaaaacaatctttgatttagtgcctagaattgctttaggttcaatcgttgcatatattatcgggcaacatgtagatgtgtttatcttttctatgattaaaaagatttttagttcagataaaacgttcattatacgtgcttatggtagtacgattttaagttcaattatagatacagcattatttgttatcattgcatttgccggtactttacctaatatggctgtgttcgaaatatttataacaacttacctactaaaacttatttcaactatattcaatgtgcctttcggttacattgctaaatctttctatcgcaaaggtaagattcaaaaacttgatgaaggctattaa

SEQ ID NO: 465 - DNA, 195 bp, Staphylococcus capitis
gtggaggctatactcacttattcagaacaaaaagcgattaataaaatcgacgagctcatgaacacttattgttaccaatgcccactaaaagcgcacaacagaaaaacgcaaggtaaaacacaagcgcatcatttttgcattaatgagtgttcagtaggtaaacaaatcaaacaaatagggaacgagctacaatag

SEQ ID NO: 466 - DNA, 255 bp, Staphylococcus capitis
atggaaatcgtagcaatttcagaaacaccaaatcacaacactatgaaaatttctttaagtgaaccacgtcaagataattcttcaacaacttatacttctgctaaagaagggcaaccagaattcattaatcggttattcgatatcgatggcgtcaaatctattttttatgtgatggacttcatctcagttgacaaagaagatgacgcaaactgggatgatttattaccacaaattcaagcagcttttaatcattaa

SEQ ID NO: 467 - DNA, 1113 bp, Staphylococcus capitis
atggagattgttcgtgtagaacctactcctagtcctaatacaatgaaaattgtattatctgaaaaaagagaagataatcaatccaatacttatactgaagtaagagaaaatcaaccacaatttattaacgatcttctcaaacttgaaggcgtaaaatccatcttttatgtgatggatttcctagcaatagacaaacaaccaaaggcctattgggaagacgtcttacctcaaatcacttcaacacttaataatgaatcaagctataatcaagaacctcaaccagacgaacattatggtgaagttcgtgcggaagttctaatgtttaaagggataccttatcaacttaagattacaacaaataaagatgaacaacgtaaacaattaccagaaatttatatcgataaaatgctagaagcccaaaaagaaaatgataatgtagtattcttgagaaaatgggaaaatttcggcattcgatatggtaatatggaagaagtaatggagagcgtttatgaagaagttatcgcactttatcccgaagaacgccttgattcgctagttaaagaagcacttgaaactgatattatagttccagaacaacattatcaacatgtcacattggatgagtatgattcagcacaagattggaaagcacgtctcagaatgcttaaggcatttccaacacctacatttgatgatatcccgttgttagaaacagcacttaatgaagagaaaatccctttaagacgtgaagctgttgtgctactagggatgattgaagatcctaaaattttaccttatatttatcaaggtcttcacgacaaaagtccagctgtaagaagaactgctggcgattgccttagtgacttaggtttcaaagaagctttaccagaaatggaaaaagcacttaatgaccctcaaaaaatcgtaagatggcgtgcagcgatgtttatttttgatgagggtaatgaggaacaattggcatcactaaaagcacatgcagatgattcagcgtatgaagtcaaacttcaaatagaaatggctatctccagaatagaaaatggagatgaggctttaggttcagtttggaaacaaattgctaatcggaaaagataa

SEQ ID NO: 468 - DNA, 438 bp, Staphylococcus capitis
atgaacggctatgagtcttatatgagagaattagcgcaacaaatgcgttctgaacttactgaaaatggttttaaaagtttagaaactagtgacgatgtgaagggttacatgaatgacttaaaagatgatgaaacaacattcgttgttattaattcaacatgtggttgtgcagcaggattagctagaccagctgctgtagcggttgctgaacaaaacgaagtgaaacccacaaataaagtaactgtttttgcaggtcaggataaagaagcaacacaaacaatgcgtgaatacatccaacaagtgccttctagtccttcatatgccttgtttaaagggcaaaacttagttcactttatccctcgtgaacatattgaaggcagagatattaacgatatcgcaatggatttaaaagacgcttttgatgaccattgccaataa

SEQ ID NO: 469 - DNA, 957 bp, Staphylococcus capitis
atgtataatccattcgacaaagcgtatcatagcttatgcgaagaggtattagaaataggtaatcaacgtgatgatcgtactcatactggtacaatttctaagtttggtcatcaattaagatttgatttatcaaaggggttccctttattaacaactaaaaaagtttcatttaaattagtagctacagaattgttgtggtttattaaaggtgatacaaacatccaatatttacttaaatataataataatatatggaacgagtgggccttcgaaaattacgttaattctgaagactatcaaggacctgacatgactaactttggacatcgttctcaagaagatccagaatttaatgagcaatataaagaagagatgaaaaaatttaaagaacgtattctaaatgatgatgaattcgctcgccaatatggtgatttaggtaatgtttacggaaaacagtggagagactgggaagataaagatggtaatcactacgatcagctaaaaacagtgattgagcaaattaaaacaaatcctaattctcgccgtcatattgtgtctgcgtggaatcctacagagattgagaccatggcgctaccaccatgtcacactatgttccaattttacgttcaagatggtaagttaagttgccaactttatcaacgtagtgctgacattttcttaggtgtacctttcaatattgcgagctacgccttacttactcatctcatcgcaaaagaatgtgaacttgaagtaggtgaatttgttcataccttcggagatgcacatatttattcaaaccatatgtcagctattgaaactcaactttctcgtgagagttacaaagcaccgactttacagataaattcagacaaatccattttcgatatcaactatgaagatttagaaattgtggattatgaatcacaccctgctatcaaagcacctatagcggtatag

SEQ ID NO: 470 - DNA, 486 bp, Staphylococcus capitis
atgactttatccatcctcgtcgcacatgataaacaaagagttatcggatatcaaaatcaattaccttggcaccttccaaatgatttaaaacacgttaaacaattatcaactgatcacacattggtaatgggtagaaaaactttcgaatctattgggaaacctttaccaaatagacgaaatgttgtattaacaaacaatccttcatttaaacacgaaggtgtcgatgtcattcattctattgaagaaattaatgatattcctggacaagtatttatttttggtggacaaacacttttcgaagaaatgatagataaagttgatgacatgtatatcactgttgtcgacggtaagttccaaggagatacattcttccctccttatacatttgaagattgggaagttgagagttctgttgaaggacaattagacgaaaaaaatactattccgcatacatttttacatttagtgcgcagaaatgaccaatag

SEQ ID NO: 471 - DNA, 840 bp, Staphylococcus capitis
atgactaaacaagttatcgtcacggattccacctctgatttatcacatgaatacttaaagaaacatgatattcacgttattcctttaagtatcactattgatggtaattcttatactgatcaagaagacatttcttctaaagaatatattgaatatatcgaggcagatgcagacgtcaaaacgagtcaaccgcccatcggtaaatttatagaaaaatatgaagagttaattaaagaagatgtagagattattagcatacatctatcttcaggtctgagtggtacttataatactgccgttcaagctagtcaaatggtaggcggtaaaattactgttatcgattctaaatcaatctcatatggcttaggttatcaaattgagcacatcgttgatttagttgaaaagggaacacctacaactgacattgttgaaagtgtcgacaaactacgcgataatattcaacttttcgtagtcatagggcaattgaatcaacttattaagggcggacgtattagtaaaactaaaggtttaatagggaatattatgaagattaaacccataggtacattaaatgagggaaaattagaacttgttcataatgctagaactcaaaaatctagcattcaatatttaaagaaagaaataactgaatttattgaaaatcataatgttaaatcaataggtgttgctcatgcgaatgtgattgaatttgttgataaactcaaaaagtcatttagcgatgcttttcattttgatcaatttgatgtcaacgtcacaactccagttatttcaactcacacaggtcaaggtgctattggtctagttgtacttagagattaa

SEQ ID NO: 472 - DNA, 528 bp, Staphylococcus capitis
atggcatatgcaacgcttgcaggaggttgtttctggtgtatggtaaaaccatttacttcttacccaggaataaaatctgtcgtttcaggatatagtggtggtcacgttgagaatcccacttatgaacaagtctgtacgaatcaaactggtcacgttgaagctgtacaaattgaatacgaccctgaaattacttccttcgaaaatatattagatgtttactttaaaacattcgaccccacagatgatggtggtcagttcttcgatagaggtgaaagttatcagccagtaatcttttatcatgatgatcatcagaaaaaggcagctgaattgaaaaaacaacaaattgatgagcaaggtatatttaataaacctgtcatcacaccaatcaaaccttataaaaacttctaccctgctgaagattatcaccaagactattatgagaaaaatccattgcactatgagcaataccaacgtggatctggcagaaaagcatttatagaatcacattgggggtctcaaaatgattaa

SEQ ID NO: 473 - DNA, 429 bp, Staphylococcus capitis
atgattaagaaaaataaagatgaattgaatgaaatggaatatcttgtcactcaagaaaatggcacagaaccaccattccaaaatgaatattggaatcattttgataagggtatttatgttgataaattatctggtaaacctttattcacatcagaagaaaaatttgaatctaactgtggttggccaagtttctccaaagcattaaatgatgatgaaatcattgaactcgttgataaatcttttggtatgataagaactgaagtacgttctgaagatgctaatagtcatttaggacatgtattcaatgacggtccgaaggaaaccggtggtctacgctattgtattaattcagcagctattcaatttattccatatgaaaagttagaagaacttggatatggtgatttaattccacactttgaaaaatag

SEQ ID NO: 474 - DNA, 501 bp, Staphylococcus capitis
atgtttaaaaaattattcggaaaaggcaaagaaatcaataaagatattaaaatatacgcaccgttaacaggtgaatatgtgaaaattgaagatattcctgaccctgtatttgcacaaaaaatgatgggtgagggttttggtataaatcctacagaaggtgaagtcgttgcaccaattgaaggcaaggtcgacaatgtcttcccaactaagcacgctgtaggacttaaagcagacaatggattagaactactcgtacacattggtctagatactgttcaacttgatggtgaaggctttgaagtattagtcgaaagtggtgacactgtgaaggtaggcgacccacttattcgttttgatttagaatatattaaaaataatgctaaatcagtcatttcaccaattattatcacaaattctgaccaaactgagtctattcatttagaagatgtagaagcagttgttaaaggcgagactcaagttattgatgtgactgtaagctaa

SEQ ID NO: 475 - DNA, 225 bp, Staphylococcus capitis
atggttaaaaattactcattctatcaatttgttatgactgttcgtggtcgtaaagacgataaaggggaattagctgagcaaatctttgatgaccttgcatttcctaaacatgaagatgacttcaacgtcctttcagagtacattgaaactcaaagtgagtttactgtacccatgtatgtctttgatgatttatacgaagagtatactgaatggttaaaattttaa

SEQ ID NO: 476 - DNA, 1479 bp, Staphylococcus capitis
gtgagtaatgattcagaacgtaatgatgcacaacaacaagacgacgaaagtcaatcaaattctcaaaataaaaacaaacaagtaagatttaaactttggcagtttctgttgattctccttggagttattttaataacagcaggaatcactgtggccgcgacgatattgattagtcataagatgagcggactcaataaagatcaacgtgcagatttaaaaaagatagaatatgtatataagacgctaaataaagattattataaaaagcaagattcagataaattaacacaatcagcaattgacggaatggttaaagaattaaaggatccatattcagaatatatgacttctgaggaaactaaacaattcaatgaaggtgtgtcaggagatttcgttggcattggcgcagaaatgcagaagaaaaatgatcaaattagtattaccagcccaatgaaagactcaccagctgaaaaagcaggaatacaaccgaaagatgtcgtaacgaaagttaatggtaaatctgttgaaggcaaaccattagaccaagtcgtaaaactagtcagaggtaaaaaaggtactaaagtaactttaactatcaaacgaggttctcaagaaaaagacattaagattaaacgtgatacgattcatgttaagagtgtcgaatacgagaaaaaaggcaacgttggtgtctttactattaataaattccaaagtaatacatctggagaattaaaatctgcaattatcaaggcacacaaacaaggtgtacgtaaaatagtattagatttacgtaacaatcctggtggtcttctagacgaagctgttaaaatggcgaacatctttattgataaaggaaaaacagttgttcaattagaaaaaggcgatgataaggagcaattgaaaacatcaaatgattcgttgaaacaagcaaaagatatggatgtttctatcttagtaaatgatggttcagcaagtgcatcagaagtctttacaggtgctatgaaagattatcataaagctaaggtttatggctctaaaacatttggtaaaggaattgttcaaactacacgtgaattcggtgatggttcattactaaaatatactgaaatgaaatggttaacacctgatgatcattatattcatggtaaaggtattcaaccggacagtaaaatagctacacctaaatatcaatctcttaacgtcatacctaataataaaacttatcatttaggtgacgagaataaaaatgttaaaacgatgaaaattggactcacagccttaggttataaagtgaataatgagtctaaccaatttgattcagaattagaatctgcaattaaatccttccagaaagacaatcatttggaagtaaccggaaaatttgataaaacgacaaatgataaattcactcaagaattagttgaaaaatcaaataaacatgatactgtattagacaaattacttcaaaaacttaagtaa

SEQ ID NO: 477 - DNA, 504 bp, Staphylococcus capitis
atgattagaacagcaacaaaaaatgatttacctgtaattgaaaaactcgttgatgaagcaaaagaaaaaatgaaagaatttaataataatcaatgggacgataaataccctgtaaccgaacattttgagaaagacatcgaaaccgaaacactttatgtattggatgtagatagtaaaatttacggttttattgttatcgaccaaacacaatcagagtggtatgatgacattgaatggccagttaatcgtgaaggtgcttatgttatccatagattagctggatcaaaagattataaaggtgcagcaactgaacttttccaatttgcggtagatttaacagaggaacatggcatacatgttattcttactgacacgtttgcgctaaataaacccgcgcaaaatctttttgagaaatttggatttactaaagctggagaagcagaaatggattatcatcctttcgatagaggcgcaccattttacgcttattataaaaaaatatag

SEQ ID NO: 478 - DNA, 1074 bp, Staphylococcus capitis
atgtcgaaaattgcatttaccggtggaggaacagtaggacacgtatctgttaacttgagtcttattcctactgctgtggaaaaaggtcatgaagcgttttatatcggttctaaacaaggaattgaaagagagatgattgaatctcaactaccagatataaaatactatcctatttctagtggtaaattacgtcgttatttatcatttgaaaatgctaaagacgtttttaaagtattaaaaggcgtgttagatgcacgtaaaattctaaaaaaacataaacctgatttattattttcaaagggcggattcgtaagcgttcctgtggtcattgcagcccgctcactaaaaatacctacaatcatccacgaatctgatttaacaccaggacttgcgaataaaatcgcacttaaattcgctaaaaaaatttatacgacatttgaagatacacttcaatatcttcctaaagacaaagctgactttgttggcgcaaccgttcgtgaggatttgaaacaaggtaataaagaacgtggttatcaattaaccggttttaacacagataaaaaggtcttactcgtaatgggtggtagtcttggtagtaagaaactcaatgaaacaattcgtgaaaatctagaggccttattacatgattatcaaattatccatttaactggtaaaggactagttgataacactattgataaaaaaggttatgttcaatatgaatttgttaaagatgatttaactgatttattagctataacagatacagtagtaagtcgtgccggtgcaaatgcgatttatgaattcttaacattaagaatacctatgttattaatcccattaggtttagatcaatctcgtggagaccaaattgataacgctaaaaacttttcatcgaaaggctatggccgatatacacttgaagatgaactaactcaagtaggtttattacaagagttaaatgatattgaaacaaatcgtgaagatatcattaaacaaatgaaaacatataaagaaagttacactaaagaagatttatttgataaaattgtacatgatgcattaaataagtag

SEQ ID NO: 479 - DNA, 615 bp, Staphylococcus capitis
atgaaccgttggacgcgcatttcattactcattgttttcacactcgtttttgggataatcgcatttttccatgaatctcgtctaggaaagtggattgataatgaggtttatgattttatttatgcatcagagagttttatcactacatcaattatgctaggtgcgactaaaattggtgaagtttgggccatgttatgtctatcactcacacttgtagcatatttaatgttaaaacgttatcaaattgaaacattattctttgctatagcaatgggtctttcaagcatacttaatcctgtccttaaaaatattttcgacagagaacgtccaacactcctacgtttaattgatatttctggatttagctttcctagtggacacgcaatgggcgcaacctcatactttggaagcatcatttacattttaaatcgccatgattcaggtatttctaaaggtgtgttaataggattaagtgcattattcatattattaatttcaacatcaagagtctatttaggcgttcattatcctactgatattattgcaggtattattggtggcgccttttgtattgtactatcgacacttatcctaaagaaacaactcgccatataa

SEQ ID NO: 480 - DNA, 1092 bp, Staphylococcus capitis
atgatacaaatcaaggatttaaacaaagtttatgaaaatggtagtcacgcagttaaagattttaatctaaatattcatgacaacgaatttgttgtatttgttggaccatcgggatgtgggaagtctacgaccttacgtatgatagcaggtctagaagatattagtaagggaacaattagtatcgacgataaagtgattaatgatttacagcctaaagatcgtaatatagctatggtgtttcaaaattatgcactttatcctcatatgactgtttataaaaacttagcatttggattaaaaatgcgtggtattaagaagagagtttatgataagaaaattcaagatgctgccaaaatattagaaatagaaaatcttcttcaacgtaaacctaaagcattatccggaggccaacgtcaacgtgtagcgttaggacgagcaatagtgagagacgcacaaatctttttaatggatgagccactttcaaatttagatgccaaattaagaagcaacatgagaagcgaaatcattaaaatacataaagaaatgaatgcaacaacaatctatgtcacacatgatcaaacggaagcaatgacgatggcctcacgcattgtgatactaaatcaaggtgaaattcaacaaattggcacgccagaagaaatctaccgtcacccagtgaatgaatttgttgcaacatttataggtagcccttcgatgaatattatcccgttaacttatcatatggacgcatggtatttcgacgctcaaaaagttgctgatcaatctgtagtacaactttcgtcacattcacaatgtagacttggtattcgtcctgaagatttgcatctcattactaacgatgattcgcatgcatatcctattcaactcacaaatttaaaaatcgatttagtcgaattgacgggctcttacaaattactccattgtcatcatgacgatcataaaattgtagccgccgtagatagtaaccttaattttgaattaggacagaacgtatctttcggcattcattcgaaagatgcacattatttcaattctgagtcaggtgaacgaatgaaagaggaggttgtatcgtga

SEQ ID NO: 481 - DNA, 957 bp, Staphylococcus capitis
gtgagtaaaatcaagcaacatggaattcaatccactcatcaaaaatctttgctcaaaagaatgtgggaacataaagttttatatcttatgattttaccttgcttactttttttccttattttcaattatatacctatgacaagtctaattttagcgtttaaagatttccgttttgatacgggtattattggtggtgattggaaagggctacactacttccaaagattcttcactgattcaagatgtgtacaaatcattataaatacacttgttatcagtggaatgaagctcattctagctcttccttttcctatcattttagccattatgtttaatgaaattaaggattctaaattaggtaaaatcagaggactattccaaggaatattatatatacctcactttttatcatgggtcgttgtgataggtatattcaagaagttactcgcaccagatgatggtttaatgaatcaacttattcacaaattcggtggtgatggctcaacttattttatgatgaaccctgaatatttccataccatcatgttttctagttatatttggaaaaatgtcggctgggactccatcatttattttgctgcaatcatgagcatcaaccctgaaatttacgaatcagcagcaatagatggggcgaaccgcttcaaacaaattatacatattaccttaccaatgctcacgcctacaatagttattctatttattatttcattaggagatattttaaaagctggctttgatcaaatctatttactcaagacacctggaaatgcgagtgtatcagaaatattagacacctttgtaatacgcacgggaatcgaacagggagacttcagttacgccatagctataggacttttacaaggtgttattggtcttatcgcggtcgtcattatcaatagatttgccgataaaaaactggatacttcattatattaa

SEQ ID NO: 482 - DNA, 1689 bp, Staphylococcus capitis
atgtttagaaaatcaatactcatcttactaattgcggtaatgatactcacatcggcgtgtggcaaagataaatcacaagatgaagcaaagagaaaagcagatgccaaagggaagccagatacatggattgctgatagaaaattaaaaggtttagtcttccaaagtgataatgacgcctctccgaagatgaataaagaggttgctaaagaactaaagaaaaaaaccggaatcactttagaattacagacagtctcaaatgaagattcgactgaagcactaacatcaggtctcgcttctggtgatttacctgacttcatcgtttattacttagacgatagtggtcgccctgaaatgaaagttctaaataaagcagctaaacaaggtcgactcactgatcttacaaagatgcttaaaaacacaaaaatctatagtaaatattttaagaaaggctaccttcctaaagatacgaaagataatattatgttcaataaagaaatggacggcacttaccttgtacacatgggtatcaatcgtcatccaggtcaagaagaacgtcgcacagtaggaggtccctatgttcgtaaagatattatggataaacttcatattaagccttcatcaataaaaacttccgaagatgtagaaaagctagcacaaaaaatgaaggatcatcactttaaagatgataatggtaaagaaatcacaccaattggtcctacagcttggggaggcgacgatcgcactaaattctacaacgacctcgtatggactggacagtcagatgagaaatttttaaacaaagggaaaaagattgttcacgaatctcaaactgattatccacttaaaagagtgagatatgtcaaagaattaatgcaaaaaggactcatgacgaaagaattttacacaatggaagagaacaaagctaaagaaggacttgttaatggttcatggggcatagtttcagatttacataattacgtcactgaaaatcaaaacatgaaatatgtacctcttggcccactcaatacagtcaaaggtaaatttagagttgagaaaccttataaatctggtgcaaacggatgggctgtcccaagtacgactgaacatccagaggacgtagttaaacttgctgatttcttagctagtcgtgaaggtaaattattaggacaatatggcattaaaggtcgtgattacacattagataaaaaaggcaacccacacgtcaaaccagaagtattaaaagaagtcaaaaacgaccctgacaaagcgaaaaaacgtggtttcagaggcgcgggttcatactgggctgatcatcttggttatacagatatagataataaagctgactttggtgaaatcgaatacggcgataatactaaaacaagcaaaaccacacctgaaaagattgctgatatgtggcattatgacgaacgccaaaagcacgcaaaaattgttaatggtctaacagtaaaatctttcttatctaaatatgagtatggtgaagatttagaggtagcacttgatgattatagcgacgcaattaaacgcgcttattattcaagaactgacaaagaagccaagcaaataatcgatagtgcgaaacaacgcttgaacgaagctggtttaaatcagtttgaacgttatgtggaaaatcaaagagataaaaaaggaacgcaaattatttactaa

SEQ ID NO: 483 - DNA, 897 bp, Staphylococcus capitis
atgaaaatatcccaagataaaagtgctattgtcattcgcatcatttcattaattatcataataggtttagttattactattatattgccactaattaatatctttgccttagcatttaattccggtgtcgatgcgcaaaaaggtggtatcacattctttcctcgtaagttttcgctagataattttaaagaaatatttaaacaaggaacattattgaatgcattgtttattagtgtagctaaaactgtcataggaacaatcttaagcgtgatattaaccgccatggcagcgtacgtcttaacaataaaaacactgccattccgaagaatcatttcattcttcttagtatttacgatgttatttagtgctggagttgttccactatacattttattaaatcaattacatttaacagacactttctgggtctatattttaccttcactctatagtgtttataacattttaatcatgcgtacattttttaatcagttaccaacaagtgttatcgaagctgcgagggtagatggatgtaatgactttcaaatcttttggaaaatagtccttccaatgagtaaaccggtagtcgcatcaattactttatttaatgctgtgagtcaatggaacgactggtttacaggcgcattcttcgtacgcaacccaaatttaaaacctttagcaacagtattacaggatatgctcactaagcaagccgcaatagctgaagcacttaaacagaaatcaggttcttatgcaatgttggataaagtaacaattactggtgattctatgcaaatggcaatgatagtgttgttaacaattccagtattattcttgttcccatttgttcaaaaacattttgtaaaaggaatcaatataggttcaactaaggagtaa

SEQ ID NO: 484 - DNA, 855 bp, Staphylococcus capitis
atgacgaaaatcttacaattaagtgatttacacattggcccacataatgacgccaaagatcaaaaaacatatgatttgattcaacatatgatgacacattatcgtcccgatatcactgtattaactggtgatcaaatatggtctgaaggagtcattgattctggtcgagtttataaagaacttatcgaatatttaaatcaattcgatactcaaattgcaacaacatttggtaatcatgacactgaaggacatcttaaacggggtgatttacgcgccatagaagaacaatattctaaaaattatgtccaaaaacatcatagtttaattattgatgataaagaagcttatactattgaagtaagctctcaagatacacttatacacgttctttatgtgattgacggaggggattataacccatttggcataggtgattacgactttatcagacctgagcacgttaactggcttaaagagacttatgaagcgtatcagtcacaatacaaacgtagctttcaacataatttactatttacacacattcctctacaggaatatcgagaagtagagaatatcaaggaattccatggcatatttaatgaacctattgcttgctctaaaattaattctggattatttagtcaaatgctattaaatggagatattgaagggatgttctgtggtcacgatcatgataatgatttcactattaacttatatggaattcgtctaagttttggtcgcgtcggcggctataacacttatggtgacttacaacgtggtgcacgattaatagaattacaacctcatgaaatatttaaatcgaaagtattagaatttgatgatcgttactaa

SEQ ID NO: 485 - DNA, 1326 bp, Staphylococcus capitis
atgatcgttactaaaggggcatttagatccttatatgtacctatacttattgaacaactgttcatacttctcatggggcaagctgacacattaatgctcaacagttatagtacgaatgcagttgcagcatccggaatgacgagtcaaatattaatgctcattacgtttcttattacaatcattcacgtgggaactaatattcgtattgttcatttaaaagcacaccaaacatcaatgattccaaaagaagtttatcacaatcttcttttcaatatcatcgtttcgattgtatttacattagttgtaggtatggtgttttcaccgttattacatctttttcaagtacctaaggacatatttaatctaacttatcaatttggtttagttatattgagtgtcttaactttgacctcaactcaaatgtatataggaaccgtacttcgtattatgaattatgctgcgattgctacacgcatcacagtaattagtaatttgactaatatcattctaaatgctttcgtactttttataattccagatttggtaggtaatcctgtattagcagttgcttatgctacagccattagccgtctgcttggatgtctcttggcattcatagcacttttaaaaatttacagaccgaaactgcattactttaaaattaattttaaaatactttatcaagtttcaacattaggtatacctagtgctggcgagcaaatttcatataactttgcacaaacatttacgacagcatttatagcaatgttaggaacacaagttattgcagctaaatctgttgcaactgtgttaagtggcttatctttcagttgtgcgatggcatttagcgctgcatgccaaatttatttaggccattttatagctagacatcgctatagtgtactaaagaaaactgtgttaagaagtatatggtttaatgtgattcaatccttaattatcatggtatgcgttttagtaggtttcgtcgctgtcggtagatggcttacacatgatgttcaaacataccatttaattatctactatctagttattcttataggattggaaccgattcgtgcaattaataatttaatcgtagatttattaaatgtagctggggatgtgcgttttcctgttacagtcaatatcataactacttggttgttactgttgcccggaagctttctattaggcattcatttggggtttggttacaccggtattattctagtgagtattgcagatgaagcgctgcgatttattatcatgtatttcagatggcgaaatgataaatggcgcgcacgcatgaagcagataggagtatag

SEQ ID NO: 486 - DNA, 768 bp, Staphylococcus capitis
atgtacaagagaaaagaacgattaaaccttatacgtaaacgtgttgatcagtacggtgaggttgctgttaaagatttagcattatttttacaagtcacacctgaaactgtgagaaaagacttagaaacattagaatatgacaaacttattactcgcacgcacggtggggcagttaaatataatcatattaacaaggagaaatcatacgcgaataaatggcagaaacaatcaaatgtgaaagaaagaatagcaaaaaaagcagcttcacaaattcaatctggagaaatcgtggttatagatggtgggacgacaacaggtcgaattcctcagtatttaaatgatattatacaaactactataatcactaattccctaaagattgcaaatgaattgaatcgtgcaatagaggagcaacgtattcaaggcgaaattattatgctcgcaggtaagacaaatactgagcaagatgtagtaaagggacatttaacaaacgaattattgcaacgtttcaaatttgataaagcctttatttcatgtggttcatttgataagaacgattgttatgaattcgatttagaggaagcacacgtcagtcaaattatgattcaacaaagtcaattaagttatttattagcagatagtagtaaacgagatgctcgtgcatcgtatcgtattagtgaatttagtgagattgattatatgatttctgattacgctaagccacaggatatggagcattttaatcataaatcatggttacaaatttaa

SEQ ID NO: 487 - DNA, 660 bp, Staphylococcus capitis
atgacaaatattttaatcgtagaagatgagcagaatcttgctcgatttattgaacttgaacttaaacatgaagattacaacgttgatatagaatatgacggacgcacgggtttagataaagcacttaataaatcatatgatcttattatattggatttaatgttacctaatattaatggcttagaaatttgtagacaaattcgccaagaacaatcaacacctatcatcattattactgctaaaggtgaaacatatgataaagtagccggattagattatggtgcagatgattacatcgtcaaaccattcgatattgaagagttgctcgctcgtataagagctattttacgtagacaaccgcagaaaaatgttatcgatattaacggcattattattgacaaagatgccttcaaggtgactgtagatggtactcaactagaactgacgaagacggagtacgatttgttatatgttttagctgaaaatagaaatcacgtgatgcagcgtgagcaaattttagaccacgtatggggatttaacagcgaagtagaaacaaatgttgttgatgtttacattcgatatttacgcaataaattaaagccttttaataaggagaaatctatcgaaactgtacgtggcgtaggatacgtgattagatga

SEQ ID NO: 488 - DNA, 1365 bp, Staphylococcus capitis
atgatcaaacgtcgtaaattaaaatataaatggatgatcataacgacactcattacgtttaccactatattactattttgcttaattattatctttttcttaaaagatactcttagaaatagcgaacttgatgaagctgaaagaagttctactgatattgcgaatttatttcattctaaatctttggctcaaatatcagcacttgatttaaatgcttcattagaaaactttcaagaagtcattatatatgatgaaaaagggaagaagttaattcaaacatcaaatgacaatatcgttaattacaataagaaatttgatatgaaccatccagaacgtataaacatctataatagtcatggcattaattacttagtaatcactgaacccattcattcgaaagattttaatggatacagtgtactagtacattctctacaaaattatgacaatcttgtacgttcactatatatagtagctttagcattcggtttaatcgctactgtgataactgctggaattagttatatcttctcatctcaaatcacaaaacccattgtgactatgtcgaacaagatgaatcaaattaggcgcgatggtttccaaaagaaactagaattaacaactaattacgaagagacagataatcttatcgttacatttaacgacatgatgtaccaaattgaagaatcatttaatcagcaacgacaatttgttgaagacgcttctcacgaattaagaacacctttacaaatcattcaaggtcatctcaacttaattcagaggtgggggaagaaagacccagaaattcttgaagaatctctagatatttctatagaggaagtcaatcgaatcactaaacttgtcgaagaattactcttattgactaaagatagtgtgaatagtcatgttcttgaagctgaaaatgtagacattaacaatgagattcaatcacgcgtgaagtcattaagacatttacatcctgattaccaatttgaaacgcacttgtccaataagccaatacaaatgaaaatgaatagacatcaatttgaacaattattacttattttcctagataatgcaatgaagtatgatactgataataaatatataatgatcaatacctctctaaagaacaaagtcatcagtatcgaaattacagaccacggcatgggtattcctaaacaagatttagatttcattttcgatagattttacagagttgataaatctcgtgcccgtagtcagggtggaaatggtttaggtttatcaatcgctgagaaaattgtgcaattaaatggtggttcgatccaggtagaaagtgaagttcaaaaatttacgacatttaagattaatttccctttataa

SEQ ID NO: 489 - DNA, 2805 bp, Staphylococcus capitis
atgactaaggacaaaaaagaagttacagaggcacctgtaaacttcggtgcaaatctcggtttaatgctagatttgtatgatgattacctacaagatccatcatcagttccagaagatttacaagtcttatttagtacaattaaaacaggtgaagctcatgtcgaggctaaaccggccactggaggaagtggttcacaagcgggagatagcactattaaacgtgtaatgcgcttaattgataacattcgacaatacggacatttaaaagcaggcatatatccagttaatcctccagagcgtaaacatgtccctaaattaggaattgaagattttgatttagatcaacaaactttggaacaaatatcagctggtattgtatcagaacactttgaagatatttatgacaatgcctatgaagcgatagttcgtatggaaaaacgctataaagggccaattgcttttgagtacactcacattaataacaacaaagagcgagtttggttgaaaagacgtatcgaaatgccttataaagcgaatttaaacaataatcagaaaaaagaacttttcaaaaaattaacacatgttgaaggatttgaaaaatacttacacaaaaactttgtaggtgcaaaacgtttctcaattgaaggggtagacacgttagtaccaatgcttcagcatacaattactttagcgggtaacgagggaattaaaaatatacaaatcggtatggctcaccgtggtcgtttaaacgtattaactcacgtacttgagaaaccatacgaaatgatgatttcagaattcatgcatacagatccgatgaaattcttaccagaagacggtagcttagaacttacttcaggttggactggagacgtaaaatatcacttaggtggcgtgaagacaactgattcttatggcactgaacaacgtatttctttagctaacaacccaagtcacttggaaattgttgctccagttgttgaaggtagaacacgtgctgcacaagatgagacgcatcaagcaggttctccttcaactgatttccataaagccatgccaattatcattcatggtgatgctgcttacccaggacaaggtattaactttgaaacaatgaacttaggtagcttaaaagggtatactactggtggttcattacacattattactaataatagaattggcttcacaactgaacctactgacggccgttcaacaacatattctactgacgttgcaaaagggtacgatgttccaatcttgcacgttaatgcagatgatgttgaagcaacaattgaagcgattgatatcgcgatggaattccgtaaagagttccataaagacgttgttatcgatttagttggttatcgtcgttatggtcataatgaaatggatgagccttcaattacaaacccagttccttaccataatattcgtaaacatgaatcagttgaattgctttatggtaaaaagttagttgaagacggcatcatttctgaagacgaaatgaatgacgttattgatagtgttcaaaaagaaatgcgtgcagcgcatgataaaattgataagtctgataagatggataatccagacatggaaaaacctgagtcacttcaattgccattgcaaagtgatgacaaagacttctcatttgatcacttaaaagaaattaatgacgctatgctaacttatcctgaagatttccacgttcttaaaaaattgaacaaagtacttgaaaaacgtagagaaccatttgaaaaagaaggcggcttagttgattgggctcaagcagaacaacttgcctttgcaactattttacaagatggcacttcaattcgtttaactggtcaagatagtgaacgtggtactttcagtcatagacacgctgtgttgcatgatgaagagaatggcgacacatacactccattacatcatgtcccaaatcagcaagcgacgtttgatattcacaactcaccgctttctgaagcagcagttgttgggttcgaatatggctataatgttgaaaataaaaatagctttaacatttgggaagcacaatacggtgacttctctaacatggcacaaatgatttttgataacttcttatctagttctcgtgccaaatggggagaacgttcaggcttaacattattcttacctcattcatatgaaggtcaaggtgctgaacactcttcagctcgtttagagagattcttacaacttgccgctgaaaataacagcacagtagtgaacttatctagctcaagtaactacttccacttattacgtgctcaagcagcaagtcttgattctcaagaaatgagaccattaatcgtcatgtcaccgaaaagtatattgcgtaataaaactgttgctaaacctatcgatgaatttacttctggtggttttaaacctattatcaccgaagaacatgatgcagaaaaagttaagaaagtgattttagcttcaggtaaaatgtttatagacttaaaagaacatttagagaaaaatccagacgaatctactttaattgttgcaattgagagattatatccattccctgaagaagaaattcaagaagtacttgaatcattaccaaatcttgaagaagtatcatgggttcaagaagagcctaaaaaccaaggtgcatggttattcgtttatccttatcttagagcacttgttgctgatagatatgaccttagctatcatggtagaatacaaagggcagcacctgctgaaggtgatggagaaattcataaacttgttcaaaacagaattattgaaagtagcattaataattaa

SEQ ID NO: 490 - DNA, 1275 bp, Staphylococcus capitis
atgccagaggtaaaagttccagaattagctgaatcaatcacagaaggtaccattgcagaatggttaaaaaacgttggagatagcgtcgataaaggtgaagctatcttagaattagaaacagataaagttaacgttgaagtagtttcagaggaagcaggcgtactatctgaacaattagctgaagaaggagatacagttgaagtaggtcaagctgtagccgtagttggtgaaggcagtggcaacgcatcaagtggttcttcaaatgaaactccacaaaaagaagaatctaaagatgctagcgaatctcaagataaatcacaacaatcacaatcatcttcagataataaactagacgaccaagatagcagtaatcaacgtgtaaatgctacaccttctgctcgtcgtcatgcacgcgaaaacggtgttaatttaagcgaagtttctggtaaaggaaatgacgttttaagaaaagacgacgttgataacagtcaaaaacaagctagccaaccatctcaaagcgaaagcaaatcacaaaatagtggctctaaaaaatctaacgataatccgtctaagccagtaatacgtgagaaaatgtctcgtcgtaagaaaactgctgctaaaaaattattagaagtgtcaaaccaaacagcaatgttaactacattcaatgaagttgacatgactaatgttatggaattacgtaaacgtaaaaaagaacaatttatgaaggatcatgacggtactaaacttggtttcatgtcattcttcactaaagcagcagtcgcagcgcttaagaaatatccagaagttaacgctgaaattgacggcgaagatatgattacaaaacaattctatgatatcggtattgccgtatctactgatgatggtttattagtaccattcgttagagattgtgataagaaaaactttgctgaaattgaacaagaaattgcgaacttagcagttaaagcacgtgataaaaaattaggcctagacgatatggttaatggttcatttactatcactaatggtggaatcttcggttcaatgatgagtacaccaattatcaacggtagccaagctgctatcttaggtatgcactcaatcattactcgaccaattgcaattgacaaagatactatcgaaaatcgtccaatgatgtacttagcgttaagctatgaccacagaatcattgatggtaaagaagcagttggattcttaaaaacaatcaaagaattaattgaaaatccagaagatttactactagaatcataa

SEQ ID NO: 491 - DNA, 831 bp, Staphylococcus capitis
atgtcttataacataatagaagggcatcatataactaagaagataaataatcatatgattatccataatataaatttcaatattcctaagaattcaataactttaatcgagggacataatggttctggaaaaagtatcactttaaaaataattactggattaattaatcattatgaaggatcattattcatttcgggaagtgtcagttatgcaatagatgtttttcctggaaacttaaatttaactatcagggaatatttgagattcttatcaaaatttaactcatataaacagtcaagaaagcaagttcattattttatcgaacatttaaatcttactccatttttaaatcgtaaattaaaagactgttctaaaggtactaagcagaaagtaaatattatacaatgcctcactaaaagtgcagacatatatatattagatgaaccattttctggattagatcaagagacaacagattttctattaaaaaatttagctgagttaaaattatctgctactgttatcatgacttctcatgaatttcatcatcacaaccatatcatcactcatacgttgaatattgagaccggtaaatttcgtaatctcaaagtagaaaataatctttctaatactgctgctaaagttatagtaattaactatgattcaaatattactaaacgcttaactaattataaaaatatcacaaacatctatactgaaaacaataaggtgtatataaaaacgcatcagcaacatttaaatgaattgctaatgcaattaattactcatcagtgcgagatcattgaaattaaggatgtgatccacttttga

SEQ ID NO: 492 - DNA, 711 bp, Staphylococcus capitis
ttgattgcttttatacaatatcagtttaaaaattacttgcgctcataccaatttatacctccaatgatgatttttgtaatttggattattcttcaatatttatataatgaacaacctatattatctagctatgcatctagctgtttaggattatttatcattacatgttggttaacattaaatatattaaatttagagtcattaaatgaaaaatacttattatttatacaactagaatctaaactcaaatatctcatagttaaatggttatttatatttttaattaattgtgtattaattgtattttcaataatatatccgttactattaggtagtttcaaaaatcacatttattttaaacagggtgtattagccatatttttgcatcttattgtatgtatgatatgtattttgatttccactttaattaaaaatcttaatgtgatttctaaaaaatacatgtggttgcttattagtctaattggagtggtaagtatattacgtccgattttaatacaatcctatccatttataaaatatattttatggcttataccaccaataggtgatttaataaagttgtatcattctgacaaccccaattatgatgtgcttttattactaactttatggacgttaatatacattatcattttattcatactcaatctcatcatcttttctaaattagatcaaaatcaaacgtcctaa

SEQ ID NO: 493 - DNA, 174 bp, Staphylococcus capitis
atgtctaatttgtggataatatttgcgattacagttttaatagctgtttattcaggtatacaagtatttactaatttaaacaataagcagaagtctagttttaaatatttcacaattgcatttattgtttgtgtcattcttgcaattattgaaatcatattcctagctcgataa

SEQ ID NO: 494 - DNA, 810 bp, Staphylococcus capitis
atgagcggacttagaagtgtcactataggaacaagtgacctgtctaaaacgaaagaactttttggaaatattctaggattacaatattccgataaaaatgaaaatgctttaagatttggagatgctaacttaagtccaggtactcgcattcactttgttgaaatttctaataaggactatagcaatcaacatattgatagcataggactacgaacaccatctgatttagggctagatgaatatcaaaacatactttcaaatcataatattaattatagctcatttactgaactcaatggcaataaacattttagttttgaagatgataatcatcaaacttatgatatctactccaatgaacacaatactggagtcgggctaggtatgccatcttttgatagttctgtaaatcctcttcaccaaattcaaggtttaggaccagttattcttaaagtcaatgaattatcaatcactacatcaattttaacgagagtatttggattagatttatttgctgaatatctaccaagtgaagatgctaatgaaaatatccaagttttcaaaattggagaaggtggcttaggcggagaattacacctataccaagcacatgaggaaatacaactttcagagtatggaccagttgaacaagttgaattttctacacatcaccgaaatgaatttgttcaagccaaagaacaattagatgaaataggaataccgtatcaaaccttggaacaagaagaatctgaatcgttaagaatcaccgaaagtagtggtatttcatttattttcacccttgaaaagtaa

SEQ ID NO: 495 - DNA, 204 bp, Staphylococcus capitis
atgttacatgaaacttggaaagaacgtacacctattaaaaaggtagaagttacgaatacagatgcgaagaaatttacagttgctgatatgctgactgtaggtaaacaatatgatgttgttaatgtaaccgaagagtattatcaaatcgttgataattctggtttagtaggtggctattataaagattacttcaaagaagtttaa

SEQ ID NO: 496 - DNA, 792 bp, Staphylococcus capitis
atgactaaatcaatttataaaaattctgatgaatcagtatttaaagatgcgaaagttctatttgaattaaataaaaatattttacttaagggacctacaggttcaggaaaaacaaaacttgctgaaacgttaagcgatgaagttagacgtccaatgcatcaggttaactgttctgtcgatttagatactgaaagtttgcttggatttaagacaattcaaactaacgaagaggggcaacaagaaattgtcttcattgatgggcctgtaattaaagctatgaaacaaggacatattttatatatcgatgaaattaatatggctaaaccagaaacgcttccgattcttaatggtgtcttagactatcgccgtcaaattactaatccatatacaggtgaggtcattaaagctgcacctggcttcaatgtgatagcagcaattaatgaaggttacgtaggcacattaccaatgaatgaggcacttaaaaaccgttttatcgttatagaagtagattatatagatggacatattttaaagactgttataaaagaacaaagtcgattacaggatgacaaagtaattgaacaaatcattaaatttaatgaggacttaagaacaatgactaaacaaggacaaatttctgaggaagctgctagtattcgtgtcctcatagatttaagtgatttagctacagtgattccaatcgaacgtgcaattaaaagaacaattatcgataaattagaagatgagcgtgaacaacaagcaattattaatgcgattgagttaaatttttaa

SEQ ID NO: 497 - DNA, 1890 bp, Staphylococcus capitis
atgagtgatcgttttataaaattcaacgatgaacagttagatgctaagcaggtaatgatgttacaagacttagctcgtctattattaaaagatgaacaaacacaagtgaaaatacaaaagtttcctttttacaatcctttcagcaataccctaatcacaagttggttttggtcacaccgtccgcatcacattgagcaagccggcttaaaaactgatgttttactcgctgcatatggatatcaacatatagatatagacattgttaatcatgttttacataatgatgattttcatcatactaaatttttccatcaattatttaagttacttgaagatgtacgtattctcgaacttattcgaaaagaacgtcctagcactgctaagtatatagatctacgcttggatactcggttagcttttactgattcacaaattaatgtttataaaactaaaactgtattcactgatttgctatttctcaatttagaacgtgcttttcttagtcaaaacttctatgacgtaccatcaattcatccgacatttgatgatgtactagtgaatatgtatcagtatttgccaaatattttccaaaacaaaacctcagaagataacatgtatctggctgaacgtatgatgtatcaggtagatgatttgcttaaagaagatatgttaaatgaatattattatttacctcaaaaactgtatgaagacattcaagcaaccacctttgaggacttgaaaagaactgacgcgagtaatacagatggtaacgataaacatcaatctgaagaagatgctgaaacagctgaagctgaaactaaagcagcggatagcgaaactaaaggtggcgcttacttagagatggaacttcacgagggagaaaacagtgaagtgatagctgataatgatactgctcgtgaaggggattccacagacgatataacagatatgatgactaagaaaggcaagggctctcagaacactttagaccatgatgaaggtggtttcataggtcagaatcaagcatttgcactagaaggaattaataaaaatgtaaaagttgaatggaaggttccaaacatccaaccacaacatattttagactatcaacattctaaaaatgatgttcaatttgaaatcaaggatcttattcaaatcattaaaaagacaatcgatagagagcatcaagatgaacgtcataatctaactaaagggcgtcttcaaaaagatttaatcaattggtttatcgatgatcaatataaattattttataaaaagcaggatttaagtaaaacatttgatgcaacgttcacattgttagttgatgcgtctgcaagcatgcacgataaaatggatgagaccattaagggcgttgtactattccatgaaactttgaaatcgttaaacattaaacacgaaattttagcttttaatgaggatgcattcgaagcagatgatcgtgaacaaccaaatattatagatgaaattatcaattataattattcaatttttgaaaaagaaggcccacgtatcatgtctttagaacctcaagatgataatcgtgatggtgtagctattcggatagctagtgaaagactactacaacgtagtcatcaacaacgttttttaattgtattttcggatggagaaccatctgcatttaactatagccaagatggcatcatagatacgtatgaagccgtagaaactgctcgtaaatttggtattgaagtctttaatgtatttctgagtcaagaagctattactgaagatattgaacaaacgattcataatatttatggacaattctcaatatttgtagaaggcgttgaacacttaccaagccttttatctccattattgaagaaacttttacttaaatcattttaa

SEQ ID NO: 498 - DNA, 1356 bp, Staphylococcus capitis
atgaataaaaacacttggattataggttttactttgttcgctatgttttttggcgcagggaaccttatttttccaacgaatctaggccttgatagtggacatttcctttggccagctatactcgcattcgcactaactggtattggtttaccattactaggtgtcgttgttggggcactagatcatcaaggatatatcggtgcttttaataaaatttcaccaaaattctctttaatctttttaattgttatctatttaacaataggacctttgttcgcgattccgcgtacagcttcgacttcatttgaaatgactgtcacgccaatcgctaatactaatgggaatatagcattattaattttcactattatttacttcttaattgtgctttatttatgtcttaatcctaataaaatgatagatcgcattggttcattgttaactccattgttattaataactatattagctatgattataaaaggatttatagactttggaagtaatgctcccggagaaggtaatacaaaattattccattcaagtttttccggtttttcacaagggtttactcaaggttatttaacaatggatgcaatcgctgcaattgcattttcaatgattgttgttaacgctattaaagctaccggaattaaacattctgataaaatatttaagcaaacagtgattgcaggacttattgctgctacagctttaatctttatatatatttcattaggatttattggaaatcatatgcatattacttcaggaaagatgaaagaactcactgctaatgatcaaaatattggtacatacttactaactactatggctgcgaagggatttggtaccttcggtaaatatttattaggaattatcgttgcattagcttgtataactacagcttgtggtcttattgtttcagtaagtcaatatttccacagagttttccctaaaatttcttataaagtttatgtaatattatttacattaataagctttatcatagccaatcaaggattaaattcagttatatctatgtcagtacctgtattaagtattgtatatccaatagctataacagttgttttactaatattagtggctcgatttataccgacgaaaccaattgcgcaacaaattccattgcttattgttgcaatagaatctatattaagtcttattactactcaaggatggtttaaaatttcatttatagaccatttaccacttaaacagcattcacttgaatggtttccaatcgcggtaatagcaaccatctttggttatattatttcatatttcgttaaacaagattttatagtttatcaaaaagaagataataacaactaa

SEQ ID NO: 499 - DNA, 1134 bp, Staphylococcus capitis
atgacgcataaaattaatagcaatcaatcacatccactcgatcaatatattgaagataatacaaatactaatcctacagtagctcaagacttcaaccctcaatttagtgatgaggacaagaaaaaaatagaaacaattagtcaacaaataaagcttttagaccatgatggcttattacagtttggtactaacttacaacaaagtatgtctcaattttcacatcaaatgctagatgaagttcaatctaaagatatggggcctgttggagattcattaagtcaattaatgggcaaattaaagtcagttaatcctaatgatttagatccaaataaacaatctaaacttaaacgtatatttagaagaacaaaagcttcaattaatgaagtcttttcaagaatgcaatcagtaagctctcaaattgatcgtattacgattcaactagacaaacataaagggaatctaactaaagatgttgaattattagacggtttatatgatcaaaataaaaaatactttgacgatgtaactttatatattgctgctgcacaacgtaagaaacaacagattcaatctgaaacaatacctgaactacaagagaaagctcataactcaggaaatcaaatggatattcaagctgtggcggatatggaacaatttgtagatcgtttagataaacgtatttatgacttacaattgtctagacaaattgctattcaaacagctccacaaattcgtatgattcaaaacgtgaatcaagcattagctgaaaaaattcaaagttcaattctcacaagtattcctttatggaaaaatcaaatggcaattgccttaaccttaatgagacaacgtaatgcagtttcagcacagcgtgccgtaacagatactacaaatgatttactcactcaaaatgcttcaatgttaaagcaaaacgctattgaaactgccactgaaaatgagcgtggcatcgttgatattgagactgtgaaaacaactcaaaatgacattatagaaacaattgaacagacattacaaatccaacaagatggtcgtcaaaagcgacaagcagctgaaaaagagcttaatggcttagaaaacgacttgaagcaacatctattgtcaatgagaaaagaataa

SEQ ID NO: 500 - DNA, 627 bp, Staphylococcus capitis
ttgagatataacatttcacgtttatttggagtgttagtaggcataccagtagcatttattgtttggatggttactgttttcgcatgggatttatcattcctgattgatgctatcgttggtgcaggtggttttctattatcgtacttccctactcaaaggcttacttcacgcaaatatcttaatgaaatcggattgtcacgtagagattatagatatgttagaactcagcttaatcaagctcaattaaaaattagaactattttaaaatcatttatgaacatcagatctataaaagattttagacaagttaatgatatttaccgtatatcacgttctatatatacaagtataaaacaacgtccgggtatgtttttcaaagtagagggtttcttctattctcatctagataatgctctgaatctagtagatttttatactcgcctttcaaggatgccacgtaaatcaaaagaagaaaaacaaaaactagaacagacgcgtattactctagatgaagttaaacgtacactaattgctgatttaaaaagattaaatgaagaagattatgaacgattagatgttgaaatggaattaaacaaattagaacaagaacgtcgcaaagatgtataa

SEQ ID NO: 501 - DNA, 270 bp, Staphylococcus capitis
atggaacgtaaacatattcaaatttttggaactgttcaaggtgtgggcttcagatattatactgaacgcattgctaaccaatatcacattaaaggtacagtccaaaatgttgacgattatgtagaaatatatgctcaaggtgaagataaggaattagaacaatttattcaatctgtaattaaaggtgcttcacctgcgtcatcagtatccgattataatattaaaaatctagatattgatgactcattaacagaatttaaaactatatag

SEQ ID NO: 502 - DNA, 309 bp, Staphylococcus capitis
atgtggacagttgcaaaaatgagagctgactacgaaggttggtggctatttagtgattggcctgaaagagttatcgaaacactaaacttcaacacatacgaagaaatgcttgaaaaatacacaaaacttcttcaagactgtaaggattgtttcgataattatgtagtaggtaaacataacatttatgctttctataacaactgtgacttaaatttttgcgaagattgcgatgaagatttacaaatattttatagttttattattttaaaaaataatgaggtttattttaatcttacaaaaattgattaa

SEQ ID NO: 503 - DNA, 201 bp, Staphylococcus capitis
atgaaacaaggtacagttaaatggtttaacgctgaaaaaggtttcggcttcatcgaagttgaaggagaaaacgacgtattcgtacatttctcagcaatcaaccaagatggttacaaatcattagaagaaggtcaatcagttgaatttgaagtagttgaaggcgatcgcggtcctcaagctgcaaacgttgttaaactataa

SEQ ID NO: 504 - DNA, 864 bp, Staphylococcus capitis
gtgaaaataatgctagaatttaaaaatgtatataaatcttttaagaaaaaagaagtattatgtgatgtaaatttcaaattatctgcagttgagaaggtggggcttataggttcaaatggggctggaaaatcaacattaatgaaacttatagctaaaactcaattaccatctaaaggaaatgtttatttcaacaatatggatatacataactctcacactatgattcgttcaatgataggacaaatatattatcctgagctaaatgcaaggcaaaatattgaaaattatctaaagattaataataagattagctatatgaacgaaattcaatcaatacttaatatagtagatttagaaaataatggaaagaaagtgaaaaattattcgtatggaatgcaacaaaggctttgtttagctatatgtttaattactcaaccaaaagtagctgtattagatgagccatttttaggtctagatccattaggcgtgagagaattaaacaatataattgaaaagttttcaaaagaaaaaaacactttatttttaatatctagccatcagttaaaagaattagaaggtctttgtgatagatttctattattagaaaacagtaaaattaaagaaattgacttacagaataaaataatcactcaaaagttaatattcaagaattctattagcaatgcttcggaactaaaagctaatttcaaattcatcaaaagtatagaggacaatctaataacaattattaataaggatgaagaagtaaatcttacaaatttacttgaattagtaggtaaaaatcccttaattaaaatagagagtaatgacaatctcttatcttcatatttctataaagagtag

SEQ ID NO: 505 - DNA, 750 bp, Staphylococcus capitis
atgtttaaatttaacttcttatatatttcaaaaattcgtgcaacttggttgctttacctcatcggactttatcctcttttgatatttctagctgaattacttaatagtaatttcctttcattatcagcaactcaaacaaatagcgtaagctttttagaactatttatcgcaatatatgacacccagcaaaaagcaatgatatcacttataattgtgggatatttagcttcattactattttatagcgaaattagcaccggaagacttttattttacaaggatcaaagtcgttacaaaatttttaattctaaattaacatctattatttctagttattttatattcttatccattttactattatcaacgttagtagtttatttgttttatgttaacaaccatcaatactcctctcattcttttatgttaaataactataaattaaatcaaactctaatcttaaatcttcttggaatctttttaacagatttattcttaatcttttatgtagttattttttctgtaaaatttaattctgggataactataatcagtatgattttatgttatgtagtcataaagcttacagacaatattaataaaatcaagttttttccttcaaattttacaaatttaaataccgataaagatttcattttcagcttattagcaatgagcactattactgttgtttatataattattttttatgttttagcaattacgatattcaggaaaattcaattttaa

SEQ ID NO: 506 - DNA, 1266 bp, Staphylococcus capitis
atggtagtcaaatataatgagtatggcgaattaacaatgggaggtacaagtttaaagactgtagctcaaagctttggtacccctactatcgtatatgatgaagatcaaattcgtaatcaaatgcgcagatatcatagtgcatttgagaaaagtggtttaaaatataatatttcttatgcttctaaagcatttacttgtattcaaatggttaaattagtgcaagaagaagatttacaattagatgtggtgtctgaaggagaactttatactgctctagaagctggttttgatgcaaaccgtattcactttcacggtaataataaaactaagcgagaaattcaatacgcattagaaaataatatcgggtactttgttatagatgcattagaagaaattgatttaattgataaatatgcaagtgatgaagtgaatatcgtattacgtgttaatcctggcgtggaagcacatacacacgaatttatacaaactggtcaagaagatagtaagtttggtctatcaattaaacatggattagctttagaagcgattaataaagtaaaagcttctaaacacttacaattaaaaggagttcacttccatgtagggtctcagattgaaggtaccgaagctatgatagaaactgctaagcttgtgcttcattggttatctgaaaatgaaatcaaagtagaattacttaatttaggtggcggtttcggtatcaaatatgttgaaggtgatgaaagtttccctattgaagaaggcattgcagaaattgctgatgcaattaaagaaactgctcattcacttaattatgaagtgcctgaaattggtatagagcctggtcgttcaattgttggtgaagcaggaattactttatatgaggtcggtactataaaggaaatacctgaagtgaataaatatgtttcagttgatggaggtatgagcgatcatatccgtacagccttatatgatgctaaatatcaagcgttattagttaatcgtaatgaggaagcagatgatactgtgacgattgcaggtaaactatgtgaatccggtgatattatcattaaaaaagctaagttaccctcctctattaagcgtggagactatttagcaattttatcaactggtgcatatcattattcaatggcatcaaattataatcaaatgcagaagccatcagtattcttcttaaaagatggaaaagcacgtgaagtgataaagcgtcagtcactaagacaattaataattaatgatacgaaatga

SEQ ID NO: 507 - DNA, 1077 bp, Staphylococcus capitis
ttgacagcaatttggtcagtagatacagaagtgttttatcagaatgctgtaaaagttagaaatgaacaatcaataatggcagtagtaaaaaataatgcttatcattatggattagaattttcagttaaagagtttttaaaagcaggcattcaaacatttagtacaacatcattaaaagaagctatccgtgtgagagaaatcgcacctcatgcaactatatttctaatgaatgctgtgtatgaatttgatacagtaagagagtatgaaattcatatgacactaccctctttaacttattattatgaacacaaagaggatttaagaaatatacatgtgcatttagaatttgaaaatcttttacatcgctcaggtttcaaagatttagaagagttgcatgaagttttagaagatcatgctcaaaataaaagtgataacaaaatgattatttctggtatatggactcactttggatatgctgatgagttcgatgttccagagtatgatattgagagacaggcatggttaaatgttctaaatactttgttgggtgaaggttactcatttgatatgatacatgcacaaaatagtgcaagtttttatcgtgaaggtcaagtagtcctacctcaccatacccatgcacgtgtaggtattgcactttatggttctagaccttatagcaaattaaaagaatctgaaattcaacaatccttgacagttaaaggtaatgtgattcaagttcgtgaagttaatgctggagattattgcggatatagcttcgcttatgaagctactaagaatcaaacacaattggcagtggttgatattgggtatggagatggcatcctcaaatccagagctcaacatgaggcgattattaatggtaaacgttatccgattagagcgctaatgatgagtcatatgtttgttgaagtggatgatgaagttcatgcacaagatgaagtagtattatataataacgatatacgcatcgatgaatttacttttaaaggtgtgggcgcaaactctgaacaattaagcgctatgaatcatgattctctaataaaggagtacatataa

SEQ ID NO: 508 - DNA, 1152 bp, Staphylococcus capitis
atgagtgaattagaatttgtaacaaaacatagaagacatttacatcaatatccagaattaagtttacatgagttcgaaacaacgaagtatattaaagaatttcttgataatttaggcgttgaatatgattgccctcttgaaaccggagcaatagcgtatttagaaggtcaaagtaatcatacgatagcatttcgtgctgatatcgatgctttaccaatatttgaggaaaatgatatcgactatcgaagtaaaacggacaatgtgatgcatgcatgtggtcatgatggtcatacaacagcattaatgttatttgtaaaacgttgcaaagcgatggcggataaaggtgaacttccccacaatgttgtgtttatctttcagcctgctgaagaaactggtggtggtgctaatcgcttaattagagcaggcgcctttgaaaagtaccctatcgaagcagtatttggtattcatgtgaacccgttcgctgaagaaggtaaagtagtgattcgtgatgaagaaatcactgcaagtgcgactgagtatcgcttttatttaaatggtttatcaagtcatgtggctgataaagagcaaggtcattcatgtggtgaagcgttacaacatgtcttagcacaagtaggacaaatacaacagtaccatcttaatggtttaaaacgtaatatagttcatatgggacattttgaagctggtgaagctataaatacagtaccgagtcatggttatcttgaaggtacaatacgcacgtatgatgtagatgacttaactgtggttaaacaacaaatgtataaaatagcagaaagtgtccaattactatttaatgtagattgccaagtaaaatttgaagaaggctatcctcctactatgaatagtcctgaacttcggaaaagtgtagaacaagccttaaataaggctaatctagaagtcattgataaacctaccccattcttatttggagaagattttagtttttatggacaacaattagctcctgcatattttgtatttgtaggcactcagaataaagctaaaggttatgttacaggtttgcatacctctcatttaaattttgatgaaaagattttaattgatgtagcaaattattatgaagaattattaagaaattacaaagaggtgtaa

SEQ ID NO: 509 - DNA, 720 bp, Staphylococcus capitis
atggtacaacatttatcagctcaagagattattcaatatatcagtgatgcaaaaaaatctacacctttaaaagtttatgcgaatggtaattttgaaggcgtaactttcccagaaagttttaaagtatttggatcagaacattctaaagttatcttttgtgaagcggatgactggaaacccttctatgaagaaaatcaaacaaaaattgaagatttagaaattgaaatggatcgacgtaattcagcgattccgcttaaagacttaacaaacacaaacgcacgtattgaaccaggtgcattcattcgtgaacaagcgattattgaagatggtgctgtagttatgatgggcgcaacaataaatattggtgcggtagttggtgaaggtacaatggttgatatgaacgcaacgcttggtggtcgtgcaacaactggtaagaatgtacatgttggtgcaggtgctgtattagctggagtaattgagccccctagcgcctctccagtgataatcgaagataatgtcttaattggtgctaatgcagttattcttgaaggcgttcgcgttggcgaaggtgctattgttgctgcgggtgctattgtaactcaagatgttccagctggtgctgttgtagcaggtacccctgctaaagtaattaaacaaacatctgaagttgaagactctaaacgtgaaattgtctcagctttaagaaagttaaatgattaa

SEQ ID NO: 510 - DNA, 726 bp, Staphylococcus capitis
atgaagattttacttataggctatggagcgatgaatcaacgagttgctagactagctgaagaaaaaaatcatgagattgtaggagtcatagatagaactcctaaagattcaacaccatacaagcattacaatagtatagttgaagctcaagacgttgctgatgtagtgattgacttttcaaaccctgaattattaataccattactagatgagtcattcaatttaccgttagttattgctacaactggtgagaaagatacgctcattcaaaagctacaaacattaggtcaacatatgcctgtattctttagtgcaaatatgagttatggtatacacgcccttactaagattttagaaactgccgtacccctactacaagattttgacattgaattaactgaggctcatcacaataagaaagtagatgctcctagtggtacattagttaaattgtatgatgtgatcaaagaacttagagaccaagtaacgccagtatatgatcgtcatgagaatactgagaaacgtacgaaagatgaaattggtattcatgctgtgcgtggaggaacaatcgttggtgaacatgatattttattcgctggcacagatgagacaatcactatttctcataaagcacaatctaaagacatttttgcaaatggtgccattggtgccgctgaaaagttaattcataaagaaaatggatattatacttttgataatttataa

SEQ ID NO: 511 - DNA, 885 bp, Staphylococcus capitis
atgacacacatgtttgaaggcgttggcgtagctctagctacaccatttactaataatgaaattgattttgacgcattagaaagacatgtaaaatttttattagaaaataacacacaagcgattatagttaatggaacaacagctgaaagccctactttaacagatcaagaaaaagaacaagtacttgaaactgtaattaaattagttgataaacgtgtacctatcattgctggaactggtacgaataatactcagaaatcaattgaagcctctaaaagagctaaagaaattggtgctgatgcagtgatgcttattacgccctattataataaaacaaaccaacgaggattaattaaacactttgagactatcgcaaatgaagtaaaattaccggttgtactttataacgtaccatcacggacgaatatgacgattgaagcagaaactgttgaaacattaagtcacaacccttacattgttgcacttaaagatgcgacgaatgactttgattatatggaagaagttaaaaaacgcattaatgaagatgaatttgcattatatagtggcaatgatgacaatgttgttgaattctatcaacgtggaggtaaaggtgttatctcagttattgcaaatgttatccctcaagaatttcaagatttatacgatgctaaacaaagtggagaaaatatttcaagtcaatttgaacctattgggcaattattagactcattatctgtggatgttaaccctattcctattaaagcactaacggcacatttaggttttggtaattatgaattaagattaccacttatcccattagatgacgcagagcgtaatgtattagagcaagcttatgatcagtttaaagcaggtgaacattaa

SEQ ID NO: 512 - DNA, 990 bp, Staphylococcus capitis
atgacaagattagcagtagccggagcaacaggattagtaggaacaaaaatgttagaaacattggatcgtaagaatattcctttcgatgaattagtactcttttcttcagcgcgttcagcgggtaaggaagtagaattccaaggacaaacatatactgttcaagagttaacagatgaagcagcaagtgaacacttcgactacgtgttaatgagtgctggtggaggtacaagtgaacatttcgccccactatttgaacaagcaggtgctatcgtcattgataactctagtcaatggagaatgaccgaagatgtagatttaattgttcccgaagtgaatgaacctaaactaactcgtggcattattgctaatcctaactgttcaacaattcaatccgtagtgccacttaaaattttacaagatgcatatggcttaaaacgtgttgcttatacaacatatcaagcagtttcaggctcaggtatcaagggtaaaagagatttatctgaggggcctaatggaaaagctcctgaagcgtaccctcaccctatttataataatgtgttaccacatattgatgtttttcttgaaaatggctacaccaaagaagagcaaaaaatgattgatgaaacaagaaaaattttaaacgataaagacctgaaagttacagctacttgtgtacgtgtaccagtgcaagacagtcacagcattgaaattgacgttactttagatagagaagctaacgttaaagatatccaaaaccttttcgaccaagatagcagagttgtacttgtagataatcctgaaaacaatgaatacccattagcaattcactctacaggtaaagacgaagtctttgtaggccgtattcgtagagatgattcattagataacactttccatgtatggtgtacatcagacaacttacttaaaggtgcggcattaaacgcagttcaagtattagagcaagttttaactatgaaaggagaacgataa

SEQ ID NO: 513 - DNA, 1203 bp, Staphylococcus capitis
ttgaacagaagtgttttgaaatttggcgggtcttccgtcagtgattttacaaagataaaaaatattgctgaaatgcttaaaacacgagttgaacagggagaagaattaatcgttgtagttagtgcaatgggtaaaacaactgatcaattaatggaaaatgtgtcaacgttgacttctacacctaaagatcaagaacttgccctactacttactacgggtgaacaacagacagtctcctatctttcaatggtacttaatgatattggtgtaaaagccaaagcaatgactggataccaagcaggtattaaaacaattggtcatcatttgaaaagtaaaattgcagagattaatccagatacatttaatcaagcatttgaaaataacgatgtactggtagtagctggtttccaaggtataaatgatgagtttgagcttactactttaggccgtggaggttctgatactactgctgtggctctagcagcaagtaaccaaatcccttgcgagatttatactgacgttgatggagtttatgcaacagatccaagaatattaagtcatgctaagcgtttagaatacgtgtcatatgaagaaatgatggaaatgagtgcgcttggtgctggagtacttgaaactagaagtgttgaacttgctaaaaactatgaaatccccctttatttagggagaactttatcaaatgtgaaaggaacgtggattatgtctagatcagatttattagagaaaaaagctgttacaggagtagctttagatacgcatatgatgcacgtcacaattagttatcccctacctgacaatcgcttattaactcagttatttactgagttagaggaaggttctgtcaatgtcgatatgatttcgcaaatcgttaatctcgaaggattacagctatcattttcgattaaagatagtgacgttaatcaaatttcatctatattggaaaatctatccactcactttgaagccttagattataaaattaatgaagaatacgtcaaaatttcgttaattggatcaggtatgagagatatgtctggagtagcatctaaagcatttatcactttaatcaattctgaaattccattctatcaaacaacgacttcagaaattagtatttcatatgttattgatgcagaaaatggtcaaaaagcggtagaagaattatataacgcattcgatatctaa

SEQ ID NO: 514 - DNA, 1608 bp, Staphylococcus capitis
atgttacaagtaactgatgtaagtttacgtttcggagatcgtaaactatttgaagatgtaaatataaaatttactgaaggtaattgttatggcttaattggtgctaatggtgctggtaaatcaacatttcttaaaattttatctggcgaaattgattcgcaaacaggtcatgtttcattaggaaaagatgaacgtctagcagtattaaagcaagatcacttcgcatatgaagatgaacgcgtattagatgtcgtaattaaaggatatgagcgtttatatgaagttatgaaagaaaaagatgagatttatatgaagccagattttagtgacgaagatggtattcgtgctgcagaacttgaaggtgaatttgcagaaatgaatggctggaacgcagaagccgatgctgctaacctactttctggtttagttattcaagcagatttacatgacagaaaaatgtctgaacttgaaaacaatcaaaaagtaaaagtattattagcgcaaagtttatttggcgatcccgatgtacttctactagacgagcctactaacggtttagatatccctgcaattagctggttagaagatttcttaattaactttgaaaatacagttattgttgtatcccacgaccgtcacttcttaaataacgtatgtacgcacattgctgacttagactacggtaagatcaaactatatgtaggtaactatgatttctggtatcaatcaagtcagttagcccaaaaaatggctcaagaacaaaataagaaaaaagaagaaaaaattaaggaattgcaagatttcattgcacgattctctgcgaatgcttctaaatcaaaacaagctacaagtcgtaagaaacaattagaaaaaattgaattagatgatattcaaccatcttcaagaagatatccatatgttaaatttactcctgaacgtgaaattggaaatgatttattaactgttgaaaatctatctaaaacaattgacggcgaaaaagtattagataatgtttcattcacaatgaatcctaacgataaagctattttaattggtgatagtgagattgccaaaacaacattgcttaaaattttagctggtgaaatggaaccagatgaaggaacatttaaatggggtgtcactacttcccttagctatttccctaaagataattcagagttctttgatggcgtcgacatgaacttagttgattggttaagacaatatgcgcctgaagatgaacaaactgaaacatttttacgtggtttcttaggtcgtatgctatttagcggagaagaagttaagaagaaggcaagtgttctatccggtggtgaaaaagttcgttgtatgttaagtaaaatgatgttatcaagtgctaacgttttattactagacgaacctacaaaccatttagacctagaaagtatcactgcagttaatgatggattgaaatcatttaaaggttctatcatcttcacttcatatgacttcgagttcatcaatacaattgcaaaccgtgttatcgatttaaatcaaccaggtggtttatctaaagaagttccttatgaagaatatcttcaagaaattggtgttttacaaaatagttaa

SEQ ID NO: 515 - DNA, 897 bp, Staphylococcus capitis
atggcattagataaagatatcgtaggttcaatagaatttttagaagttgagggcttacaaggctcaacttatttattaaaggggcccaatggggaacaagttaaacttaatcaatcagaagtagccgatgaagacgaatttgaaataggggaagagtatagcttctttgtctatccaaaccgttcaggtgaactgtttgcaacacaaaacatgcctgatatcaccaaagataaatatgattttgcaaaagttttaaaaactgaccgtgacggtgcacgtattgatgtagggcttccacgtgaagtgttagttccatgggaagacctaccaaaaattaaagaattatggcctcaagctggagattacctccttgttactctaagaattgatagtaataatcagatgtttggacgcctcgctagtgaaacaattgttgaaggtatgttcacaccagtaatggatgatagtaaacaaaatgaaatgattgaagcacgagcatatcgcttattaagagtaggaagtttcttattgagtgaagatggctacaaaattttcgtccatgaatctgaacgtaagcaagaacctcgtttaggagagaaagttgaagtgcgtatcatcggacataatgataaaggtgaactcaatggttcattcttaccgctagctcatgaacgtttagacgatgatggacaagttattttcgatctactcgtagaatatgatggcgaattaccattttgggataaatccagtcctgaagccattaaagaagtgttcaatatgagtaaaggctcattcaaacgtgctattggtcatttatataagaagaaaataattaatattgaaactggtaaaatcacgcttactaaaaaaggttggagtagagtagaagaataa

SEQ ID NO: 516 - DNA, 114 bp, Staphylococcus capitis
ttgttaattaaaaatagagtaattgtaaatcttttgttaagaatgtttaaaggttggtataacgcgctttatagaggtatagatgaagtttatatttttgaaaaattactttaa

SEQ ID NO: 517 - DNA, 993 bp, Staphylococcus capitis
atgaaaaagtggcaattagtcggtactactgtattaggtgcttcattcttacttggcgcttgcggtggtaataatggaggttctggtagcggaagtgatcttaaaggttctgcaaaaggtgaaggttcatctactgtagctcctatcgtcgaaaaattaaatgaaaaatgggcgaaaaatcacaaagacgctaaaatttcttctggacaagctggtacaggtgctggattccaaaaattcattgctggcgaaactgatttctcagacgcttcaagacctattaaagacgaagaaaagaaaaaattagaagataaaggtattaaataccacgaatttaaaattgcacaagatgctgttactatcgcagtaaataaagataataaattcgtaaaatcattaactaaatctcaattaaaagatatttattctggaaaagctaaaacttggaaagatgtaaattctaaatggccaaacaaaaaaatcaatgctgtatcacctaactcaagtcatggtacatacgacttcttcgaagaggaagtaatgaacaaacaagatatcaaggctgagaaaaatgctgatactaaccaattagttagctctgtaactaaaaacaaagaaggtattggttacttcggttatgcgttctacgaacaaaataaagacaaattaaaagaagttaagatcaaagatgataacggcaaattaactgaaccaactaagaaaacaatcaaaaatggttcatatgctttaagtagaccattattcatctacgttaaagataaatcattaaaagataacaaagtaatgtctgaattcatgaaattcgttcttaaagatgaaggtaaatctgctgaagctaaagatgaagtagctgctcctaagaaaacttataaatctcaattaaaagagttaaataagtttttagataaacatcaaaaatctgataaaaaatctgacaagaaatcagataaaaaatcagacgacaaaaaataa

SEQ ID NO: 518 - DNA, 927 bp, Staphylococcus capitis
atggcttcacaaacaaatgttagagaaatgatagccaagaataatgctaaaaagggtggagcaagtgataaaatcgttcctatcattttgggtattatttcagctatttcaatcttaaccactattgctattttatttactttactcactgagacaatcactttctttacacgtgtaccattttctaaattctttttaacaggaacgtggaatcctacgggttcaaatcctgaatatggcatttgggcattgattataggtacattaaaaattactttcattgcaactatcgtatcagttccaattggactaggcgctgcaatttatcttaatgaatatgcaagtgatagaacacgtcgtatcatcaaaccaatcctagaaatattagcaggtatacctacgatagtattcggtttctttgccttaacttttgtaacaccaattttaagaagtattattcctggtttaggcgagttcaactctataagtcccggtatagttgttggtattatgatcgtgcctattattacaagtttgagtgaagatgcaatgtcttctgtacctaataaaatacgtgaaggcgcttatggtcttggtgcaactaaatttgaagttgctactaaagttgtcttacctgcagccacttcaggtgttgtcgcatcaattgtattgggtgtttcaagagcgattggtgaaactatgattgtttcattagcagctggtagtacacctacatcttcattaagtctaactagttccattcaaacaatgactggttatattgttgaagttgcaactggtgacgcgccatttggctcagatatctactacagtatttatgcggtaggatttactctatttatcttcactataataatgaatctactttcacaatggatttcaaaacgattcagagaggagtattaa

SEQ ID NO: 519 - DNA, 906 bp, Staphylococcus capitis
atgagtgcaacaacaaatcctactaataaagcgttaatagataaaaataaggtagataaaaacatttctactcgtggtactaagaataaaatatttaaaggattattttttctatgcacagtcatcggtctcgtagtattagttgctttactagcacaaacaattattaaaggggcaggacatttaacacctgaattctttacgaatttctcatcttcaacacctgcagatgccggtattaaaggtgcgttggttggatccatttggttaattgttactattattccaattactatcattcttggaattggtacagcgatttatcttgaagaatatgcaaaggacaatatttttacaagtattgtaaaaataagtatttcaaacttagctggtgtaccttcaatcgtattcggtttattaggttacacacttttcgttggagcagcaggtatgggcaatagtgtcttagcagctgcattggcaatgtcattattgattcttccagttatcatcgtttcaagtcaagaggctattagagctgtacctggttcggtgagagaagcgtcatttggattaggtgctaataaatggcaaacgattagaagagtcgtattacctgcagcattacctggtatcttaactgggtttatcttatcgttatctcgtgcattaggtgaaactgcaccattagtagttattggtatcccaactattcttttagctacaccttctggcttattagatcaattctctgcacttccaactcaaatttacacttgggctaaaatgcctcaagctgaattccagaatgttgcatcagcaggaattatcgtcttactaattattttattagcaatgaatgcagtagcaattcttttacgtaataaattcagtaaaaaatattaa

SEQ ID NO: 520 - DNA, 879 bp, Staphylococcus capitis
atggctaattcacaagtcgcagaaaaaaataaattaaatgagcaaacagagaaaaataatggctctgtgtctacgattattactactgaaaatgataaaaaagacaagacacctgatagtcaaaaaaacatcgtatattctactcaaaatttagatttgtggtacggtgaaaatcatgcgttacaaaacattaacttagatattttagaaaataatgtaacagcaattatcggaccatcaggttgtggtaaatcaacttacatcaaaactttaaatcgtatggttgagcttgtaccttctgttaaaacagctggtaaaatcttatatcgcgatcaaaacatctttgatgctaaatattctaaagagaaactaagaactaatgtaggaatggtcttccaacaaccgaacccattccctaaatcaatttacgataatattacttacggtcctaaaacacatggtattaaaaataaaaaagttttagacgaaattgtagagaaatcattacgtggcgctgcaatatgggatgaattgaaagatagattacacactaatgcttatggcttatcaggggggcaacaacaacgtgtttgtatcgctagatgcctagcaattgaaccggatgtaattttaatggatgagccaacatcagcattagacccaatttcaactttaagagttgaagaattagtacaagacttaaaacaaaattattcaattattatggttacacataacatgcaacaagctgcacgtgtatctgataaaacagcattcttccttaatggttatgtaaacgaatacgacgacactgataaaatcttctctaatccttctgataaacaaacagaagattatatttcaggacgtttcggataa

SEQ ID NO: 521 - DNA, 648 bp, Staphylococcus capitis
atggcaatcattagacataaatacgaaggtcagctagatgagttaatcaaagatttacgtcgtcttggccttcgtgtttattttaatatcaaaaatgcattagtgtcgttaagtgaagaaaaaagaacgattgctagagaaaccattgagaaagataaggaaattaatcaattagattatgagattaatgaaaaagtcattatgttaatcactaaacagcaaccaattgctactgatttacgcatgatgatggcagcattaaaaatttctactgactttgaaagaatgggggacaatgctgcaagcatcgcacatatacgtttaagagtgaagattaacgatgattatgtgtttacacgtttaaagacgatgggtaagttagcaatgcttatgctagaagacttaaatacagcagttaaaaccgaggatttaacattaattaaggaaattattgaaagagataaagacattgatgatttatacattaatatcgttaacacaacatacttaattgataatgatccattcgttgctggtcaagcacatttagccgctcgacacttagaacgcattggagatcacattagtaatattgccgaaagtgtctattattatttaaccggagagcattacgatacatttgactaa

SEQ ID NO: 522 - DNA, 1809 bp, Staphylococcus capitis
atgacacaaggtctacctttaagaaaagatgttccaaagcaagaaacatgggacctcaaagatctttttattaatgatgaagcattttatgaaactttaaatcaagtatttaagtcttctaaagagtttaattctaaatataaaaatcaacttactaacattgagaatgtcgaacgagcgttgaaagattatgaggacattctaattcaattagatcgcctatataattatcctgaattaagagttagtgttgatacttctaatgaagaggcacaaaaagtaaatgctaaacttaatacgatgtctggaaaaattgctggtttattatcatttgtagattcagaaatcttggcattatccgaggaaacgttaaatgaattacaagaaaaaactaattatcctcactttattaagagattacatgatagaaagccgtatcaattatcaactgaagtagaacaagtacttgccacattaacacctactttaagaagtccgtttgaattatatggcaccactaaaagtttggatatagacttcgaatcatttgaacataatggtgttacctatccattagattacgcaacttttgaaaatgaatacgaagatcatccagatgctgaatttagaagaaagagttttaaaacatttagtgatgctatacgtaaatatcaaaatacaacggcagctacatataacatgcaagtacaacaagagaaaattgaagcggatttacgtgggtatgactccgtaatagattatttacttcaagaacaagaagttacgcgtgatatgtttgaccgtcaaattgatgtcattatgagtgatttagctcctgtaatgcagaaatatgctaaactcattcaacgtgtacatggtcttgataaaatgcgctttgaagatttgaaaatatctattgacccaagttatgaacctgatatatctattgaaacttcaaaagaatatatttatggagcgcttaacgttttaggtgatgattatgtaaatatgttagaaactgcttacaacaatcgttggattgatttcgcacaaaataaaggtaaagagacaggcgcttattgtgcgagcccttactttacgcactcttatgtgtttatctcttggacaggcaaaatggctgaaactttcgttcttgctcatgagttaggtcatgcaggacattttaaattagcacaagaccatcaaaatttactggaatctgaggcatcaatgtactttgttgaagcgccttctacaatgaatgaaatgttaatggctaactacctatttaacagtagtaatgatcctaaattcaaacgttgggtgattggttcaattctatcaagaacttattaccacaatatggtaacgcatttattagaagctgcatatcaacgtaaagtatatcaattagtagatgaaggagaatcactcacagctccgatcctaaataaaattatgctagatgtgtacgaaacattcttcggtaatgtggttgaaatgactgatggcgtcgaactaacatggatgcgtcagccacattattatatgggtttatattcatacacgtactctgctggtttaactattggtacagttgtatctcaaaaaattaaaaatgaaggtcaaccagctgtagataactggttaaatacattaaaagctggcggtagtatgtctccagttgaattagctcaaactgccggtgttgatatcactactgaagctccattaaaagctacaataaagtatatctcagagttggtggatgaattagagagattaacagatgaaattgaagctgaataa

SEQ ID NO: 523 - DNA, 351 bp, Staphylococcus capitis
atgacaatttttgatatgcctaattatttatggattactatcttagcaatgattttgttaacagtattctgtactcttgttttacataaatggttttcggccgcaatcatcacgtttgtagttttagcattattagcattctttattccaaatttccatgatatttcttatcaacctttattaggttatgctgcctttttagctataatgagtttaatcataagtttcttattgtggttctttactcgtaaatggcgacgtgagcgtaagaaaaataaacttgagaaagaaattcgtaaatatgaagatgatgacgattttaaaaagtcgagacatcgttttcgtaaataa

SEQ ID NO: 524 - DNA, 1005 bp, Staphylococcus capitis
atgtttaaaacaatcatttccaaaatattgcaaatgatgattgttctgtttgtaatcacaacgctcacatttattctgatgaaattatcaccaggtaatcctgttaataaaatccttcatcttgatacaactcaggtttctcaatcccaaattcgagcaacagaacagaaattaggtttaaatgactcaatatttgttcaatggtggcactggatgagtcatttattacacttcaatttaggtacaagttttcaaactaatgaaccagtaacacaagaaatcacaggttatattggcccaacattgattattacctttggcactctaattgtatctatgcttatttctataccattaggtatttttgcggcattaaactatcacaaaactttagatcacttgatacgtatttttacttctctttcggtaagcttaccttcatttttttttggattaattttattatttatttttaatcaaaaactcaatctcttaccaacatcggaggaggggtctatagccatatatgtattacctatacttacaatgagcattggaatgtgtgcatattatattcgactcattcgatctaatttattagaacaataccaaagtccaattgtggaagcttctaggttacgaggaatgtcagaacgttatattttatttaacgacatctttaaaccttcattacttcccattatcccattattaggtttatcagtaggtagtttaatagggggcactgtagtcattgaaaacttattcgatattccaggtttaggttacattttagtagatagcatcaaatcaagagactatcctttaatacaaggttgcgttttatttataggctgtttcgtagtgattatcaatacgattgcagatattttaagtttgatgatggatcctaaacaacgttataactctaaagatggaataaatattttcaaatcctctcgccaaagccagcatagacaagaaggtgatcgacatgaagcgtaa

SEQ ID NO: 525 - DNA, 837 bp, Staphylococcus capitis
atgaagcgtaaactagccaaccgtaattatattttttatgtgtttggtatttatatctttataatcattgccttacaattatttgtaagtccagacgcagctttcaatgttcatttatcagagacgtttaaacctataagcttcaaacatttattaggcactgacgattatggtcgcgatttgtttagccgtcttatcataggcgctcgtacaactttattcattacattacttacgttactttttactattttaataggtgtgccattgggtcttttggcaggctataaaaaagggattattgattcaatcattatgaggattatcgatatcggtttaagtattccagagtttgtcataatgattgctttagcaagcttttttcatccaagtatatggaatttagtcattgcgattacacttattaaatggatgaattatacaagtgtaacgagagggattgttaattctgaaatgaattattcctatatcaaaatggctaaactattcaatgtgtcaacttttaatattttatttaaacatttattaccaaaggtcataccatctattttggtcattatggtagtagatttcggtaaaattatattatacattagttcgctatcattcttaggattaggggcacaaccgccttctcctgaatggggagctatgctgcaagcaggacgaaatttcatcacgtctcatcctattatgattattgcaccagccacacttatttcaatcacaatattgttattcaatcttactggtgatgcaattcgagaccgcttattagagaagagaggtgccgagtttgactcttttaaaaattaa

SEQ ID NO: 526 - DNA, 780 bp, Staphylococcus capitis
ttgactcttttaaaaattaaaaatcttaacattagcgatctaaatggtacaagtttaattaaaaacctaaacttagatgtccgcaaaggaatcttaaatgtaattattggagaaagtggggcaggtaaaagtctcacagctagagcactgttaaattatttacctaaaggtcttgatatgagttttacggaatatcaatttgagaataatgaggctcgtgacataaaaaaatttttaggtaaggacattggttatatttctcaaaattatgctcaaagctttaacgaacatacacgtttagaaaaacaactcatcgcaatataccgtactcatcatgatgcaagtcgttttgaagcattagaaaagataaagaacgcattaaaatgggtgaatttagatgattctaatattataaaaaaatatagctttgaactttcaggtggtcagctagaacgcgtatatattgctagtgtactaatgctagatcctaaacttattatcgcagatgaacctgtagcttcattagatgtggttaatggtcataaaataatgcaactgcttcaacacattgtcaaagatcatcataatacggtactccttattactcataatatgaatcatgtccttcgttatggagattattttactgttatgaagcatggggaagtggtagagactggtgaagttggcaacctcttagaaaatagagtatctcattcctatacaaaacaattattagaaaacagaaataccttgagtcaaagggagataaatgaataa

SEQ ID NO: 527 - DNA, 696 bp, Staphylococcus capitis
atgattagattacaaaacgtctattatgaatatagtaaaaatcatccagtacttaatggtattaatttagacattaaagaaaatgaaaaggtaggtattctaggtgagagcggggcaggtaaaactaccctagttaaactaatattaaatgaaatcaaatctataagaggtaaagttaatgtagattccaaacgtgtattgcctatatatcaacatgcatttgaaagttttgatagacactatacaattcaacaatcattagaggagccccttatttattacaataaagttaaagcttcatttataaaagaacaaattttaaatcatttagatgcttttcacttatctcatcaattgttgcaaaagtatccaaatgaagtaagtggcggtcaattgcagagattaaatattataagaactttactagctcaaccagacatcttgatatgcgatgaaataacatcaaatcttgatgttatcgcagaacaaaaggtaattgatttcttattgaaatccgaaattgacatacctcaaacgatgattgttatatcacacgatttatcagtgttgcaacgtttaacaaatcgaattatcgttttaaaagatggattaattgttgatgatttcaaaacaaatgaattatttgattctgaacgtaatgagtacactaaattattaattgaaacatttgaataa

SEQ ID NO: 528 - DNA, 765 bp, Staphylococcus capitis
atgaattttatttttgatatagatggtacaatttgttttgatggtcatcatgttgaccaatctattaaacatcggcttgtaaaactcaaaaatgctcacaataatgtaatattcgcatctgcacgtcctataagagatttgctaccagtaattcctgaatttgcggattatactttaattggtggaaatggagctattatttctcaaaatggacaaatcgaaattatttcggaaatagacgttcatgatattacgcttatcaaacaaatcattaagcaatacaatttaacatatatcattgatgataaattcaattactcgacaaatctaaatgctgatactgaattgtatcagcgtatagaccctaatcgtacggcacaatctttacatatggatgctataaaggatccgattaaggctatacttttaaatattaaatctgaagaatttgctactattactaatactttagaaactgaatctaatggaattgagcttatacaccattacaatgaatcatacattgatgttactgctcaaggtatagataagcatacgacgattcaatacatattgggtgctgaagtggattatatcgcattcggcaatgatcataatgatatacatatgttaaataatgcttctcatggttatttcgtctcaaatgctaatgtagagtatcaatcttttttaaagaaccctaatatagaagttataaataatactaatgaagcaatttgtaatgtcttagatagatatctttaa

SEQ ID NO: 529 - DNA, 1254 bp, Staphylococcus capitis
atgaaatttacagagttaacagttaaagaattcgaaaactttgtacaaaatccatcattagaaagccattattttcaggtaaaggaaaatattgctacgcgtgaagcagatggattccaagttgtattattaggtgttaaagatgatgacaatagagtaattgcagcaagtcttttctctaaaattcctacaatgggaagttatgtatattattcaaatcgtggtccagttatggattattcagatttaggtttagttgatttttatttaagagaattggaaaattatctacaccaacatcaatgtttatacgtaaaattagatccttattggatatatcaagttcatgataaagacatcaatcctttaactgagaagaacgatgctttagttaacctctttaaatcacatggttatgaccaccatggtttcacaactgaatatgatacttctagccaagtaagatggatgggcgttttagatttagaaggtaagacaccttcttcactgaaaaaggaatttgatagtcaacgtaaaagaaatattaataaagcgataaactatggaattaaagtaagatttcttgagagagatgaatttgataaattcttagatttatatcgcgaaactgaagctagaacaggctttgtatctaaaacagatcaatatttctataatttcattgatcactatggcgataaagttcttttaccattggcctatatagacttagatgaatacatagaaaaagttcaacattctttaaatgataaagagaatcgtcgtgatgatatgatggctaaagaaaataaaaatgataagcaattaagaaaaattgccgaattagataaacaaattgagcatgacaaaaaagaattactaaatgctagtgagattcgtcaaactgaaggatccattctaaacttagcagcaggtgtatacttcgctaatgcatatgaagtcaattatttctcaggaggttcttcagaaaagttcaaccaatatatgggaccttatgcaatgcattggcatatgataaattattgcttcgataatggttacgcaagatataacttttatggtttatctggtgactttactaaagatagtgaagattatggtgtttatcgctttaagagaggatttaatgttcaaattgaagaattaattggcgatttttataaaccaattaataaagtgaaatattggttattcacgacattagatcgtatacgtagtaaggttaaaaaataa

SEQ ID NO: 530 - DNA, 1254 bp, Staphylococcus capitis
atgaagtttacgaatttaacagccaaagaatttagtgactttactgatcaaatgccttatagccattttactcagatggaaggtaattatgaacttaaagttgctgaaggaacggattcacatcttgtaggaattaaaaataatgacaatcaagtgattgctgcatgtttattaactgctgtacctgtaatgaaaatttttaaatatttttattcaaatcgcgggccagtaattgattatgataataaagaacttgttcactttttctttaatgaactaagtaaatacgtaaaaaagtataactgtctttatctaagagttgacccttatcttccataccaatacttaaatcatgatggtgaaattattggaaatgctggccatgattggtttttcaataaaatggaagaattaggatttgaacatgaaggctttcataaaggcttccatcctatattacaagtaagataccattctgttttagatttaaaagataaaacatctaaagatattcttaaaggaatggatagtttaagaaagcgaaatactaagaaagtacaaaaaaatggtgttaaagttcgtttcctatccgaagatgaattacctattttcagatcatttatggaagatactactgaaacgaaagaattcgctgatagagatgatagtttctattataatagattcaaacatttcaaagacagagtgttagtaccattagcatatattgatttcgatgaatatatcgaggaacttaataatgaaagagatgttctcaataaggatttaaataaagcgcttaaagatattgagaagagacctgacaataagaaagcttataacaaaaaggataatcttcaacaacaattagatgcaaatcaacaaaaaattgatgaagctaaaaatttacaacaagaacatggtaatgaattacctatttcagcaggatactttttcattaatccttttgaggttgtatattacgccggtggtacttcaaatcgttatcgtcattatgctggtagttatgcaattcaatggaaaatgataaactatgctttagaacatggtattgatcgttataatttttatggagttagtggggacttcagtgaagacgctgaagatgtaggagtaattaagttcaaaaaaggctataacgctgatgttattgaatatgtaggtgattttataaaaccaatcaataaacctatgtatgcaatctataacgcacttaaaaagttaaagaaatag

SEQ ID NO: 531 - DNA, 660 bp, Staphylococcus capitis
atgagtaaaaaagtattatttgttctaactagtacgagtcagtatcctgatggtacggaaactggtttatggttagaagaagccggagaaccttatgatattcttagaaacgaagggattgatgttgatatagcgtcaatcaaaggtggtaaggttaacttagaccctaactccacttcagatgagttattaaacaaatatacttcatttacttcgcagttaaatcatacaccaagtattgaggacattgatgttgatgagtatgaagcaatttatttaccaggtggtcatggtacagtttttgattttgctaataatgaaaaattagcaaatattttagtacattttagagaccatgataaaattatttcatcagtttgtcacggaccaagtgcatttgttggtgttaaaacaagtaatggtaaatatcttgttgatggtatacgcttaaccgcttttactgatagtgaagaaaaagcaatgggactggaagataaagtaccatttttaacgcaatctaaattagaagaacaaggtgctcatttcattacaagtgatgattttacttcacatttagaagaggttcgtaagtttattactggtcaaaatcctcaatcaagcgaagtcattggtaaagcacttgtaaatgcattaaaataa

SEQ ID NO: 532 - DNA, 732 bp, Staphylococcus capitis
atgagtaagttatttattccttatataatgggaaatttaaagtttattgagaacttaaagatactaagtgaagcaggtgctgatattatagaaattggtgttcctttttcagatccagtagcggacggttcaacaatcatgaacgctggagcaaaagccattgaagaaggcgtgaatattaattttatatttgaacagttaattaaaaataaagagactataacttctaaatatgttttaatgacctattataatattatctcatcatttggggagaatgaatttttaaataaatgtgaggaagcaggtgtatatggtttaatcattccagatttgccgtttgaactaacccaaaagtttaaaaaagatttccctaatgagaaagttaaattaatctcacttatagcaatgactacttctgaggaaagaattaaaaatattgctaaaaaggcagaaggttttatttacacggttacgatgaatgctactactggagaaaatggtcaatttcaccctgaattaaaaagaaaaatcgaattaattaaaggtgtcacagatgtacctgtggttgctggattcggtattagaaatcaagaacatgtgaaagatattggacgtatagcagatggcgttgtcatcggcagtgaaattgtaaaaagattcgctgagagtgatcctagtgagatgtttcaatttttaagaagcataagaaagacactcgatcaaatttaa

SEQ ID NO: 533 - DNA, 1209 bp, Staphylococcus capitis
atgaacatacaaacagaagctgacgagctaggtttttttggtgaatatggtggccagtatgtccctgaaacactgatgcctgcaatcatagaactcaaaaaagcttatcaacaggctaaacaagacgaatcattccaagaggagctcgcaagttatttaaaagactatgtcggaagagaaacaccacttacttacgctaaatcatttaccgaagatttaggaggagccaaaatatatttaaaacgtgaagacttaaatcatactggggcacataaaattaataacgctttaggtcaagcattgttggcgaagcgtatgggaaaaacaaaattagttgctgaaacaggtgctgggcaacatggtgtggcgagtgccacagtagctgctttattcgatatggagctcatcgtttttatgggaaaagaagatgttaaaagacaacaattgaatgtatttagaatggaacttctaggcgcaaaagttgtttcagtagaagaaggacaaggaacattgtctgatgctgtcaatagagctttaaaatattgggtaagccatgtagaggacacacattatttattaggttcagccttaggacctgatccttttcctacaatggttagagatttccaaagtgtgattggaaacgaaataaaaagacaaattaatcaaaaagaagggcgtttaccagaggctatagttgcatgtgtaggtgggggttctaatgcgatagggaccttccatccatttattaatgatgacgtaaaactttacggggttgaagctgcaggtaaaggagttaactcaaataaacatgcattagctataggaaagggaaaacctggtgttctacatggatctaaaatgtatcttattcaagatgaggatggacagatagagttagcccattcaatatctgcaggactagattacccaggaataggtccggaacattcatattataatgatataggtagagtgaaatatgtaaatgcctctgatgaagaagccatggaagctctaataagattctctagagctgaaggtattattcctgcaattgaaagtgctcatgcgattagttatgttgaaaagttagctccaaaaatgagaaaagatgaaattattgttattactgtctctggtagaggggataaagatatggaaacaattagaaattatactgaaagtcgtggtgatatagatgagtaa

SEQ ID NO: 534 - DNA, 648 bp, Staphylococcus capitis
atgattttaaaattttgcgggtttaaaaatgaagaagatatcgaaaaggttaaaaatctaaatgttgatgcaatagggtttgtccattttcctagcagtaaacgacacgtgagtatgaatcaattaaaattactgtccaaacgagttccagaccatattcattgcgtggtagtcttggtaaatccaacattagacttaattaagcaagtcttcaatgaaactaatatcaacgtaatacaacttcatggaagtgagtctattcaattaataaaagcaattagaaagttaaatcctacgattaaaatttttaaagcaattcctgctgataaatatttaaataaaaatattgaaaaatatgagaaaaccgttgatttatttattattgatacaccatctcaaaattatggtggaacaggtgatacatatgattggaatatgcttagtaatattcggaaatcacgttttttaatagctggcgggttagatataaatcatattagtaaactaaaataccttaaattaggtcagtgtggttacgatattgctagtgggattgagacagataatattaaagatttagcaaaaatgacgcaaattataaaaataattaaaggagatgaaagaaatgaacatacaaacagaagctga

SEQ ID NO: 535 - DNA, 783 bp, Staphylococcus capitis
atgacgatacttaatgaaatagttaattataaaaagtcactacttaaggaaggatattatcaacaaaaattagaagaattagaatatgttgatgtttctaataagaagaaattaataaatgcattgaaaaatgaaaaaaagttatcggttattgcagaaataaagactaaaagtccaacgctaaaacaattacctcatagaaacttaatagatcaagtaaaagaatatgaattatatggtgcaaatgcaatttcaatcttaacagatgaaaaatactttggtggtagtttcgaaagattgagtgaactcaccgtcgaaacatctttaccagtactgtgtaaagattttatagtagataaaattcaaattgacgtagctaaaaaagcaggtgcttctattgttttgcttattgttaacattctcacagacaaagagttaaaaactttatatgattatgcaacagaacttaacttagaagttttagttgaggtacatgatagaaatgaattaaatagagcacatcaattatcgccaaaaataattggagttaataatcgagatttgaaacggtttgttactaacgtggaacatacgaaccaaattttaaaatttaaaaagaaaggatttcattatatttcagaaagcggtattcatagtactcatgatgttgagcacattttacagtcaggtatagatggcttactagtgggtgaatcattaatgaaatgcaacgacttaagtcaatttttaccaagcttaaaaatggagaagattcatcaatga

SEQ ID NO: 536 - DNA, 996 bp, Staphylococcus capitis
atgaaattattaaaagatattgaagataatagacagttaacggaagaacatatgaaggaatttatcgatattcttcttaatccaaatgtgaaggaagacaataaacttaagttattaaagtcttacactaaaaaggaaatgcaacaaattgaactaacctatttagttaaacatcttataagcacaatgtatccagttcaaccctattatgaaggagcgatgtgcgtttgtggtactggaggagatggttcaaacagtttcaatatatcaacaacagtagcattcatagtagcaagtgccggtgtaccggtagttaaacatggcaagaaaagtatcacatcgcattcaggtagtaccgatgttcttcaagcaatggggattcaaacaagtgaagtagctagtgtgataaaacaattagatacaaaaggtctctctttcattagtgccactgattcttatccaattatgaaatacatccaacccattaggaagcagataaagtctccaacaatatttaatttagtagggcctcttatcaatccatttaaactaacttatcaagtgatgggtgtctatgatgttacacaactagataagattgctcaaactatcaaagatttaggtaggaagagagctattgtcgttcatggtgcaaatggtatggatgaggcaacgctatcgggaaacaatatcatttatgaaattaaccaaaataagccaatcaaacagtatacaattaatgctaaaaattatggtttaactattgctgacaatgacgcactcaaagggggaacacctgaagaaaataaaaatatagccataaatatattaaatggaaacgatcaatcgagtaaaaaagatgtcgttatactcaatgcagcaattgctttatacgtggctgaaaaagcaaaagatattcactcaggtattaaactagtacgtcatcttatagacagtggtcaggctatgaaacagtatttaaagatgggggtatag

SEQ ID NO: 537 - DNA, 567 bp, Staphylococcus capitis
atgattttaattatagataactatgattcttttacctataatctcgtagatatagtatcaaaacaagcagatgtgactgttaaatttcccgatgacagtgaaatttatgaacttaaaaatatctcagcagttattatttctccaggtccagggcatccattagataataatttattgattaaattaattgaatatttcgaaaacaaaccgatattaggtgtctgcctaggatcacaagcattgacttgttattacggtggagaagttattcaaggactaaaaattatgcatggtaaagtggatgatttagaaatagtgaaatcaacacctttgtaccaaggtttacctaatcattttaaaataatgcgatatcactcattaataagtaatcctaaaacatttccatccgctttagaaattactggtcaaacgatagattgcatacagtcatttcaacataaatacaaaaaacattatggaatccaatatcatcctgaatcctttgcaacagaacatggaaaaaaaataattaacaactttgtaagactagcaatgaaaggtagttaa

SEQ ID NO: 538 - DNA, 1407 bp, Staphylococcus capitis
atggatgtagtttataaaaagttaaatgcgctaatgacgccagaagctttagcacaattaggagaagcaaaaattatatttgaaagtacaaatcaagataaattaaaaggaagatactccatcgttgtcttagaagactatggttcagttactcttgataataatcaattaattattaatacaagagaaaaaataaaagtggtgaatgaacatccgtatgattatttaaaaagtttagtcaatcagtactacgtgaatattgcagatgatcaattgaagcatttaccttttatttcaggttttatagggacatgtagttttgatcttgtaaggcatgagtttcctaaacttcaagaaattgaattagatgatcatcgggatcatgacgttaaattttatctggtagaagatacttatgtttttgatcactataaagatgagttgtatgtgatttcaacaaatttattctcaaatacttctaaatctcagttggaagcaaaagttaaacaaagaattgatgaattaaaaaacatcaatttagctcatgaaagaataaagttgaaacaacctgaacgacaaattgagacaaatataggagaacaagaatttttaaaaataataacagaattaaaaaagaaaatcgcagaaggggatatgttccaagttgtgccttcaagaatttattattacaagcataactttgtaactcatttgcatcaattaagttttcaactttatcaaaaattaaagagacaaaatcctagtccatatatgtattatatgaataaagatattcctatagtcgtaggcagttcacctgaaagtttcgttagagttaaagatggattggtttataccaatccaatagctggaactactaagcgaggtgctaataaagatgaggataagaaaaatagtcacgctttacttaaggacgaaaaagagataagtgaacatagtatgcttgtagatttaggtagaaatgatattcatagaattagtaaagtaggaacttctaaaatcacaaagttaatggaaattgagaaatatgaacatgtcatgcacatagtgagtgaagtcgtaggtgaattaaaggagaatttatctccaatgagtgtcattgcaagtttattacccacaggtacagtatcgggggcaccaaaattaagggccattcaaaggatttatgaagcttatccgtttaaacgagggatttatagtgggggagttggctacatcaattgtaatcataatttagatttcgcgcttgctatacgtactatgctcatagacgacaaacaagtaaacattgaagcaggttgtggtgtagtttatgattccatacctgagaaagaactcgaagaaactaaactgaaagcaaagagtttactggaggtgactccatga

SEQ ID NO: 539 - DNA, 1035 bp, Staphylococcus capitis
atgagcggaattttagaaactataaaaacattaactgaaatcaatagcccatctggtaatgctgacgaagcgattaattatgtcaaaaactatgttgaagatctaggttatcatacaaaagttactaataaaggcggactccttattactgttgatggtacaaatgaaaataaacagcggtgtataacagcacatgtggatacattaggggcaatggttaaagagattaaagaaaatggcagattagctttagacttaataggtggatttcacttcaatgctatagaaggtgagtattgtgaaattcaaacccaaaccggtcaaacattttcaggaacaatctgtctacatgaaacgagcgtgcatgtttacaaagataaccataatattccaagagataaagagcatatggaagtaagaattgatgaaataactcataatgctcaagaaacaaaagatttaggcatagaagtgggtgatttcatatcatttgatcctagaacagttatcactcaatcaggatttattaagtctagacatctagatgataaagcgagtgtcggaatgattctagaacttttgaaaaagctaaaaaacgaaggtacaaaattaccgcatacaacacaattttatatttctaacaatgaagaaatagggtatggtgcaaattcaagcatttcagaagatattgtcgaatttatagctttagatatgggagcgctaggggatggtcaatcttctaatgaatatactgtttcaatttgcgcaaaagatggatctggtccataccataaagcactaaaaaatcatctaattaacctttgtaaaattaatgacataccatacaaagtagatatttatccatattatagttcagatgcttcagcagctctaaaagcaggatctgatattcgtcatggtttattcggagcaggtattgaatcctcacatgcaatggagagaacacacttagattcgattaatgccactcaagaattactttatgcttattgtttgtcgccaatcaatgaataa

SEQ ID NO: 540 - DNA, 1092 bp, Staphylococcus capitis
atgcaacacatattatttgttggccttggtcttattggtggtagtttagctagtaatttaaaatattataattccgacgtacaaattatggcttatgacgctaatgaaacacagttagataaagcattgtccattggtattattgataaaaaaataactgattacaaaaccgcagttgaaaaagctgatgtcattgtttatgcaacgcctgtagaacaaacaattaagtatttatcagaacttcccaattataaaaccaagcctcatttgatagtgaccgataccggaagcactaaatctactattcaaacttttgaacaacaactactagataacaatattcatttagttggtggtcatcctatggcaggaagtcataaatctggagtattaaactctaaaaagcatttatttgaaaacgcctattacattcttgtatttaatgaaaaagaaaatcaagaagcagctaaatatttacaaaatttattcaagcatactttagctaagtttattacaacgaatgctgatgaacatgattttgtaactggtgtagttagtcatgtccctcatattatcgcatctagcttagtacacttaagtgccaatcatgtagatcaacatgaattagtagaaaaattagctgctggaggttttagagatattacgcgaattgccagtagtaatgctcaaatgtggaaagatatcactttaaataaccaaacgcatattttgtctttgttaaacgaactaaaaaatcaaattacagcatttgaaaagatgataaattctaataatgatgaaaacatttacgagttctttgctaaagctaaaaattatcgtgatcgcctacccgctaaacaacgaggtgccctatctgtggcgtatgatctatatgtagacattccggataaaccgggtatgataagcaaagttacacatatcttaagtttacataatatttctataagcaaccttaaaattttagaagtccgcgaagatatctatggcgcattgcaaataagctttaaaaatcctgaagatcgagaacgtggtatcaaagctttaaaaaatttcgatacctatattgaataa

SEQ ID NO: 541 - DNA, 1263 bp, Staphylococcus capitis
atgtatgactataatctattagaggatagagatgtattatgcattgatcagaagagcttttttgcgagtgtgtcatgtatggagaaaggcttggatcctttagaaaccaagttagcagtagtagctgatacgaaaaggcaggggtcagtagtgttggctgctacaccgaaattgaaagaaataggtataaaaacgggatctagactttttgaaataccacatcgaaatgatatttatatcattaacccaagtatgagaaagtatttaaatgtttctgttgctatttcaaaaattgcactacgttatgtaccacctgaagacttacatcaatatagtattgatgaattttttatggatgtcacagatagttatcataggtttagttctacagtttatgcgttttgcgaacgattaaaaaaagagatactggaagagacaggtatccattgcactgttggtataggttctaatatgttattaagcaaaatagcaatggatatagaagcaaagcatacagaagatggaattgcagaatggcgttatcaagatgtacctgataagttatggcctattcaaccgttaagagatttctggggtattaataaacgtactgaagcgaaattaaataagagagggatatttacaattggcgatttagcacaatatccttatcgctatttaaagagagattttggtattttaggtgtagatatgcatttacatgctaacggtattgatcaaagtaaagtaagagaaaaatacaaagtaacaaatccttcaatatgtaaaagtcaaattttgatgagagattatcgatttgaggaatcaaaagtagtcatgcaagaactcattgaagatgtagcaagtagattaagagcacagaaaaaattagcgcgtacgatacatttttcatttggttatgctgatgatggaggtgtacacaagcagtatactttagaagatcctacaaatttagaaagagatatttttaaagtgattaattattttgcgaatcgattatgtgataaaaatgctttgtataggacgctaagtgtatctttaacacagtttgtagatgaacaagatcgacagttaaatttatttattgatgagtatgagcgtaaacgagatgaaaaactagctaaaacaattgaccatttacacctaaaatatggtagaggtatcgtttctaaagcgacatcttatactgaagcagggactaagcatggtcgattaggacttatggctggccacaaaatgtag

SEQ ID NO: 542 - DNA, 186 bp, Staphylococcus capitis
atgccaatcgtaaatgtaaagttattagaaggacgtacagatgatcaattaaaagatttagtgaatgaggttacaaatgcagtagaaaaaactactggagcaaacaaagaggccatccacgtcgtaatcgaagaaatgaaaaagagccattacgccgttggtggagtaagaaaatcagatcaataa

SEQ ID NO: 543 - DNA, 987 bp, Staphylococcus capitis
atgacagaacagaaggaacatagagaaacagagtatcgacgtcacactggcacaacatcgacaccttctaggcgacgaaataaaaaaagactacgcaaattaccttttatcattttaatcattctcatcattcttatttcaataattgtctatatcactcatcaatataatagtggtatgaagtatgcgaaagagcatgctaaagatgtaaagatgcatcaatttaatggagccgttaaaaatgatggcaaaatatctgtattagtacttggagcagataaagctcaaagcggtaaatctcgtacagactcaattatggttgtacaatacgactatattaataaaaaaatgaaaatgatgtctgtaatgagagatatttacgcagatatccctggttatgataaatacaaaattaatgcagcttattcacttggtggacctgagttactaagaaagacacttaataaaaatttaggtatcaatcctgaatattatgcggtagtagatttcactggatttgagaaaatggttgatgaacttgaacctaatggtgtacctatagacgtagagaaggacatgtctgaaaatataggtgtttcattgaaaaaaggtcatcatagattaaatggtaaagagctattaggttatgcgagattccgtcacgatgctgaaggagatttcgggcgtgttcgccgtcaacaacaagttatgcaaactttaaaacaagagttagtaaattttaataccgttgcaaaacttccgaaagttgcaggtattttaagaggatacgttaatactgatatgcctaattcagctattttccaaactggattaagctttggtattcgtggtgataaagatgttaaatcactaactgtacctgttaaaaacacgtatcaagatattaatactaataatgatggtagtgcgcttcaaattgataaagaaaaaaataaaaaagcaattcaagactttttcgatgattaa

SEQ ID NO: 544 - DNA, 504 bp, Staphylococcus capitis
atgaatattaatacggcatactttgccggtggttgtttttggtgtatgaccaaaccttttgatacatttgacggtatcgaaaaagtaacttctggttacatgggtggacatacagagaatccaacgtatgaagatgttaaaagtggtaacactggtcattatgaaacagtaaaaattgaatatgatgtagcacttttttcatatcataaactattggaaatatttttttcagtaatcaacccactagatgaagatggacagtttcaagatagaggttcccaatatcaaacagccattttttactctaatgaagatcaaaagaaatctgccgaatcatatatcgaagcacttcaagatactttaaatgcagacaaagcaatagctacaaaagtcttacccgcttcaactttctttgaagctgaagaataccatcaagatttctataaaaagaatcccgaacgttacgctaaagaacaacaagatagagcgaattattataaataa

SEQ ID NO: 545 - DNA, 2523 bp, Staphylococcus capitis
atgacgcaagaagtgaaaagtaaattattatctattttgaaatttatctttgccacagcgttatttatttttgtcattttcacattgtatcgtgaattagctcatattaattttaaagacactttgatgcaatttggcaaaataaatagattgtggcttgttttattatttgcaggtgggggagcatcgctcattcttttgtcactatatgacattattttagtgaaatcgttaaagcttaacatgtcagtgactaaagtattaagagttagttatattatcaatgctctcaatgctatcgtaggttttggtggctttatcggtgcaggagtcagagccttcgtttataaaaactatacagatgatattaagaaactcgtacattatatttcgattatcttgatttcaatgctcactggacttagtctcttgtccatattagttgttctacacgtttttaacgcttctcatatgatggataaaattacatgggtacgctggattttatatgttgtagcactatttttacctgtatttatcatttatactatcgctaaaccagcggataaatctaatcgttatatgggtgtgtattgtacacttgtatcttgtatcgagtggatggcagcagctactgttctttactttgctgcacttatcgtaggtattcatgtatcatttatgacatttatcggcatcttcgtgatcgcggcgttatcaggattagttagttttattcctggtggttttggtgccttcgatttagttgttttactaggacttaaatctttagatgtttcagaagaaaaaatattattagcattacttctatatcgatttgcatattattttgttccagtcattattgcacttatactatctacatttgagtttggaacaactgctaaaaaatatcttgaaggttcgaaatattatgttcctgctaaggactttacgtcattcttgatgtcctatcaaaaagacattttagctaaaataccttcattttcactcgcaatattaatatttttaactagcatcattttcttcattaataatttaacgattgtttatgatggactatatgatggaaatcactttgcttattatttaactttatctatccatacgagtgcttgtttattattaattttgaatgtgagaggtatttttaaacagagtcgtcgtgcgattatttatgcgatgatttctattattttaattgcgggagctacaatttatacttacgcatctttcttattgttaacttggcttgtagtcatgtttattttattagttttagcttatcgtcgtgctcaagtgcttaagcgtccgttccgttttagaaaattagttctcatgcttatactcagcgtgattgttttatatctaaatcatattttaattgcggaaacattatacgcattagatatttatcacattgaagtagatacatcattattaagatattacttctgggttactattttaattgtgattattctggttggtctcattgcatggttatttgattacaaatttgaccgtcctcatcaaattacagatttatcaatatgtgaagctattattcatgaatatggtggtaattacttgagccatcttgtttatagtggtgataaagattgttttatccatgaaaatgaaaaatcattcctcatgtatcgttataaatctaatgccttagttgtattaggagatcctataggcgatgcaaatacgtttgaatcattgttagaatcattttatcaatatgcagaatatagaggttacgacattattttctatcaagttagtgataattatatgcctttatatcatcatttcgggaatcaatttttcaaactaggtgaggaagctattattgatttaacatcattcactacctcaggtaaaaagcgtcgtggctttagagctacactcaataaatttaatgatttaaatatttcttttgaaattattgaaccaccattttcacaagatttctttaacgaactcaaatatgttagtgatagatggttagatggtagaaatgaaatgcacttctctgtaggtcaatttacacaaccatatctttctaaagcgcctataggtgtaatgagagatgaacatggtaagatgattgcattctgtagtttaatgcctacgcactttaacgatgcaatttctgtcgatttaattcgatggttaccagagctcgatctacctttaatggatggactgtatttacacatgttgttatggggtcaggaaaaagaatataaagcctttaacatgggaatggccaccctctctaatgttggtactttacattactcttatttaagagaacgtttagcagggcgagtctttgaacattttaatggattatatcgtttccaaggtttaagacgttataaagaaaagtatagtcctaactgggaaccaagatttttagtttatcgtaaagatagctctctatgggaaagtatgttgaaagtgatgagagtcattcgacataaataa

SEQ ID NO: 546 - DNA, 1215 bp, Staphylococcus capitis
atgtcaaacgaaaataaatctagtgaaaagaaaaaccatatatttagtttttctgaaacaagatttatgagatttttaggtggcaatgatcttatatatggtttagttgcacttgttttattaggtattgtaatctttattttcgataaagtttcctatgtatttgaaccatttattattatatttaatacaattgctgcacctattattgtttcattaatcttattttatctatttaatccattagttaacttaatggagcgttatcgaattccaagactgttaggtattacgattatttatgtggcagttgtgggaatcattacattaattgttaatttacttattcctatcattggttcacaaattgaaggattaattaaaaactctccgcattatttaaataaaattactcaatcaattgagaagataactactaactctttcctatctagttatatgagtcaagttaatgactggttagaatcagctcagaaaaaaattccttcaatgttatcagagtactttgatggatttgggcctaagcttgcatctttcgctgaagccgtttcaaatgttggtgttgtcatagtaacgacgccattcatattattctttatgctaaaagatggccatcgttttaaagattatacaacaaaaattatgccacctaaatttagaaaggattttcatgatttacttgaaaaaatgagtgttcaagtaggttcttacattcaaggtcaaatcatcgtttctttctgtataggtgtattactattaattggatattcaattatcggtcttaaatatcctttagtattagcgagtattgcagcagttacaagtgttgttccatacttaggaccaacgattgcaatttcaccagctattgtaattgcgattatcacatcaccttggatgttacttaaattagttatcgtttggacacttgttcagttctttgaagggcactttatttctccaaacgttatgggtaaaacactcaaaatacatccattaacaattatcttcattttgctatgtgctggtaatttaatgaatgtcgtgggtgtaattattggtattccattatatgcggtacttaaagtactagtatctcatatattcttactatttaaacgaagatataatcgttactatggtgaagatgctggagattatagtattaaacaagaagaagaaattacagattaa

SEQ ID NO: 547 - DNA, 849 bp, Staphylococcus capitis
atggggaattacgaaataacgaaaacactaaataacaacgtcctcatatgtaaaagtaataatcatgaagttgtgttaattggcaagggtattggtttcaataaaaaagtgggaatgatgcttgatgagaatgcttcaattgagaaagtatataaattagaacagcaacagcagaaagaacattataaaacgttggtcgagatgggggaagaccatgttgtccaagctgttatcgaatcggtcaatatgatttctgaggcctcgcttcaaactgatgataaaagcttagttgttgctcttacagatcatattatctttgcatataaaagacttaaacagaatcaagttatttctaacccatttgcaatagagacgcaacatctttacagtgatgcatatcaaattgctaagcgtgtcattgataaattgaatcagacgttagatgttcgattccctgaagatgaaattggttttatagctttacatattgcttctaattctgaagatttatcaatacatgatatatcagttatcaataaattaattaataaaagtatgacgattattgaaacagatcttaatcatgaaattgataaaacaacaacgcaataccaacgttttattaggcatatacagtttttaatttataggttaactaaaggggaaaatgtggatgcgcaagacaattttattttaatggttaaaaatctttatccacaatgttttaatactgcttataaaattttaaaaatgatacaacgtcagtttgatgtgattatcaatgagtccgaaattgtatatcttgcgatacatatacaccattttgaagctcaaattaaaatcgaataa

SEQ ID NO: 548 - DNA, 1464 bp, Staphylococcus capitis
ttgcaagatttcgataatttgattcctggctggtttaaatcttttgttcaggtcgggaatgatttgatttggtcgcaatatctaattggacttttattaactgcaggctttttctttactataagttctaaatttgttcaattaagaatgttacctgaaatgttcagagcgctcactgagaaacctgaaacgctaagtagtggtaaaaaaggtatttcgcctttccaagcatttgctattagtgctggatctcgtgtaggtactggtaatattgccggagtagctacagctattgtattaggtggacctggagcagtattttggatgtggattatagcttttattggtgcggctagtgcatttatggaagcaacattagctcaagtatataaagtgcatgataaagaaggtggtttccgtgggggaccagcatactatattactaagggtctcaaccagaaatggttaggtatcgtattcgcaacattaatcaccatcacatttgcatttgtatttaatactgttcaatctaatacaattgcagagtcattaaacacacaatatcatgttagcccagttataactggtattatattagctgtaattactgcaatcattatttttggtggcgtaagaagcatcgcaacattatcatcacttatagtacctattatggcaatcatatacataggaatggttttagttatcttgttattaaatatagatcaaatagttccaatgattggtactatcattaaaagtgctttcggtttacaacaagtgactggtggcgctgttggtgcagcgatacttcaaggtattaaacgtggattattctcaaatgaagcaggtatgggttcagcacctaatgctgcagctactgctgctgtcccacaccctgttaaacaaggtttaatacagtcgctaggagtattctttgatactatgttagtttgtacagcaacagctatcatgattcttctatactctggattaaaatttggtgaaagtgcacctcaaggtgtagctgtaactcaatcagctttaaatgaacatttaggttcagcaggtggtattttcttaacagtggctataactttatttgctttttcatcagttgtaggtaactattattacggacaatcaaatattgagttcttatctaaaaacaaagccattttgtttgtatttagatgtttagtagttgtgttagtattcattggagcagttgcaaaaactgaaacagtttggagtactgcagacttatttatgggcctaatggccatagttaatattatatctattataggattgtccaatatcgcttttgctgtaatgaaagattatcaacagcaacgtaaagaaggtaagaaacctgtatttaaacctgaaaatctagaaattaatttatttggtattgaatcttggggatctcaagctaaaataccacgtaatgataaataa

SEQ ID NO: 549 - DNA, 2403 bp, Staphylococcus capitis
ttgagtgagataattcaagacctatcccttgaagatgttatcggtgaccgcttcggacgttatagtaagtacattattcaagaacgtgcattaccagatgtacgtgatggattaaaaccagtacaacgaagaattttattcgctatgtattcaagcggtaatacatttgaaaagaatttccgtaaaagtgctaaaacagtcggtgacgttattggacaatatcatcctcatggtgattcttccgtatatgatgctatggtgcgtctaagtcaagattggaaacttcgacacgtacttatcgagatgcacggtaataatggtagtattgataatgatccaccagctgctatgcgttatacagaggctaagttaagtcaattgtctgaagagttattaagagatataaataaggaaacagtagccttcataccaaactatgatgacactactttagagccaatggttttaccgtcaagattccctaatcttttagtaaatggttctacaggtatatcttcaggatatgcgactgatattccaccacataacttagcagaagttattcaagctactttaaaatacatcgataaccctgatattactgtaaatcagttaatgaaacatattaaaggacctgattttcctactgggggaattattcaaggtatcgatggtataaagaaagcttacgaaactggtaaaggtaaaatagtcgtacgttcaagagtggatgaagaagaattaagaagtggtcgtaagcaacttatcattacagaaattccatatgaagtgaataaaagtagtttagttaaacgtattgatgaattacgagctgacaaaaaagttgatggcatcgtggaagtacgtgatgagacagatagaactggtttgcgtatcgcaattgaactaaagaaagatgttaatagtgaatcaattaagaattatttatacaaaaattctgatcttcaaatttcttataattttaacatggttgctattagcgatggtcgacctaaattaatgggattacgtgaaattattgaaagctatttaaaccaccaaattgaagtcgtaactaatagaacacgttatgatttagatcatgcggaaaaacgtatgcatattgttgaaggtttaatgaaagcactatctatcttagatgaagtcataactttaatccgtaattcaaaaaataaaaaagatgcaaaagataacttagttgctgaatttgatttcactgaagcacaagctgaagctattgtaatgttacaactgtatagattaacaaatactgatattgtagcattagaagaagaacacgctgaattagaagctttaattaaaaaattaagaaatattttagatgatcatgatgcactattaagtgtgattaaagacgaacttaatgaaattaagaaaaaatttaaagtgaatcgtttatcaacaattgaagctgaaatttctgaaataaaaattgataaagaagtcatggttcctagtgaggaagtgattttaagtgtttcacatcatggctatatcaaacgcacatctacgcgtagtttcaatgcaagcggtgttactgaaattggcttaaaagatggagatcgtttattaaaatatcaagaagtgaatactcaagatactgtcttagtgtttactaataaagggcgctacctgtttattccagtacataagttagcagatatacgttggaaggaactcggtcaacacgtttcacagattgttcctatagatgaggatgaacaagtggttgatgtttataatgaaaaagactttaactctgatgcattctatgtcatggcaactaaaaacggtatgattaagaaaagtagtgttagtcaatttaaaactacaagattcaataagccacttgtaggtatgaaagtaaaagaccatgatgaaattgtcaacgtgatacgattagaatctgatcaattagtaacagtacttacacataaaggtatgtcgcttacttactcaactagtgagttatctgatacaggtttaagagctgcaggagttaaatcaattaaccttaaagatgaagattgtgttgtaatgacagagagcgtttctgactcagattctatcttaatgataacgcaacgtggtgctattaaacgtattagttataaagttttacaagtcgctaaacgtgcacaacgtggtattaccttattgaaagaacttaagaaaaacccacatcgtattgttgatgctgcagtggttaaagaaggacaagaaacttatacggttttctctaacaatcacgaagaatctggtaatattaatgaagtacatctctcagaacaatacacaaatggttcatttattatagatgtcgatgattttggtcaagtagtaagcatgaccttagagtaa

SEQ ID NO: 550 - DNA, 2001 bp, Staphylococcus capitis
ttggcagtgaataaacaaaatacttattcagatgattctattcaggtacttgaaggccttgaagctgttagaaaaagacctgggatgtacatagggtcaactgataaacgcggattacatcatctcgtatatgaagttgtcgataactccgtcgatgaagttttaaacggttatggtgatgaaatcactgtaacaattaatcaagatgacagtatttcaattgaagataacggtcgaggtatgccaacgggtatccatgcgtctggtaaaccaactgttgaagtaattttcacagtattacatgccggtgggaaatttggccaaggtggttataaaacttctggaggacttcatggtgttggtgcatctgtagttaatgcattaagtgaatggttagaagttgagatacatagagatggtaatatttacactcaaagttttaaagacggtggtataccagcaacaggacttaataaaaaagggaaaactaaaaagacaggtactaaagttacatttaaacctgaccctgaaatttttaaggccacaacgtcctttaactttgatgttttaagtgaacgcttacaagaatcggctttcttattgaagaatttaaaaattacgcttaatgatttgcgtagtggtaaagagcgtgaagaagtttaccattatgaagaaggtattaaagaatttgtaagctatgttaacgaaggtaaggaagtacttcatgatgttactacattttcagggttagcgaataatatcgaagttgaagtggctttccaatataatgatcaatattctgaaagtattttaagttttgtaaataacgttcgtactaaagatggcggtacacacgaagtaggttttaaaactgctatgactcgtgtgtttaacgattatgcgcgtagaattaatgaattaaaagataaagacaaaaatttagatggtaatgatattagagaaggactcactgcaattatttctgtacgtatcccagaggagttacttcaatttgaagggcaaactaaatctaaactaggtacttctgaagcgagaagtgctgttgattcagtagtttctgaaaagttgcctttctatttagaagaaaaaggccaattatctaaatctttagttaaaaaagcaattaaagctcaacaagctcgtgaagcagcacgcaaagctcgtgaagatgcgcgctctggtaaaaagaataaacgtaaagatactttgttatcaggtaaattaactcctgcacaaagtaaaaatacagataaaaatgaactatatcttgtggagggtgactcagcaggtggatctgccaaactaggtcgtgatcgtaaattccaagcaatcttaccacttcgaggtaaagttattaatactgaaaaagcacgactagaagatatcttcaaaaatgaggaaattaacacaattattcacactattggagcaggtgttggtaacgacttcaaaatagaagatagtaactataatcgtgtgattataatgaccgatgccgatactgatggtgcgcacattcaagtattattattaacgttcttctttaaatatatgaaaccattagtacaagctggtcgtgtctttatagcattacctcccctctataaattagaaaaaggcaaaggtaaaactaagaaagttgaatatgcatggacagatgatgaattagaaaaattacaaaagcaacttggtaaaggatttacgttacaacgttataaaggtttaggtgaaatgaatcctgagcaattatgggagacaacgatgaatcctgagactcgtacattaattcgtgttcaagttgaagatgaagtacgttcttctaaacgtgtaactacactaatgggtgataaagttgcaccacgtcgtgaatggatcgaaagccatgttgaatttggtatgcaagaagatcaaagcattttagataataaagaagttcaagttcttgaaaacgaagaatatattgaggaggaaacgaattga

SEQ ID NO: 551 - DNA, 609 bp, Staphylococcus capitis
atgatgattgtcgtcatgttagttttaagttatcttattggcgcatttccaagtggattagtcattggtaaattattttttaaaaaagatattagacagtatggcagtggcaatactggagcaacaaatagctttcgtgttttagggaggccagctggtttcgtagttacatttttagatatcttcaaaggatttataacggtctttttcccgttatggttccctgttcatgctgatggcataatcagtacattctttacgaatggattgatagtaggattatttgcaattttgggacatgtatatcctatttatcttaaatttaatggtgggaaggcagttgctacaagtgcaggtgtcgtattaggcgtaaatcctttactactactcgttttagcaattatattctttggaatattaaagatatttaaatatgtttctttatcaagtataattgctgcaatttgttgcgtcataggctcggtcattattcatgactatatattattgggaatgagtgctctagtatcaatcatactaatcattcgtcatagaactaacattgttagaattttcaaaggtgaagagcctaaaattaaatggatgtaa

SEQ ID NO: 552 - DNA, 297 bp, Staphylococcus capitis
atggatatcgagctaactaaagaggcagttgaatggttcaaagatgaacttgatttacctgaagaaaataaagtacttcaattttatgtaagatatggtggcgaatttcaacttaaacaaggctttagccctgctttcagtgtagatagaagagatgatgtagaaataggttttgaacaaagctatgatggtttaaatattgtcgtagcggaaaaggatttatggtacttcaaagatgatgtaatactagtagatgtcgtcgatcatgaagatgaaatctcatatactaaaaaataa

SEQ ID NO: 553 - DNA, 468 bp, Staphylococcus capitis
atgatttatagtttgacagaaatagaagcaagatatcaggaaacggataaaatgggagttatatatcatgggaattatgccacatggtttgaagtcgcgcgtacggattacataagaaaacttggttttagttatgctgatatggagaagacaggtattatatcaccagttactgatttaaatattaaatataagaagtcaattttttatcctgaaaaagtaactatcaaaacttgggttgagaaatactcaagattgcgttctttatattgttatgaggtttataacgaaaaaggagaattagctacaactggttcaacagaattaatatgtatgaaagctgataactttcgacctatacgtttagatcgttacttccctgattggcatgctacttatagcagagttgctgaactgaataaagaaggaaaagaagctgaagtaacagacggcattaataacctataa

SEQ ID NO: 554 - DNA, 2706 bp, Staphylococcus capitis
atggcttctaatattaaagaacaagcaaagaaacaattccaattaaatggccaatcatacacttactatgatctgaagacattagaagaacaaggtttaactaaaatttctaaattaccttactcaattcgtgttttactagagtctgtattacgacaagaagatgattttgtaattactgatgatcacattaaagcgttaagtgaatttggtaaagatggtaatgaaggtgaagtaccattcaaaccgtcacgagttattttacaagacttcacaggtgtacctgcagtcgtagacttagcatcattacgtaaagcaatgaatgatgtaggcggagacatcaataaaatcaaccctgaagtgccagttgatttagtcattgaccactcagttcaagtagatagctatgcgaatcctgatgcattagaacgaaatatgaaattagaatttgaacgtaactatgaacgttaccaattcttaaactgggctactaaagcttttgacaactataacgctgtacctccagcaactggtatcgtacaccaagttaacttagagtacttagcaaatgttgtacatgtacgcgacgttgatggtgaacaaactgctttcccagacactttagtaggtaccgactctcacactacaatgattaatggtattggtgtattaggttggggtgtaggtggtatcgaagctgaagctggaatgttaggtcaaccatcttatttcccaattccagaagttatcggtgttcgtttaactaactcattacctcaaggttcaacagcaactgacctcgctttacgtgtaactgaagaattacgtaaaaaaggtgttgttggtaaattcgtagaattctttggtccaggtgttcaacacttacctttagctgaccgtgctacaatcgcgaatatggctccagaatatggtgcaacttgtggtttcttccctgttgatgaagaatcacttaaatacatgaaattaactggacgtaaagatgatcatattgcacttgtaaaagaatacttacaacaaaacaatatgttcttcgacgttgaaaaagaagatccagaatatactgatgttattgacttagatttatctacagttgaagcttcattatctggtccaaaacgtcctcaagacttaattttcttaagtgatatgaaaactgaatttgaaaaatcagttacagcaccagctggtaaccaaggccacggtcttgataagagcgaatttgataaaaaagctgaaattaagtttaatgatggctctacatcaactatgaaaactggtgacattgctatcgctgcgattacatcttgtactaacacatctaacccttacgttatgttaggtgcaggtttagttgctaagaaagcggttgaaaaaggacttaaagttcctgagtttgttaaaacttcattagctccgggttctaaagttgtaacaggttatttaagagactctggattgcaagaatacttagatgacttaggatttaacttagtaggttacggttgtacaacttgtatcggtaactctggtccattattacctgaaattgaaaaagcagttgctgatgaagatttattagttacttcagttctatctggtaaccgtaactttgaaggtcgtattcatccattagttaaagctaactacttagcttcaccacaattagttgttgcttatgcattagctggtactgtagatattgatttacaaaatgaaccaatcggaaaaggtaaagatggtgaagatgtatacctacaagatatttggccttcaattaaagaagtttcagatactgttgatagtgttgttacaccagaattattcttagaagaatataaaaatgtttacaacaataatgaaatgtggaatgaaatcgatgttactgatgaacctttatatgatttcgatccaaactcaacatatattcaaaacccaacattcttccaaggtttatctaaaaagcctggaactattgaaccacttaaagatttacgcgtaatgggtaaattcggtgattcagtaacaactgaccatatctctccagcaggtgctattggtaaagatacaccagcaggtaaatatttattagatcataatgttccaatccgtgactttaactcttatggatctcgtcgtggtaaccatgaagtaatggtacgtggtacatttgctaatattcgtattaaaaaccaattagctccaggaactgaaggtggcttcactacttattggccaactgaagaaatcatgccaatttatgatgctgctatgaaatataaagaagatggcacaggattagctgttttagctggtaatgactatggtatgggatcatctcgtgactgggcagcaaaaggtacaaacttattaggagttaaaactgttatcgctcaaagttatgaacgtattcaccgctctaacttagtaatgatgggtgtactaccattacaattccaacaaggtgattctgcagagtcattaggtttagatggtaaagaagaaatctcagttgaaatttctgaagatgttcaaccacatgatttagttaaagttaaagctaaaaaagaaaatggcgaagtagtagaatttgaagtaattgtacgtttcgactcattagttgaattagattactatcgtcatggtggtatcttacaaatggtattaagaaataaattagctcaataa

SEQ ID NO: 555 - DNA, 1641 bp, Staphylococcus capitis
atgaattcttcttctcaagagaagagaaacaagaagttttcatcagtgtttatctatagttcaatcattgttgcaattgtagtaatcattggtgccatttggcctgataagttcgactacattactaacaatgctaaaatgtggattactgataaacttggatggtattacttaattttaactactattattgttttcttctgtatcttcctaattttcagtccaattgggaaactcaaactaggtaaacctaatgacaaaccagaatttaatactatttcttggtttgcaatgttatttagtgcaggtatgggtattggattagtgttctatggtgcagcagagccaatggctgactttgccgctccacctacagcagatcctaaaactacagaagcttatacagaagctctgagatcaacattcttccactggggattccatgcttgggctatctatggtgtagtagcattagctcttgcttatgcgcaattccgtaaaggagagccaggtttaatttcaagaacattaagacctattttaggtaataaagttgagggacctataggaactttaattgatgttctttcagtatttgctacattagtaggtgtagcagtttcactaggtatgggagccttacaaattaatggtggtttaaactatttatttaatgttcctaacaatacatttgtacaagggattattatcgtaattgttacaatcttgttcattgcaagtgcatggtcaggtttaagtaaaggtattcaatatttaagtaacttaaacattagcttaggtgctattttaatgattatcactttaatcattggccctacagttctaattttaaacatgatgactagttcaactggtagcttattaaatactttcttatttaatagctttgatacagctgcgcttaatggacaaaaacgagattggatgtcaacttggacactatactattggggttggtggttaagttggagcccattcgtaggtgtattcattgcccgcgtttcaaaaggtcgttcaattcgtgaatttatttcaggtgttttacttgtaccagcacttgtaagtttcgtttggttcagtgtatttggtgtgcttggtattgaaacaggtaaaaaacatcctgaactattcaaaatgtcacctgaaacacaattattcggtgtattcaatcacatacctatgggtatagtattatcaattattgcattattattaatcgcatcattctttattacatctgcagactcagcaactttcgtattaggtatgcaaacaacatttggttcacttaacccaagtattatggttaaagtgacatggggagttgctcaagcacttattgcatttgttctattattagcaggtggcggtgatggttctaaagccttaaacgctattcaaagtgccgcaattattagtgccttcccattctcgtttgtcgtcataatgatgatgattagtttctataaagatgcaaaccaagaacgtaaattcttaggattaacattaactcctaacaaacatcgtttacaagactatgtgagatatcaacaagaagattatgaatcagatattcttgaaaaaagagaatctagaagaaataaagaaaaagaagaataa

SEQ ID NO: 556 - DNA, 357 bp, Staphylococcus capitis
atgttaaaagaatttaaagactttgctctcaaaggaaatgtattagatttagctatcgctgtagtaatgggcgcggcgtttaataaaatcgttacatcattagttcaattcatcattatgccattgattggcaaaattttcggttcagttgattttgctaaagattggtctttctggggaataaagtatggtcttttcatacaatctattattgattttataattgttgcttttgcccttttcatcttcgttaaaatagctaacactattatgaaaaaagaagaagaagaggaagaagttgaagaaaatacagttttattaactgaaattagagatttacttagagagaaaaattaa

SEQ ID NO: 557 - DNA, 3030 bp, Staphylococcus capitis
atgaaaccattaaatttgaagttaaacaattttggaccctttcttaatgagacaataaattttagtcaaattgaaaataatgaactctttctaataagtggtaaaaccgggtctggtaaaacaatgatttttgatgctattgtgtattcattatttggagaagcttcaactaaaaatagaaaagagggtgacttaagaagtcattttgctagtggtaaagaacctatgagtgtgacatatgaatttaaactaaataatcaaatatttaaaattcacagggaagctccttttattaaagaaggcaatactactaaaacccaagcaaaacttgatatttatgagttaattgatgatgtttatgaactaagggaaagtagagtcaatgcgggtaaccaatttatcactcaaattatgggcgtgaatgctgaacaatttagacaattattcattttgcctcaaggtgaatttaaaaagttcctacaatcaaatagtaaagaaaaacaatctattttaagaacgttatttaatagtgaaagatttgaagaaatacaaaagtatttaatagaaagcgttaaaaatgaaaaattacaaatagaaaatagatataatgaaatagattacttatggaatgaacttgctacgtttgaagacgattatttacttaaaataaaaaatatagagagctcgcaaaccgagaaaattttagaacgtttaccaaaatttataaatcacggtaaaaaaatattatctaactataaaaagcgaaaagatatgttggaccacgaagttgaaaaagttactaatgaatatacatttagtaaagagttgaaccaaaatataaactctctagaagagaaaaagaaatcattcgaactcctcaaacaaaatcaagatagtattgatcatcttaaggttgaactaaagaaaataagggaatctaatgttttgattaattatttcaaaaggcaaaaagttgttaataaagagattgaggaattagagactgaaatcactaaatcaaaatctaaagaagaagaatacgaaactcaaattaataatgtagaaaaaactcttaaatctttagaatcagaagcaccagaagttaacaaagctaacaaatatcttgaacaaacttataatttttacaataatcttgatgattatattaaagtctttgagcaaaagcctatttatcatgaggaattaaataagttagaaaaaaagtattccgattcaaaagagcaaaaagaaaatcttctgaatcaagctaaaggaaaatcaagaaattatgaaatagttgatcaatatatagatgagataaataaaatcaaaactttaatcgatgatactgaaaggtatttgaaaagtgaagaacaagttcggaaaattaaacaagaacaatctgaaaatgtaagacaaattaaagatttaaaagacaaatatgcaaacttagagcatattatttcacaggttgatgcaactaatattgatttaaacaataaggagacatttgttaaagaaattcaaacggctctttcaattggagatacatgtccagtttgtggtaatgagattcattcacttggagaacatattaattttgatttgattgctcaaaataaaaagcatttaaaagagcttgaggatagtaaaatctccatcaatgagaatatcattaggttagaaagtaaaaatgaagaattgactaaacgagaagaggacatcaattttaaagatcaagaaattcaagatttagatgaacttaaatcgaagttagaagagatagagaacgctaaaaggcttcaacaaaaagaaaataaatttttagagtcaattaatgaagaagagaagaatttaaatcaaaatcttcatacatttgagctagacctaaataataaaaaagcgcaacttgaacaaatagatattaaattaaatgattttaagagaaatacacagtttgaatcatgtacatcatttaagcagtactacgagaataaaaagcaagagactcaaacttttaatgagcgtaaagaaactataaaagaccaactaaatgaacttaagaataacttaaatatagagtcaactaatgttaagcattacaatcaaaatttagaagctagagttgaagaagaaaatcagcttattattaacattaaagatgagatgaaccgaaatggtttcgaaacttatgaagaaattgaagaagcaataagtttaagtgaaaataaaagtaatattgaagaaaaaattaatgactataacaaacagtatcaaacctatgagattgagattagccaattggaaaaacttgttgacggtagagaacttactaatttagaagatattgaaacgcatctaaaaacaaaaaaacaagcattagagcaaattaattcagaagttgcaacaatagcatatatgcaagaagcaaatataaaaaatattgataaaattgaagacttaatcaatacattaaatgaagaattaaaagagcataaagagatatttttactaacggaaattctctcaggcaaaaatagtcataaactaacactagagaattatgtgctcatttattacttagaaaaaattatctttaaagctaatcaacgtctattaacaatgagtggaaataggtatcaattgataagaagagaagctatttctcagggcttcagtggtcttgaaatagatgtatttgattttcattctaataagtctagacatattagttctctttctggaggggaaacattccaagcttctcttgcattagcattaggtttaagtgagattgttcaacaagaatctggtggcattaatttagaatcaatgtttgttgatgagggatttggtacgttggatcaagaaacattagaaactgcccttgatactctaattaacttgaaatcttccggtagaatggtgggaattatttcacatgtaagtgaactaaaacagagaataccacttattttagaggtatctactaaccagtatcaaagccaaactagatttaaaagaaattag

SEQ ID NO: 558 - DNA, 1125 bp, Staphylococcus capitis
atgaaaattatacatactgctgattggcatcttggtagaatcttgaatggtaaacagttattagatgatcaaaaatatgtattaactaaatttattaatcatatggaaaaagaacaacctgatgtcattgttatagcaggtgacttatatgacacctcttatccgagtaaagaaacgatgagtttacttgaaaatacaattgcagagttgaatataatacttcaaatacctgtaattatgattagtgggaatcatgatggaaaagaaagattgaattatgggtcatcatggtttgaacataatcatttgtttataagaaccaaacttaaggatatacataaacctatagaaataaacggggtacaattttttgctttaccttttgcgacaataagtgaagtacaacactttttcgaagataaagaaatcaatactcatcaacaggctttaaatcgctgcatagaatatatgtctcaaaatatagatgaaaataaagtgagtattttaattggtcatttaactattaaaggtggtaaaacatctgattcagagcgacctttaactataggaactgtagagtcagttgaaagacagtcatttgatcaatttgagtatgttatgttaggacatttacatcatccctttagtgtaaatgaaaaaaacattaaatatagcggctcattactacaatattcattctctgaagtgaatcaagcaaaaggttatcgcatagttaatatcgatgaagtttatcatgtagaagatacatttaaatctattgaacctttaagagaattagaggttatagaaggggattatgatgatgttattgaagaacgagtttctgtgaaaaataaagataattattttcattttaaactcactaatatgtcacatattaatgatccaatgatgaaacttaaacaaatttatcctaatacattagcattaactaataatacattcgaacatattgaagagtttaataatgtagagataaagaaacaagatgatcaatctataattaagtcgttttatgaatcaatgactaatgaggaaattagcgaaaatcaatctaataagatagctgaaattttaaataatattatgagaaaggaagtctaa

SEQ ID NO: 559 - DNA, 468 bp, Staphylococcus capitis
ttggcttatttaattttttctattgtcgttgcttttttaatgggcgcagtagtaattgtaataagaatgaaagcacaaaagtttccagttaatgaaaaaaaaatcattttacctccattctttatggctactggggctttaatgtatattattccatatttcagattaacaggtatcgaaatgttagaatcactaattttaggtgtactattctcaactgttttaattttcacatcaagatttgaagtcaaaggcagcgaaatttacatgaagcgttctaaggcatttccagtaattttaatttcgttattagttattagaactattattaaaatctttattagcaatgaaattaacccaggtgaaatagctggtatgtttttcttactagcgttttgtatgattgtaccttggagattagcaatgttttataaatataaaaagttaaaaaaatcactagttaagtag

SEQ ID NO: 560 - DNA, 159 bp, Staphylococcus capitis
atggtattagaagataaggctttccaaaaggctaccttacaagcattcattaacaaaggcgacgcagaccgcgacgttagtttattcccgttagcgcaagcgttcccaactgaacaagttaaagatattgaaaatgtttacaatatcatcaaaatataa

SEQ ID NO: 561 - DNA, 357 bp, Staphylococcus capitis
atgagtttaaaaccgaaagtaattaatggttttggtttcaatccagagtttatacgcgacgctacatacttagaatacactgtaggtaatccagtgttagatgcgtctaaattcacagagccaacaacagttaaagcaggtacagctatttcatgtaatgaagatactggtttatatgagttggttactgatagcacttcaaacatcgttgcaggtgtattaacaacaaatgaggttgttgtgtaccctaacaaaaacaaagaagtgccagcagtacgtaaagcgtcagtaagacccgaacgtatccacggtgctacagacgcatttaaagaggctacaaaaggccgtatttcttaa

SEQ ID NO: 562 - DNA, 543 bp, Staphylococcus capitis
atggcatttagtagagaagaactcaaaaatatcggtatagatgacgaaaaaatcaacgacgtgatgacgttatacggtaagaatattcaaagtcttaaagatagcgttgatgaagaaaaacgaaaagccgaagaaaataagaaagaagttgaatcttatcgtaaacgtatcaacgaacaaaacgatgagttagataacttgaaagaaaagatcaataaaggcgaaaacttagaggagcaaataaatgcactcaagcaagtcaataaagaaaaagaccaacaacacatcaatgagatgaacgaggttaaattgcaatatgaaattgacaaagaactaaacagtgcaggcgctaaaaatacaacatcagtcatggcgttagtcaatcgcgacaacatttcgtttgatagtgaaaaaggtttacgtggcttaaaagagcaattggacgaccttaaagaaatgaaagttatctattcgtatatgataacgatgataaaggcggctcaaaaaatgccgatagtcaaagcaattcaaacagtaatatga

SEQ ID NO: 563 - DNA, 183 bp, Staphylococcus capitis
atgcatttgacaccagaatctatcattattggtatcgctactttcattgcagttattgtagcgtcatatattggcaggaaaatcaaagataatgtaattttaagtatggtagtaacagtaattcttactttgatattgctttttgtcatatataaagtaggaatatggatatattataaatga

SEQ ID NO: 564 - DNA, 441 bp, Staphylococcus capitis
atgactgaaagaggatggcataaacacaaaaacgctgatggtactacaacatatactcaatacgagggcgatacaatagcaaatatgcaaaaacatgctacacctcaacaaaaagaaaaaatgaacaaagaacttagacataaccctatgccattcaaacagggcgtaaattctttcaaaatgagtaaagatgggaaacatttcactattaaattaagtaaaacaacagcgaaagctatagctacaactggcactgcggcagcaggtggcttattcgctttacttgggccattatggggatacggagcatctatagcaacttcattagcgaacgtatacggttcaggctcaattaaaaacggtgtagtaggtcatggagttgttaaaacaagtcctaaaggcgacgctacaccttatatcactagttggggaaatcagtaa

SEQ ID NO: 565 - DNA, 249 bp, Staphylococcus capitis
gtgggtgaaacaatggcaacttggttagcaattattttaatcattttagcacttatcgtaggattaatcggtggtttctttttagcaagaaaatatatgatggattacctcaaaaaaaacccacctatcaatgaagaaatgctacgtatgatgatgatgcaaatgggtcaaaaaccatctcaaaagaaaatcaatcaaatgatgacaatgatgaacaaaaatatggaccaaaacatgaaaggcaaataa

SEQ ID NO: 566 - DNA, 1989 bp, Staphylococcus capitis
atgtttaacgaaaaagaccaattggctatcgatacaatacgtgcactaagtattgatgctatcgaaaaagcaaattctggacaccctggtttaccaatgggagctgcccctatggcgtatacattatggacacgtcatcttaattttaacccccaatctaaagattattttaatagagatagattcattctttcagcaggacatggctctgctttactatatagtttattacatgtatcaggtagtttagaattagaagaactaaaacaatttagacagtggggttctaaaactccaggtcatccagagtttagacatacagatggagtagaagtaacaactgggccactaggtcaaggattcgcaatgtcagtgggaatggcacttgctgaagatcacttagctggtaaatttaataaagataattttaatatggttgatcattacacatacgttttagcttcagatggagatttaatggaaggtatttcacatgaagctgcttcatttgcgggccataatcaattagataagttaatcgttttatacgactctaatgatatttcacttgacggtgatttaaataaatcattctcagaaaatacacaatctagatttgaagcatatggttggaattatattttagttaaagatggcaatgatttagaagaaattgataatgctattaataaagctaaatcacaacaaggcccaactattattgaagttaaaactgttatcggttttggctctccaaataaagctggttcaaatggagtacatggcgctccgctaggtgaagatgaaagaaaacttacttttgaagcttatggacttgatcctgaacaacgattcaatgtacctgaagaggtttatgaaatcttccaaacttctatgttaaaacgtgctaacgaaaatgaagatgcttggaaagctaaattagaagattatagcaaagaatatcctgaattagcagaagaatttaagttagcaattagtggtaaattacctcaaaactatgaaaaagagttacctaaatatgatttagatcataaaggagcatctagagcagattctggagaaattattcaaaaacttagtcaaacagtaccatcattctttgggggttctgctgatttagcagggtctaataaatctaatgtcaaagaagctaaagattatgataaagaaacaccagaaggtaaaaatgtatggtttggtgtacgtgaatttgcgatgggtgcagcagtgaacggaatggctgctcatggtggattacatccttatgcagcgacattcttcgtatttagtgattacttaaaacctgcattacgtttatcagctatcatgggtcttaactcaacatttatctttacacatgattcaatagctgtaggtgaagatggtccaacacacgaaccaatagaacaattagcgggcttacgtgctattccgaatatgaatgttattcgacctgcagatggtaatgaaacacgtgtagcatgggaagtagcattagaatcagaacaaacaccaacttctctagttttaacacgtcaaaacttaccaacattagatattgctgaagaaacggtagaagcgggagttcgtaaaggagcttacgtagtatttgaatcagaaaaggatccagaatacttattattagcatctggctcagaagttagtttagcagtagaagctgccaaagatttagacaaacaaggtaaaggtgttagagttgtatcaatgccaaactggtttgcatttgataaacaatcagatgattataaagaatcagtattaccgtcctcaattactaagcgtgtagcaattgaaatggcatctccattaggttggcataaatatgttggaacagaaggcaaagttattggtattgatggctttggcgcaagcgcacctggtgatttagtagttgaaaaatatggatttactaaagaaaatatattaaatcaaattcgcacattctaa

SEQ ID NO: 567 - DNA, 237 bp, Staphylococcus capitis
atgtctaaggaagatttaaatatagatagaatcaatgagctagctaaaaagaaaaaagaaaaaggtttaacagaagaggaagctaaggaacaatctaaattaagaaagcaatatttagattcatttagaaaagggttcaagcaacagcttgaaaatactaaagtaatagatcctgaaggaaatgatgttacacctgaaaagcttaaaaaaattcaatctgagaaaaacaataaataa

SEQ ID NO: 568 - DNA, 234 bp, Staphylococcus capitis
atgttaattaagacaaaacaaaagtttttaatatatatagctgtagtactcatctcttgcatggttttcctaacattctttttaagtgtaaatcaaagtgcgcattcagaacaaacgtacgaaatgacagatcatgaaattcatcaacaggataataataaatcaaactataaagttgaagacaaacaaaatagcgaacaaaatgacacttcagtgttcgctttagttaattag

SEQ ID NO: 569 - DNA, 621 bp, Staphylococcus capitis
atgagagaattaactaaacgtcaaagtgagatttatgattacattaaacacattgtacaaactaagggttatccacctagtgttagagaaattggcgaagcagtgggcttagcatctagttcaaccgtacatggacatttatcaagattagaagaaaaaggttatattcgaagagaccctactaaacctagagctattgaaattgttagtgaacaactagaggaagttaatgttgaggaaacgattcacgtaccagtaataggtaaagttactgccggtgttcctattacagctgttgagaacattgaagagtatttcccactacctgaacatttaacttcaacacataatagtgacattttcatattaaatgtagtaggagaaagtatgattgaagctggtattctagacggtgacaaagtgattgtaagaagccaaacgatagctgaaaacggcgacattatagtagcaatgactgaagacgaagaagctactgttaaacgcttctataaagagaaaaaccgttaccgattacaacctgaaaatagtactatggatcctatttatttagataatgttattgttgttggtaaagtcatagggttatacagagaaatgtaa

SEQ ID NO: 570 - DNA, 819 bp, Staphylococcus capitis
atgaatatgtctaagcaagccgttgaaagtaaattaggtcatccaaaacgtatgacttctaatgaatatggaactaagtggtacacatattataataaagattatgataactttattatgattagttatattaaaaaccacgttaatgccatgtactcaaatcaaaatattatatcttcaaaatctaaaattaagtacgctactcctaaacatactgtaagagaacggttaggtaatcctatagaatatattagtaaagggcgatatcgttttgaggtaaaaaataatgaatatgatgttttccataaagatcacatttatacaacagttttttacgacaaacatgaaaaaaatggagtgactgcattattacaagtaagtgaaaatatggaaaatcgcttgcgtcaacaatatggcgtgccatctagagaattagaaaaaagctttgaattacaaaattatgatttagttaactcggaaagaaagcaacatggcttaaatacactaaattattcaagtaaaatttctaatactgctagaaagcatagtaaaaatatgtctgaaaataactttttcgatcatacagataataaaggggattctccttttgatagattgaaaaaagatcgtattgatttcaatgcggcaggagaaaatcttgcttatggtcaaatcaatagtatttatgctcatgaaggattaatgaattcactaggtcataggaagagcatactaaatacgcattatcgaaatttaggcgtaggtgtagattttaataaagagaagcaaccattttggactgagaattatacagaataa

SEQ ID NO: 571 - DNA, 849 bp, Staphylococcus capitis
atgcagacggtaatgaatgaagagcttgcacaatggttcgcacaaaatgattatttttatattatgcatcgctttgatgaagaagctagaattccatttattaaaaagatgcaagatgaggggctattcgcttctatttctgttggagtaaaagaaaatgaatttaaattcattgaagaacttgcttcaaaatctttagttccagaatatatcacaattgatattgcgcatggccattcagactcagtcatcaatatgattaaacatattaaaaaccacatacctaaaagttttgttattgcaggtaatgttggcacacctgaaggcgttagagaacttgaaaatgctggtgctgatgcaacaaaagttggtattggtccaggtcgtgtatgtataactaaaattaaaacaggatttggtactggaggttggcaattagctgcacttaacatttgtagtaaagcagctcgaaaacctattattgctgatggtggtttaagaactcatggtgatatagctaaatcaattcgttttggtgcatcaatggtaatgattggttcgttattcgctgcacatgaagagtcaccaggagaaactgttgaacttgaaggtaaaaaatataaagaatattttggaagtgcctcagaatttcaaaaaggtgaacataaaaatgttgagggtaaaaaaatgtttgttgaacataaaggttcactgaaagatactttaattgaaatgcaacaagatttacaaagttcaatatcttatgccggtggaaaagatctgaaatcactaagaactgtagactatgttatcgtgagaaactcaattttcaatggtgatagagactaa

SEQ ID NO: 572 - DNA, 117 bp, Staphylococcus capitis
atgttagccggaactactggtaatttgaatgtgcgtggtccaaatttaattgaagtatcacattcagaacggctgttaacaatgcatttattaggtattaattgtatatcttcatag

SEQ ID NO: 573 - DNA, 270 bp, Staphylococcus capitis
atggcgaaaaaatctaaagtagttaaagaacaaaaaagagaagaacttgtaaataaatattatgaattacgtaaagaactaaaagcaaaaggtgattatgaagcgcttagaaaactccctagagattcttcacctacgagattaactagaagatgtaaagtaacaggacgtccaagaggtgttttacgtaaatttgaaatgtctcgaattgctttccgagaacatgcacataaaggtcaaattcctggtgtgaaaaaatcaagttggtaa

SEQ ID NO: 574 - DNA, 150 bp, Staphylococcus capitis
gtgcgcgtaaatattactttagcttgcacagaatgtggcgatcgtaactatattacaactaaaaataaacgtaacaatccagaacgtattgaaatgaaaaaatattgtcctagattaaacaaatatacgttacatcgtgaaactaaataa

SEQ ID NO: 575 - DNA, 1515 bp, Staphylococcus capitis
atgtctaaacaagatggtagattaactggtctatttggtgcaccagtatcagatagagaaaatagtatgacagcagggccacgaggtccattattaatgcaagatgtttattatttagaacaaatgtcacattttgacagagaagtaattccagagcgacgtatgcacgctaaaggttctggcgcatttggtacttttactgtcacaaatgacattactcaatacacaaatgctaaaattttctctgaagttggtaaacaaacagaaatgtttgcacgtttctcaacagtttcaggtgaacgtggtgcggctgacttagaaagagatatacgtggatttgcgttgaaattttatactgaagacggtaactgggatttagttgggaataatacaccagtgttcttcttcagagatcctaaattatttattagtttaaatcgcgctgttaaaagagatccacgtactaacatgagaagccctcaaaacaactgggatttttggactggcattccagaatctttacatcaagtaacaattttaatgtcagatcgtggtatgcctaaaggtttccgtaatatgcacggtttcggctcacatacttattcaatgtacaatgacgcaggtgaacgtgtatgggtgaaatatcattttagaacgcaacaaggtatcgaaaattatactgatgaagaagctgctgaaatcgtaggtggagatagagattcatctcaaagggatttatacaatgccatcgaacgaggggattatcctaaatggaaaatgtatatccaagtgatgacagaagaacaagcaaaaaatcatccacataatccatttgatttaactaaagtatggtataaagatgattatccattaattgaagtaggcgaatttgaattaaatcgcaatcctgaaaactatttcttagatgtagaacaggctgcatttgcaccaactaatatagtaccagggttagatttttctccggataaagtgctgcaagggagattattctcttatggagatgctcagagatatcgtttaggtgtcaatcattggcaaatccctgtcaatcaacctaaaggtgttggcgttgaaaacttatgtccatttagtcgcgatgggcaaatgcgtttcttagataacaaccaaggtggcggtcctcactattatccaaataaccaaggtgtatatgattcacaacctgagtttaaaaaaccatcattccctgtagatggtgatggatatgaatataacttccgtcaagatgatgataactacttcgaacaacctggtaagttattcagactacaatcagatgatgctaaagaacgtatctttactaacacagctaatgcaatggatggggtgactgaagacgttaaagtacgccacattcgtcattgttataaagctgatcctgattatggtaaaggagtagcaaaagctttaggtatcgatattaatcaaattgatttagaaactgaagaagatgaaacatacgaaaactttaaataa

SEQ ID NO: 576 - DNA, 1449 bp, Staphylococcus capitis
atggaagataacaatatgaaacgtggactcaaatcgagacacatatccatgattgcaattggtggcgctatcggaacaggtttattcgttgcaactgctagtgtgatttcgcaagcaggtcccggtggcgctatattagcttatattctaataggaattatgctttactttttaatgtcatctattggagaactagcaactttttacccagtatcaggatcattcagttcttattcaactcgctttgtagatccatctctaggtttcacgatgggatggttatattggggaatgtggtcacttgtaacaagtgtagacattattgtggcatcgaatgtcctccaattttgggatgtatttaaagtacttagtcccctagcatggagtttaatatttttaacttttattttcttgattaatatattttcagtaaaagcttttggagaaactgaattttggttatcactcatcaaggtaataacaatcattgttttcatcattgttggtatattaatgatatttggtatattaggtggtcattcttacggctttgataattatactaaaggtcaagcaccatttgttgggggtatatcaggattattaagcgtattacttgtagctggtttctctgtaggcggtactgaagtcgtcgctgttactgcaggtgaatcaaataatcctcaaaaatcaatgccaaaagctataaaacaagtattctggagaattttattattctatgtgttatctatcgcagttatagctgcaattataccttatactgatccattattattaaatgagcataaatcggtctcacaaagtccatttactattgtattcgatagaattggaatcgcatttgctgcatcagttattaatgcagttattttgacttcattattatcagcagcaaattcaggtatatatacaacgagtagaatgctattttctctaagcgccgatggtcaggctcctaaatttttcggcaaattaaacaaacaaactaaattacctatgcgtgctttagttacaacctacatccttattatacttgttataatatatgcaaatttcaatgcaaatgctgtgtttaatctattaaacatcattggttcaatggttattgtagtatggggatctagtatatggtctcagattagattgcgtagggcaattaaaagacaaggtaaaaatcctgatgaattactcccttataaagcaccattttatccagtaggtccaataattgtaattattacgttattgtttttattattaggtaattcttacagtagtattattaccggagatttattaagcgttttaagaaactttgcacctatcattatcctttcaattatttatttcgtgcataaattaattaaacgcactcattttgttaaattagaagaaatggatttaactccacataattataaaaattaa

SEQ ID NO: 577 - DNA, 315 bp, Staphylococcus capitis
atggttggacaaactaacttattcgatgatgttataaaacaagatgaacgttttgtcattgtggttcaagcccttgaagaaaaaaatggcaacttattaaagcacacgctaagggaataccctagtttaaaacatgatcaaatgaatgatttatttacacatctcaaagatgtatttttagaagaacccttcgaagacaatcaatcagcttttactattactgtatatactaatcttgattatgctgctgaccaagtctatgcacacataaaaagatataaagggaaacatgattggacacatactgctaaataa

SEQ ID NO: 578 - DNA, 804 bp, Staphylococcus capitis
atgagtaaatttaaaatgatagttttggatatggatgatactttaatgaacagtgacaatgaagtgtcagccgaaactaaatcctatttgatagatattcaagataaaggatatagcgtagttctagcatctggtagacctacggaagggatgatacccgtagctagagaattacagttaaatcacaatgagagttttataattagctacaacggtggcaaaacaattaaaatgtccaatgaagaagttgaagtaagtaaaccagtttctaaagacaattttgatttaattgtagattattgtagagaaagaggatttctagttttaacgtatgataacggttatatcattcatgatagtgatcacgaatatatgaatattgaatctgaattgactggtttaccaatgaaaagagtcgaagatattaaatcatgtattaatcatgatgtacctaaagttatgggtgtagattatgtaggtaatattactgaagcgcgtgtagatcttaatggtttcttcaatgaggacatagatgtaacgacaagtaaaccattcttcttagaatttatggctaaagatgtctctaaaggaaatgcaatcaaagcattatgtaagaaagaaaatattaatttagaagaagtagtagtgtttggagatagtttaaacgatcaatctatgtttgacgtagctggttattcagttgcgatgggtaatgctagtgaagaacttaaagaaagcgctgatgtagttaccttagataacaattcagaggggattcctcatatgttgaagaaattaatctaa

SEQ ID NO: 579 - DNA, 921 bp, Staphylococcus capitis
atggaagaagttttaaaacttaagattccagcttcaactgctaatttaggcgtaggttttgattctataggaatggcattagataaatatttatacatgtctattaaagaaataaaaggatatgcttgggaattcttgtattatagtcctgaattagaaacgttacccaaagatgaaagtaattatatatataaagttgcacaagaagttgcagaaaaatataaagtaacattaccttgtttacaaattgaaatgagaagtgatatcccactagctagaggattaggttcctctgcttcagcgctagtgggcgctttatatattgcaaactattttggtaatattcaattatcacaatatgagttattgcaattagctactgaaattgaaggtcaccctgataatgttgctccaactatatatgggggattaatttctggctattataacccagagacaaaagttacagatgtcgcacgtatagatgttcctaaggttgatattattctaacgattccaccgtatgaattacgtacagaggactctagaaatgttttgcctgaaaccttttcacataaaaaagcagtacaaaatagtgcgattagtaatactatgatatgtgccttaattcaacataaatacggcttagctggtaaaatgatggaacaagatgggtttcatgaaccgtttagacaacatcttattccagagtttgaggaagtacgccaattatcgcgagaacaccaagcatacgcaactgtcatcagtggtgcaggtcctacaattttaactttgtgtcctagagaacgtagtggcgaattagtaagagcattaagagatcgaatcactcattgtacctctgagcttgctacaattaatgagaagggccttatagaagaagttgtgtacctaaagtcctaa

SEQ ID NO: 580 - DNA, 1062 bp, Staphylococcus capitis
atgaaaagatggcaaggattagtacaagaatttaaagagtatttaccagttaatgaagagacaccacaaattactctaaacgagggtagtacgccacttatttattgtgaaaagttatctgaaaaacttgatatagaattgtatgtgaaatatgaaggtgccaaccctacaggatcatttaaagatcgtggcatggttatggcggtcactaaagctaaagaacagggtaaaaagatagtgatatgtgcatctacaggaaatacatcagcttcagcagcggcttatgcagcgcgagcaggtttaaaagcaatagtagttatacctgaaggtaagattgcactcggaaaattatcacaagctgtaatgtatggtgcagaaattgtctcaattgaaggcaactttgatgaagcactagagattgttaaagaaattgctaaagagaacagcgatattgaattagtgaactcagtgaatccttttagaattgaaggacagaaaactggggcattcgaaatcgttgaacaattagaacaagctccagacgtattggcaattcctgttggtaatgccggaaatattactgcttattggaaaggttttaaagaatataatgagaaaaaaggtagtcaattacctcaattgtttggttttcaagcagcaggtgcagcgccaattgttcaaaataaagtcataaaaaatccagaaacagttgctacagccatccgtatcggtaacccagcaagttggcagaaagcagttaaagcattagaggaatctaacggattaatagatagcgtaacagatgatgaaatacttgaagcttatcaattaatgactacaaatgaaggtgtgtttagtgaaccagcaagtaacgcatcaatcgcaggtttaattaaacttcatagagcaggtaaacttccaaaaggtaaaaaagtagtggcagttttaactggtaatggcttaaaagatccagatacagcaatctccttattggacaacccaattcaacctttacctaatgacaaggacagtatcataaaatacattaaaggggcaatttga

SEQ ID NO: 581 - DNA, 1281 bp, Staphylococcus capitis
atgaaagaattgaatattgcattacttggtctaggaactgttggatcaggtgttgtcaaaattattgaggagaataggcaacaaattaaagataccatcaataaagatattgtcattaagcatattttagtacgtgataaatcaaaaaagcgtccattaaatattagccaatatcatttaactgaagatattgatgagatattaggggatgaatcaattgatattgttattgaggtaatgggaggtatagaacctacagtcgattggttaagaactgcacttaaaaataaaaaacatgtgataactgctaacaaagatttattagcagttcatttaaaattattggaagatttagcagagagtaatggcgtagccttaaagtttgaagcaagtgttgcgggcggtattccaattgttaatgcgattaataatggtttaaacgctaataatatttcaaaatttatgggtattttgaacggaacttctaattttattcttacaaaaatgacccgagaacagacaagtttcgaggatgctcttgatgaagctcaaagattaggattcgccgaagcggatcctacagatgatgtggaaggtgtcgatgctgcgcgtaaagttgtcattacatcttatctatcatttaaccaagtaattaaacttaatgatgtgaagataacgggtattagtggaacaacattatcagatataaatgctgctgatcaattaggctttaaaataaaactaattggtaaaggtacatatgaaaatggccatgttcacgcttcagttgagccaacgcttattcataagtcacatcaacttgcagctgttgagaatgaatataacgctatttatgttataggtgatgctgtaggagacacaatgttttatggtaaaggcgctggtagcttagccacgggaagcgctgttgtaagtgatttactcaatgtagctttattctttgaatcgaaccttcacacgttgccacctcattttgaattaaaaactgatgaaacgagagagatgatggatggggaagaacctgttgtaatccaagaaaagttaaattactacattgttttacaaaataatcatttaacatttgataagattgaaaatgatatcaaagcactgttgccattccataagtcacttcaaattgctgaaagagatgagaatacagtagcagtgataattataggattggatcaatctccagaggatgttcttaataaatcaggatacgaagtcgaaaagatttatcctgtagaaggagtttaa

SEQ ID NO: 582 - DNA, 1377 bp, Staphylococcus capitis
atgaaagttgctaaattcggaggtagttctgtctccaatgctaaacaaattaaaaaggtattagatattgtaaatggagaccctgagcgcaagataattattgtttctgccccaggtaaaaggagtaataatgataccaaaacaactgatttactcattcgtttatatgaaaaaatactcaatggtttagattatcaaaataagaaaaaagaaattattcaacgctatgctgacattgtaaaagagttagatatggatgatgaaatattaactaccattgatgaaacgttagaactttacattaaccaactttatgataaaccttcacgtttatacgacgctttattatcatgtggagaagatttcaatgcgcaattgattgcaagctacaataatagtcaaggtatccctacacggtatgtttctcctaaagaagccggactcactgtgacggatttgccacaacaagctcaaattatagattcttcatatgaaaagatttataaattacgtaattataaagaaaagcttattatccctggtttctttggaatttctaaacaaaattatattgtaaccttcccccgaggcggttcagatattaccggtgctataattgctagaggtgtaagagcatctctttatgaaaacttcactgatgtgtcaggtattttcaaagcaaatccaacaattatagataagccggagttaattgaagagattacttatagagaaatgcgagaactttcatatgcagggtttggagtttttcacgatgaagcgctacaacctttatataaggatcggatacctgttgtaataaaaaatacgaatcgcccaaatgataaaggtacctatattcggcatgacagagaagtaaattcggacaatgtaattagtggtataagttgcgacaaaggctttacagttatcaatattaagaaatatttgatgaatagacaggtaggatttacacgaaagattctagccgtattagaggagtttaatatctcatttgatcatatgccatctggtattgataatatcagtattataatgcgtacgaatcaaatcaaaggtaaagaaagtcaagttttaaatgaaatcagaaaacggtgtgaagtagatgaacttagcgttgaccacgacctagcaattttaatgatcgttggagaaggaatgaatcaagtagttggtacagcgagtaaaatcactcatgcactttcagaatctaatattaacttaaaaatgattaaccaaggggcttctgaaatatcaatgatgttcggtatacgagttgaagatgcagaaaaagctgtcctatcaacttatgaattttgttaccatggtatttgtttaaaaaatttatgttcataa

SEQ ID NO: 583 - DNA, 594 bp, Staphylococcus capitis
atgaaacttgaagcacaaaaaccagtcgaccaaatagttaagatattaatggatacatctactcatatttttaaatttcatggtgaagttgcgatgcagttgtttttgaatgatgagtttaagttacctaataaagtggatatttgcgttgaacgcaaaaaattaattgaaatcgtcaaagttatacctaaggatttcactatagaatattatggtaaggcaaatggggtttcgaagaataaaaaactttcattatctgaagttgcccatgtagaagtattcaaagatggaaatatggttctcaatattttcgtttatgatgtagtaaatgatcagtggatattcagattagataataaaatccgtttaccaaaaaataatatttattttcactcattaaactggaatgtagattatataaaacctgaaatagttttaatgtatgatttaatggataatcaaaattatcatcaattttcaaattataaggctgtgattgattcactaagttattatcaattttatattttaaaattagtagtagggaaaaaacgtattgaagaagcggtaataaataatagaaaaatatcataa

SEQ ID NO: 584 - DNA, 858 bp, Staphylococcus capitis
atgtctgtaacggtcattttatctgtaattattattattttgattatagctattgtcttaaatcaaagatatatgaaagatagagttgagactgaagaatacgctagaaatcaattaattgctaaaaattcaactttaagcgaagaaaatttagctttaaagaatcaaatgttaagttctaataacgatgtaggacaccatgcttttaaaaatgctaagcgtgagttacaaaagattttggatcgctttaaaaacaacggtcgattaaaaacatattcaattgtttctacaaataatttagctgtgaaacacccattatttgaatatgcaagatcatttgattttattattgtcactgatgtaggactcatcaatgtcgacgtaaaaaattggaatcaaaaaactttctaccatttcgacgttccagataaacattttgaagaaaagaatcaaccctatgatactgatcaaatagtaggtcattatgtaagtagtagatatcatagccaattcaatacgacacgtacaggtgtctatacatttacagaaatcttacaagataatcgtgtgatatacgagttttatgatcaagatccataccaacaagctgcaaacaatgctaaagcacttaaagatcaaattgaatcagattatcgatttaagatacaaagtatcggcgttgtttatttcagtgatggtagcgtaaatattattgaaggttcagatgaaagtgataaatatgtggatacagtatctactcaatcttctcttgaaaaggtcatagaagatgctatacaactttctaagcaccctctcaatgatgaacaagtccaagaaatatctgagagttttaaataa

SEQ ID NO: 585 - DNA, 537 bp, Staphylococcus capitis
atgaaatcaaaaaaaggattatcgctaattgttgttgcattaatcgcaataatagtaatactatttcaatttattaaccatgatgggccattcggtgctcatcaatcaacggaagaaaatcaaagcgcagatttgaaagggaaggacaaagtctacgttgagcgtgtagtggatggagatacttttcttgctaagaaagatggtgagcgcattaaagttagaatgattggtatggacacgcctgaaacggttaaacctaatactcctgttcaaccctatggtaaagaagcatcaaattatagtaagaaagagttaacacataaatatgtttatttagagtatgataaagaaaaaaatgatagatatggtcgaactttagcttacgtttggctaagtaaaaataagatgtttaatagagagctagttgagaaggggttagctagagagaaatactattctccaaatggtaagtacagacaaattcttaaaaaagcacaagaagaggcgaaacaaaataaagtgaacttatggagttaa

SEQ ID NO: 586 - DNA, 189 bp, Staphylococcus capitis
atggattcatctaatgaaagtaaaatatctttaatcgcaattattgtagcaataatcataggcgtagtattacaaatagtatttaaattacctattatagtaagtgttgtagtagccttattattaggcattttagttggtttcattgtatacattattcaatcaacactaaataaaaggaaaaagtga

SEQ ID NO: 587 - DNA, 186 bp, Staphylococcus capitis
atggaaattttagattgtatcatcgacacaaactctgtgacgcataaagtaaaaacagctaaaggaaaaatatttcaacacaccttgagtattgaaacacccacacacaaagttgtagaaattttatcactattatctaattatgtagataaaactgaccgcccgaaattaataattaaaaagtaa

SEQ ID NO: 588 - DNA, 603 bp, Staphylococcus capitis
gtgatatcactaataatagctgaagatcaattaatgttaagacaagccatggtacaacttattgaaatgcatgaggatatgaaagttttaaatgatgtcgagaatggtgaagaagcacttcaattaattgaaaataaagaacccgatgtagccatcttagatatagagattcctggtatgactgggttagaaattttagctcaaattcgagctaaagggataaatactcgtgtaattatagtgacaacatttaagcgacctggttactttgagaaagctgtagctaacgatgtagatgcctatgtgttgaaagaacgttctgtagaagatttagtcaatacaatttataaagttatgaatggtgaaaaagaatatagtacctcattgatgactactttttttagtgagtcaaatccattaacgcataaggaacaagttgtattaaaagaaataggcaacggtttaagtagtaaagaaattgctgaaaaattgtacttgtctaatggtactgttaggaattatacaagtacgattattgataaaatgtgctctgaaaatcgctttgatgcatggaaaaaagcgattgctaaaggatggatataa

SEQ ID NO: 589 - DNA, 873 bp, Staphylococcus capitis
atgtattttgtttatgcttatgaaccattattgagtatgttctttttttatagtgcatttgctttacccttcattttcgatgtgggagtgaaatcaaaagaatttataagttttattactacaatgattatatgtgcctttttaacctatattacgcatcatgattatgtgtatacgatgataatttactacatcgtcatcttgatgattgcgtttggtaattttcaagtgcgtaaagatcgtagggtgcgtaaagaactcgaagagaagaataaatatattaacgtacttatagcagaacaagaacgaaatcgtattggtcaagatcttcatgatactttgggtcatgtgtttgcaagtttaacgttaaaatctgaacttgccactaaactccttgataccgacaaagaggcggctagaaatgaaatgcgagcaattaatgagttatctagagagacacttaataaagtacgcactattatagatgacttgaaagtccaatcatttgaagaggaagttttatcagtagaatctattcttcatgatgcaaatttgaattttattttcaaaaataaaagtgctgcgaggtcattaaacccggccaagcaatccatactatcgatgatattaagagaagcgattaataatgtaattaaacatgcacatgccacagaagttgtagggaaaattaaagaaaagcaacacgaaatcacattgattgtgagtgataacggggtaggtatcgatggcgaagtcgcgagttcgctgaaaagtattagagaacgtactgcatatttaaatggagaagttgaagttcaatcaaatgaaggcactacaataatagtcagaattcctaggagtgaattaatgtga

SEQ ID NO: 590 - DNA, 732 bp, Staphylococcus capitis
atggtagccacattttttaaaactgaatttaaagtgatgtttagaaagaagctatatttattcatgtctatatttctaccattagcattctatcttttatttacttcgttgttggatttacctgaagaagctaaagaaccgttttataaggagtatatgtacagtatgactgtatttagtttattaaatttttgtatgttgtcatttcctctagacatgattgaggagagaaacaatggttggtataaacatttgatgtctactcctttaaagccatcacaatattatttagtaaaagtcttaaaaaccatgtgccaatttttaggagcgattatagttattttcacagtggcacacttttataaagatgtaagtatgaatttatcagattggttactatctggagttactttatgggtgggagcaagtttattcttaactttaggactgattattgcacaatttagtgatagtcaaaaggcgagtagtgtagcaaatttacttaatatggctatggctatagtaggtggtttatggtttccgattaatacttttccagattggttacagaccatttctaaaaaaatgcctacttatcacttaaagcaaatgtcgttagatttaggtaaagataaaggtataaattatgagtcacttggctttttacttgtgtatagtataattttcctaagtattgctttactgattaataaaaagaaagatgtgtcttaa

SEQ ID NO: 591 - DNA, 876 bp, Staphylococcus capitis
atgataaagattaacaatttatctaagtccttcaagaagactagtgtactcaatgatattaatttagaaattaaggaacattcttgtacagctttgattggtaaaaatggtgcaggaaagtcaacgcttatagatatattaattggtaatatgcaaggtgataagggggagattatcgataagtctagaatgatcaatcatcataaaatggcaatcttatttcaaaaaactaattttcctaaatttttcaaagtaaaagaattatttaaacttcatcagtctttttacgcaaattcgatatcaacatcacgttttttagatattactcaatttagtgaaacccaaatgaatcagatggcaaatcagttatctggaggacaaaaacgtattcttgattttgcattaacactcgttggtcgacctgaatttttaatactagacgagcctacaactgctatggatattgaaacaagagaacatttctggagaatgattgaggatctcaaatcaaagaatgtcacgattctttatacttctcattacattgaggaggttgagcgaatggctgatcatgtcgtcttactagatgaaggtcgaattcaattaagtgattctcctgaacagattaaaaatcaacagacttattccacagtagttttaccaccaatttgtaaagatatggttgaagagttagagaatgagtttgaaattgcaaagtataaaaataattatgtagtgagaacgaatcacgttgatacagttatacaaaagttaattgataatcacattgatttaaaccaaattgaaattcataaaacttcattattagatattatgttttcgaataatagtgatcaagaaggagtgactttataa

SEQ ID NO: 592 - DNA, 1473 bp, Staphylococcus capitis
atgaatttaggatattttggtactattttagcgattttattagtcctaggatttatcattaatttgatacttgcttttattatcattttcttggaaaaggaccgacgaagtgcaagttccacatgggcatggctatttgtacttttcttattaccaatagtaggattcattctttacttattcctaggtcgaactgtttctaagaaaaagctagagaaaaataacggaaaagagttggatgctttccaagatttagttaaagcacaagcaaatagctttgaaaaattaaattttaattctccaaacgaccaagttacaaaacatcatgatttaatccgaatgttattgatgaaacaagatgcttttttaacagagaataataaaattgaattatttacggacggtcatcaactatttgataaagttatagaggatatctataacgctaaagattatattcatctggagtattatacatttgaacttgatggccttggaaatcgtattatcgatgcgttagaaactaaactcaaagaaggcttagaagtcaaattattatatgatgatgtaggttcgaaaaaagtgaatatggctaaatttaaaaaatttaagtctctaggtggagaggttgaagccttttttgcttctaaattacctatcatcaactttagaatgaataaccgaaatcacagaaaaattattatcatagatggtcaagttggctatgtcggtggttttaatataggtgacgactatttaggtctaggtaaattaggttattggagagatacacaccttcgtgttcaaggtgatagtattgacgcattgcaactaagatttactctggattggaactcacaagcacatcgaccacagttcgaatatgaccaaaaatatttccctaaaaagattggggaaaaaggagataaagcattacaaattgcatcgagtggaccagcgttcgatcttcaccaaattgaatatggttatacaaaaatgataatgagtgcaagaaaatcaatttatcttcaaagcccttactttataccagatcaatcttatattaacgcgctgaaaatggctgcaaatagtggggtagacgtcaatttgatgattccatgtaaacctgatcatccatttgtatattgggctacattttcaaatgcagctgatttgttagatagtggtgtgaaaatttatacttatcagaatggatttatacattctaaaatattgatgatcgatgatgaagtttcatctgtaggtagtgcgaacatggactttagaagtttcgagttaaactttgaaattaatgcctttgtgtacgataaagaaattgcacaacaattgcgtcatgcttttgaagaagacgtgaagaaatcaaaacttcttaccaaagaaaaatatgagcaacgtccactttcaattaagtttaaagaagatttagctaagttaatttcaccaattttataa

SEQ ID NO: 593 - DNA, 198 bp, Staphylococcus capitis
atgcaacaaattaaattcaaaacatttacagaagattctattgaaagattggaaaaaagcgttaatgattttcttaagtcagatgaaggtagtgcatatagcttattaaatatcactattaaacaaattgaggagcgaaagtttccaaatatagaagaagattataacgcaatagtaactttagttactaaagaataa

SEQ ID NO: 594 - DNA, 1026 bp, Staphylococcus capitis
atgatttcatttgaaaatgattacttagaaggtgcacatgagaaagtactcaaacgacttattgatacaaacatggttcaagctgctggatacggctttgatgacttctcagcacaagcagctgataaaattagagaaactatcaagtgtcctgaggcaactgtaagatttttagttggtggaactcaaacaaaccaagtagttatcaattctatgttgaaaagttacgaaggtgttatatcagcagatacgggacatgtggcggttcatgaaggtggcgcgattgaatttagtggccataaagttttagccatcccatcagaagaagggaaaatatccgctaaaggtgttgaagcttacttagaaactttttatagtgacttcaaaaaagaacatatggtatttccggggatggtttatatttctcatcctacagaatatggcacactatatacaaaagaggaattagatagtttagccaaagtttgtcgtcaacatgagataccattatttatggatggtgctagactcggttacgggttgatgagtgaaaataccgacgtcactattgaagatgtagctaaatattgtgacatcttttatattggtggtactaaaataggtgcactatgtggtgaggcaattgtattcactaagaataatgagccaaaaaattttacaaccattattaaacaccatggcgctttactagctaaaggtcgattaactggtatccaattcttagagttatttacagatgatttatattttaaaattagtaaacatgcgattgatatggctaagaaagtcaaaaacggatttttagaaaaaggatatcaagtctattttgattcacccacgaaccaactattctttgtactcagtaacgataaaataaaagaattagagaagaaagttaaattcgcagtgtgggaaaaatatgatgataatcaccgtgttgtaagatttgcgactagttgggcaactactgaagaaaatgtagaacagttgttgaagttaatttaa

SEQ ID NO: 595 - DNA, 249 bp, Staphylococcus capitis
atggaaaacaaccaaagtaatattactgaagaaacgaagcacaatgataattcagaaacaattcatgaacaatcgcaacaaaaggagaaaacattctcccaagaagaagtatctcaaatgattaaagatcgtttagcaagagaaagaagaaaatctgatgaacgtattagaaatgcaattaaagaagctaagaaactggcaaaaatgaaaccagttcaatgctcaatgagtccggtgttcaaattttaa

SEQ ID NO: 596 - DNA, 249 bp, Staphylococcus capitis
ttgctaattttaaaacttcaagaaaaaaataaccagactgttatatataaatattatcctaatgataatgaaaatattaagccaggtgttattcatgtgaatatagacagtcttcaaattatcaatgctgaaaaatctgagatagaagataaagaaaaagataattattttatacatgctatcgaaagaatagaattgaataccagtaaaaaaatgtttcccaaatctgaacttgtagcttggggatag

SEQ ID NO: 597 - DNA, 843 bp, Staphylococcus capitis
gtgaaatggtctagaagagtatggcaagatagtgccgtaattcaaaaagtagtggaaagaacggctagtaatgtgtcacttaggggaagacatcctaatgagtatgtaactgtttatgagaaacatactgttacaaatatttataatgcaagtagattgttagttactgaatcagcacgtgttcaagctgaatcacagaagctaacttatcttaaagatttaggtgaagatggcgaatataaatatgtggccaaaatagataaaaaaacatctaaaatatgtcactctttaaatgataaagtatttaaagttaaagatatgatacctggagttaatgctccaccaatgcatccatggtgtagaagtactacagtaccgcatttgggaaactggcgggataaattctttaatgaacgtaaagataagtatcagattaaagattaccttagcgagtcaggtgcacttagtaacaaaaatgatgaatacggtgttaaaagaagaaagcacgcacaaacgtattataattcagtaaaaaatcgtgataaactggcagagataaaaactattgcaaacaatgtgaatatgaatgaaaaagcgattaaaagagtttatgaacacctatttgagaacaagtatctactagacagtggcattaaacaatttgaccctgatttttatatggctcaaagttggcaaagattgagaaaagggaaaaatattaaatctatggatgtaataatgctaaagcacgaagcacttgaacactttttaatgaataagtataatttaagttataaagaagcacatatactatctgaaaaaaatacaattacagcgcattaa

SEQ ID NO: 598 - DNA, 1341 bp, Staphylococcus capitis
atgccaaaacgtagttttacaaaagatgatattcgtaagtttgctgaagaggaaaacgtaagatatttaagattacaatttactgatattttaggaacaattaaaaacgtagaggttcctgttagccaattagaaaaagttttagataatgaaatgatgtttgatggctcttcaatcgaaggatttgtaagaattgaagaatctgatatgtatttacatccagatttagatacttgggtaatcttcccatggactgctggacaaggtaaagttgcacgtttaatctgtgatgtatttaaaacagatggtactccatttgaaggcgatccacgtgctaacttaaaacgagttttaaaagaaatggaagatatgggattcacagacttcaacttagggcctgaaccagaattcttcttattcaaattagatgaaaaaggtgaaccaacattggaacttaatgatgatggtggttacttcgacttagcacctacagacttaggtgagaattgccgtcgtgatatcgtattagaattagaggatatgggctttgatattgaagcaagtcaccatgaagttgcacctggtcaacatgaaattgactttaaatatgcagatgctgtaacagcatgtgataatattcaaacattcaaacttgttgtaaaaactattgctcgtaaacataatttacatgcgacatttatgcctaaaccattatttggtgttaacggaagcggaatgcactttaacgtttcactattcaaaggtaaagaaaatgcattctacgatccaaatggcgaaatgcaattaacagaaacagcttatcaatttacagcaggtgttcttaaaaatgcacgtggtttcactgcagtatgtaaccctctagtaaactcttataaacgtttagtgccaggttacgaagcaccatgttatatcgcttggagtggtaaaaaccgttctccattagtacgtgtaccttcttcaagaggattgtcaactcgtattgaagtacgttcagttgaccctgcagctaacccttacatggctttagcagcaatccttgaagcaggattagacggaattaagaataaactagaagtaccagaaccagtaaatcaaaatatctacgaaatgaatcgtgaagaacgagaagcagttggcatccaagacttaccatcaacattgtatactgcgttaaaatcaatgcgtgaaaatccttcaatcaaaaaagctttaggaaatcacatttacaatcaatttattaactctaaatcaattgaatgggattattaccgtactcaagtttctgaatgggaacgcgagcagtacatgaaacaatactaa

SEQ ID NO: 599 - DNA, 369 bp, Staphylococcus capitis
gtgcagtctaatgattcaatcagacgtaacatggccgtattctctatgagtgtagtgagtaaattaaccgaattaagtccaagacaaattcgatactatgagacacatgaactcattacaccagaaagaactgaaggtaacaaaaggttattttcaatgaatgatttggatagacttttagaaattaaatctttaattgaaaagggttttaacattaaaggtattaaacaaatcatttttgatgatcaagatcacttatcgacagacgaacaagagactagaaaaagaatgattgtagatgcaacgcagaaaccgcgtagcgaaacattaccaataaatcgtggtgacttatcaagatttattaaataa

SEQ ID NO: 600 - DNA, 1239 bp, Staphylococcus capitis
atggaagaaatgaccaaattaattgaagaagttgaaacgactttagcaccattcttcaaagatattgagaaaactgcgttaatcaatcaagaaaaagtattagacgcatttcaccatgtcaaagctacagagagtgacttgcaaggatctaccgggtacggttatgacgattttggtagagatcatttagaagaaatttacgctcacacatttaaagctgaagatgcacttgtcagaccacaaatcatttcaggtacccatgcaattacgctagctctgcagagtactttaaaatatggcgacgagttgctatatatcactggaagtccatatgacactttactagaagtaataggtgtgaacggaaatggtatagaaagtttaaaagaacatggtgtgcactataacgaggtcaaattgaataatggtaaaattgatattccttctgtacttagtgcaataaatgagaaaacgaaagttgtcgctattcaacgttctaaaggttatgatcaacgcccgtcaattccggtggatgaaattgaagaggcgattgatacaattaaaacacagcatccgaatgtcattatattcgtagataattgctatggagaatttgttgaagataaagaacctattgaagtaggggctgacttaatcgcaggttcactcattaagaaccctggtggtggcctagctaagataggcgggtatatagccggtcgtaaagatttaattgagagatgcggttatcgcttaactgcgccaggtattggtaaagaagcgggagcatctttaaattctttacaagaaatgtatcaaggattctttttagctcctcatgtagtcagtcaaagtttgaaaggcgcattgtttaccagtcttcttcttgaaaagttaaacatgaaaacgacacctaaatacaatgtgaaacgtacagacttaatccaaacggtacaatttgagacgaaagaacaaatgatatctttctgtcaaagtatacaacatgcttctccaattaatgcacattttagtccagaacctagttatatgcctggatacgaagatgatgtcattatggcagcaggtacctttgtacaaggctcctctatagaattatcagcggatggtcctattagaccaccatatgaggcatacgtacaaggtggacttacttatgaacatgttaaattagctgtaacacgagcagttacacaactgcgaaaacaaaacttgatataa

SEQ ID NO: 601 - DNA, 1236 bp, Staphylococcus capitis
atggcacagcaaccacatccgactaagaagaaattagagactgctgttttaatcggtgtacatgctcaaacggataatcaatttaattttgattcaactatggaagaattagaagctttatctcaaacttgccgtttaaatgttaaaggacaaatcactcaaaatagagaacaatttgatcataaatattatgtaggtaaaggtaaaatagaggaaattaaagctttcatcgaatttcatgatatagatgttgtcgttacaaatgatgaattaacgacggctcaatctaaaacattaaatgataatttgggcataaaaatcatcgatagaacccaattgattttagaaatattcgcattaagagcaagaagtagagaaggtaaattacaagttgaacttgcacaacttgattatcttttaccacgattgcaaggtcatggaaagagtctttctcgtttaggcggtggcataggtacaagaggtccaggtgaaacaaaacttgaaatggatcgacgtcatattagaacacgcatgaatgaaatcaagcatcaactacaatcagtagttgaacatcgtgaaagatatagaaataaacgagaacagaatcaagttttccaagttgccttagttggttatacgaatgctggaaaatcatcttggtttaacgttttagcgaatgaagaaacctacgaaaaggatttactctttgcaacattagacccaaaaacacgtcaaatacaaataaatgaagggtttaatcttattatttcagatacagtaggtttcattcagaaattacctacaacacttgttgctgcgttcaaatctacgcttgaagaagctaaagatgcagatttactattacacgttgttgatgcgagtcatcctgaacatcgtacgcaatatgatacagttaatcaaatcattgatgatttaaatatggatcaaatacctcaggctgtcattttcaataaaaaagatttatgcacagaagctcaagaggctccagttgctaaatcgccatatgtatttgtatctagtcgtgatgaaaatgataaagataaagttagaaacttaatgattgatgaaataaaacatcatttagactattatgaagaaacagttgatagtacagatgcaaatcgattgtacttcttaaagcaacacacactagttgatgaactttatttcaatgaagacaatgagacttatagtattaaaggttataaaaaataa

SEQ ID NO: 602 - DNA, 477 bp, Staphylococcus capitis
atggaaacaatttatgatttcgtagtacaaaaaaataatggtgaaaattataaattagaacagtataaaggcgacgtaatgctaatcgtaaacactgctagtgaatgtggttttactccacaatttgaaggattacagaagttatatgataactataaagataaaggctttatcgtcttaggtttcccttgtaatcaatttggcggacaagaacctggttcaggagaagaggctgctcaaaattgtaaaattaattatggcgttactttccctattcatgagaaagtagacgttaaaggcgacaatcaacatcctttattccgttatttaactgacgctgcaaaaggtatgttaaatgaaaaaattaaatggaatttcactaaattcttagttgatcgtgagggtaatgttattaaacgcttttctcctcagaaaaaaccagaccaaatcgcaagtgaaattgaaaaattattataa

SEQ ID NO: 603 - DNA, 240 bp, Staphylococcus capitis
atgattgcaaacgaaaacatccaagatcaagcactagagaactttaaagcagacaaaactgaggtcactgtattctttttaaacggctttcaaatgaaaggtgttattgaagactttgacaaatatgtcgtaagtttaaattctcaaggcaaacaacatctgatttacaaacatgcgatcagcactttcacagttgataatgaagcagaagaatcaactgaagaaaaaagtgaagaatag

SEQ ID NO: 604 - DNA, 999 bp, Staphylococcus capitis
atgacgaatcaacataagccatttattgttgttattgtcggaccaacagcatcaggtaaaactgaattaagtattgaagttgccaaaaaatttaatggagaaatcattagtggcgattcaatgcaagtatataaaaatatggatattggaacagctaaagtaacacaagatgaaatggatggtatcacgcatcatatgatagacatcttagaaccagatgagtcgttttcggcatttgaatttaaaaaacgtgcagaagcatgtattgaagatattacaaatagaggtaaattacctattatcgcgggtggcacgggcctttacatacaatcattactttataattatgcatttgaagatgaaactatttcagaagagcaaatgaaacgtgttcaagcacaacttgaagaattaaaacactataataatgaagaattgcatcagtatctagcatcatttgatagtgactctgcagaagatattcatccaaataatcgaaaaagagtacttcgagcgatagaatactatttaaaaacaaaaaaacttttaagttctcgcaagaaagtgcaacaatttactgaaaattatgatacattattattagggattgaaatgtcgcgcgaaacattatattttaaaataaataaacgtgtcgatattatgttgggtcacggattatttaaagaagtgcaagacctcgtagaacaaggttttgaatcaagtcaaagtatgcaagcaattggatataaagaactcgtacctgtagtaaaaggtcatatacagatggaagatgccgttgaaaaacttaaacagcattcacgtaagtatgcgaaacgacaattaacttggtttaaaaataaaatggacgttcgttggttagataaagaaaaaatgtcacttcagatgatgttagatgagattacaacccaaataaataaaaggagttctaaacatgattgcaaacgaaaacatccaagatcaagcactagagaactttaa

SEQ ID NO: 605 - DNA, 936 bp, Staphylococcus capitis
gtgagtcaaagtcaatttaaaattactgttgaagatggaacaatgattgaagttaaagttgataaagcgaagaaaaatactatcggtattattcatctttttcatggtatggctgaacatatggaccgttatgacgagttagtaaatgcgttgaatatacaaggatacgatgttttaagacacaatcatcgtggtcatggtaaagatattgatgaagttgaacggggtcattttgagagtatgtctcagattgctgatgatgcgtatgagatagttgaaacactatatggtactgaacttaaagttccttacgttgttcttggacattctatgggctctattattgcaagattatttgttatgagatacccagaatttgcagatggattaatattaacaggtactggcatgttcccaaaatggaagggtgttccggcgactttcgctttgaagctcattacgatgatcttaggaaaacgccgtcgagtaaattgggtgaataaattagttaataaatcatttaacaaacgaatatccaatcccttaactgaaagtgattggatatctacaagacgtgatgaggtagagaaatttgttaaagatgaatactgtggtttcaaagtatctaatcagttaatttatcaaactgtaaaatttatgatgctaacaatagaacctaaatgtctagataaacttaacaaacaattgccaattttattgatttcaggaaaagaagatccatttggtgattatggaaaaggaatcaaacaattaggtaaattgtataaaaaatcaggtattaagcacattactgttcagctatataaaaataaaagacatgaaattttatttgaggacgattatcaaacaacgtggcaacatatgtttgaatggatagagaaacaaattttaaagaaaaataaagtgagtgaataa

SEQ ID NO: 606 - DNA, 1674 bp, Staphylococcus capitis
atggcattatctacattgaaaagagatcatatcaagaaaaatttaagagaaaatgaatatgacgttgttatcgtcggtggtggtattacaggtgcaggtattgctcttgacgctagtaaccgcggtatgaaagtagcattagttgaaatgcaagatttcgcacaaggtacaagttctagatctactaaacttgttcatggtggtttaagatatttaaaacaattacaagttggcgttgttgctgaaactggtaaagaacgtgcaattgtttatgagaacggtccacatgtaactacacctgaatggatgctgttaccaatgcataaaggtggtacattcggtaaattctcaacagctatcggtttaacaatgtatgatagactagctggtgttaaaaaatctgaacgtaaaaaaatgttatctagacaagatacactagataaagaaccactagttaaacaagaaggcttaaaaggtggcggttattacgttgaataccgtactgatgacgctcgtttaactattgaagttatgaaaaaagcagctgaaaaaggtgcagaaatcattaactatactcgttcagaacatttcacttatgattcaaataaaaaagttaatggtatcgaagtattagatatgattgacggagaaatatacggtattaaagctaaaaaagtaattaatgcttctggtccatgggttgatgaagtgagaagtggtgactatgcacgtaataataaacaactacgtttaactaaaggtgtgcacgttgttatcgaccaatctaaattcccattaggccaagcagtttatttcgacactgaaaaagatggtcgtatgattttcgctatacctcgtgaaggtaaagcatatgttggtacaactgatactttctatgataacgaaaaagcaacaccattaactacacaagaagatagagattatctcattgatgcgattaattacatgttcccaagtgttaatgttaaagatgaagatatcgaatcaacttgggcaggtgttcgtccattaatcttagaagaaggtaaagacccatctgaaatttctcgtaaagatgaagtttgggaaggtgaatcaggcctacttactattgctggtggtaagttaacaggttatcgtcatatggcactagatattgttgacttattagctaaacgtttaaaacaagaacatggacttaaatttgaaccatgtgcaactaaatatcttaaaatttctggcggtgacgtaggtggtagtaaaaactatcaacactttgttgaccaaaaagttgacgcagccaaaggatttggtattgaagaagatgttgcacgtagattagctagtaaatatggttctaacgtagatcatttattcaacatagctcaaactgctaaacaacaagataatcatttaccattagaaatttatgtggaattagtttacggaattcaacaagaaatggtttacaaaccaactgacttcttagtacgtcgttcaggtaaattatacttcaatattcaagatgttttagattataaagaggctgttattgacgttatggctgacatgcttaactattcagatgctcaaaaagagtcttacactaaagaagtagaagaagcaattgatcaagcacgtactggaaataatcaaccagcagttaaagaataa

SEQ ID NO: 607 - DNA, 1500 bp, Staphylococcus capitis
atggaaaaatatattttatcaatcgatcagggaacaacaagttcacgtgcaatcttatttaataaagatggagaaattaaaggtgtttctcaacgtgaatttaaacaacattttccacactcaggttgggtagaacatgatgctaacgaaatttggacttcagttctttcagtaatggctgaagttatgaatgaaaatgatattcaatctgaacaaattgaaggtatcggtattactaaccaacgtgaaacaacagtggtttgggataaaaataccggacgaccaatttatcacgcgatagtttggcaatcacgtcaaacgcaagatatttgtactgaattaaaagatcaaggttatgaagaaacattcagagataaaacaggtttactactagacccttattttgcaggaactaaagtaaaatggattttagataatgttgatggcgcaagagagaaagcagaaaatggagacttattattcggaactattgattcttggttagtttggaagttgtcaggtaaagcggctcatatcactgactatacgaatgctagtcgtactttaatgttcaatattcatgatttaaaatgggatgatgaactattagacattttagatgttcctaaacaaatgcttcctgaagttaaagaatcaagcgaagtgtatgctaaaactatagattatcacttctttggtcaagaagtacctattgccggtatcgctggtgaccaacaagctgcattatttggtcaagcttgtttcgaccgtggtgacgttaaaaacacttacggtacaggtggctttatgttaatgaacactggtgaagaagcggttaaatcagaaagtggattattaacaactattgcatatggtattgacggcaaagtgaactatgcgcttgaaggttcaatctttgtttcaggttcagctatccaatggttacgtgatggtttgagaatgattaattctgcacctcaaactgagaactacgcttcacgtgtggactcaactgaaggcgtttatatggttccagcatttgtaggcttaggtacgccttattgggattctgatgctagaggcgcattcttcggattaactcgcggtactgaaaaggaacacttcatccgtgcaacattagaatcactatgctatcaaacacgtgatgttatggaagcaatgtcaaaagattcatctattgaagtacaaaacttacgtgtagatggtggtgcagttaaaaataacttcctaatgcaattccaagctgatatcgttaatacagcagttgaaagacctgaaattcaagaaactactgctttaggtgctgcatacttagcaggtttagctgtaggattctgggacgataaagaagatattagagaacgttggaagcttgaaactgaatttgaaccaaaaatggaagatgaacaacgcactaagttatacaaaggctggaaaaaagctgttgaagcaactcaagtattcaaattagaagattaa

SEQ ID NO: 608 - DNA, 819 bp, Staphylococcus capitis
atgaatgcttatttagcagaatttttaggaactgcgattctaatccttttcgggggtggcgtatgtgcaaacgtcaacttgaagagaagtgcaggcaacaacgctgactggattgttatcgcagcgggttggggacttgccgtgtcaatgggtgcctacgctgttggtaaattctcaggtgcacatttaaacccagctgtaactatagctcttgccatggatggcggattcagttgggctcaagtaccaggatatatcatttgccagatgttaggtggtatcgttggtggtgcactcgtttggttaatgtatcttccacattggaaagtcactgaagaacctgacgttaaattaggcgtgttctctacagcacctggtatcaaaaattatttcgccaactttttaagtgagataatcggtacaatggctttaactttaggtattctatttattggtgtaaataaaattgctgacggattaaacccacttattgttggcgctttaattgtagcaattggtttaagtttaggaggccctactggttatgcaattaacccagctcgtgacttaggcccacgtattgcccatgcaatattgccaattgcaggaaagggtaaatctaattggtcatatgctatagtgcctgtattaggtcctattgcaggtggtatgctcggtgcagtcatttacgaagtattttataaacaaacttttaatgtaagttgtgccgttggaattttagtagtagtaatcactctagtattagggttgatattaaataaatcttcaaaaaaaggtgacattgaatcaatttactaa

SEQ ID NO: 609 - DNA, 534 bp, Staphylococcus capitis
ttgaaagaaaatattttaccagctattagaaacatgagagatcttgaaagattaacgaagacgaactataaagcttgtgtattgttagatatgcatatcggccatttaaaaagtattatggggttactaaagcaatataatatagagtgttatattcatatcgatttgattaaaggattgagccatgatgaatttgcttgtgaatatatcattcaacaatatcaaccaaaaggtatcgtttctacaaaaacaaaagtgattaggaaagctaaatcattaaataccttaacgatatttagagtgtttattattgatagtcaagcacttactagaagtatagagttaattgaaaaagtcgaaccagattttgtcgaagtattaccaggtatagctagtaaagcgattaatcaaattcaaaaagagactacaacatcagttattgcgggcggattaatcaatgatgaagcagaaattcaagaagccatatctagtggagctaaatatgttactacaagctatcaaaagctctggtag

SEQ ID NO: 610 - DNA, 1968 bp, Staphylococcus capitis
atgggaaaaataaaagaattacaaacctcattagctaacaaaattgcagccggcgaagttgtagagagacccagctctgtagttaaagaattattggagaacgcgattgatgcaaaatccaccgagataaatattgaagtggaacaatcaggtatttcttcaattagagttgttgataacggcacaggtattgagcaagatgatttaagtcttgtctttcatagacacgcaacaagcaaattagatgttgatgatgacttattccatattagaactttaggatttcgtggtgaggctttagccagtatttcatcagtatctaaagtgacattaaaaacgtgtacagataatgaaaatggctttgaagtatatgctgaaaatggtgagatcgttaatcgtaagccagcaaaagctaaaaaaggtacagacatattagttgaatccttgttctataatacaccagcgcgcttaaaatatattaaaagtctttatacagaattagggaagataactgatattgttaatcgaatggcgatgagtcatcctgatattagaatctctttagtgtctgatggcaaaacactaataagcacgaacggttcaggtcgcacgaatgaagtgatggcagagatatatggaatgagagttgctaaagatttagtacatatttcaggagatacaagtgattatcatcttgaaggtttctttgcaaagcctgaacattcaagaagtaacaagcattatatttcaatttttattaatggtagatatatcaagaattttattcttaataaagctattttagaaggataccatacattattaactataggcagatatccaatttgctatatcaacattgaaatggatcctattttagtagatgttaatgtgcatccaactaagttagaagttcgtttatcaaaagaggaccagttatatgatttaatagttgaaaaaattagagaggccttcaaagatagaattctaatacctcaaaatgatttagaccgaacacctaaaaagaataaagtccttgaatcatttgaacaacaaaaaatggatttcgaaaaacgaaattctgaagtgacaaatgacgactcaacaaccgcccatccttcatctaataaggaccattacaatactaatgattcagaaattagagaaggtatcaataattaccaagatacaaatactactttatcaaaccatgaaaatgagaaaggatttacctctcataatatacaacgttccgaagaggataattactctcaagttcaaaaagacatacttaatgatatggaggacgattaccttttaaatactgaatcaacctctaataatgaagaagatattaaaggtacagtgagtcaagatcctaagcgacgtgtaccatacatggaagttgtgggccaagttcatggaacatatattattgctcaaaatgaaaatggtatgtttatgatagatcaacatgcagcgcaagagagaataaagtatgaatattttagagataaaataggagaagtatctaacgaagttcaaaatttacttatacctcttacatttcatttctcaaaagatgaacaaatgattattgaccagtatatagatgaattagataaagttggaatacagctagagcattttggtggtcatgattatattgtaaatagttatccagtatggtttccaaaagctgaagcacaggaaataattaaagatatgattgagttagttttagaaaataaaaaagtagatgtgaaaaagataagagaagatgcagcgattatgatgtcttgtaagaaatctattaaagctaatcattatttaaaaaataatgaaatgtcagatttaattgatcaactaagagaagcagaagatccatttacgtgtccgcatggtagaccaattataatcaatttttcaaattatgaattagaaaaactatttaaacgagtgatgtag

SEQ ID NO: 611 - DNA, 2610 bp, Staphylococcus capitis
atggcgaatgtaacaccgatgatgcaacaatatttaaaaataaaatcagaatatgatgattgtttattattttttagactcggcgatttctatgaaatgttctttgaagatgccaaagaagcctcaagagtacttgaaatcaccttaactaaaagagacgctaaaaaagaaaatccaatcccaatgtgtggcgtaccttatcattcagcagatagttatattgaaaccttaattaataatgggtataaagtagcgatttgtgaacagatggaagaccctaaacaaacaaaaggcatggttaaaagagaagttgtaagaattgtcactcctggtacagtcatggaacaaggtggcgtagatgaaaaacaaaataactacattcttagttttgtaaaagatgaagaaatagcacttagttattgtgatgtttctactggagaatttaagtctacccattttcaagacgaagcgacgttattaaatgaaataacgacgataaatcctaatgaaattgttgttaatgaagcattatctgaagaactcaaacgccaaattagtatgactacagaaacaattacagtacgtgagactctatcaaatgaacaatacgagactaataagcttgctcataatctaatgtataaatctgcacaattattactagattatattcatcatactcaaaagagagacttatctcatatagaagaagttgtacaatatgcggctgttgatttcatgaagatggacttctatgccaaacgtaatctagaactaacagaaagtattagactcaaatctaaaaagggtactttactttggttgatggatgaaacaaaaacaccaatgggtgctagaagattaaaacaatgggtagatagacctttaattagtaaagaccaaattaatgatcgattaaatatagttgaagaattcattaatcgttttatcgaaagagataccttacgtaattatttaaatcaagtttatgatattgaaagattggtaggtagagtcagttatggcaacgtgaatgccagagatttaattcagctcaagcactcaatatcagaaattccacatattaaagaattacttaatgaattagatgctcaaactactactcaatttagtgaacttgagccgttagatgatcttttagaactattagaagaaagtttagtagaagaacctccaatttcagttaaagatggtggattattcaagacaggtttcaatgaacaactagatgaatacttagaagcttctaagaacggtaaaaattggttagcagaattacaggctaaggaacgtgagcgtacaggtatcaagtctcttaagataagttttaataaggtttttggttattttattgaaatcacacgtgctaatttgcaaggatttgaacctagcgattatggctacaatcgcaaacaaacattatccaatgcagagcgttttattacagatgaattgaaagaaaaagaagatatcattttaggtgccgaagataaagcgattgaattagagtatcaattattcgttaaattgcgtgagcacattaaaacttacactgaaaggttacaacaacaagctaaaattatttctgaattagattgtctacagagttttgctgaaattgcgcaaaaatataattatgtaagaccttctttcagtgatgataaaaccttacatttagagaattcgagacatccagtggtagagagagttatggatcataacgattatgtgccgaacgattgtagtttaaacaatgatacatttatttatctcataaccgggccaaatatgtctggtaagtcaacttacatgagacaagtagcaattattagcattatggcacaaatgggagcatacgtaccttgtgattcagctatattacctatatttgatcaaattttcactagaataggtgcagctgacgacttagtttcaggtaaaagtacatttatggtagagatgttggaagcacaaaaagcgttaacttatgctacagaaaatagtttaattatttttgatgaaattggtagagggacatctacttatgatggacttgctttagcacaagccatgattgagtatgtagcacaaacttctcatgctaaaacattattttcaactcattatcatgaattaacttcactagatcaaatgttaccatgtttaaaaaatgtacatgtagctgctgatgaatatcaaggagaactgatattcttgcataaagttaaagatggagccgtcgatgatagttatggtatacaagtagctaaattagctgatttgccagaagaagtaataagtcgagctcaagtaatactagatgaatttgaacaaaaaccatctaatcaaattatgcctaatgaattaccaaataatcatacaaatgatgaaaatgtaaaaaatgagcatcacaatagtgacgacaaatcaatgatcaaagattcatttgaacaagctgcatttgatttatttgataatagtgaagaacaaagtgaattagaattagaaattaaaaatttgaatttatccaatatgacgcctatagaagcacttgtgaaattaagtgagttacagaatcaattaagatag

SEQ ID NO: 612 - DNA, 495 bp, Staphylococcus capitis
atgaaaataaggaatttgactataactgcatttttaatcgcaatcaacgttgtattaagtagtcttattgtaatacctttaggacctataaaagcagcgcctgttcaacattttattaatgttttatgcgctgtgtttgtaggaccgtggtatggattagctcaagcgcttatttcttcaattttaagaattagttttggaacaggtagtccttttgctttcccgggtagtatgattggagttctcttgtctagtctattctacatgtatagaaaacatattttcatggcatcagttggagaagttttaggaactggtgtcataggaagtttaatgtgtatacctttagcatggtttatgggaatggaagacttctttgtaaaaccattaatgatagcgtttatggtttcaagtgtaattggttctctaattagctatataatacttattattttaaaaagacgcgggttattagataaatttaaaaagaaataa

SEQ ID NO: 613 - DNA, 366 bp, Staphylococcus capitis
atgtattcaaaagaggatatcttaaaacatgcagatatactagcgcaacgcattaatgacctagatgttgtaaaagattaccaatcgattgaacagcaaatccataataataaaacaattgaaagtaagatgaaaagtctaaaaaatcaacaaaaacaatctgtcaactttcaaaattatgggaaagatactgccttccgacaatctgaaaatcaaattcatcatattgaagatgaaataaataatttaccaatagtcgaagaatttcgttctgcacaatacgatgcgaatgatttattacaaatgatgatcaaaacaatggaagatagacttaatgaacataacaaacgagagcataaggaataa

SEQ ID NO: 614 - DNA, 1545 bp, Staphylococcus capitis
gtgaatgaagaacaaagaaaagctggtacgataaacattttagctgagcgtgatcgtaaagctgaaaaagactatagcaaatactttgaacaagtgtatcaaccacctagtttaaaagaagcaaaaaaacgtgggaaacaagaagtacaatataatagagattttcatattgatgaaaagtataaaaacatgggtaacggtcgtacttttttaattaaaacgtatggttgtcaaatgaatgcacatgatactgaagttatggcggggatattaaaggctttaggttatagtgcgacaactgatattaatcaagcagatgtaattttaattaatacttgtgctattcgggaaaatgcggaaaacaaagtttttagtgaaattggaaatttaaaacatcttaaaaaagaacgtcctgattgtctaatcggggtatgtggatgtatgtctcaagaagaatcagtagtaaataaaattctaaaatcttatcaaaatgtagatatgatatttggtacacataacatccatcacttacctgaaattttagaagaagcgtatttatctaaagcaatggtagtagaagtttggtctaaagagggagatgttattgaaaatcttcctaaggtaagagaaggtagtataaaagcttgggttaatatcatgtatggatgtgataaattctgtacatattgtatcgtacctttcacgagaggtaaggaacgtagccgtcgccctgaagatattattaatgaagtaagagaattagcaagagaaggctatcaagaaattactttattaggtcaaaatgtaaattcctatggtaaagatatcgaagatctagattatggacttggtgatttactagaagatatatctaagattgatataccaagagtaagatttacaacaagtcacccttgggactttacggatcgtatgattgaagttatagcaaatggtggtaatatagttcctcacattcacctaccagttcaatcagggaacaatgccgttttaaaaattatgggtcgtaaatatactcgtgaaagctatcttgatttagtaaatagaataaaaactgcaattcctaatatagcgttaacaacagatattattgtaggatatcctaatgaaactgaagaacaatttgaagaaacgctatcgttatatgatgaagtagaatttgaacatgcttatacttatctatactctcaaagagatggaacaccagctgctaaaatgaaagataatgtgcctactgaagtgaaaaaagaacgattacaaaggttaaataaaaaagtaggtgaatactctcaaaaagctatgagtaaatatgaaggtaaaatcgttacagtattgtgtgaaggagcaagtaaaaaggatgacacagtattagctggttacactgataaaaataaactagtcaactttaaagctcctaaagaaatgattggaaaacttgttgatgttaaaatcgatgaagcaaaacaatattcattaaatggaacatttgtgaaagaacatcaaaaggcaatggtggttcattaa

SEQ ID NO: 615 - DNA, 297 bp, Staphylococcus capitis
gtgcaagatactttaatgagtgtacaaataattcctagaactccaaacaatgaagatgtgattccttatgttgatgaggcaattaaaattattgatgaatcaggaatgcattatagagtagggccattggaaacaactgttcaaggagaaatgagtgagtgtcttattctaattcaaaaacttaatgagagaatggttgaattagaatgtccaagtattattagccaagttaaattttatcacgtccctgaaggaattgatattgagacattaactggcaaatatgatgaagaataa

SEQ ID NO: 616 - DNA, 618 bp, Staphylococcus capitis
atggatagatttaaatcaatgaaagaattagaaaacgtaactgtggaaaatgaagattgggaaattgaaacagatgataaagatagtaatgtatcaatcttagcgattcacggtggtggtattgaaccagctacgactgagttagcacaagtgattgctgataaagggaattttaattatttttcttttaagggactacgtagtaaaggcaataatgaattgcatgttacatctacaaattacgatgacccacaagctattaaaattgttgaaaaaagtgaaagagcgatagcattgcatggttgtaaaggcgaagatagtgtagcttatcttggaggcaatgatcagcaacttattgatatattaagtgatacgttatcagatgtaggtataaaggtacaagaagcgccgaatacgatggctgggaagcaagatgaaaatattattaatttaactaagaataatgctggcgttcaaatcgagttaacttcaagtcttagaaaagaattatttgtgaataacaaaagttcacgtaaaagtcgtgaagaccgagataactggggtgacttaatgtacgactttgcagatgcaacaattaaagcactacaacaagtttag

SEQ ID NO: 617 - DNA, 867 bp, Staphylococcus capitis
ttggctacattcaaagattttagaaataatgttaagccaaattggtgcccaggatgtggagatttctcagtacaagcggccatacaaaaagcagctgccaatgtaggtttggaacctgaagaagttgcaattattacaggcattggatgttctggtagattatcaggatacattaattcttatggtgttcacgctatacatggtcgtgccttacctttagcacagggtgttaaaatggcgaacaaagatttaactgttattgcttcaggtggcgatggagacggttatgcaatcggtatggggcatacgattcatgcattaagaagaaacatgaatatgacatacattgtcatggataatcagatttacggtttaactaaaggacagacatcaccttcttcagcagtaggttttgtaactaaatctacacctaaagggaatattgagaaaaatgtagccccattagaattagctctttcatcaggtgctacatttgtagcacaaggtttttcaagtgatattaaagcattaactaaaatgattgaggatgcgattaatcatgatggattttcatttgttaatgtattctcaccttgtgtaacatataataaagttaacacttatgattggtttaaagagcatttaactagcattgatgatattgatgattatgataattcagataaacagttagctatgcgaacagttttagagcacgaatcgctagttaaaggtattgtctatcaagatactgaaacgccttcatacgaatctcaaattaatgaacttgaagatgaggctctagctaaaaaagatgttcatattacagaagatacgtttaatgatttgacagctcaatttatataa

SEQ ID NO: 618 - DNA, 1761 bp, Staphylococcus capitis
atgaaatcacaactatcatggaaagtgggcggacaacaaggtgaaggtatcgaatctactggagaaatcttcgctactgcaatgaataggaagggatactttttatatggttacagacacttttcaagtcgaattaaaggtggtcatactaacaataaaataagagtatcaactacgcctgttcatgccattagtgacgatttagatatcttaattgcattcgatcaagaaacgattgagttaaatcatcatgaaatgagagaggatagtattataattgcggattctaaggctaaaccgacgaaaccagaaggctgtaaagcgcaacttatagatttaccgtttacaagcactgctaaagaacttgggacagcactgatgaaaaacatggtggctattggagctacttcagcgcttatgaatttagacacaactacttttgaagaattaattacgaacatgttctctaaaaagggagaaaaagtagttgatatgaatatcgaagcacttaacgaaggttatcgtttaatgaaagaacacctaagttctattcagggagactttgaattagaagcaattaatgaagatcctcacttgtatatgataggtaatgatgcaattggattaggagcaatatcagcaggttctaaatttatggctgcttatcctattactccagcatctgaaattatggagtatatgattgctaatcttcctaaagtcggtggcactgttgttcaaacggaagatgaaattgctgcagctacaatggctatagggtctaattatgctggtgtaagagggtttacagcaagtgcaggtcctggtttatcattgatgatggaatcaattggtttatcaggaatgactgaaacaccattcgtagtcatcaacactcaacgtggcggaccttcaacaggtttacctactaaacaagaacaatcagatttaatgcaaatgatatatggtacacacggtgatattccaaaaattgtagttgctccaactgatgctgaagatgcattctatcttacagtagaggcattcaatttagcagaggaatatcaatgtcctgtcattattttaagtgatctacaactttctttaggtaaacaaacagttaagtcattagattataataagattcaaattaaacgcggcgaattacttcaatctgatatagaacgtgaagaagatgataaaggctactttagaagatatgccttaacaggtaatggaatttcacctcgtcctattccgggtgtaaaaggtggcattcatcacatcactggtgttgaacataatgaagaaggtaaacctagtgaagcggcttctaatagacaagcacaaatggaaaaacgtatgcgtaaaacagaaaatctagttatagaaaaacctattgaatctaatgaaaaatatgatgaggcagatttattatatataggttttatttctaccaaaggtgctattaacgaaggcgcagaacgtttggaatctcaaggtattaaagttaatactatacaaattcgtcagttacatccattccctaaagatacgattcaacatgcaatcgataaagcatctaaagtgattgtagctgaacataattatcaaggtcagttatctaatattttaaaaatgaacacaaaagtagaagaaaaattagtgaaccaaactaaatatgatggtacacctttcttacctcatgaaattgaagataaaggattagagatagtcaaggaaattaaggagttggtttaa

SEQ ID NO: 619 - DNA, 795 bp, Staphylococcus capitis
atgagaatattgtttattggagatatcgttggaaaaatcggtagaaaagcaatttctacatatttaccaaaaataaaacaaagttatcgccctacagtttccattgtaaatgctgaaaatgcagcacatggcaaagggttaacagagaagatttataaacaattattaagagaaggcgtagatttcatgactatgggtaaccatacttatggtcaaagagaaatttatgactttatcgatgatgcacatcgcatggttcgtccggctaattttccagaagaagcgccaggagttggaatgcgttatattcaaattaatgaaataaaattagctattattaacctacaaggacgttcatttatgcaagatattgatgatccctttaaaaaggcggatcaattgatagaagaagcaagaaaagtcactccttacatcttcgtcgactttcatgcagaaacaacttctgagaaaaatgctatgggttggtatttagatggtagagtgagtgcaatagttggaacacatactcacattcagacttctgataatcgcgtcttaccaaacgggactggctatatcactgatgtgggtatgacaggatattatgatggaattttaggtatcaatcgcgaagaagtgattaatagatttattacaagtttacctcaaagacacgtcgtaccagatgaagggcgcagtgttttatctggcgtcattattgatttagataaagaaggtaaaacaacacaaattgaaagaatattaataaatgacgacaatccttttcagggataa

SEQ ID NO: 620 - DNA, 216 bp, Staphylococcus capitis
atgtctattaatattgatcctgaaaaatttgcagaattagtagtaaacgcgaatccagcaaaatctgatgaaccagaagatattgctaaagaaagcttaacactctatattaatgcttaccgtttagctgaaaaatattcaaacattgctactaattgttacgatacagctgaaatcattaaagaaatcaatgatgcagacctacaattaaaataa

SEQ ID NO: 621 - DNA, 1560 bp, Staphylococcus capitis
gtgaatttattaagcctcctactcattttgctggggataattctaggcgttgttgtagggtatgtcgttgcccgaaatttattacaccaaaaacaagttcaagcaagacaaactgccgaagatattgtcacttatgctaataaagaagctgacaatattaaaaaagaaaagttacttgaggcaaaagaagagaaccaaattttaagagaacaaacagaaagtgaactgcgtgaaagacgtggggaacttcaaagacaagaaacccgacttcttcaaaaagaagagaacttggatcgaaaatctgatcttttagataaaaaagatgagattttagaacaaaaagaatcaaaaattgaagaaagacaacaacaagtagatgcaaaagagagtagtgttcaaacattaataatgaagcatgaacaagaattagaacgcatctccggtctcactcaagaagaagctgtaaatgaacaacttcaacgagttgaagaagaactgtcacaagatattgcaatacttgttaaagaaaaagaaaaagaagcgaaagaaaaagtagataaaacagcaaaagaattacttgctactacagtacagagattagcagccgatcatacaactgaatcaactgtatcagttgttaatttacctaatgatgaaatgaaaggtcgtatcataggtagagaaggtcgaaatattcgtacattagaaacgcttactggtatagacttgattattgatgatactccagaagcggttattttatcaggctttgacccaattcgacgagaaatagctagaacagcattagttaacttagtttcagatggtcgtattcatcctggtcgtattgaagatatggttgagaaagctagaaaagaagttgacgatattattagagatgcaggtgaacaagctacatttgaaattaatgttcataacatgcatcctgatctagttaaaatacttggtcgattaaattatcgtactagttatggccaaaatgtgcttaaacattctattgaagtggcgcacctttcaggtatgttagctgcagagttaggcgaagacgttactcttgctaagcgtgcaggtttacttcatgatgttggtaaagctattgaccatgaggttgagggaagtcacgtagaaataggtgttgaattagctaagaaatatggtgagaatgaaacagtaactaatgctattcactcacatcatggtgatgtagagccaacttctattatttctattttagttgcggctgcagatgccttatcagcagcaagaccgggtgctcgtaaagagacacttgaaaactatattagaagattagaaagattagaagctttatctgagagctatgatggagttgaaaaagcatttgcaattcaagcaggtagagaaattcgtgtagttgtctcacctgaagaaattgatgatttaaaatcatacagattggctagagatatcaaagatcaaatcgaagaagaattacaatatcctggttacatcaaagtgacagttgttcgagagactagagcagtagaatatgcaaaataa

SEQ ID NO: 622 - DNA, 1053 bp, Staphylococcus capitis
ttggataacgaacgtcaaaaagctttagatacagttataaaaaatatggagaaatcatttggtaaaggtgcggttatgaaattaggcgacaataaaggtcgtaaagtatcaagcacatcaagtggttctgtaacagtggataatgccctaggtgtaggtggttatcctaaaggaagaattatagaaatttatggacctgagagttcaggtaaaacaacagttgctttacatgcaattgcagaggttcaaaaaaacggtggagtagctgcattcattgatgctgaacacgcacttgatcctgtgtacgctcaagctttaggcgtagatattgacaacttatacttatctcaacctgatcatggggaacagggacttgaaattgctgaagcatttgttcgaagtggtgcagttgatattgtcgtggttgactcagtggcagcattaactcctaaagctgaaatcgaaggtgaaatgggagatacacatgtcggtttacaagcaagattaatgtctcaagctttaagaaaattatctggtgcaatttctaaatcaaacacaactgcaatctttattaaccaaattcgtgaaaaagttggtgtgatgtttggtaacccagaaactacaccaggtggacgtgcattaaaattctatagttctgtaagattagaagtaagaagagctgaacaattaaaacaaggccaagatatcgtaggtaacagaactaaaatcaaagttgttaaaaataaagtagcacctccattcagagtagctgaagtagatattatgtacggtcaaggtatttctaaagaaggcgaattaattgacttaggtgttgaaaacgacatcgttgataaatctggtgcttggtactcttataatggtgatcgaatgggtcaaggtaaagaaaacgttaaaacgtatttaaaagaaaaccctcaaattaaagaagaaattgatcgtaaattacgagaaaaattaggtatattcgatggagacgttgaagaaacagacgctgaagaagaagcacctaaaactttatttgatgaagaataa

SEQ ID NO: 623 - DNA, 1149 bp, Staphylococcus capitis
atgaaaatatctataattgccgtaggttctgaattacttttaggtcaaatagcaaacacgaatggtcagtatttatccaaactatttaatagtattggtaaaaacgtggttgagcatactgtaattggagataatccggaaagattggaatacattatcagacaaggatttgaacgttttgatgctcttgtgttaacaggtgggttaggacctactaaagacgatttaactaaacatactgtagctaaagttttaggtaaagaattagttactgacgaggcttctttagaatatattgagagttatttcaaggagcaaggacaagaaatgacacctaataataaacaacaagcattggttattgatggttgcaaagtattaccaaataaaactggtatggcgccgggaatgttaattgaaaagaatgataaaaaggttgtgcttttaccagggcctcctagtgaaatgaagcccatggtaaagaatgagctattaccttacttactagatgacgatagcgtcattttttcagagttattaagatttgccggaataggtgaatctaaagttgagacgatactcatggatcttatagaaaatcaaactaatccaactatagctcctttagctggaacacatgaagtttatattagaattactgccaattctgattcaaagaatgattgcaaaaatcttattgcccccgtcaagagggaaatactcgaccgtattggtgattattactatggatctgatgacattactcttgaagaggctgtgatctctaaaataaatgaaacgtttgctatatatgatggagtaacaaatggtgctttatatacaagacttaaaaatgtagatcaaaataatgtacttaatggattgttaccacacaatggtttatttatagacactacagatagtatccacgaccaattatttaatgcagcgcaatatgtaaaagatttataccaaactgatttgggtattgttttattacatgaaaatgaagacgtctacttagctatgtacgatggagaagtattaaacgttgatacttttaaaatgactcaaagtagaaatttattaagaagcagaagtcaaaattatgcgatgattaaattattaaaatggtttgaaaatcgatga

SEQ ID NO: 624 - DNA, 582 bp, Staphylococcus capitis
atgaatataccgaatcagattacggtatttagagttatattgatacccgttttcatactatttgcgttagtagatttcggatttggaaaggtatcttttttaggcgggtatcacattagaattgaaattttaataagtgcaattatttttattcttgcatcgttaagtgactttgcagatggatatttagcacgtaaatggcaacttgttacaaatatgggtaaatttttagatccattagctgataaacttttagtagcgagtgctcttattgtaatggtgcaattaggttttacgaattcagttgtagctataataattattgcacgagaatttgcggttacaggcttacgtttattacaaattgaacaaggatttgtaagtgcggcgggtcaactaggtaaaattaaaacagcagtcacaatggttgcgattatttggatactactaggtgatccactcgttcattatattcattttccactcggtgtgacattactttatataggagtgttcttcactatcctttctggcattgagtatttttataagggtagagatgtatttaaacaatctaaataa

SEQ ID NO: 625 - DNA, 393 bp, Staphylococcus capitis
gtgaaaactgttggtgaagcattaaaaggtagacgtgaaaggttaggtatgactttaaatgaacttgagcaacgaacacaacttaagcgtcaaactctgatacatatagagaataatgattttgatttattagccaaaaaggattacacagagggatttatccgtaaatatgctaatgtagtcaacattgaacctaatcaacttattgaggctcatcgtgacgaaataccaaataatcagaatcaaattgatgaattaattgctgctttctcgaacggtgaagctccctcgtatcgaagtaagtcaaaagaaacgatgcaattgataatgctaattggtcttatagtaatagtttctttaatactttggattcttgcagtgttaattatataa

SEQ ID NO: 626 - DNA, 828 bp, Staphylococcus capitis
atggcagtagcagaaagaaaagaatggtatcttgaatatgagattacaattaatcgtgcaggattacttggggacatatcaagtttattaggtatgttaggaattagtattgttacaattaatggtgttgatcaaggcaaaaggggtttacttatcaaaactgataaactagaaaaagttgaacgttttgaacaaatagttaaagaaattaatgaaattgacattaccaaattaagaataccagaacttagagatcgtcttgcagttagacatggcagatacatagaacaagatgcggatgataaaaaaacgtttaaatttgagagagaagatttaggtttacttgtagactttttggctgaactttttaaagaagaaggacataagttaataggaatacgaggtatgccacgtgtaggtaagacagaatcaatcgtggccggaagcgtatgtgcgcataaaagatggctgtttattagttctactttaattaagcagacagtaagaagttctttaatcaaaggtgaatatgattcaaatcatgtttatattattgatggtgcggtgacagctcgtgaatctaatcctaagcaccaagatttagttagagaagttatgacactcccttcgattaaagtagttgagcatccagatttatttgtagaagcgtgtaattatagtatggaagactttgactatatcattgaattaagagaaaatgagaatcaagaaatacattatgatgaaatgaaaaaacagacgattcaaagtaaaaataatttagatttcggtgatccatttggtggaggatttggtttctttgaatag

SEQ ID NO: 627 - DNA, 708 bp, Staphylococcus capitis
atgaaagcactcgtacttggtggttcaggtactataggtttagcgattgttaagcaactcttaaatgaagggtatcacgtaattgttcactatcactcttctaaattagaagccttgaaacaaaaatttaatcataaccaaaatgtagaattcatccaatgtgatctatctcaaaatctaaatttagaagattattttggacacattaatgatttggattgtcttatttatactagcggcactgcattatatggcatgttacaagatatgagcgatgatgatatcgataagagttacgctcttcacttaagacaatttatacgtttatccagattttttgtagatattttaagaagaagtgaaaacggccgaattgtagttatttcttctatttggggagaaacaggtgcaagcatggaaactatttactcagctatgaaaagtgctcaaataggtttcgttaaagcgcttagtcaagaacttgcgcttacgtcagtaaccgtaaatgctataactccaggatttgtttcaggtaatatgagcaaggtgtggtcagaagaggaaagagattcaatacttcaagaattacctcagaatagaatgattgaacctgaagaggtggcccatgtctgtgcgtatttgtgtcaccccatgtctagaagtattacaggtactgttcaaaaggtaaatggagcatggtatttataa

SEQ ID NO: 628 - DNA, 1287 bp, Staphylococcus capitis
atgaaggtacataattatgaattgatagatgagaaagtctacgaacatgaacttgataatgggcttaagctgtttataatacctaaaccaggattccaaaaaacatttgtgacttatacgacacaatttggttctttagataatcatttcaaacctattggaagccaacaatttgtaaaagtgccagatggtgtagcacattttttagaacataaactttttgaaaaagaagaagaagatttatttacagcttttgccgaggaaaatgctcaagctaacgcatttacaagttttgaccgtacaagttatttatttagtgctacaagcaatattgaaagtaatattaagcgtttattagatatggttgaaacgccttattttactgaggaaacggttaataaggaaaagggtatcattgctgaagaaattaaaatgtatcaagaacaacctggttacaaattaatgttcaatactttgagagcgatgtattcaaaccatcctattcgcgtcgatattgctggtagtgtggagagtatttacgatatcactaaggatgatttatacctttgttatgaaactttttatcatccatcaaatatggttttatttattgttggtgacgtaaaccctcaaaatatgattgatttagtagaacaacatgaggcaaagcgaaataagaccaaccaacctaagattgagcgtgcagaaattgatgaacccattgaagtgaatcaacacaacgttacagagcagatgaaattgcaatctccaaggctaatgttaggttttaaaaatcaaccacttaaagaaagctcggaaaaatatgtacaaagagatttagaaatgacatttttctatgagttgatttttggagaagaaacggatttttatcaaaacttattaaataaagatttaattgatgaaacttttggatatcaatttgtgcttgaacctagctatagcttttctattattaccagtgcaacacagcaaccggatgaattaaaagaattattacttaatgaattgaagaagtacagaggacaattagttgatcaagaagctttcgacttattaaaaaaacaatttatcggtgagtttatttcaagtttgaattcacctgagtatattgctaatcaatatgcgaaattatattttgaaggtgtaagtgtttttgacatgttagaaattgttgaaaatataacactcgaaagtgttaatgaaacatctgaactatttctaaattttgaacaacttgtcgatagtcgtttggagatgaaaccataa

SEQ ID NO: 629 - DNA, 1275 bp, Staphylococcus capitis
ttggaaaataatacattagacaactccaatatacatattaacgttttaccaactaaaaaatttaaaacaaccatggtgacctttaaatttatggcgccattagattataaaacaataacggcgcgttcaattttaagcaaagtcttagtacgtgctacacaacaatggcctaacgataaagcgttaaatagacatttatcatcattatatggtgcatatatcaatagttttgtatctaaatttaaggataaacatgtgattacaatttctttagaaattgctaatgagcgttatttaaaggactcaactccattatttgagaagggtcttaagacgcttaaagaacttatttggaatcctttaattattgacgaacagtttaatgagaactatgtagcacaggaaaaatctttgctcactaaaaagcttgaagcaatgattgataataaagctcaatattcatttttaaaattaatgaaccatatgtttgaaaatgaaccctataaatatttagctacaggtcaagtagaacaaatacctcatgttactgctaaaaacttgtatgatacatataaatcaatgttacataacgatgattgtgcaatttacgtagttggaaatgtagataaacaaaatgtgatagatacaatacaagaaaactttaatattaaaccattcaaatttgaaagtaataatcgacctgagcatatagatcaaaataaatcatctaaatttatcattgataatgatgaagtggaccaagctaaactcaatcttggttatcgtttcccaacttattttgggaaagagaactattatgcattcgtagttttaaacatgatgtttggtggcgacccttcttcagtgttattcaatgaagttcgagaaaagcaaagtttggcctattctatacattcacaaatcgatggaaagaatggatttttatttgttcttagtggagtttcggcttctaaatatgagattgccaaagatactattttagatgaatttgaaaaattaaagaatggtaattttgatgatgataaattagagttggcaaagaaaattattatctctcatagacatgaatctactgacagacctaaaagtattatcgaactattacataatcaggtgttattagacaaacctcaatctgaagaagaattcatcactgcaattaatgctgtcacaagagaagatgttataaaattagctaatgaagctatgctagatacaatctatgttttaacgaaaggaggtcaaagtgaataa

SEQ ID NO: 630 - DNA, 711 bp, Staphylococcus capitis
atgtcggaaatgaatgcgatttatagagttaaacaatacattttaaagttaataaaaaatggagaattagatagtaccggtaagctaccaagtaatttatctattgcacgtgcactcaacgtgaaaacggacgatgtttatgatggaattggtgaattaattaccgaacaaattgtaactgataattttgaagaggggactagtgttaaaaaacagcctcccttcttttatccattagataagttagtaagtattagtaatatgattgaagaagctgggtataaagcaggtatagaatatttaaattttgatgaacaaccagcaactattcttgatgctgaattattagaaataagtgataaagaacctgtgactatcattgaaagattaagaacggctgatcaaataccagtagtttactgtttagataaaatcgctaaacaaaatctaacttgtacagactatcaaaaaagtagtggctctatgttaagagctattaaagaatcaacaggacatgaggttaaacatgcagaaatggacttagaagcaattagttatgaacctcatatttcagaagtgttaaacgcttctccacatgaaggtttaatgctattaaaggtagttcattatgatgagcaagaccaacctattttatattcattaaactatattaaaagtagtttggttaaatttaaaataaataaaagctaa

SEQ ID NO: 631 - DNA, 2421 bp, Staphylococcus capitis
ttgccacaaacaaagaaaaaaacaacgaatagaaggaaaagtaatgctacgcgtaaaaatagtaaaagaaaaaaacaaaatgagagccctttacgctacatcattgctattgtcataatcattcttgtcgttttaggagcttttcaattaggcatagttggtcaaatgattgatagtttcttcaattatctattcggtatgagtagatttctgacttatattttagtgattctaggtacagtcttcattacatattctaaaaaaattcctaaaacgcgtcgaagtattggtgcgcttgttttgcaacttgctttgctatgtataacgcaactttattaccattttagtaaaggcgtgtcatctgaaagagagccagtattatcatatgtttataaatcatatgaacatacacactttcctaacttcggaggaggtttaataggtttttacttatttaaattattaatacctcttatatcaatagctggcgttataattattactgttctactaatagcttcaagtatcatacttttatcaaacttaagacatagagatgtaagtaaaagcctatttgaaagtatgaaatcatctagtaaaagtgcttcagaatcatttagagacaaaagagaaacgagtaaagctagaaaagaagagagggctcaattaaaagcagagagatctgaagagaaaaagagaaagaaagaacaagaaagattgcaacaagaaaatgtcaaagatgttagtgatcttcctgaagttccgcaaagtaatgacatacctatttacgggcacagtgaccaagaagataaaagcaatagtgcacctaagacacgtaaaaagcgtatttttgatcatgaggctaatagtagtgaaatcacttcaaactcacaagatattaaacagagtgacaacaaaggtaatgtttcaagttctaatgaagacaatgacaatgatagtagtaacgctgaaggatcaatctctgaagctggagaagtagcaaatgtggagtatgtggttccacctttatcattacttaatcaaccagctaaacaacagtctacttctaaagctgaagttcaaagaaaaggtcaggtcttagaatctacaatgaagaattttggtgtcaatgcgaaagtgacccaaattaaaattggtcctgcggtaactcaatatgaagttcagccagctcaaggtgttaaagtaagtaaaatcgttaacttacataatgacattgctttagcattagcagcgaaagatgttcgtatagaagctcctattcctggacgttcagcagtaggaatcgaagttcctaatgacaaaatttcattagtatcacttaaagaagttttagaagagaagtttccatctcaacataaattagaagttggtattggacgagatatatcaggagaacctgtatctatacaactcaatgaaatgcctcatttacttgtagcaggttctacaggcagtggtaaatcagtatgtatcaatggaataatcacaagcattttacttaatgctaagccgcatgaggtaaaacttatgttaattgatccgaaaatggtagaattaaacgtatataatggcatacctcatctacttatcccggtagtaactaatccacacaaggcatcgcaagcgcttgataaagtagttgcagaaatggaacgtcgttatgatttattccaacattcttcaacaagaaatatcgaaggatataatcagtatattcgtaaacaaaatgaagagttagaagagaaacaatcagaacttccttacattgtagttattgttgatgagttagcagatttaatgatggtcgcaggtaaagaagttgaaaatgcgattcaacgaattactcaaatggctagagctgcaggtattcatttaatagtagccactcaaagaccttctgtagacgtaatcactggtatcattaaaaataatattccttcacgtatagcttttgcagtaagttcacaaactgattctagaactattataggttcaggtggtgccgataagttattaggtaaaggcgatatgttatatattggtaatggtgaatcgactcaaacacgtatccaaggtgccttcttgagcgataaggaggttcaagatgtagtggactacgttgtagaacaacaaaaagcaaattatgtaaaagaaatggaacctgacgcaccagttgataaatcagagatgaaaagtgaagattccttatatgatgaagcctacttgtttgtaatagaacaacaaaaagcgagcacatctttattacaaagacaatttagaattggttataatcgtgcttcacgattaatggacgatttagaacgtaatcaagtcatcggtcctcaaaaaggaagtaaaccaagacaaattctagttgatttagataatgatgaggtgtaa

SEQ ID NO: 632 - DNA, 1674 bp, Staphylococcus capitis
ttgagtttaataaagaaaaaaaataaagatattcgcatcataccacttggtggtgtaggcgaaatcgctaaaaatatgtacatcgttgaagtagacgatgaaatgtttatgttagatgcgggattaatgttccctgaagatgaaatgttaggtgtggatatcgttattcctgacattcagtacgtaattgaaaacaaagataaattaaaaggtattttcctttcacatggtcatgagcacgcaattggtgcagttagctatattttagagcaaattgacgcgccagtttatggttctaaattaacgattgcacttattaaagaaaatatgaaggcccgtaatattaagaaaaaagtgcgctactatacagtatctcatgattcagtaatgaaatttaaaaatgtgaatgtgagcttctttaatactacacacagtattccagatagcttggggatttgcattcatacttcttatggttcaattgtatatacaggagaatttaaattcgaccaaagtttacatggtcaatatgcacctgatatgaagcgcatggctgaaattggtgatgaaggtgtatttgctttaattagtgattctacagaagcagaaaaacctggctataacactcctgaaaatgtcattgaacatcacatgtatgacgcattcactaaagttaaaggaagacttattgtttcttgctatgcatctaattttattcgcatacaacaagttctaaatatagctagtaaattgaatcgaaaagtatcattcttaggtcgctcactagaaagttcatttaatattgctcgtaagatgggatattttgatattccgaaggatttattaattcctatcaatgaagttgataattatcctaaaaatgaagttattattattgcaactgggatgcaaggcgaacctgtagatgctttaagccaaatggctcaaaagaaacataaaattatgaatattgaagaaggcgactcagtattcttagcaatcacggcttctgctaatatggaagtaatcatagctgatactttaaacgaacttgtacgtgcaggggcacacatcatccctaacaataaaaaaatccatgcttcaagtcatggttgtatggaagaattaaaaatgatgttaaatataatgaaacctgaatactttattccagtgcaaggtgaatttaaaatgcaaattgctcacgctaaattagcagcagaatcaggtgtagcacctgaaaagattttcttagttgaaaaaggtgatgtgatcaattacaacggtaaagatatggtactcaatgaaaaggtaaattcaggtaatgtacttatcgatggtattggtgtcggagacgtaggtaatattgtcttaagagaccgccatttattagctgaagatggaattttcattgctgttgtcacgctagatcctaagaatagacgtatcgctgcaggacctgaaattcaatcaagagggttcgtttatgttagagaaagtgaagaattattaaatgaagccgaagaaaaagtgcgtacaattgtagaagcaggtttacaagaaaaacgtatagaatggtctgaaattaagcaaaatatgcgagatcaaatcagcaaattattatttgaaagcacgaaacgtcgtccaatgattattccagtaatttctgagatttaa

SEQ ID NO: 633 - DNA, 2100 bp, Staphylococcus capitis
atgtctcaagagaagaaagttttcaaaactgaatgggctggacgctctttaacgattgagacagggcaattagctaaacaagctaatggtgctgtgttagtacgttatggagatacagttgtgttatcaactgctactgcttcaaaggaacctagagatggtgactttttcccattaacagtgaactatgaagaaaaaatgtatgcagcaggtaaaattcctggtggatttaaaaaaagagaaggacgaccaggtgatgaagcgacgctgacagctcgtttaatcgatagacctattcgtccccttttccctaaaggatacagacatgatgttcagattatgaatatcgtcttaagtgctgatccagattgttcacctgaaatggctgcaatgattggttcttcaatggctttaagcgtctcagatattcctttccaaggaccaatcgcaggcgtaaacgtaggttatgttgatggaaattatgttattaacccttcagttgatgaaaaggaagtttctagattagatttagaagtagctggtcataaagatgccgtaaatatggtagaagctggagctagcgaaattacagaaagtgaaatgcttgaggcaatcttctttggacatgaagaaatcaaacgtttagttgcattccaacaagaaatcatcgatcatattcaacctgagaaacaagaatttattccagttgaacgtgatgaagcactcgttgaaaaagtaaaagctttaactgaagaaaaaggattaaaagaaacagttttaacttttgataaacaacagcgtgatgaaaatctagatgcgctaaaagaagaagtagttgcacattttattgttgaagaagatcctgaaaacgaagcgcttattaatgaagtgtacgcaattttaaacgatttagtgaaagaagaagttagacgtttaattgcagatgaaaaaattcgtccagatggtcgaaaagttgatgaaatacgaccacttgattcagaagttggcttgcttccaagagctcatggttctggattattcacacgtggtcaaacacaagcgttatcagtgttaacgttaggtgctttaggtgattatcaacttattgatggtttagggccagaagtagaaaaacgctttatgcatcactataatttccctaacttctcagtaggtgagacaggacctgttcgtgcaccaggacgtcgtgaaattggtcatggtgctctaggtgaaagagctttacgttatattattcctgacacagctgatttcccttacacaattcgtatagtaagtgaagtattagaatcaaatggttcttcttcacaagcatcaatctgtggatcaacattagctttaatggatgccggcgtacctattaaagctcctgtagcgggtattgcaatgggtcttgtgactcgtgatgatagctatactattttaactgatattcaaggtatggaagacgcacttggtgatatggacttcaaagtggctggtactaaagaaggtattactgctattcaaatggatattaagatagatggattaacacgtgaagttatcgaagaagcacttgaacaagcacgtcaaggtcgattagcaattatggatcatatgctacaaacaattgatcatcctcgaaaagaactaagtgcttatgcaccgaaagttgttactatgcatattaatcctgataaaatcagagatgttataggacctggtggtaaaaaaattaacgaaattattgatgaaacaggtgtcaaattagatatcgaacaagacggtacaatctttataggtgctgtagatcaagctatgattgatcgtgcgaaagaaattattgaggatattacacgtgaagctgaagtaggtcaagtttataatgctaaagttaaacgtattgagaaatatggtgctttcgtcgaattattcccaggaaaggacgcattacttcacatttcacaaatatctaaagaacgaatcaataaagttgaagatgtattaaacattggcgattcaattgaagttaaaattacagaaattgataaacaaggtcgtgtcaatgcatctcataaagctttattagatgattag

SEQ ID NO: 634 - DNA, 270 bp, Staphylococcus capitis
atggcaatttcacaagaacgtaaagatgaattaattaaacaataccgtgtacacgaaactgatactggttctccagaggttcaaatcgctgttttaactgcagaaatcgctgcattaaacgagcatttacgtgaacacaaaaaagaccaccattcacgtcgtggattattaaaaatggtaggtcgtcgtagacacttattaaactacttacgtagtaaagatattcaacgttaccgtgaattaattaaatcattaggtatccgtcgttaa

SEQ ID NO: 635 - DNA, 972 bp, Staphylococcus capitis
atgaaagtgatagaagttacccatcccattcaaaaagatcaattaataaatgaaaatgttgcgatggcgtttggtttctttgatggcatgcatagaggtcatgacaaggtgtttcaagctttgaatcaaaaagcggaagaaaataatctaaagaaagctgtaatgacatttgacccgcatccatctgtggttttgaatcccgaacgtaaacgtacgacttatttaacaccactttcagataaactagaaatgattgaacatcatgacgtagattactgcatagttattaatttttcttctcgtttcgctagcgtcacttctgaagaatttattcaagaatatgtaattaataataatgtaaaagaagtgattgctggatttgattttacttttgggaaattcggaaaaggaaacatgactgttttacaagaatctaatgattttaaaactacaatcgtaggtaaacaagaattggattctgaaaagatttcaacaaccgctataagagaagcattaactgaaggcaatttaagaaaagcaaacgaagaacttggttatctttatagaattaaaggaacagttgttcaaggagagaaacgaggcagaactataggcttcccaacggcaaacgttcaaccaagcgacgattatgtgttaccaaaaaaaggtgtatatgctgttagtatggaaattggtccagaaagtaaaatatatagaggcgtggccaatgtaggagttaaaccaactttccatgatccagctaaagctgaagtggttatagaagtaaatatttttgattttgatgaaaatatttatggcgaacgagttactgtgtattggcactatttcttgagaccggaagttaaattttcaggtatagatccattagttgaacaaatgaatgaagataaagaccaagcaaaatatttattatctgttgatttcggtgatgatgtatcgtataatatttaa

SEQ ID NO: 636 - DNA, 918 bp, Staphylococcus capitis
atgtataacggtatattacccgtattcaaagaaagaggtttgacgagccatgatgtcgtttttaaacttagaaaaatattaaaaatgaagaagatcggacacacaggtacgttggaccctgaagtagatggggttcttccgatatgccttggtaatgctactagagtgagcgattacgtgatggaaatgggaaaaacatataaagctgaagttactctaggagtaagcacaacaactgaagatcaaactggggatacattagaggttaaaggaattgataaagacgatgttacagaacgggatattgatcaaacgcttgagaaatttttaggcgttatcgaacaaattccaccaatgtattcatcagttaaagttaaaggaaaaaaactttatgagtatgcccgtaataatgaagaagtcgaaagacctgtaagacatgttcttatcaaaaatatttatagaacttcaaatttaacttttcaaaataaccaatgtcattttgaaattgaagtgagttgcggtaaaggcacatacatcagaactttagctactgatattggtaagaaattaggttatccagcgcatatgtcacgtttgacaagagtttcctcaggtggttttcaaatcgacaaaagttttaaattaaaacaaattaaggacatgcatgagcatgattcattacaagataagctatttcctatagaatatggcttaaaaggattgcaagagattgaaataaatgatgaagcatttaagaaaagaattttaaatggacaaaaatttaatgttaaggacttagatcaagaaatagagtcacagtttgtttttattgatcaaatgtcaaaaaaagcattagccatttatatggtacatcctgagaagataaatgaaattaaaccgaaaaaagtatttaactaa

SEQ ID NO: 637 - DNA, 351 bp, Staphylococcus capitis
atgagtaatatgagagctgaacgtgttggagaacaaatgaaacaagaaatcatggatatcgttaataataaagtaaaagatccaagagtaggattcctaactattactgacgttgaactaactaatgacttatctcacgccaaagtttatctcacagtattaggtagtaaaaaagaggtcgacaacacatttaaagcacttgaaaaagctaaaggtttcattaaatctgagctaggttcaagaatgcgtttaagaattattcctgacttaacatttgaatatgatgaatcaatagaatacggaaataaaattgaacgcatgattcaagatttacacaaagaagataaataa

SEQ ID NO: 638 - DNA, 2166 bp, Staphylococcus capitis
atgagtaaaaaaagaatttacgaatatgcaaaagaattaaatctaaagagtaaagagattatagatgagttaaaaagtatgaacgttgaagtgtcgaaccatatgcaagctttagaagacgaccaaattaaagctttagataaaaagttcaaaaaagaacaaaacacagacgacaaacaaaatactcaaaataatcaccaaaaatctaataataaacaaaatcaaaataataaaggcaatcaatcgaataaagataaacaaaataacaaaggtaatcatcaaaaaaacaataaccaacaaaagaatcaaaacaaaaagaatggtcagaacaataaaggcaagcaacaaaataaaaataataaaaacaacaaaaataataaacagcaaaatcaagctgcagaacctaaagaaatgccttcaaaaattacttatcaagaaggaattactgttggtgaattagctgaaaaacttaatgttgaatcttcaggtatcatcaaaaaattattcttattaggaattatggctaacattaaccaattattagatgaagaaacattagaattaattgcagatgattatggtgtggaaattgaacaagaagtagttattgatgaagaagatttatctatttatttcgacgatgaaactgaagatcctgatgcgatcgaaagaccagctgttgttacaattatgggacacgttgaccatggtaagacaacattattagactctattcgtcatactaaagtcactgaaggagaagctggaggtataactcaacatattggtgcttaccaaattgaaaataatggaaagaaaattactttcttagatactcctggacacgcagcatttacaactatgcgtgcgcgtggtgctcaagtaacagatattacaattcttgtagtagctgctgacgatggcgttatgccacaaacaattgaagcaatcaaccacgcaaaagaagcagatgtccctacaattgtggcagttaacaaaattgataaaccaactgcaaatcctgaccgtgtaatgcaagaattaacggaatatggtttaatcccagaagattggggcggtgacacaatctttgtaccactttctgctttaagtggtgatggtatcgaggatttactagaaatgattggacttgttgcagaagttcaagaacttaaagctaatcctgacaaacgtgcagtaggtacagttattgaagctgaacttgataaatcacgtggaccagctgcttccttattagtacaaaacggtacattaaacgttggtgattcaattgtagtaggtaatacgtatggtcgtatccgagcaatggttaatgacttaggtaaacgtattaaatcagcaggcccttcaacacccgtagaaatcactggtatcaatgatgtaccacttgctggagatcgatttgtagtatttagtgatgagaaacaagcacgtcgtataggtgaagcgcgtcatgaagcaagcgtgattcaacaacgtcaagaaagtaaaaatgtttcattagataacttatttgaacaaatgaaacaaggtgaaatgaaagatttaaatgtaattattaaaggtgacgttcaaggttcagtagaagcattagctgcttcattaatgaaaattgatgtagaaggcgtaaatgtacgtattatccacactgcagtaggtgcagttaatgaatcagacgtaacattagccaatgcttctaatggtatcatcattggctttaacgtacgaccagatgctggcgcaaaacgtgctgctgaagctgaaaatgttgatatgagattacaccgcgttatctataacgtaattgaagaaattgaatctgctatgaaaggtttactggaccctgaatatgaagaacaagtgatcggtcaagctgaagttcgtcaaacattcaaggtgtctaaagttggtacaattgctggtagttacgtgactgaaggtaaaatcacacgtaatgcgggtgtacgagtaattagagacggtattgtattattcgaaggtgaattagatacattaaaacgtttcaaagatgatgctaaagaagtagctcaaggttatgagtgtggtattactattgaaaaatataatgacctaaaagaaggcgacattatcgaagcgtttgaaatggttgaaattcaacgataa

SEQ ID NO: 639 - DNA, 318 bp, Staphylococcus capitis
atgattaaagatcaaatatttaatttcctgggcttagcaatgagagcaggaaaagttaaaagtggagaatctgttattttaaacgacattaaaaccaataagattaaactcgtaatcgtagcaaccgacgcgtctgacaatactttgaaagttatgaaagataagtgcaatagcaaccaagttccattaaggaattttggaacgagggctgaattagggggagcacttggtaaaggcgagagagttaatattggtgtaacagataatggttttgctaaaaagttattatcaatgatagatgaatatcgtaaggagtga

SEQ ID NO: 640 - DNA, 285 bp, Staphylococcus capitis
atgaaaaagaaaaaaattccaatgcgaaaatgtattatatctaatgaaatgcatccaaagaaagatatgattcgagtagtcatcaataaagaaggcgaaatctttgcagatgcgactggtaagaaacaaggtcgtggagcatatgtttctaaagatgtttctctagttgaaaaggctcaacaaaaagagttacttgaaaagtactttaacgcctctaaagaaacactagagccggtatataaagaaattattcgtttaatttatagagaagagattcctaaatga

SEQ ID NO: 641 - DNA, 1224 bp, Staphylococcus capitis
gtgtcaagtaatgaattattattagctactgaatatttagaaaaggaaaagaaaattcctagagaagtacttatcgatgctattgaagctgcgctaatcactgcatataagaaaaattatgacagtgcaagaaatgtaagagtagaattaaacatggacgaaggttcgtttagagtaattgctcgaaaagaagtcgtagaggaagtcttcgatgatagagatgaagtagatctaagcactgcattggtaaaaaatccagcttatgaaattggtgatatctatgaagaagatgttactcctaaagactttggacgagtaggcgcacaagcagctaaacaagcagttatgcaacgtttaagagacgctgaaagagaaatcctatatgatgaatttattgataaagaagaagatattttaacaggtgtgattgaccgtgtcgatcatcgctatgtttacgtaaatttaggtagaattgaagctgttttatctgaagctgaaagaagccctaacgaaagttacatccctaatgaacgtattaaagtttatgtaaacaaagttgaacaaacaacaaaaggacctcagatttatgtttcaagaagtcatccaggtttattaaaacgtttatttgaacaagaagttccagaaatttatgatggaactgtcattgttaaatctgtagcacgtgaagcaggagaccgttctaaaatcagtgtttactctgataatgcagatatcgacgcagtaggtgcatgtgtaggttctaaaggtgcacgtgttgaagctgttgttgaagaacttggtggagagaaaatagacatcgttcaatggaatgaggatccgaaagtattcgttagaaatgctttaagcccatcacaagttctagaagttattgttgacgaagaaaatcaatcaacaatagtggttgtacctgattaccaactttctctagcaataggtaaacgtggtcaaaatgcgcgtatagcagctaaattaactggttggaagattgatattaaatctgaatctgatgcacgtgaagcaggcgtttaccctgtaattgaatctgaagaagttgcagatgaaatcgtaaacactggtgatgaagatgttgaatttgatgacgttaatttagaagaatctaatttaacaacagcagaattagctgcagagactgatgaagaaaaagactctgatgctgaagaagataaaaatacagaagaatag

SEQ ID NO: 642 - DNA, 468 bp, Staphylococcus capitis
atgagtaaaattactgaacaagtagaaactataattcagcctatattagatgatttaaaatttgaacttgttgaaattgaatatgttaaagaaggtaaagatcgctttcttagagtgtccatcgataaagaaggtggcgtagatcttaatgattgtactttagcttcagaaaaaattagtgaagcaatggatgaaaatgaccctatcccggaaatgtattaccttgatgtagcatctccaggggcagaacgacctattaaaaaagataaagattttcaaaatgctgtaagtcaacctatatttgtttcactttatgcaccaatcgaaggtgataaagagtggttgggaatattaaaatctgtagatgaagacaatatagttatggaagtaaaagaaaaatcaaaaaccaaagaaattgaaataccaagaaataaaatcgctaaagcacgtcacgctgttatgatttaa

SEQ ID NO: 643 - DNA, 4317 bp, Staphylococcus capitis
ttggcaatgacaaatcaagaaaaattcaaagtacttgccgatcaaattaaaatatcaaatcaattagagactgatattctaaatgagggtgaactgactcgaattgatgtttctaataagaatagaacatgggaatttcaaatctcattaccacgttttctttcacatgaagattacctattatttactcatgcaattgaagaagagtttaaagaaatagccacagttacaatccatttttcaattaaagatacaactcaccaagacgaacatgcattaaaatactttgcccattgtattgatcaaacgagattatcacctaaagttaaaggtcaattaaaacaaaagaaattgattatgtctggtaatgtaatcaaagttttagtatccaatgatattgaacgtaaccattttgacaaagcatgtaatggaagtttagttaaagcttttcaaaaatgtggttttaatatagacaagattatctttgaaacagatactacgaatcatgatgatgatttagcctcattagaagctcatattcaacaagaagatgaacaaagtgctagagaagctactgaaaaattagaaaaaatgaaggctgaaaaggctaaacaacaagataacaatgaaagttctgttgataagtgtcaaattgggaaaacaattcaagttgaaaacattcgctctattgattcaattatcgaagaagaattcaaagtagcaattgaaggtgttattttcgatatcaatttaaaagaacttaaaagtgggcgtcatatcgtagagcttaaagttacagactacacagattctttagttttaaaaatgttcacccgtaaaaataaagatgacctagaccattttaaggctttaagtgtaggaaaatgggtgagagcacaaggtcgtattgaagaagatacatttgtgcgtgatttagttatgatgatgtcagatattgaagaaattaaaaaagcaccaaaaaaagataaagctgacgaaaaacgtgtagagtttcatttgcatacagctatgagccaaatggatggtataccgaatatcggttcttatgttgaacaagccgctgaatggggacactctgctattgcagttactgaccataatgtcgttcaagcatttccagatgcacataatgcaacagagaaacatggaattaaaatgatttacggtatggagggcatgcttgttgatgacggagtgcctatcgcttacaaacctactgaccgcgttttaaaagatgctacttatgtggtatttgacgttgaaacaacaggtttatctaatcaatacgataaaattattgagttagcagctgtaaaagttcataatggtgaaattattgataaattcgaacgctttagtaatcctcatgaacgtttatctgaaacaatcattaatttaactcatatcacagacgacatgctaacggatgctcctgaaattgaagaagtattaactgaatttaaagaatgggttggggacgcgatatttgtagctcacaatgcttcatttgatatgggatttattgatactggttatgagcgcttaggctttgggccgtctactaacggtgtcatcgatacattagaactttcacgtacgattaacactgaatacggtaaacacggtttaaacttccttgctaaaaagtatggcgtcgaactcacacaacaccatagagcgatttatgatactgaagcaaccgcatatattttcatcaaaatgattcaacaaatgaaagaactcggcgttctaaatcacttggaaataaataaaaagctaactaatgaagatgcttataaaagagcacgcccatctcacgtaacacttatagttcaaaaccaagaaggacttaaaaatctatttaaaatcgtaagtgcgtctttagtaaaatactattatcgtacacctagaattccacgctctcttttaaatgaatatagagaggggatattggttggtactgcatgtgatgaaggggaattatttactgctgtaatgcaaaaagaccaatcagaagttgaaaaaattgcaaagtattatgatttcatagaagttcaaccacctgcattgtaccaagatttgatggacagagaattaattcgtgatcatgaaactttaacagaaatttatcaacggttaattgaagcgggagaaagtgcaaatattccagttattgcgacgggtaatgtgcattatttatatgaacacgatgcaattgcacgaaaaattttaattgcgtcacaaccaggtaatccattaaatcgttcaacgttacctgaagcacattttagaactacagatgaaatgctagacgaatttcattttcttggagaagagaaagcgcatgaaatcgtagtcaaaaatacaaacgaattagccgaacgtattgagagagttgttccgattaaagataaattatttacaccaagaatggaaggtgcaaatgatgagattcgtgaattaagttattctaatgctaaaaagttatatggtgaagatttaccgcaaatcgttatagatcgattagagaaggaattagctagtattatcggtaatggtttctcagtaatttatttgatttcacaaagattagttaaaaaatcacttgatgatggttatttagtaggatctcgtggttcggtcggttctagtttcgtggctacgatgactgagattaccgaagttaatcctttacctccacattatatatgttcacattgtaaaacgagcgagttctttgatgatgggtcagtaggttcaggtttcgaccttccagataaaaagtgtcctatttgtggtaatgaccttattaaagaaggacaagatattccattcgaaacgtttttaggtttcaaaggagataaagttcccgatattgatttaaactttagtggggagtaccaaccaaacgcgcataactatactaaagtgctatttggtgaagataaagttttccgtgcaggtacgattggtacagttgctgagaaaactgctttcgggtttgtaaaaggatatctcaatgatcaaggtatccataaacgtggagctgaaattgacagattggttaaaggttgcactggtgttaaacgtacgactggacaacatccaggtggtattatagtagttccagactatatggatatttacgattttacgcctattcaattccctgcagatgatcaaagtgcagcttggatgacaacacactttgacttccactccatacatgataacgttttaaaactcgatatacttgggcacgatgacccaactatgatacgtatgcttcaagacttatcaggtattgatcctaagactattccagttgatgataaagatacgatgcaaattttcagtggtcctgagagtttaggtgttactgaagatgaaatattatgtaaaactggtacatttggcgtccctgaattcggtactggattcgttagacaaatgttagaagatacgaaaccaacaactttctcagagcttgtacaaatttctggcttatcacacggtactgatgtgtggcttggtaatgctcaggaattaatacgacaaggtatttgtgatttatcaagcgtaataggttgtcgtgatgatattatggtttatcttatgtacgcaggattagaaccatctatggccttcaaaacaatggaattcgtgcgtaaaggtcgtggattaaccgatgaaatggtcgaagctatgaaagaaaatgatgtacctgactggtatttagattcatgccgaaaaattaaatacatgttccctaaagcccatgctgcagcatatgttctgatggcagtaagaattgcttattttaaagtacaccatccgctatattattatgcagcgtactttactattagagcttctgactttgatctcattacaatgattaaagataaaacaagtattcgcaacactgttaaagacatgtactctcgttatatggacttaggaaaaaaagaaaaagatgttttaactgttttagaaatcatgaacgaaatggcacatcgaggattccgcatgcagccaattagtcttgaaaaaagtcaggctttcgactttattattgaagaagacacgcttattcctccgtttgttgcagtacctggtttaggtgagaacgttgccaaacggattgttgaagcacgtgaggaaggtcctttcttatccaaagaagatttaaataagaaagcgggactttcacaaaaagttattgattacttagatgagatgggatccttaccaggtttaccagataaagcacaattatctatttttgatatgtag

SEQ ID NO: 644 - DNA, 1704 bp, Staphylococcus capitis
atgaaacaatctaaagtatttataccaacgatgagagaagttcctgcagaagctgaagcactaagtcatcgtttattacttaaagcaggtttaatcaaacaaagtactagtggaatctatagttatttaccacttgcaacaagagttttaaataacatttctaacatcgtacgagaagaaatggaaagtattgatgccgttgaaattttaatgcccgctttacaacaagctgaattatgggaagaatctggacgttggggagcttatggtccagagttaatgcgactcaaagatagaaatggaagagaattcgcattggggcctacgcatgaagaggttgtaacttctctagttagagacgaactaaaatcatacaaacgtctacctcttaccttattccaaattcaatcaaaataccgtgatgaaaagagaccccgctttggattattacgcggcagagaatttattatgaaagatgcatattctttccacgctgacgaagaatctttagatgcaacatatcaagatatgtacaatgcatatagtaaaatcttcaagcgtgtagggattaacgcacgccctgtagtcgctgattcaggcgcgattggtggtaatcacactcatgaatttatggcactaagtgaaattggcgaagatacaattgtttatagtaacgaaagtgactatgctgctaatattgaaaaagcagaagttatttatcatccttcagaaaaacatactgaaacagctgaactatcaaaaattgaaacaccaaatgtcaaaacagcacaagaactcgcagatttcttaaatcgtccactagatgaaattgttaaaacaatgattttcaaagtagatggcgaatttattatgattctaataagagggcaccatgaatttaacgatgttaaattaaaagcatatttcggtactgaaaatgttgaaatggcatcacaagatgaaattgtcaatttagttggtgcaaatcctggttctttaggcccaattcataataaagaaattaagatatacgcagataactatgtaaaagatttaaataatcttgttataggtgctaatgaagatggctatcattatgttaatgctaatgtagaaagagattttaacattgatgaatatggtgattttagatttattttagaaggcgaaatgttaagtgatggttctggtaaagctcaatttgcagaaggtattgaagttggtcaagtcttcaagttgggtacaaaatactctgaagcaatgaacgctactttccttgataatcaaggtaaagcgcaaccattaattatgggatgctacggtattggtatttcgagaactcttagcgctattgttgaacaaaataatgatgacaatggtattatttggccaaaatcagtcacaccatttgatttacacttaataacaattaaccctaaaaaagatgatcaacgtgaattaggagatcaattatatgatcaattaaatggtcaattcgatattctttatgatgatagaaaagaacgcgcaggtgttaaatttaacgatgctgacttaattggattaccaatgcgagttgtagtcggtaaaagagctgaagagggtattgttgaggtcaaacaacgcttgaatggtgaaagtgaagagattcacgtcaatgatttagaaaattatttaaaagatttatatgacaatttaaaatag

SEQ ID NO: 645 - DNA, 1287 bp, Staphylococcus capitis
atgagctatttaataacaatagtttcatttatcatcgtatttggtgtactagttactgtacatgaatacggtcatatgttctttgctaaaagagcaggtatcatttgtcctgaattcgcgattggcatggggcctaaaatttttagttttagaaaagatgaaacattatacacaatacgtttattacctgtaggcggttatgtaagaatggctggagatggacttgaagagccaccagttcaaccaggtatgaacgtaaaaattaaattaaatgaaaaagatgaaattacgcatattattttagatgatcaacataaattccaacaaattgaagctatagaagttaaaaaatgtgactttaaagatgatttatatatagaaggtataacatcttatgatgaagaaagacatcattactcaatcgctaagaaggcatattttgttgaaaatggaagtcttatacaaatcgcccctagagatagacagtttgcacataagaaaccattacccaaatttttaacactttttgccggcccgctcttcaattttattctagcattagtgttatttataggtttagcttattaccaaggtacgcctacaaatacaattggagaagtagtaaagcattcacctgcagatcaagctgggttacataaaggtgataaaattgttgaaatcggtgatcataaaattaaagactttagtgaaataagaaaagtattagatgataataaaacttctaaaacaacaattaaagtacaaagagatcaccattcaaaaacaatgcaacttgaacccaaaaaggtagaaaacaaaattagcaaaaacaaaaagcaaacaagttaccaaatcggatttgcacctaagttggagcacagtatttttaaaccaatcagttatggaatttataatttctttgataaaggtaaattaatcttctcagcggttgttggtatgattgctagcatctttactggtggtttttcattcgacatgcttaatggtccagtaggtatttaccataatgtggactcagttgtaaagtctggtattatcaacctaataggctatacagcattattaagtgtaaacttaggtatcatgaacttattacctattccagcgttagatggtggtcgaattttatttgtattatatgaggctattttcagaaagccagtgaataaaaaggctgaaacagctattattgcaacaggtgcattatttgttgttattattatgattatcgtaacttggaacgatatacaacggtatttcttataa

SEQ ID NO: 646 - DNA, 783 bp, Staphylococcus capitis
atgaaagtaagaacattaactgcaattattgccttattaatattcttgccattcttactaaaaggtggcatgattttaatgcttttcgcttacttattagctttaattgcattaaaagaactattaaacatgaacatgattaagttcttatctataccaggatttattagtgcattagccttaattattattatgttgcctcaagatgctggggaatgggtacaaactatacaacttaaaagcttaatagctatgagttttattgtcctaagttatacagtgctatctaagaacagatttagttttatggatgcagctttctgtcttatgtcggtagcatatgtaggtattggatttatgtatttctatgaaacacgttcagagggattacattacatattatttgcctttctaatagtttggttaacagatactggagcatatattttcggtcgattgatgggtaaacataaattatggcctgtgattagccctaataaaacgattgaaggttttattgggggaatcatttgtagtttactcgtacctttaattatgcaatttttcgtgaatttccatctaaacatatggctgttattaatagttacagtgattttaagtatgtttggtcaattaggagatttagttgaatctggatttaagcgacactttggtgtcaaagattcaggccgtattttaccaggtcacggtggtattttagatagatttgatagttttatgtttgttttaccactattaaatattttattaatccaaatttaa

SEQ ID NO: 647 - DNA, 771 bp, Staphylococcus capitis
atgtttaaaaagctaaaaaataaaaataagactgaaaataatctaaataatgatttagatttacataatattcctgaacatgttgccatcattatggatggaaatggtcgatgggctaaaaaacgtaaaatgccaagaataaaaggacattatgaaggcatgcaaacaatcaaaaaaattactcgagaagcgagtaatattggtattaaatatttaacactttatgctttctccacagagaattggtctagacctgaaagcgaagttaattatattatgaatctgcctgttaattttcttaaaacatttttaccagagttaattgaaaaaaatgttaaagttgaaacaattggattcggtgaaggcttaccccaatcaactattgaagctattaatcaagcgaaagaaaagacgaagaataatacaggattagcattaattttcgctattaattatggtggacgtgctgaaattattcaaagtatgaaagaaatatttgaagagttacaatctgcgcatcaaagttctgaagctattgatgaaaatctattaaacaaacatttaatgactcgcgattaccctgatccggaattactaattcgtacttctggagaacaaagaattagtaactttttaatttggcaagcttcatacagtgaatttatttttaatgagaagttatggccagatttcgatgaaaatgaattaaaagaatgtttaaaaatttatcaatcgcgccaaagacgctttgggggattaagtgaggagtaa

SEQ ID NO: 648 - DNA, 555 bp, Staphylococcus capitis
atgagtgacattattaaagatactaaagctagaatgcaaaaatctatcgacaacttatcacgtgaattagctaacatcagtgctggtcgagctaattcaaatttactaaatggtgtaacagttgattactatggtgcaccaacaccagtacaacaattagcaagtatcaatgttcctgaagcacgtttattagtaatttcaccatatgataaaacttcagtagatgatattgagaaagcaatcatcgcagcaaacttgggcgttaacccaacaagtgacggtgaggtcatccgaatttctgttcctgcattaacagaagaaagacgtaaagaactagtgaaaaacgttaaaaaaattggtgaagatgcaaaagtttcaattagaaatattcgccgtgacatcaatgatcatcttaaaaaagaagagaaaaatggtgacattactgaggatgacttaagaagtcaaactgatgacgttcaaaaagcaactgataactctattaaagaaatagatcagttagttgacgataaagaacaagatatcatgtctgtttaa

SEQ ID NO: 649 - DNA, 723 bp, Staphylococcus capitis
atggctcaaacttctaaatataaacgtgtagtcttgaaattgagtggagaagctttagctggagataagggattcggtatcaatccaattatcatcaaaagtgtagcgaaacaagttgctgaagttgctaaaatggactgtgaaattgcagttattgttggtggcggaaacatttggagaggtaaaacaggcagcgatttaggaatggatcgaggcactgctgactatatgggcatgttagcaactgtaatgaatgctttagcgttacaagatagtttagaacaattagattgtgatacacgtgttttaacttcaattgaaatgaaacaagttgctgaaccatatattcgtcgacgtgcaatcagacatctagagaagaagcgcgtagttatctttgcagctggtataggtaacccttacttctcaactgatactacagcagctttacgagcagctgaagttgaagcagatgtaatcttaatgggtaaaaataatgtagatggtgtttattcagctgaccctaaagttgatgaaaatgccgttaaatatgaacacttaactcatattcaaatgttacaagaaggtttacaagtaatggattctactgcttcatcattctgcatggacaataatattccattaaatgtattctcaattatggaagaaggaaatattaagcgcgccgttatgggagaaaaaatcggtacgctgattacaaaataa

SEQ ID NO: 650 - DNA, 879 bp, Staphylococcus capitis
atggcaatttcagcaaaacttgttaaagaattacgtgaaaaaacaggcgcaggtatgatggattgtaaaaaagcgctaactgaaactgatggtgacatcgataaagcaatcgactacttacgtgaaaaaggtatcgcgaaagcagctaaaaaggctgaccgtatcgctgctgaaggtcttgtacacgtagaagttaaaggaaatgaagcagctatcgttgaaatcaactcagaaactgacttcgttgctcgtaacgaaggattccaagaattagttaaagaaattgctaaccaaattcttgatagtaaagctgaaacagttgacgctttattagaaactaaattatcaagtggcaaaactgttgatgaaagaatgaaagaagctatctctacaattggtgaaaaattaagtatccgtcgttttgctattagaactaaatctgataatgacgctttcggttcttacctacacatgggcggacgcattggtgtgttaactgttgttgaaggtacaactgatgaatcagctgcaaaagatgtagctatgcacatcgctgcaatcaaccctaaatatgtttcttctgatcaagtaagcgaagaagaaatcaaccacgaaaaagaagtattaaaacaacaagcattaaacgaaggtaaaccagaaaacatcgtagaaaaaatggttgaaggtcgtttacgtaaatatttacaagaaatttgtgctgtagatcaaaacttcgttaaaaatccagatgaaacagttgaagcattcttaaaatcaaaaggtggtcaacttactgacttcgttcgttacgaagtaggcgaaggtatggaaaaacgcgaagaaaacttcgctgatgaagttaaaggacaaatgaaataa

SEQ ID NO: 651 - DNA, 789 bp, Staphylococcus capitis
atggcagtaatttcaatgaaacaattacttgaagccggtgttcacttcggtcaccaaacacgccgttggaacccaaaaatgaaaaaatatatcttcactgaaagaaatggtatctatatcattgacttacaaaagacagtgaaaaaagttgaagaagcatacaacttccttaaacaagtatcagaagatggcggtaaagtcttattcgtaggtacaaaaaaacaagcacaagaatcagttaaagctgaagcagaacgtgctggtcaattctacgttaaccaaagatggttaggtggaatcttaactaactacaaaacaatctctaaacgaatcaaacgtatttctgaaattgaaaaaatggaagaagatggattgtttgaagtattacctaaaaaagaagttgttgaacttaaaaaagaatacgaccgtttaattaaattcttaggcggtattcgtgatatgaaatctatgcctcaagcattattcgttgttgaccctcgtaaagagcgcaacgctattgctgaagcacgtaaattaaatattcctatcgtaggtattgttgacactaactgtgatccagacgaaatcgattacgttatcccagcaaacgatgatgctatccgtgccgttaaattattaacaggcaaaatggcagatgctatcttagaaggtcaacaaggtgtatctaatgaagaagtagctgcagaacaaaacatcaatttagatgaaaaagaagaatctgaacaagcagaaacaactgaagaaaacacttctgttgaatcaaactaa

SEQ ID NO: 652 - DNA, 774 bp, Staphylococcus capitis
atgagcttattatctaaaactagagaattaaacacgttattacaaaaacataaaggcattgcagtagactttaaagatgttgcacaaacgatcagtagcgttacagtcacaaacgtatttatcgtatcaagaagaggtaaaattttagggtcgagtcttaacgagttattgaagagtgagcgaattatcaatatgttagaggaaagacatattcctagtgagtatactgaaaaacttatggatgttaaacaaacacaatctaacattgacattgataatgttttaacagtgttccctcctgaaaacaaagacgtttttgtaaacagtagaacaactattttccctatattaggtggaggagaacgacttggtacactcgttttaggtcgagttcaagatgactttaatgagaacgacctagttttaggtgaatacgctgcaactgtaattggtatggaaatcttacgtgagaaacataacgaagttgaaaaagaggctcgtgataaagctgcaatcacaatggctatcaattcactatcttattctgaaaaagaagcgattgaacatatctttgaagagttaggtggaaatgaaggtttacttatcgcttctaaagtggctgaccgtgttggtattactagatctgttattgtaaatgcattacgtaaattagaaagtgctggtgtcattgaatcacgttcactaggtatgaaaggtactttcatcaaagttaaaaaagaaaaattcttagatgaattagaaagaacaaaataa

SEQ ID NO: 653 - DNA, 1404 bp, Staphylococcus capitis
atggatacaaatggaattaaattgactccaaaagatatcgtatctaaattaaatgaatacattgttggacaagatgacgcaaaacgtaaagtagcgattgcattaagaaatcgctatagaagaagtttattagatgaagaagctaaacaagaaatcgcacctaaaaatattttaatgattggaccaactggggtaggtaaaactgaaatagctagaagaatggctaaaatagttggtgcacctttcattaaagttgaggctactaaatttactgaagtaggttatgtaggtcgagacgttgaaagtatggtaagagacttagttgatgtagctgttcgtttagtgaaagaagagaagaaagcactcgtcaaagatgaagcgattgctaaagcgaatgataagcttgttaaattgttagttccaagtatgaagaagaaggcttctcaaggaaataatcctcttgaaaatcttttcggaggtgcaattcctaactttggtcaaaataatgaagaagaggaagagccacctactgaagaaataaaaactaagcgttcagaaattaagaagcaattagaagaaggtaaacttgaacaagaaaaagtaagaataaaagtagaacaagatccagcagctatgggcatgctaggaacgaatcaaaatcaacaaatgcaagacatgatgaaccaattgatgcctaaaaagaaagttgaacgagaggtatctgttgaaacagcaagaaaaatacttgctgatgattatgctgatgaacttatagatcaagaaacagcaaaccaagaggctctagagcttgcagaacaaatgggtattatctttatagatgaaattgataaagtagcaacaaataatcaaaatagtggtcaagatgtttcacgccaaggtgttcaaagagatattttaccaatccttgaaggtagcatgattcaaaccaagtatggtactgtaaatactgaacacatgctatttattggtgctggtgcgtttcacgtttcaaaacctagtgatttgattccagaattacaaggtcgtttcccaatcagagtagaacttgaaagtctttctgttgacgactttgtcagaattcttacagagcctaagttatcattaattaagcaatacgaagcgttgcttcaaactgaagaagtgactgtaaacttcactgaagaagcggtcaaacgtttagctgaaattgcttaccaagtcaaccaagacactgataatattggtgctcgtagattacacacaattttagaaaagatgcttgaagatttatcattcgaagcaccaaatatgccacatgctgttgtagacataacaccacaatatgttgatgataaactaaaaactatctcaacgaataaggatttaagtgcatttattttataa

SEQ ID NO: 654 - DNA, 543 bp, Staphylococcus capitis
atgagtaatactttacatgcaacaactatttacgctgtacgtcataatggagaagctgcaatggcaggtgatggccaggttactcttggacaacaagttattatgaaacaaactgctagaaaagttagacgtttatatgaagggaaagtgttagcaggatttgctggtagtgttgctgatgcattcacgcttttcgaaaagtttgaaacaaaactacaacaatttagcggtaatttagaacgtgcggcagttgaattagcacaagaatggcgtggagataagcagttaagacaattagaagcaatgcttattgttatgaataaagatgcaattcttgttgtaagtggtacaggcgaagttattgcgccagatgatgatcttatcgctattgggtctggaggcaattatgctttaagtgctggtcgagcgcttaaaagacatgcttcacaactttctgctaaagaaatggcttatgagagcttgaaagttgctgcagacatctgcgtatttactaatgataatattatcgttgaaacattgtag

SEQ ID NO: 655 - DNA, 891 bp, Staphylococcus capitis
ttgaatgaaatccaaaaaacatttttatacatgttgaaggtagaaagaaatttttcagaatatactttgaaatcctatcatgatgatttgattcaatttaatgactttttagttagtgaacatttagatttagctacatttgaatataaagatgctcgaaattatttatcatttttatattcacataatttaaaaagaacgacagtatcgagaaaaatttctactttacgtactttttatgaatattggatgactcaagatgaatcaatagttaacccctttgttcaacttgtacaccctaagaaagaacagtaccttcctcaattcttctatgaagaagaaatggaagctttatttcaaactgtggagcaagatagtaaaaagggcatacgagatagggttattattgaattattatatgcaacaggaatacgtgtgtctgaattagttaatatcaaaattaaagatatagatatgaatttacctggagtgaaagttttaggtaaaggaaataaagaacgtttcattccctttggtgaattttgtaagcagagtattgaaagatatttagacgaatttcaacctagaaaaactaatgaccatgaatatcttatagttaatatgaatggtgcgcctattactgaacgtggtgtgaggtatgttctcaatgatgtagttaaacgcactgctggtgtcacagatatacacccccataaactcagacatacgtttgcaacgcatttattaaatcaaggtgctgatttgaggacagttcaatctcttttaggtcatgttaatttatcaacgacaggccgctatactcatgtttcaaatcaacaacttcgcaaggtttatttaaatgcacatcctcgagcaaaaaaaggagagtaa

SEQ ID NO: 656 - DNA, 1308 bp, Staphylococcus capitis
atgactcaaacagttaatgtcgttggagctggattggcaggttctgaagcggcatatcagttagctcagcgtggtgtaaaagttaatttaattgaaatgagaccagtgaaacaaactccagctcatcacactgataaatttgctgaacttgtatgttctaattcactaagaggtaattctctgacaaatgcagttggtgtgcttaaagaagaaatgagacgtctggactctctaattattcaagcagctgataaagcacgtgtcccagctggaggagctctagctgtagatagacacgattttgctggttatatcactgatacgcttcgtaatcatcccaatataacagtattaaatgaggaagttaatcatattcctgaaggatacacaattatagctacaggtccactaacgacagaacacttagctcaagaaatagttgatattacaggtaaagatcaactttacttttatgatgcagcggcaccgattgtagaaaaagatacaatagacatgaacaaagtttacttaaaatctcgttatgacaaaggtgaagctgcttatcttaattgtcctatgacagaagaagaatttaatagattttatgatgctgtattagaagctgaagtagcacccgtcaatgaatttgaaaaagaaaaatatttcgaaggatgtatgccttttgaagtaatggctgaaagaggtcgtaaaactttactatttggtccaatgaaacctgtaggacttgaggaccctaaaacaggtgaacgtccatatgcagttgtacaattgagacaagatgatgcagcaggaacactttacaatatcgtagggttccaaacacatttaaaatggggcgcgcaaaaagaagttatacgtcttattcctggattagagaatgtggatatcgtgagatatggtgtgatgcaccgtaatacatttatcaactctcctgacgttttaaatgaaaaatacgagcttgagggtcatgagcatctttattttgcaggtcaaatgactggtgtagaaggttatgtagaaagtgcggcaagcggtttggttgcgggaattaatctcgctcataaacttgctggtaaaggagaagttattttccctagagagacgatgataggaagtatggcctattatatttctcatgctaaaaatgagaaaaacttccaacctatgaatgctaatttcggcttattaccatcattagaaaagcgaattaaagataaaaaagaaagatatgaagctcaagcaaatagagcgctcgaatatctagataattataaacaaacactttga

SEQ ID NO: 657 - DNA, 2070 bp, Staphylococcus capitis
ttggcagataatttagtcatagttgagtcgcctgcaaaagctaaaaccattgaaaaatatttaggaaaaagatacaaagttatcgcttcaatgggacacgtacgtgacttgcctagaagtcaaatgggtgtcgatactgaagataactatgaaccaaaatatattacaattcgcggtaaaggtccggttgttaaagatttaaagaaatatgctaaaaaagctaaaaaagtttttctcgctagtgaccccgaccgtgaaggtgaagcgattgcctggcatttatcaaaaattttagaactagaagactcaaaagaaaacagagtagtattcaatgaaattacaaaagatgcggtaaaagatagtttcaaacaccctagaggtattgaaatggatttagttgatgctcagcaagcacgtcgtattctggatagactcgtgggttataatatctctcctgtattatggaagaaagttaaaaaaggtttatctgcaggacgtgttcagtcagtagctcttcgtttagttatcgaccgagaaaatgaaatacgtaatttcaaaccagaagaatattggactattgaaggggaatttagatataaaaagtctaaatttaatgctaagttcctccattataaaaataaaccttacaaattaaatacaaaagaagacgttgagaaaattacaacagctcttgatggagatcaatttgaaattacgaatgtaaataagaaagaaaaaacacgtaatccagctaacccatttactacttcaacccttcaacaagaagctgcacgtaagttaaacttcaaagctcgtaaaactatgatgttagcgcagcaactatatgaaggtattgatttaaaacgtcaaggtactatcggtttgattacttacatgcgtacagattctacacgtatatcagactctgcaaagtcagaagctcataactatattactgataaatatggtaaagaatatgtgtctaaacgtaaggcaaccggtaaacaaggtgaccaagatgcccatgaagcgattagacctacaagtactttaagaactccagatgaaatgaaaccttatttaactagagatcaacatcgtctgtataaattaatttgggaacgttttgtggcaagccaaatggctccagcaattttggatactattgcactcgatgttactcaaaatgatattaaatttagagcaaatggtcagactataaaattcaaaggtttcatgacactatatgttgaagctaaagatgataaagaaaatgataaagaaaataaacttcctaaattagaggaaggcgataaagttacagcaactcaaattgaacctgcacaacactttactcaaccgcctccacgttatacagaagcacgtttagttaagacactagaggaacttaaaataggaagaccttcaacttatgctccgactatagatactattcaaaagcgtaactacgttaaattagaaagtaaacgattcgtaccaacagaacttggcgaaattgtttatgaacaagtccaagagtacttcccagaaattattgatgtagagtttactgttaacatggaaactttattagataaaatagctgagggagatacgaattggcgtaaagtagttggtgatttttataatagtttcaagcaagatgttgaacgtgctgaagaggaaatggaaaaaatagagattaaagacgaaccagctggagaagattgtgaagtctgtggttcacctatggtgattaaaatgggaagatatggtaagtttatggcttgttctaatttccctgattgtcgaaatactaaagctattgttaaatctatcggagtaacatgtcctaaatgtaatgagggtgaagtagttgaacggaaatccaagaagaatagaatattttacggatgctctcaataccctgattgtgacttcatttcttgggataaaccagtaggaagagaatgtcctaaatgtaaccactacttagtagataagaaaaaaggtagaagtagccaggtcgtttgttctaactgtgattacaaggaagaagttcaaaaatag

SEQ ID NO: 658 - DNA, 873 bp, Staphylococcus capitis
gtgattcaacacactttattgaagctctattgggctaatttcgccacaacgcaagttcatcaatttattaaagaatatccagaagttatttcagaaaatgcactaattcaaaatgagatgattgaggattgggctaaaagacaaacctcatccacagtcaggagaaaattgagcttatttaaatcacttaatacagaagttatatttcaagaaatgactaaaatgaacctcaaatatttaacttactttgacaaacattatcctcaattacttaaagaaatttatgatttcccatatgtaattttttataaaggaaataaacaactatttaattgtcctcatactttagctgttatagactcaagaaagtcaactttatatacaactcaagatttggaataccttttcccatcatttaaatcactgaaaatgacgattatttccggattagcatatggtgcagatagtatagctcaccaagtcgcactaaaaaataaacttccaacaataggtgttcttggcttcggccattcatatcattatcctaaatcatctttaaagacaagagagaatatcgaacgaaaaggactagttataagtgagtatccacctcattctcccataaccagatataaatttcctgaaagaaatagattgattagtggactcgctcggggtctattaattacagaagcagagaaaataagcggtagtcaaataacagtagactgcgctttagaacaaaaccggaatgtatatgttttaccaggatcaatgtttaatcctatgaccaaaagtaatttacttagacttcaagagggggcacaagtcgttttagatgaaagtagtattctttcagactacattttctaa

SEQ ID NO: 659 - DNA, 909 bp, Staphylococcus capitis
atgagtgtatttattgataaaaatacgaaagtaatggtacaaggtatcacagggtctactgcccttttccatacaaaacaaatgcttgattatggaacacaaattgtcgcaggggtaacaccaggtaaaggtggacaagttgtagaaggtgttcctgtttataatacagttgaagaagctaaaaatgaaactggcgctaacgtatcagttgtatacgttccagcaccatttgctgcagattcaattttagaagcagctgaagctgaattagatatggttatctgtattactgaacatattccagttgtggatatggttaaagttaaacgttatttacaaggacgtaagacacgtttagtaggaccaaactgcccaggtgttattacggcagatgagtgtaaaatcggaattatgcctggttacattcataaaaaaggtcacgtaggtgttgtatctcgttcaggtactttaacttatgaagccgtacatcaattaactgaagaaggcatcggtcaaacaacggctgttggtatcggtggtgacccagttaatggtacaaacttcattgatgtattaaaagaatttaatgaagatcctgaaactaaagcagtagtaatgattggtgaaatcggtggtactgctgaagaagaagctgcacaatggattaaagataatatgaataaaccagtagtaggatttattggtggtcaaactgcacctccaggaaaacgtatgggacacgctggtgcaattatctctggtggtaaaggtactgcagatgaaaaaatcaaaacattaaatgattgtggtgttgaaactgcagatacaccatcagaaattggtacaactttaatcgaagcagctaaaaaagctggaatctatgatgaattattaacagttgataaataa

SEQ ID NO: 660 - DNA, 1167 bp, Staphylococcus capitis
atgaatatccacgagtatcaaggtaaagaaatatttcgttctatgggcgtagccgttccagaaggacgagtagcattcactgctgaagaagcggtggaaaaagcgaaagaattagattcagatgtatatgtggttaaagcacaaatacacgctgggggtagaggtaaagcaggcggtgtaaaaattgctaaatcactttctgaagttgaaacttacgctaatgaattattagggaaacaattagttactcaccaaacaggacctgaaggtaaagaagttaaacgcttatatatcgaacaaggttgcgatattcagaaagaatattatgttggtttcgtaattgaccgtgcaacagacaaagttactttaatggcgtctgaagagggtggtactgagattgaagaagtggcagctaagacacctgagaaaatctttaaagaaacaatcgacccagttgtaggtttatctccttatcaagcacgtcgtattgctttcaacattaatattcctaaagaatctattggtaaagcaactaaattcttattagcactttataacgtgttcattgaaaaagattgctctatcgtagaaattaatccactagtaactactggtgatggacaagtattagctctagacgctaaattaaacttcgacgataatgcattatttagacataaagatatcgttgaattacgtgatttagaagaagaagatcctaaagaaatcgaagcatctaaatatgacttatcatatatcgctttagacggtgatatcggttgtatggttaacggtgcaggtttagctatggcaacaatggatactattaatcattttggtggaaatccagctaacttcttagatgttggtggcggtgctactaaagaaaaagttactgaagctttcaaaatcattttaggtgatgacaatgttagaggtatctttgtaaatatctttggtggaattatgaaatgtgacgttatcgcagaaggtatcgtagcagcagttaaagaagtagaattaactttaccattagtagtacgtttagaaggtacaaatgttgagcgcggtaaagaaatcttaaacgactcaggtttagcaattgaaccagcagctactatggctgaaggtgcacaaaaaatcgttaaacttgttaaagaagcgtaa

SEQ ID NO: 661 - DNA, 771 bp, Staphylococcus capitis
atgacatcaacaattaaagaaatacgtgatcaacttgcattaattcaatctatagaagaacttgaagcgcatgtagctaatgaagatacccgaaaaggagttcaaaaagctatagaatcacgtaaaaagtatttaatcaaacaacaagaactagaaaacaattatattagtatgaatcactatgaaaatgaaatattgaatcatgataatgaggcactaatatgtggaatcgatgaggtaggacgaggaccactcgctggtcctgttgttgcttgtgcagtcatattaaataaaggccatcattatcttgggttaaatgactctaaaaaggtaccagctaaacagcgcttaattttaaatgaagaattgaaaaataatgttacgagttacgcttatggaattgcaactccacaagaaattgatgacttgaatatttataaagctacacaggtagccatgcaaagagcgattaatcaattaagtattcaacctacacatttacttattgatgcaatgaaacttgataatgatattcctcaaacatcaattataaaaggagatgctaaaagtgtttcaattgctgcagctagtattatggcgaaagaatatcgtgataattatatgaaagaactagctaatgattatcctaattacggatttgaaaaaaatgttggatatggtactaaacagcatttagaggcaattgacacatttggtgtaataaatgaacatcgcaaatcctttgaacctatcaagtcgatgttaaaataa

SEQ ID NO: 662 - DNA, 867 bp, Staphylococcus capitis
atggcgatacaatggtatccaggacatatggcgaaagctaaaagagaagtgagtgagcaactcaaaaaggttgatgtagtatttgagttagttgatgctcgtataccatatagttctagaaatcctatgatcgatgaagttattaaacaaaaaccgcgagtggttattttaaataaaaaagacatgactaacttaaaagaattagaaaagtgggaaggattctttaaggaacaagggttctttccggtagcagttgatgctaaacatggtaaaaatttaaaaaatgtagaggctgaagcaataaaagctacgaaagaaaaatttgaacgtgaaaaggagaaagggcttaaaccgagagcgatacgtgcaatgattgttggtattccaaatgtcgggaaatcaactttaattaataaattggcgaaacgtagtattgcagaaacaggtaataaaccaggtgttactaaacaacaacagtggattaaagttgggaaatcacttcaattgttagatacaccaggaatattatggcctaaatttgaggacgaggaagtcggtaagaaattaagtttgactggtgcaatcaaggatagcatcgttcatttagatgaagtagcaatttatggcttaaacttcatgattgaacatgatttagaaggtctcagacaacattacaatatagatgtagacaaagatgcagaaattttagagtggtttgatgcgattggtcgtaggagaggccttcttcaaaaaggtaatgaagtagattatgaatcagtcattgaattaatcattaatgatatgagaaatgctaagataggtacatattgttttgatattttaaaagaaatgaagagtgacttataa

SEQ ID NO: 663 - DNA, 2601 bp, Staphylococcus capitis
atgaaaagagttttaagttataccgtattatttatagtgctatcacttattggacatagttatgtcgtatatcgtttttatcacgatggtattttatcaactggtccaaatgatggcatggaacaaatggttccaatacaaatgtatctttacaatcagtggcatcaagggaatctattttatgagtctaactttggcttaggtggggatttcttcactgatttaagttattatttttcaacaaatttattatttatcattaatgttctaattatttcgtttgtaaaattattcatatctttagatacacatcaagtgatgttttggatgaataacgctttaatcgtctcaatttttaaggggacgattgcgctttattgtacatttttatatgctcaatacatttttaaaaataaaattttgagtatatttaccgcatttttatttgtaatctcaccactctatttcagatttacagcttattggccatttttcagtgatgtgtttatttggttacctttacttttattggccatggaaaagtcaattcaacaacgtaaaagtggtctgttaatcttaactattacattagtattaataaataatttctattttgcttactattttttaattattgctagtgtttatggcttaattagaatcatgtttaggcatcctgatgatgattcaacacgaataagaaccttgtgcactttacttatcccagcagtattagctttaggaaatagcttatttattttctttcacggcgtagaaagtttcgtaaacaatagacgggtatcattctctggaaatgttccaacttttgagcatctgaatattaatacaaacatatttttcgataactatcttatcgtcattttatttttaacaattcaaagtatattaacctttaaattatatagacactactattatcgattatttgcactgatgaccgtagtactcatcatatttacttttataccacttatagatcaaatttttaatggattttcagcacctcagaagcgttggcattttattttagccttttcatcatctttattaatcggactatatgtaaagtactttagaacggtgagtgttaaatcatatatcactacaagtttgatcgcccaactcattatttatattagcgcctattgttatcataaatttataccatggttaatacttgtaccggtagtttcaattattggattattaattttatttttaaaagagagaaagattcgcatacaacttacatatatttatattatttcaattgttgccttaagtatgatggtgagttttgtttttataaaaaatcaaatttacttccaagaccatcaagatcgagcgaatacattttatgcgaattctagtctatatagctctgatttacaaagagcattagttaaagaaatgaagagtagtaagaaggatgaccagcgtattgattggcgggttaatgaacaggacaatacaccgatgtatcaaaactttaaaggtttgagtctttattctagtatctttcatcacaatatcttggatttctattatgatgctttaaaaattaatttagcagaggaatcacttagtcgttatcaatcgaccaatgctagacaaaatatcgatagtttattctcaattaaatatgtaatgttaaaaaaatatcaaaataatatacctacttacttcaaaaaagtgaaatcgagcggccaatatgacatatatgaaaatcagcttaatttacctagcgttaaagtgactaataacctatataatagtcaaagcttaaaaacaccgatagaccgtgaacatgcaatgcttaaaggagcgattgtagattcaaatggcaaagatttcaattctcaaagtaagaatttactaaaacatgcacgtataacaactaagaatattaaaagtaaaggaaataatcagttagaagttaaaaataatataggaactgttaacattcatatacctaaaaaaatccgtaagcaatatcaggacttttatataactttatatattaaacgaggtaatccagacagtaattacactgtaaatgttaataattactttaataaccgtctttataataattcagtctacaaaacgaggataaacacacaactttatcggacccaacctgataaaaatggcaatatttctattaaattatctccaaatggcggtttcaaatttaagttactcaatctcagtggagaaaattataagacactcaaaactgcacatcataatgcaaactttaatatggattacaatgatattaaaaatggtgtgaaagtgaatctcggtcaacactctaaaggtttagctaccataaatattccttatcgagctggtatgcgtgcttatattgacggccgtcaagttaacattcataaagtaaattatatgatgactggtgttccagtaaacaagaatgatcaaactataattattaaatatcagcccccttattggaaaacaatgatatttatttcatttataagtattatttttagtatgatatatataagatatacgaattcaataaaaagaaagatgaggattcaccgtgattaa

SEQ ID NO: 664 - DNA, 2508 bp, Staphylococcus capitis
atgacaaaaggcgacgttttcagtggaagtggtgatggttttaggcaaatgatgcctttccaaatgtatctgtatgaacattttgcttcttttaaagggttctatgatgcctcttttggtttgggtggagattatgtgaaatcattagcatattactactcaatgtcaccacttatgtggatcaattttgcatgtatttggggacttgaacatactattcatattaatccacatgacattagcttttggccaactaatcaacttgttatggcatatgtgcgaactgtaattactttgatttttactttttatttgtttatgtatttgaaattcaaacccgcacctatgtttattgcaactattttgtatggcatgtctaccgttatgacatattataattttacttggtcattttatggtaacttacttatcatgctacctatgtcaatttgggctatggaaagattttttagagagcgcaagttaggatggtttatctttgcaattacatttacactattcactaatttctattttagttattatgaagcggttgtattaggattttatttaatatatcgcctcattgcagtacatccgcaagatattgttaatcgttggcaaaaattttacatattagttatcgctactttattaagtgttttatcaagtttatttggtctttatactggtgtttcttcatttttaaataatgatagatcacagaatcctaaatttggaattacctttttaaccaatttatttgaaaaaaattataatatatttactgatggtttttatataacaatttctattattgtaattattgcgttattttcattcaagctatatcaaaattattattataagttattcgccgttgcaacttggttactactcattggttctttatcacaatggtttgatagttcattcaatgggttctcattacctcaaagacgttgggtttactttttagcattatcatcaggcgctttaattgcacttttcatacaacatttaagcgaattatctctaaagaattatttaattatagctatacctatatttttatatagctgtttttacatcacttacactgatcgctctgtaaattggatgtatattgcaattataataatgatagttattggcttattattatacagaaaatcacttttaaaaagaaaatggatagcaatcgggctagttattctatttttagttgaacaagttattatggtaaatgattcaaaaaaaataactattgaaccataccaaactacgatggacactattaacgattcaagttatagaagtaaagtattaaacaataaaattaatcaaatgactagtgataaactagatcctttgaaaagattagattatttttcattttacgcacttaactcaccatttatatatcactacaatggtacatctttatattcaagcattttcaacggtcaaattttaaaatactatgataaaacaatgcaaatcaacatgcctgtagataaaaatagtacatatcgctatttaagtaatcgagcgaatttgatggctttatggaatgtacaagatagattaagacatcccaatgacttaaacatgccttatggatttaaaaagaaaaatcttatcaaagatgggaaagatcaatggatccactcaaagaatacgatttcttatccaagcgcacacattacgcataaagtctatgattctaataacttaaaatcacctctagatagagaacaagcgatgcttcaaggtgtggtattcgataataatacgaaaagtgttaacactacgtttagccctaataaaaatctattaaatgatgctcaactacaattaaaagattcacaatggaaaaagaaaaatcagctaaaggtagataaaaataatggaggcgttcaactcacattacctcattctttaactaaaaagtataaagacatgtatctcgaaatggatgttgaactgctcactcctgataaggaacatagtattggcgtaaatgaatatagtcaaaatcgaaatgcgttgtcatataaatatcgacgtgtggtatcacctgtgacaatgcgtgtgaaagcttcagacaaacttaatattcatatgtctgaaggtacgtatagatttaagattaaaggaatttatggggaaaattatcacacacttaaaaaagcttctaaacaattacattcagtaaaagtaaaaaaagagagaaatggttatacgattactaaaaataaaaacgataacggatatatcgtgttacctatagcttatgaaaatggcatgcaagctagagccaacggtaagcctttagatgtaaaaaaaggtaacggaattatgactacaattccagctaaagctggacaaacaacgattagattgacttacacaccgccacatttttattggttaattattttaagtatcattggagtcattttaagtatcatgtttactaaaaaagtaagaaaaaataaagtttaa

SEQ ID NO: 665 - DNA, 147 bp, Staphylococcus capitis
atgttcaaagagaatcacatatttcaaagtatgtctaaaaaaggtaactggctatataatttttataataatactagaattaaatcaaaatttaaagacttgtctcctaaacaacattggaaacaaatctttaaaataacatactga

SEQ ID NO: 666 - DNA, 252 bp, Staphylococcus capitis
ttgtttgtaaaaatgaataaactattgtcaagatttgtaatctctttgctgtcgtttgtattagcattaactgtagtttctccattttcttctaaagctgaggaagggcataaatttaatcaaaaagaagtcgatgaattagcacaagcattacaggttacgtttgaacagtcttcaataaagtcagaaggtaaaattataggatatcaaaaatctaccattgtaaataatttgcaaaataacaaatattaa

SEQ ID NO: 667 - DNA, 339 bp, Staphylococcus capitis
ttgtcagatcaagatgcaaatcaatataaacatagcggaacagcatcaagagcctccggtaattatggagatgatgcgccaaatgcaagtccagcagaacaaaaacatgcgaagaaatggctgaaagtacgtaatggttgcctttacaataaaattcctgaaatattaggtgtgtctgctacgggtactttaattgacgcaatgactacaggaagttggcaaaaagcagctaaaataatattgaaattaggcggtaaaggtactgtagttggattagcagctagtttgacatggacttatggtgaatgtagtagatatgccaatagtaaagtgaaatag

SEQ ID NO: 668 - DNA, 351 bp, Staphylococcus capitis
atgagtaatcataagttaatcgaagcagtaactaaaccacaattacgtactgacttacctactttccgttctggtgacactttacgtgtacacgttcgtatcgtagagggttcacgtgaacgtatccaagtcttcgaaggtgttgtaattaaacgccgtggtggaggaatttctgaaactttcacagttcgtaaaatttcttcaggtgtaggtgtggaaagaacattcccattacacactccaaaaattgaaaaaatcgaagttaaacgtcgcggtaaagtacgtcgtgctaaattatactacttacgtagtttacgtggtaaagctgctagaatccaagaaattcgttaa

SEQ ID NO: 669 - DNA, 738 bp, Staphylococcus capitis
atgaaaattgattatttaacgttatttccagaaatgtttgatggtgtgctgaatcattcgattttgaaacgcgctcaagataaagaaattattgatgtaaatacaataaattttcgagattattcaatcaacaaacataatcaagtggatgattacccatttggcggtgggcaaggcatggtgttaaaacctgagcctgtttttaatgctatggaagatttaaaaagagatgacgatacgcgtgtgatattaatgtgtcctcaaggtaaaccttttactcaagagatagctcaagtgttaagtaaatcgcaacatattgtatttatttgtggtcattatgagggctatgatgaacgaatcagagagcatcttgttactgatgaaatttctatgggagattatgtgcttacaggtggagagttacctgcaatgactatgactgatgcaattgtgcgcttgattcctggagtgttaggcaatgaagcttcccatcaagatgattcattttcagatggattattagaatttcctcaatatacaagaccaagagaatataaagaaatgaaggtgccggatgtcttattatccggaaatcacgctcacattgaacaatggagacatgaacaaaaattgattcgcacttacgaaaaacgaccggatcttttagaaaattatgagctcagtcaaaaagataaagaaattttagaaacgtacaaaaagcaattgaaaaacaagtag

SEQ ID NO: 670 - DNA, 504 bp, Staphylococcus capitis
atggaagtagaagtaggacaaattgtaaatacacatggaattaaaggcgaaattaaagttaagtcgaattcagattttacagaaacacgatttcaaccaggtgaaaatttaattgttaaacacaataatgaagatatcgaatatactgtttcatcttatcgcatacataaagggtttcacatgttaaaatttgaaggaataaacaatattaatgatattgaacatctcaaaggtgattatctatatcaagaacgtgatcatgaagatatcgagttggatgaacatgagttttattattcggatatcataggatgtacagtttttgatgatacagatactcctatcggtcgagtaattaatatctttgagactggcgccaatgatgtgtgggttgttaaaggagataaagagtatcttattccatacattgaagatgtggttaaagatatagatgtggaaggtagatcaattaaaattacacctatggaaggattgttagattaa

SEQ ID NO: 671 - DNA, 276 bp, Staphylococcus capitis
atggcagttaaaattcgtttaacacgtttaggttctaaaagaaacccattctatcgtatcgtagttgctgatgcacgttcaccacgtgatggtcgtatcatcgagcaagtaggtacttacaatccagcaaatgttaatgcaccagaagttaaaattgatgaagagttagctttaaaatggttacacgatggtgctaaaccaacagatacagttcacaacattttatcaagagaaggtatcttgaaaaaatttgatgaacaaaaaaatgctaaataa

SEQ ID NO: 672 - DNA, 1368 bp, Staphylococcus capitis
atggcatttgaaggattatccgatcgattgcaagccacgatgcaaaaaatgcgtggtaagggtaaagttactgaagcggatatcaaaacaatgatgcgagaagtacgattagcattattagaagccgatgttaactttaaagttgttaaagagttcgttaaaactgtttctgaccgtgctttaggttcagatgttatgcaatctttaacacccggccaacaagtgattaaaattgttcaagaagaacttacaagcttgatgggtggagaaaacacatctattaaaatggcaaataaaccacctactgttgtcatgatggttggtttacaaggtgccggtaaaactacaactgctggtaaattagcattattaatgcgtaaaaaatataataaaaagccgatgttagttgcaggagatatttatcgtccagctgcgattgaccaattacaaactgttggtaaacaaattgacatacctgtatatagtgaaggtgaccaagttcagcctcaacaaattgttgaaaatgcattaaaacatgctaaagaagaacatttagattttgtcatcatcgatacagcgggacgtttacacattgatgaagcgttaatgaatgagttacaagaagttaaagaaatttctaaaccagatgaaattatgctagttgttgacgcaatgacaggtcaagatgctgtcaatgttgcgcaatcatttgacgatcaactagatgtatcaggtgtaactttaacgaaacttgatggtgatacacgtggtggtgctgcactatctatacgttcggtgactcagaaacctattaaatttgtaggtatgagtgagaaattagatggtttagaactattccatcctgaacgtatggcttctcgtatcttaggtatgggtgacgtgttaagcttaattgaaaaagcacaacaagatgttgaccaagaaaaagctaaagatttagagaagaaaatgcgtgactcttcatttacattggatgatttcttagaacaattagatcaagttaaaaacttaggtcctttagatgatattatgaaaatgattcccggaatgaacaaaatgaaaggattggataagcttaatatgagcgacaaacaaattgaccatattaaagcgattattcagtctatgactcctaaagaacgttcaaacccagaaacactaaatgtttctcgtaagaaacgtatagctaaaggttctggtcgttcattacaagaagtcaatcgtcttatgaaacagttcaatgatatgaagaaaatgatgaaacaatttactggtggcggcaaaggtaaaaaaggtaagcgaagccaaatggagaatatgttaaaaggtatgaatttaccattttaa

SEQ ID NO: 673 - DNA, 333 bp, Staphylococcus capitis
atgggccaagatgatttagttaaaacaattagaatgaattatttgtttgatttttatcaatcattattaactcaaaagcagaaaagctatttagaattattttatttacgagattattcattaagtgaaatcgctgatacatttgaagtgagtagacaggcagtttatgataatataagaagaactggcgatttagtagaagattatgaaactaaactaggtttatatagaagatttgagaaacgccaagaaatttatgatttaatgaaacaatctcttaataatccagatttactaaaagaatatatcgctcaattagaagagttagagtag

SEQ ID NO: 674 - DNA, 1260 bp, Staphylococcus capitis
atgagtttttttaaacgcttaaaagataaattttcaggtaaaagtgaagatgagattcaaaaagaattaactgaagatgtggaatcagacgaaacaagtgattcggatgcatcaagtgaatcaggtgaacccaatgtcactgatataatcgaagagcctaaacctaagaaaaaaccaaaaaaattaagtgaagctgatttcgacgaagatggtttaatctcaattgaggactttgaagaaattgaagcccaaaaaattggtgcgaaatttaaagctggtttagaaaaatcacgtcaaaatttccaagaacagttaaataatttaattgcacgctatagaaaagtagacgaagatttctttgaagcacttgaagaaatgcttataacggctgacgttggtttcaatacagtaatgaaattgacagatgaattacgtacggaagcgcaaagacgcaatattcaggaaactgaagatttacgtgaagttattgttgaaaaaattgtcgagatttatcaccaagaagacgatcattcagaagcaataaatcttgaagatggtagattgaacgttatcttaatggttggtgtcaatggtgtgggtaagaccactacaattggtaagttagcatatcgatatcaacaagaaggtaaaaaagtgatgcttgcagctggagatacattcagagctggcgcaatccaacaattaaaagtttggggagaccgtgtaggcgtggaagttgtaagtcagagtgaaggctctgatccagcagcagtagtatacgatgcaattaacgccgcaaaaaataaaggtgtagatattttaatttgtgatactgcaggtcgtctacaaaataaatctaacttaatgcaagaacttgataaaatgaaacgtgtaattagtcgagcaatccctgatgcacctcatgaagcattactatgtttagatgctacaacaggtcaaaatgcgttgtcacaagcgcgttcatttaaagacgtgacaaatgtttcaggtattgtattaaccaaattagatggtactgctaaaggtggtatcgttcttgccatacgtaatgaattgcatatccctgttaaatatgtaggcttaggtgaaaaacttgatgacttacaaccatttaaccctgaaagttacgtatacggtttatttgctgatatgatcgaacaaaatgaagatattcctgatgaattaattgatgaatcatcgaatgaaactgaagaaggtactcaagatgggccaagatga

SEQ ID NO: 675 - DNA, 3570 bp, Staphylococcus capitis
atggtttatttaaaatcaatagatgccataggatttaagtcttttgccgaccataccaatgtccaatttgataaaggtgtgacagctattgttggtcctaatggtagtggtaaaagtaatattactgatgcaattaaatgggtattgggtgaacaatcagctaaatcgttacgtggttctaaaatggaagatattatcttttcaggagcagaacatagaaaggctcaaaactatgctgaagtaaaactcaaattagataatcattctaaaaaattgcagattgattcagatgaattagtagtcactcggcgtctataccgtagtggagaaagtgaatactacttaaataacgatcgtgctcgtttaaaagatattattgaaatctttttagattcaggtttaggaaaagaagcattcagcatcatttcacaaggtagagttgacgaaattttaaacgctaaacctatcgaccgacgacaaattattgaagaatcagctggcgtattaaaatataaaaagcggaaagctgaatctattaacaagttagatcatactgaagataatctaactcgtgttgaagatatcttatatgatttagaaggtcgagttgaaccacttaaagaagaagcagcaattgctaaagaatatcaacagttatccaaacaaatggaacaaagtgatgttatcgttacggtacatgacatcgatcaatatacggaagataacactaaattagaccaacgtttaaatgagttgaaaagtcagcaagcagataaagaagcacaacaagctctggtaaatcaattgttgcaaaagttcaagggcgaacgtcagcaagttgattatgatattgaaaaattaaactatgaattagttaaaacaacagaaacatatgaacaactcactgggaaattaaatgtattagaagaacgtaaaaagaatcaatcagaaacaaatgctagatatgaagaagaacttgagaacttgaatgctcagattgaatcgattaatcatgaaaagcaacaaaatgaagaaacgttaaatgaacttaaagataaacagaaacatttaaataaagaagtacaagatctagagtcaattctgtacgtatctgatgaacaacacgatgaaaagcttgaagaaattaagaataattattatacgctaatgtctgaacaatcggacgttaataatgatatacgtttccttgaacatacgattaatgaaaacgaggcaaaaaaatctagattagattcgagacttgttgaagcatttaatcagttaaaagagatacaaaataatattaatgaaactgaaaaaagttataaaacttctaagaaggctttaactgaagcggaacaacacattcaccgtcttgaaaacgatttaaccaaatctaaaaaacagcaatctgaatatgaagataagctgtatcaagcctacagatataatgaaaaattaaaatctagaattgatagtttagctattcaagaggaggattatacgtatttcttcaatggggttaaacacattctcaaagctaaagataacgaattgagaggaattcatggcgcagtagctgaagtgattgatgttccatctcaaatgactcaagcaatagaaacagctttaggtgcatcacttcaacatgtcatcgttgataatgagaaagatgggagacaggcgattcaatttttaaagcaacgcaatttagggcgtgcgacatttttacctttaaatgttattaagccacgacatattgcgtcagatattaaagagatagctcgtcaaactgaagggtttattaatattgcgtcagatgctgtaaatgtttcttccaagtaccaaagtgtcattgaaaatttattaggaaatacaatcatcgttaatgatttaaaacatgctaatgaattagctagagctatacgttatcgtactcgaattgtaactttagaaggagatgtagttaatcctggtggttcaatgactggcggtggtgcacgaaaatcgaaaagtattctttctcaaaaggatgaactatcaaaaatgcgtcatcaacttgaggattatcaacgccaaactgcagattttgaacgtcattttaaagaattaaaagacaagtccgaacaattaagtgagcagtatttcgatgcgagccaacaatataatacgttaaaagaaaaagtgcatcatcatgaattagagttagatcgtttaaaaacacaagagacgcatcttaagaacgaacatgaagaatttgaatttgagaaaaatgatggttatcaaagtgataaaagtaaagaaactttaacgcaaaaacaggcgcgtttatctgaaatccaacaacaattgactgaattagagagtgaaattgaacgttatactcaattgtctaaagaaggtaaagaatcaacaactaaaactcaacaacaacttcatcaaaaacaatccgatttagcagtggtgaaagagcgaataaaatctcaaaaagtcgagattgaacgtttagttaaacaacaagaatcaacgcagcaacaaattaagactattgaagagaaaataaggctgtttaattctgacgaaatgatgggtgaacaagcatttgaggatttgaaatctcaaattcaagaacaagaagaggcacgtgatcagcttaatcaacaacatgaagaacttaaacaacaacgtatcaatctaaatgaaacgattgagaataatgaaagtcagcttcaagtttgtcatcaagatattttagctatcgaaaatcattatcaagatattaaagcaaaacaatcaaaattagatgtgttgattaatcacgcgatagaccatctgaatgatgtatatcagttaactgtagagagagcacgcgctttatatgaatctaatgaacctattgaaagtctacgtaagaaagtcaaacttacgaagatgtctatagatgagttgggtccagtaaacttaaatgctattgaacagttcgaggaattaaatgaacgttataccttcctcaatgagcaacgcacagatttaagagaagctaaagagacacttgaacaaatcattaatgaaatggatcgtgaagtagaaggacgttttaaagaaacattccatgcggtacaggaacactttacaactgtcttcaaacaattattcggtggcggacaagctgaactacgtttaacagaggatgattacttatcagcaggtgttgatattattgttcaacctcctggtaaaaagcttcaacatctttctttattaagcggtggtgaacgtgcattaagtgctatagcattattatttgcaattcttaaggtacgttctgctccatttgttatactagatgaggtagaggcagcgttagatgaagcgaatgtgattcgctacgctcaatacttaaatgaactatcagaacaaacacaatttatagttattactcatcgtaaaggaacgatggagttctctgaccgtttatatggagtcacaatgcaagagtcaggtgtttctaagttagttagcgttaacctaaatactatagatgaggttatgaaggaggaacaagcatga

SEQ ID NO: 676 - DNA, 738 bp, Staphylococcus capitis
gtggctaaccataaaaagagagagatggtcaaagaatttcaacaaaaatttaccaaaaaaatgaatgagtggggttttaattttaataatatcgatttgtatcaacaagcgttctcacattcgagttttatcaatgattttaatatgaatcgacttgatcataatgaacgtttagaatttttgggtgatgcggtattagaattgacggtttcacgctatttgtttgataagcatcctcatttgccagaaggtaatctgacaaagatgcgtgcaacaattgtttgtgagccctcacttgtaatatttgcaaataaaattgatttaaatgaacttattttattgggtaaaggtgaagaaaaaacaggcggtagaactagaccatcattaatatctgatgcttttgaagcatttgtaggtgctttatatttagaccaaggtctagatactgtatggaaatttgctgagaaagtcattttcccatatgtagaagatgatgaattagttggtgtggtcgactttaaaacacagtttcaagaatacgtacatcgacaaaataaaggtgatgtgacctatcgccttattaaagaagagggtcctgcccaccataggttatttacttctgaagttattttagaaaataatgcagttgcagagggtaaaggaaagacgaaaaaagaatccgaacaaaaggcagccgagcaagcttataagtcaatgaagaaaaatgagtcattttaa

SEQ ID NO: 677 - DNA, 234 bp, Staphylococcus capitis
gtggaaaacttcgataaagtaaaagatatcatcgttgaccgtttaggtgttgatgctgacaaagtaactgaagatgcatcatttaaagatgatttaggcgctgactcacttgatatcgctgaattagtaatggaattagaagacgaatttggtactgaaattcctgatgaagaagctgaaaaaatcaacactgttggtgatgctgttaagtacatcaatagcttagaaaaataa

SEQ ID NO: 678 - DNA, 735 bp, Staphylococcus capitis
atgagtaaaagtgctttagttacaggtgcttcacgtggtattggacgtagcatcgcattacaattagctgaagagggctataatgtagctgtcaattatgcaggtagtaaagataaagcagaagctgttgttgaagaaatcaaagctaaaggtgtagatagctttgctattcaagctaatgtggcgaatggcgacgaagtgaaggctatgattaaagaagttgtaagtcaatttggttctgttgatgtattagtaaacaacgcgggtattactagagacaatttattaatgcgtatgaaagaacaagaatgggacgatgtgattgacacaaatttaaaaggtgtatttaattgcattcaaaaagtgacgcctcaaatgttacgtcaacgtggaggcgcgattattaatttatcaagtgttgttggtgcagtgggtaatcctggccaagcaaactatgtagcaactaaagcaggagtggttggtttaactaaatcatctgctcgcgagttagcttcacgtggtattactgttaatgcagtggctccaggctttattgtttctgatatgactgatgctttaagtgatgaacttaaagatcaaatgttagagcaaattccgttagcacgctttggtgaagatactgatattgctaatacagttgcattcttagcttcagataaagctaaatatatcactggtcaaacaattcatgttaatggtggtatgtatatgtaa

SEQ ID NO: 679 - DNA, 927 bp, Staphylococcus capitis
atgagtaaaacggcaattatttttcctggtcaaggagctcaaaaagttggaatggcaagtgacttatataatgaagaaacacgttcaactgaaatcttaaatcaagcacaagaagcacttgatttcgatttattagaaacaatgtttactgatgaagaaggtaaactaggtgaaactgagaatactcagccagctttattaactcatagtgtggcactgttagaggcgttacaaaatttaaatgctgattacacaatgggacatagtttaggtgaatattcaagtttagtagcaagtggtgtactctcatttgaagatgcagttaagatcgttcgtaaacgtggacaacttatggctcaagcatttcctaatggtgtaggtagtatggctgctgtacttggattggactacgaagaagttgataaaatttgtaaagatttatctaatgaagaagaaataattgaacctgccaacattaattcaccaggacaaattgttgtttcaggtcataaaactttaattgataaattggttgaagaaggaaaaactttaggcgctaaacgtgtacttcctctagcagtttcaggaccattccattcatctatgatgagcgtgattgaagaagatttcgcttcttacattaatgaatttgaatggcatgatgccaaattccctgttgtccaaaactttaacgcacaaggtgaaacggacgcggaagtgattaaacataatatggttaaacaattatattcacctgtacagtttataaaatcaacagagtggttgattgaacaaggtgtagatcactttattgaaattggtccaggtaaagtattatcaggattaattaagaaaattaatagagacgttaaaattacttcaattcaaacacttgaagatgtgaaaggatggaatgaaaatgagtaa

SEQ ID NO: 680 - DNA, 987 bp, Staphylococcus capitis
atggttaaaattgcggttgatatgatgggtggagatgatgcaccaggtatcgtactcgatgcagttaaaaaggctgtagaagattttaaagatttagagataattctttttggagataaagaacaatacaacttaaatcatgatcgtattgattttagacattgttctgaaaaaattgaaatggaagatgaacctgttcgtgcaattaaacgtaagaaagatagctcaatggtgaagatggcagaagctgttaaatctggagaggctcatggatgtgtttcggccggaaacactggagcattaatgtcagcaggattatttattgttggtcgtataaaaggtgtttcaagacctgcattagtagttactttaccaacaatggatggaaagggctttgtctttttagatgtaggagctaatgcggatgctaaggcagaacatctattacaatacgcacaattaggtaatatctatgctcaaaagattcgtggtataaagaatccttcagtgtcacttttaaacataggcactgaagcagctaaaggtaattctttaactaaaaaagcttatgaattatttgaaaaggatcattcatttaatttccaaggtaacattgaagctaaaacgttaatggatggtaatacagatgtagttgttaccgatggttataccggaaatatggtattaaagaatctagaaggtacagcaaaatcaattggtaaaatgttaaaagaaactattttaggtagttttaaaaataaaattgcgggtgctattcttaagaaagacctagacgcattctctaagaaaatggactactccgaatatggtggttcagtacttttaggcttagatggaactgttgtaaaggcacatggtagttcaaatgctaaagcattttactcagccattagacaagctaaaatcgctggagaagaaaatatagttcaaacaatgagagaaacggtaggtggtaaaaatgagtaa

SEQ ID NO: 681 - DNA, 570 bp, Staphylococcus capitis
ttgaaactaaagaaagacgaacgcagaatagctattcaaaatgcaattgatgctaacccctttattactgataatgaactttgcgaaaagtttggagtgagtattcaaacaattcgcttagaccgtacgcatttaaatattcctgagttacgtaaaagaattaagttagtggcagaacaaaattatggccaaattagatcgattgaagctaatgaaattattggagatttaatacaagttgagcctgatattgaagcacagtctttaatagaaattactgaagatactgtctttactaaaactcaaattgctagagggcatattctctttgcccaggctaattctttgtgcgtggcattaatacataatccaacagtactgacacatgaaagtcaggttgaatttatcgaaaaagtgaaattaaatgatacggtaagagcaaaggctcaagttatagataaaacatgtaagcactatattatagaagttaattcatatgtgaaagataaattagtttttaaagggaaatttaaaatgttttatataagtgaggatgaattcaatggttaa

SEQ ID NO: 682 - DNA, 2049 bp, Staphylococcus capitis
atgacaaaagtacatttaatcgaaagtccttacactttagacaaaattaaaggaattggtccgaaacgattaactatattagaagaattaaatataaaaactgtagaagatcttgtactctatttacctacacgttatgaagataatactgtgattgacctaaaccaggctgaagatcaatcgacagttactgtacaaggagaagtatattcgacaccagcggtagctttttttggtagaaataagtctaaattaaccgttcatataatggtgaacaacattgcggttaagtgtgtcttcttcaatcagccttatctgaaaaagaaaattgaattacacggtaccgtgactgtcaaaggcaagtggaatcgtgctaagcaagaaattaatgggaatcgtatgttctttaatgaacaaacaactcaagatgatgttcagttagagcctgtgtatcgtattaaagaaggtattaaacagaaacaaattcgagataacattagacaggcattagaggatgtcacgatacatgagtggttatcagacgatttaagagaaaagtataaattagaaacattagaatatacactacgcactttacatcaccctaaggataaacaaagtcttttaaaagcacgtcgcacatatgcctttacagaactttttatgtttgaattacgcatgcagtggttgaatcgtttagagaagtcatcagatgaagcgattgaaatcgattatgatatatctaaagttaaacaatttatcaatcgcttgcctttcgaactcacagatgcacaaaaaacaagtgttaatgaaatatttagagatttaaaggcacccattcgaatgcatcgtttacttcaaggagatgtaggttctggtaaaacagtagtcgcggcaatttgtatgtacgcattgaaaacagcaggtttccaatctgctttaatggtaccgacagagatattggctgagcaacatgctgaaagtttaattgaattatttggagatacgatgaatgtcgcacttttaactggctcggttaagggtaagaaacgacgcattctgttagagcagttggagaatggctcaattgattgtttaatagggacacatgcactcattcaagatgatgtagtttttgaaaatgttggtttagtgattacagatgaacaacatcgttttggtgttaaccagcgtcaaatgttgagagaaaaaggtgctatgacgaatgttttatttatgacagcaacaccaatacctcgaacgttagcgatttcagtgtttggagaaatggatgtttcttctattaagcaattacctaaaggtagaaagcctatcatcacaagttgggctaaacatgaacagtatgagcaagtcttagcacaaatgacgagtgaattacgtaaaggtagacaagcatatgtcatctgtccattgatagagagttcagagcacttagaagatgttcaaaatgtggttgcgctatacgaatcgttacaagaatattatggcgctgaaaaagttggattattacatggtaaactaacctctgatgaaaaagatgaagtgatgcaaagattcagtgataaagacattgatatacttgtttcaactactgtagttgaagtcggcgttaatgttcctaatgctacatttatgatgatttatgatgcagatcgttttggtttatctacgctacatcaattacgtggacgtgtgggaagaagtgaacatcaaagttattgtgtacttattgcttctcctaagacagagacaggtatagagcgtatgacaattatgactcaaactacagatggatttgaactaagtgagcgagatttagaaatgcgaggtccaggagatttctttggagtcaaacaaagtggactaccagacttcctcgtggcaaacgtagtagaagactaccgcatgttagaagtagcaagagacgaagcagccgaaatcatacaatcaggacaattcttccaacaacactacacacaacttagaaacttcattcaaaacaacctcctacacaccagttttgattag

SEQ ID NO: 683 - DNA, 861 bp, Staphylococcus capitis
atggaaccaatgattctcttatcgattctagttattttttgttcaagttttatatttgttcgaaaatatatgtcacaaacatctagtttaaaattcaaacgtgtcttctcactaatagctatattggctattgtattttcaacattagggcaaacgattaatgcacaacaggcacatgcagctaatggattacataaagagaaagcaactttagttaaagtgattgatggcgacacagtgaaattaaattataaaggtaaagtttcaacgtttagattattacttattgatacaccagaaacgaaagatcctagaaaaccagttcaaaaatatggtccagaagcaagtgcatttactacaaacatgatgactaaagctaaaaaaattgaagtagcgtttgataaaggtcaaagaactgacaaatacggaagattattagcttacgtgtatgctgatgggaaaatggttaacaatgcggttgtaagacaaggtcttgcaagagtaaaatatgtttatccgccaaacaatacgtatgaacaattaatcagagcaagtgaagctcgagctaaagctgaaaagcttaatatttggagtgagtccaatagtgtaaaaacttctctaacttcaactaaaaaaactcataaagtagtaaaaccgacatcagctaaaacaacaagtatacatcattattcaaaaaaatctaagacaccatccaaagctaaaagtaccactaagaaagaatattttaaaaattgtactgctttaagaaagaaatatccacacggcgtgaaaaaaggacatcctgcttatcaagctaaacttgatcgagataaagataactatgcttgcgaagttagataa

SEQ ID NO: 684 - DNA, 1068 bp, Staphylococcus capitis
atgatttttgaaactatggagcaaaaagactatgaacaacttgtcttctgtcaagatgaagtaacaggattaaaggctatcatttgtatccatgatactacattgggaccagctttaggtggatgtcgtgttagaaatgattatgaatccgaagaagaggccattgaagatgctatgaacttagcacgcggtatgacatataaaaatgcagctgctggattaaatcttggtggtggaaagactgtagttatgggcgcacctgataaacagaatgaagaggcgttctatagagcattaggtcgctatgttaatacattaaatggacgttattatactgcagaagatgttggtacttctgaacatgaaatgaatttaatatataaagaaacaccatatgtatgtggaactagtaagtcatttggttcagcaggtaatccaagtcctatgactgcctatggtatttatattgcattgaaacgcactgtagcagaaaaatttgatggcgacaaacttgaaggtaagacagtggcagttcaaggtgtgggacatgtatcatatgagttatgtcgtttattaaatgaagatggtgtgaaattaattgtcactgatattaataaagacaatgcacaacgagctgttgatgatttcggtgcggaatttgtagaacctgatgatatattctcagtagatgctgatatctttgcaccttgcgcattaggtggcgtcttaaatgatgatacaattccacaattaaaagtaaaagctgtgtgtggttctgctaacaatcaattaaaagatgaagataaacacagtaaaatgttagaagaaaaaggtattctttatgcaccagattatattgttaatagtggtggagttattaatactgcagatgaattgaatggctacaatgaagagagagctaaagaaagtattgaaaatatagatcaaattttaaaacatatcttcgacatttcaagtgaacacaatgaaacaccacttgaagcctctcaacattttgctgaaactagaatgaagcaaatttctcatattaaagatattagaaaataa

SEQ ID NO: 685 - DNA, 1662 bp, Staphylococcus capitis
atgattagcaaaataaatggtaaattatttgccgatatgattatacaaggggctcaaaatttatcaaataatgcagatttagtagattcattaaatgtatatcctgtaccagatggagatactgggacgaacatgaatctaacaattacttctggtcgtgaggaagtagaaaataatttatctcaaaatattggtgaattaggaaagacgttctctaaaggattacttatgggggcacgtggtaattcgggcgtaattctttctcaattatttagaggtttttgtaaaaacattgaaaataatgatgaaatcaacgcacagcaattagctgagagttttcaagcaggagtagaaactgcatatagagctgtaatgaaaccagttgaaggaacaattttaactgtagctaaagatgcagcagctgcatcagttgataaagctcaagatacagaagattgtattgaacttatggaacatactatacaagctgccaaggaatcattagacaatacacctaatttattgccagtgcttaaagaagtaggagtcgttgacagtggtggtaagggattattatgcgtttatgaaggatttcttaaaggcctaaaaggagaaaaagtagaagcgcaagctcctaaattagataccgaatcacttgtcaatgatgatcatgatttccacggtgttatcaatacagaagatattgtctatggttattgtactgaaatgatggttcgttttggtaaaaataaaaaaccgtttgaagaacaagaatttagaaatgatatgagtgaatttggtgattcattacttgtaatcaatgatgatgaaattgtaaaagtccatgttcacactgaacatcctggcgatgtatttaattatggtcaacagtatggcgaattaattaaactcaaagttgaaaatatgagagagcaacacagagaggttatcctcaaagaacaaagcggacaagaacaaaaggataatgcagatgaacctaatacagtagaaacagctgtgattacaatttctatgggtgaaggtatttctgaattgtttaaatctatgggtgctacacacattattagtggaggacagacaatgaatccttcaacagaggacattgtcaaagttattgagcaatcacaatgtaaacgtgcaattatcttacctaataacaaaaatattttaatggcaagtgaacaagcagcaaatatcgttgatgttgatactgtagtgattccaactaaatcgatacctcaaggtattactgctttattccaatatgacgaagaatcatctcttgaagataataagaattatatggaaacagcacttgaggcagttcaatcaggttcagtgacttatgcagtacgtgatactaaaatcgatggtattgaaattaaaaaagatgaatttatgggtctagcagaagacaaaattgtaacaagcgatgctgatcaattaacagcagtaaaaggtctattagacaaattacttacggacgatagtgaaattttaactatgataagtggggaagaatctgatcaagaagtcaaagaacaattaagtgaatggattgaagaaacttatccagatgtagaagttgaacaacatgaaggcggtcaaccaatttatcagtatttctttgcagttgaatag

SEQ ID NO: 686 - DNA, 375 bp, Staphylococcus capitis
atgacattagaaatttcaaatgattatggcaaaattgatatttcaaatgaagtgattgcatctgtagtaggtggtaaagccgttgaaagttatggcatagttggtatggcatctagacaacaagtaagggacggtattgctgaaattctaggacatgataactatgctaaaggcattaaagtaagagaagaaaatggcacgatagatgtagatatgtatattattgtgagttacggagtgaaaatttctgaagtagcaagtaatcttcaatcaacagttaaatatacacttgaaaaaacacttaatgtaaaagtcaattctattaatattttcgtacaaggtgtacgtgtaaacgatacaggcaaaaaggtttag

SEQ ID NO: 687 - DNA, 189 bp, Staphylococcus capitis
atgggtaaacaatgttacgtaacaggtcgtaaagcttcgactggtaataatcgttcacacgctttaaatgcgaacaaacgcagatggaacgctaaccttcaaaaagttagaattcttgtagacggaaaaccaaaaaaagtttgggtttctgcacgtgctttaaaatctggtaaagttactagagtttaa

SEQ ID NO: 688 - DNA, 603 bp, Staphylococcus capitis
ttgcccactcaattatttaagttagaacaacaatcacaatgggccggtattgatagaggtgcattgatactagttgaaaatggtatagagcctgtattttcagtaggagatttcgactcggttaatgaagaggaacgtcatatattaaaagatcaattaaatattcatccagtaaaagctgaaaaagatgatactgatctcgctctaggcgtgcaaaaagccgttcaacaaggatattctacaataactatttacggagcaactggcgggagattagaccattttatgggtgtacttcaaattttacaaaagcctgaatatttagagcgtcatattcatcttcgagttatagatgttcaaaatgaaattacattactcaacgaaggtgaacatcaagttaaacaagatagcacctatccatacatttcatttattccattaaatgatgaagtaagtttgtctttagaagggtttaaatataatttgagcaatgaatatttagaattggggtcaacattaactatttctaatgaaattacaacaaaggttgcaaaagtcaatgtggaaaagggcactgtcttacaaatgagaagtactgattaa

SEQ ID NO: 689 - DNA, 645 bp, Staphylococcus capitis
atggttaaggttttaccttcacttttatccgttgattttttaaatttaaaagaggaattagatcatttagaaaaagcgaatgttgatggcttacacttcgatgtgatggatgggaaatttgtacctaatatttcgataggtataccacttttagatgcaatacgcagttattctaacctaccaattgacgtacatttgatgatcgaacagcctgaaaactatattcaattatttgcagatcatggcgcagatatgatttcagtgcatgttgaagctacacctcatatacaccgtgcaattgaagaaattaaattacttaacaagaaagctggagttgtaatcaatccaggcacacctgtagagtccattttacctgtgttaagtattgtagattatgttttggttatgacagttaatcctggatttggtgggcaatcatttattgaacaatgtattaataaaatcgaacaacttaaccaaataaaacatgagaataatcttacatttgatattgaagttgatggtggcattaatgattcaacaagtaaatattgtgtagagcagggagcaacaatgcttgttacaggttcatacttttttaaacaaaatgattatgcaaaggtcactaatgcattgaaaggctaa

SEQ ID NO: 690 - DNA, 876 bp, Staphylococcus capitis
ttgaagactggacgtatcgtcaaattaattagtggtgtctaccaagtagatgttgatggtgttcgatttgacactaagccacgaggattgtttagaaagaaaaaattttctccagtagtaggagatatcgtcgattttgaagttcaaaatgaacaagaaggctatattcatcatgttcatgacagagacaatgaactcaaacgaccacctgtcagtaacattgatgagcttgttattgtaatgagtgctgttgagcctcaattttcaactcaattacttgatcgtttcttagtcgtagcacattcttatgatttagaacctcgtatattaattactaagaaagatttaacgacacaggatgatcaagaatatattcaagctatgctagacctatatcaagatataggatatcctacacagtttattagtaaaaatgatgatagggtctctattgtagatgagtggaatcatggtttaattgttttaagtggacaatcaggtgtaggtaaaactacttttcttaatcattatcgcccagagttaaaccttgaaacaaatgatatctctaaatcattgaatagaggtaagcatacgacgagacatgttgaattatatgagagaaatcatggatttattgctgatacgccaggatttagtgcgcttgattttgatcatattgaaaaggatgaacttaaaaattacttcgttgatattaaggacgcgggacaagattgtaaatttagaaattgtaatcatatcaaagaacctaaatgtaatgttaaacatttagttgatgaggggaaaattgctcaatttagatatgagcattatttacagttatttaatgaaatctctaatagaaaggtacgatattga

SEQ ID NO: 691 - DNA, 1188 bp, Staphylococcus capitis
atgcctaagcaaaatttagacaggcacattaattttttattattaattggaatcatgttggtagcagcaaatttacgagcacccattacctctgttggcgtggcgttaccttcaattaaagatacattacatacaactaatagtgcacttagtttaatgactgtagtacctttaatagcatttggagttgtatcattttttgcgtcaaaaataggcaatacatttggattagaacgaacaatatttgtagctttaatcttgatatttataggtattttattacgttcaataattggattgagttggctttatattggcacaacactgattggtataggtattgcgttcggcaatgtattagcaccagccatagtcaaaacacgatttccctttcatattggtatcatgacagggctatataccgtagtaatgaatgtagttggaagtttaagttcttcagtcataagtccgttaacctctcgttataactatgcaattgcattaggactaatgtctattattacattattcacaattataatttggacttttcaactgaagcaacaaccacctaaagctaccaactctgttcatagtcaaatcaacatttggaagtctctattggcttggagagtaaccatttttatgggagcacaatctctgatcttttatacaattattaattggttaccagaattactcacggatcatggcatatctatacaaacttcaggtatttacgtatcaatattacaaatcgctattatacctttaactttcatcacacctattgttgctacaaaaatgaaatcacaagtacccttaacgttattaacgagcgttctattcatgataggtgtactttgtttaatattcgttgattacaaatatgtatggttaggcatcatactaataggtgtagcaagtggtctagcatttggattagctaacacattatttgttgtacgtaccgaaagtggacaaacagcagcgaaattgtctgggatggcacagtctattggttacttattagctgctattggcccattcttatttggaattttccacgatatcacgcataactggacactttcactaagtgtgctattagttacttcactactcattcttctattcggaacgaaagcaggtagtcaaacaactattgaacaaacgaaagcgaaataa

SEQ ID NO: 692 - DNA, 2004 bp, Staphylococcus capitis
atgataggaaagatggttaatgaacgctacaaagtaattgataaacttggtggcggaggaatgagtattgtatatttagcagaagatacaatacttaatcgtaaagtcgcaataaaagctatttctattccacctcgtgaaaaggaagaaaccttaaaacgctttgaacgagaggtacataattcttctcagctatcacatgaaaatatagtgagtatgattgatgtagatgaagaagacgaatgtttctacctagtaatggaatatattgaaggccctacattagctgaatatatacatagtcatggttctctaagtgtagaaacagcaataaaatttaccgagcaaattttaagtggtatcaaacacgcacatgatatgagaattgtgcatcgtgacattaaaccacaaaatgtattaatagataaaaacaaaacattgaaaatctttgattttggtatagctaaagcgctaagtgaaacatccttaacacagacgaatcacgtgctcggaacagtacaatatctttcaccagaacaggcaaaaggtgaatcaactgatgaaggtacagatatttactctattggtatagtgctatatgaaatgttagtaggtgaacctccgtttaatggagaaactgctgttagtattgccattaagcatattcaagattcaataccaaatattactactgataaacgcgaagaagtaccacatgcgttaagtaatgttgtgctacgcgctactgaaaaagataaacataatcgttatcataccgttcaagaaatgtgtgatgacttaacgagtgctttacatgagaaccgtgcgaacgaggaaaaatatgaactagataaaactaaaacagttccgctcactaaagatgaactcaataaaaagataaatgatactcataacgatgatgatttaaataaaacaatgcaaatccctattgttaacgaacctgtacgtcagcaagaatttcaatcgttagaaggtcgctattcatcaccacctaaaaagaaacactctaagatgaaaatcactgtcctatctttaatatttgcgttattgttagcgggattagttggttttataggtatgggtgtttttggtagtaagtatgaggaaatgccagatttatcaggaaaaactgaaaaagaagcagagcaaatattaaaggatcatcatttgaccatgggtgacatatctaggaaatatagtgataaatatcctgaaaaccaaatcatcaaatctgaacccaatagcggtgaacggatagaagaaggagaagcgattgatattattctttctaaaggtcctcaaaaagtaaaaatgccaaatcttgtaggactgcctaaagatgaagcagttaaaaagctgaaaaatttaggtttaaaagatattgatgttgaacaagcttatagtcactcagtagacaaaggtttaatttcagaacaaagtgttgaagcaaatagtgaagttgctctaaatgatcatcacattaaaatctatgagtcactaggtgtgcgtcaagtttatgtgagtgattttgaaaataaatcttattcatcagccaaaaaagagttggaatctaaaggatttaaagtacaagctactcaagaaaatgatgataaagttaaaaaaggaaatattatatctcaatcacctaaaaataaatctgtagatgaaggttctataattaatttaacagtttcaaaaggcaagtcaggtgaggacgatgatgacagtgatgatagcgatgtgaaatcaacgtctgaaacagttaaagtgccctactcaggtagtaaaggtaaaagccaaacagtagaagtctttataagagacaaagataactctggaaattccgcatctcaaacttttaaaattactaaggataaaacaataagcatacctttaaaaatagaaaaaggtaaaactgcgggatacactgtacgtgttgataataaaattgttgccgataaagatgttggctacgatgactaa

SEQ ID NO: 693 - DNA, 744 bp, Staphylococcus capitis
atgttaaacgcacaatttttcacggatactggtcaacacagagaaaagaatgaagacgctggcggtattttttataaccaaactcagcaacaattgttagttttatgcgatggcatgggtggtcataaagccggtgaagtagctagtcaattcgttacgtatgaacttcaaaaacgttttgaagatgaaaacctcattgaaatccatcaggctgaatcatggttgcgttcaaacattaaagatatcaactttcatttgtataactatgctcaagaaaatccagattatcatggtataggtacaacactcgtgtgcgctattgtttatgacaagcaagttgtggtagctaatgttggagattctcgcgcttatgttattaatcaaagacaaatagagcaaattacaagtgatcattcttttgttaatcatctcgttgtcactggtcaaatttctaaagaagaagcttttaatcatccacaaagaaatatcatcactaaagttatgggaactgacaaacgcgtgtcacctgatttatttgttaaaagaactaacttttatgacttcttgttattaaatacagatggattaacagattatgttagagattacgaaatccaggaggagcttaatcaagatgacacaattgaatcacattgtgaacgtctaatgcgtttagcgatgtcccatgactccaaagataatgtaagtttcatactgtcatcgatagaaggtgacaaagtatga

SEQ ID NO: 694 - DNA, 1095 bp, Staphylococcus capitis
atgattactgcagaaaaaaagaaaaagaataagttcttacctaattttgataaacaatcgatttattctttgcgttacgatgaaatgcagcagtggttgattgatcatgggcaacaaaaatttagagctaaacaaatttttgaatggttatatcaaaaaagagtggatagtattgatgaaatgatgaatctctctaaagatttacgtcaagttttaaaagataattttgcgatgactacgttgacaacagtagttaaacaagaaagtaaagacggaacgattaaatttttatttgaattacaagatggttatacaattgaaactgtattgatgagacatgaatacggtaattcagtttgtgtcacaacacaagtgggttgtcgtatcggttgtacattctgtgcttcaactttaggtggcttaaagcgaaacttagaagcgggcgaaatagtatctcaagtactaacagttcaaaaagctttagatgaaacagatgaacgcgtctctcaaatcgtaatcatgggcattggtgaaccttttgaaaattatgatgaaatgatggatttcttaagaatcgttaacgatgataacagcttaaatattggggcacgtcatattacagtgtccacttctggtataattcctagaatttatgatttcgctgaagaagacatccaaatcaattttgcagttagtctacatggtgctaaagacgaaattcgttctcgtttaatgccgattaaccgagcttataatgttgagaaattaatggaagcaattaaatattatcaggaacaaactaatcgacgtgttacatttgaatatggtttattcggtggagtgaatgaccaactagaacatgcaagagatttagcacatctaattaaaaatttaaattgccatgttaatctaattccagtcaaccatgtacctgaacgtaattatgtgaaaactccaaaggatgatatttttaaatttgaaaaagaattaaagagattaggaatcaatgctacaataagacgtgaacaaggatcagacattgatgcagcgtgtggtcaattaagagcaaaggaacgacaagtagaaacgaggtaa

SEQ ID NO: 695 - DNA, 1308 bp, Staphylococcus capitis
atgatgaattctgtaagagcccatgcattcgaaactatccaacatatattaaatgaaggcgcatatagtaatttaaaaattaatgaagttttatcttccaatatcatcgctgatgttgatcggaatttatttactgagcttgtttatggaacaattaaacgaaaatatacattggattatattctaaaaccttttgttaaaactaaaataaaagggtgggtacgccagcttttatggatgagtatttatcaatatgtttatctcgacaaagttcccgatcatgcgattattaatgaagcagttgatattgctaagcaaagaggtggccatcataatggtaatatcgtcaacggtattttacgttcaatgatgagaagtgaattgcctcattttcaagaaataaaagatgataagaaacgaattgctttagagtatagtttacctaaatggttagttaatcattgggttacgcattatggtcttgtgacgacggaagaaattgctcagtcattattagctcctgtcaagacaacagttagagcgaatatttcacgtggttctgtagatgacattattaataaattggaaaatgaaggattcaatgttgaaaaagatgatattttacctttttgtttgcatgtaagtgggcaaactattgtaaattcaagagcgtttaaagatggttatgtctccattcaagataagagttcgatgatggtagctcatatcatgaagttaggtagagatgataaagtattagatgcttgtagtgctcctggaggaaaggcttgtcatatggcggaaatattatctccagaagggcaaattgatgctacagatatacattcccataaaattgatcttattaagcataatattaaaaaattaaagctagataatattcatgcgttccaacatgatgcaactgaaccttatgatgggctgtacgataaaattttagtcgatgcaccttgtagtggtttaggtgtgttaagacataaacctgaaataaaatatactcagtctcaagatagtattcaatcacttgttgatttacaactacaaatattagagaatattaaacataatattaaacctggtggtacaattacgtattcaacatgtacaatagaacagatggaaaatgagaatgtaatttatacatttttaaaacaaaacgaagagtttgaatttgagcctttccaacaccctgttactggaaagcaagttaagacattacagatattaccacaagattttgactctgatggattctttataactcaaattaaaagaaaggaaagttaa

SEQ ID NO: 696 - DNA, 933 bp, Staphylococcus capitis
atgagtaaaattatatttatgggaacacctgacttttcaactaaagtactagaaatgttaattgcagaacatgacgtgattgcagtagtgacacaacccgatcgtccagttggtcgtaaaaaagtcatgacaccaccaccagttaaaaaagtagcgcttgaacataacattgatgtttatcagcctgaaaaacttaaagattcagaagaacttgaagaattattaacgttagatgctgatttaattgttaccgctgcatttggccagttactacctgagtctctacttaacgcaccacgtttaggagcgattaatgtacatgcttcattactacctaaatatcgtggtggagcacccattcaccaagcaattatagatggtgaagaaaagacaggtataacgataatgtatatggtgaaaaaattagacgctggtaatatcatttctcagaaagcaattaatattgaggaagatgataatgtaggtacaatgcatgataaattaagtttccttggtgcggatttactcaaagatacacttccttctattattaatgaaacgaatgacagcatccctcaagatgactcagaagcgacatttgcttctaacattagtagagaagatgaacgaattaattggaatcaaagcgctcaagatattcataatcacatacgtggcttatctccatggccagtagcatataccactatggatgacaaaaatcttaaattatattcatctcacattatctcaggtaagaatggtgatcctggtaaaatcattgaaacgactaaaaaagctatcattattggaacaggttctaatgatgctattgcattaacggaaatgcaacttgctggaaaaaaacgtatgttagtagctaattatcttagtggcgttcaagagtcacttgtagggaagcaattgatatga

SEQ ID NO: 697 - DNA, 489 bp, Staphylococcus capitis
atgacagtaaagaaattggttaagtctacacatccgttactaaaaaaagaaagcaagatcgtgaatcaatatgatgaccagttaaaatcattgttaaaggatttggaagatactctatatgaagaagaggctgctgcaattagtgcaccacaaattggtgtgaatcaacgtgttgcattaatcgatatggaacttgaagggcttcttcaattaatcaacccagtcataaaaagttattctgatgaggaaattacagaccttgaaggttcagtttctttacctaatgtttttggtgaagtaactagaagtaaaatgattgttttacaatgcaatgatgtaaatggaaatcaagttgaattgactgcttatgatgatgtagctcgaatgatattacatatggtagatcatttaaatggtatcctttttacagataaagcgaatcgtattttaaatgaagatgaagtggaggcatattttgaaaatgagtaa

SEQ ID NO: 698 - DNA, 204 bp, Staphylococcus capitis
atggaagtaaataaagtgatatatattttattagctgtttttctagggagcttcggcatccataaattttacgctggtaagtcattccagggtattatgcatcttttattctgttggacagccattcctcatattttagctattatcagtgccattttaactctattcagaccagctgatgaaaatggtaatgttacaatgtaa

SEQ ID NO: 699 - DNA, 2409 bp, Staphylococcus capitis
atgattgcaaaagtaattgttgatataccatccaagagtgttgattttaaatttgattatattgtgccaactcatttagaaagtgtagttcaggttggtgtgcgtgtaattgttccatttgggcctcgtactattcaaggttacgtgatggatattcaagataagccagatgaagatgttaacatctccaagcttaaagctattaaagaagttcaagatattcaaccagagctaactacagagcttgttcaattaagcgaatggatgagtcattatcatgtcaccaaacgtatatctgtacttgaagcaatgttgccaagtgcaataaaagcaaaatataataaagcttttgaaataattaagggaaatgatttatctgaaacaattttgaagaaatttaataaagatggtcattatttatacaaagacgcgcaacataataatgatttagacgacatgctttctctaatgatagagggattggtacaagaagtcactttattatctcaaaatattaagaagaaaacacaaagagcaattgctataaaagaagaattcaatggtgatgatgttctagctcgacttgaaaagtatgcgaaacaatatgatttatacgctttcttattagaagaatcgcatcgtaccatatttttaaaagagatagaagatattgggttctctaagtctagcttagattctctaattaaaaagggctacgttgaaaaatatgatgctgaggttaaccgtgatccatttgcgaatcgtatatttgaacaagaagataaacgtcaacttaccactgatcaacaacttgcttatgaagctgttaaaaataaaattgatcatgatgaatctagaacatttttactacatggtgtaacaggttcaggtaaaactgaagtttacctacaaaccatagaagcagttttaaacaaaggtaaagaggcgatgatgcttgtaccagaaattgcacttacgcctcaaatggttttacgatttaaacgtcgttttggagatgatgttgctgtacttcactcaggattatctaatggtgaacgttatgatgaatggcaaaaaatccgtgacgggcgtgcacgtgtaagtgttggtgcacgttcgagtgtgtttgcaccttttaaaaatttaggaattattattattgatgaagaacatgaatctacatataaacaagaagattatccaagatatcatgcgagagatattgcacagtggcgtagtcaatatcatcattgccctgtcatactcggaagtgcgacaccaagtttagaaacatatgcaagagcggagaaagatgtttacgaattattatcattaccaaatagagtgaatcaacaagcactacctcatattgatattgtagacatgcgtgaagaattaagcgaagggaatcgttctatgttctccaatgcgcttaaagaagctatacaacaacgcttaaataaaaaagaacaaatcgtacttttcttaaatagaagaggatatgcttcatttatgttatgtagagattgtgggtacgttccgcaatgccctaactgtgatatttcattgacatatcacaaaacgagtgatcaactaaaatgtcattattgtggttatcaagaaacaccacctaatttatgcccaaattgtgaaagtgatcatattagacaagtaggtacaggaacacaacgtgtagaggaattattatatcaagaatttccagaatcaagaattatacgaatggatgtagatacaacttctaagaaaggtgcacatgaaagattattaaatgactttgaagcgggtaaaggggatatcctcttaggtacacaaatgattgcaaaaggtttagattatcctaatatcacattagtcggagtgttgaatgcagacaccatgcttaatttgcctgattttcgggcaagtgaacgaacgtatcaattattgactcaagtttccggtcgtgctgggcgccatgaaaaagagggtcaggtcatcatacaaacatataatccggaacattatgctattgaagatgtgaaacttaacgattacctcacgttttatcaaaaagaaatgaactttcgtaaactaggtaaatacccaccttattatttcttaatcaattttacaatttctcatagagatatgaaaaaagtgatggaagcgtcaaaacacattcaccaaatattattgcaacatttaagtgagaaagctttagtattaggcccatctcctgcagcattatctagaataaataatgaataccgttttcaaatattagtaaagtataaaagtgaaccacaattacatcaggcacttcaatatttagatgattactatcatgaccagtatgtaaaagaaaaattagcacttaaaattgatattaacccacaaatgatgatgtaa

SEQ ID NO: 700 - DNA, 1200 bp, Staphylococcus capitis
atgaaacacattttattagctgtaactggtggcattgcagcatataaagcgatagatttaacgagtaagctaacacaagcgggttatgaagtgagggtaatgctttctaaccatgcacaagagtttgtcacaccactttcatttcaagcaattagcagaaatccagtttataccaatacttttaaagaagaaacaccagaagaaattcaacacgtgtcattaggtgactgggcagatgcaattattatagcgccagctacagctaatacaattgcgaagttaagtgttggcatcgctgacgacattattacatcaacattacttgctactgaaacaccgaagtttgttgcaccagcaatgaatgtgcacatgtatgagaatcctcgtactcaacataatattgaagttctcagaggagatggctatcaattcattgaaccaggagatggctatttagcttgtggttatgtagcaaaaggccgaatggaagaaccattgcaaattgtgtccgtgattaaccaatttttcaacaatgataaagtttcgtctgatagttcattttcaggaaagagagctttagttactgcaggtcctacggttgaagtgattgatccggtgagatatgttacaaatcgttcttcaggtaaaatgggttttgcaatagctgaggctcttagagataaaggagctgaagtaacactcataactggccctacgcagttaactgatcctacgggtataaacgtgatacatgttcaaagtgcagaggatatgtttaatgccgtaaaagaaagatatgatacacaagatattgtttttaaagcagcggctgtttcagactatacaccctcagaagtgcttgaacataagatgaagaaacgtgaaggggatttatctgttaccttcaagcgtactactgacatcttaaagtatttaggtgataacaaaaaacatcaatacttagtaggcttcgctgcagaaactcaaaatattgaagcatatgcgcaagataaattagcgcgtaagaatgctgatgtcattatctcgaataatgtaggtgaccaatctataggatttagttctgatgataatgaattgatgatgcattttaagaataaagatgtggttagtataaagaagggtaaaaaagtagaattagctaaacaaattttagatgaattagaaactaggtggcaatga

SEQ ID NO: 701 - DNA, 213 bp, Staphylococcus capitis
atgttaaatccaccgttaaaccaacttactgcaaaaattaattctaaatatcttatcgcaactactgccgcgaaaagagcgcgcgagttagacgaaaaacatgaaacagcacttattgaaaattatcattcagctaaaccagttggtagagctttagaagaaattgctgatggtaaaattgaaccagtcattcctgaagaatacttaggttaa

SEQ ID NO: 702 - DNA, 624 bp, Staphylococcus capitis
atggataatgaaaaaggattgctaattgttctttcaggtccttctggtgttggcaaaggaactgttagaaaacagatttttgatgatcccactacttcatataagtactctatatcaatgactactcgtaacatgcgcgaaggtgaagtagatggtgtagattactttttcaaaacgaaagagcagtttgaagagttaattaaggacgatcaatttattgaatatgcggaatatgtaggcaattattatggtacgccagttcaatatgttaaagatactatggatcaaggttacgatgttttcttggaaatagaagttgaaggcgcaaaacaagtaagaaaaaaatttcctgatgcattgtttatcttccttgcgccaccaagtcttgacgacttaagagagcgtttagttggcagaggcactgaatcagatgagaaaattcaaagtcgtgttaacgaagcacgtaaagaagttgaaatgatgaatctatatgactatgtagtcgtaaatgatgaagttgaacttgctaaaaatcgaattcagtctatagtagaagctgaacatttaaaaagagagcgcatcgaagctaaatatagaaaaatgttattggaggcaaaaaaataa

SEQ ID NO: 703 - DNA, 1698 bp, Staphylococcus capitis
atggcatatgatggcttattcactaaaaagatggttgagtcacttcaaagtttagtttcaggccgtattcataaaatcaatcaaccggaaaacgatactattattatggtagtacgacaaaatcgcaaaaatcatcaattactattatcaattcaccctagcttttcaaggttacaaattactgataaaaaatatgataacccatttaatccacctatgttcgcacgtgtctttcgtaagcatttagaaggtggctttatagaaaatatacgccaaattggcaatgaccgtcgcgttgaaattgatataaaaagtaaagatgaaatcggcgacacaatgcatcgtacaattatattagaaattatgggtaaacacagtaaccttattcttgtagatgaaaatcgtaaaattattgaaggatttaagcatttaacaccaaatactaaccaatatcgtacggtaatgcctgggtttgaatatgaagctcctccaagccaaaataagttaaatccttacgaaatttctggacaagaggctctaaaatatattgattttaattcaggtaaaatttctaaacaattattaaattcatttgaagggtttagcccacttattacaaatgaaatagttagtcgccgacaatttatgacgcaagatacgctacctgaagcatatgatgaagttatggctgaaactcaattatctccgacccctgtttttcataaaaatcatgagacaggcaaggaagatttttattttatgaaattaaatcagttttatgatgatgtagtagaatatgattcacttaacgatttactcgatcgttattatgatgctcgaggagagcgagaacgtgttaaacaacgtgcaaatgatttagtaagatttgtacaacaacagttgcaaaaacaacaaaataaattaagtaagttaattgatgaatatgagagtgctaaggataaagaaactcaacaactttatggtgaattaatcactgcaaacatttacagaattaaacaaggtgatgaatcggtaacagcactaaattattatactggtgaagaggtaaccattccgctcaatccgaccaaatcaccttcagtaaatgctcaatactactataagcagtataatcgtctaaaaacacgagaacatgaattagatcatcaaatacaattaacgaaagaaaacattgattacttttcaaatattgaacaacaattagaacatattactgttgacgatatagatgatattcgtgacgaattagctgaccaaggtttcatgaaacagcgtaaaaatactaaaaagaaaaagaatgcgcaaattcaactacaaacgtatcgctcaagtgacggagatacgatcttagtcggtaaaaataataagcagaatgactacttaacaaataaaaaagcacaaaaatctcatatatggttccatactaaagatataccaggttctcatgtcgttatcttaaatgatagtcctagtgatgaaacaattaaagaggctgcaatgttagctggttacttctctaaagcaggaaattctggtcaaattccagtggattatacagaaattagaaatgttcacaaaccttcaggtgcaaaacctggctttgtgacatatgataatcaaaaaacattatatgcaacacctgactatgataaaattcaacaaatgaaagaatcttaa

SEQ ID NO: 704 - DNA, 402 bp, Staphylococcus capitis
gtggaaatacctaaaataacaacatttcttatgtttaacgaccaagctgaagaagcaattaagttatatacaagtttattcgaggatagtgaaatattgacgatggttaaatatgatgaagacggccctggtactccaggatcagtacaacactctatctttactttaaatggtcaagtatttatggcaattgatgctaataatggtgaagaattacctatgaaccctgccatgtcattatatgtcactgttaaggatgctatggaaatggaacgtttatttagtggtttgaaaaaagaaggcgctattctaatgcctaaaactgaaatgccaccttttagagaatttgcatgggtgcaagacaagtttggcgtgagtttccaactcgctttaccagaataa

SEQ ID NO: 705 - DNA, 219 bp, Staphylococcus capitis
atgactcaaagagatgaaaataatcatctttatattacgatgaagcattgtaatgattttctaaaaagacaagatgattatagaaccccaaaaaacttaaaaagtattgacgaaagtgttcgagatttctcagaatcagtaaatgataatgcgtttacacattctggtgatatatttaaaagagctaaagaaagtttacgtcataaaggtcaattatag

SEQ ID NO: 706 - DNA, 612 bp, Staphylococcus capitis
atggctaaagaaattgcaaaagctttattagatattgaggcagtctccttgtctccgaatgatttatatacttggagttctgggattaaatctccaatctattgtgataatcgtgtcactctaggttacccgttagtgcgtaatgctattagagatgatttagcacgcttaatagatgaacatttttcagaggtagaaattgtgtctggtactgcaactgcaggtattcctcatgctgcttatatttctgaaaagatggaactaccaatgaactatgttcgttctaaaagtaaaagccatggtaaacagaatcaaattgaaggcgctaaaagcgaaggtaaaaaagttgtagttgttgaagatttgatctctactggtggttcttcagtaacagctgtagaagctttaaaagaggctggtgctgatgtacttggtgtggtagcaattttcacgtatggactgaaaaaagcagatgatacattccacaaagcaggaattccgttttatactttaagtaattataatgaattaattgaagttgcgagggaagaaggaaaaatttctgaagatgatattcagactttagttgattggagagacaacttgtcataa

SEQ ID NO: 707 - DNA, 693 bp, Staphylococcus capitis
atgagaaatttaccaatcattgcattagattttaaatctgcagaagaagtaaatacctttttagatcaatttaatgaaccattgtgtgtcaaggttggtatggaattgttttaccaaacaggtcctggacttattcaatctctaaaaaagagaggccatgatatctttttagatttaaaattgcatgatatccctaatactgtaagtaaagctatggaaggattagcgcgattagatgtagatttagttaatgttcacgcagctggcggtgtgaaaatgatggaagaggctaaaaaaggtttaagtaaaattaatccaaatactaaaattattgcagtaacgcaacttacctctactactgaacaacagttgcatgaagagcaaaatattcatacgactattgatgaagcggtactgaattatgctcgccttgctcataaagctggtttagacggagtggtgtgctcaccacttgaagctgagttaatttctcgagaattaggtcctgaatttatgaaagtcactcccggaattagacctaagggcgcggctcaaaatgatcaacaacgtattactactcccgaagaagcacaaactttaggatctacacatatagtagtcgggagacctataacacaaagtgatcgtcctgtagagagctatcaaaatatcaaagaaagttggttaggttaa

SEQ ID NO: 708 - DNA, 3174 bp, Staphylococcus capitis
atgcctaaacgcgacgatattcaaacaattttagtagtaggttcaggaccaattattataggtcaggctgcagaatttgattatgcaggtacgcaagcatgtcttgctcttaaagaagagggatatagagtcatcttagttaactctaaccctgcgacaataatgactgataaagaaattgctgataaagtctatattgagccgctaactcatgattttattgctcgtattattcgtaaagagcaaccagatgcattgttacctactctaggtggacaaactggtttaaatatggcaattcaactccacgatagtggcgtacttgctgcgaataatgtgaaacttttaggaactgagcttgaatctattcaacaagctgaagaccgagaaatgtttagaacattaatgaatgatttaaatgtccctgtacctgaaagtgacattgttaatactgtagaacaagcctttgaatttaaagaacaagtgggttatccactcatcgttcgaccagccttcactatgggcggtactggtggtggaatctgctacaacgatgacgatttaaaagaagttgtaagtaatggattacattacagtccagctacacagtgtttaatcgaaaaatcaatagcaggttataaagaaattgaatacgaagtcatgcgtgataaaaatgataatgccattgttgtttgtaacatggaaaatatcgatccagttggtatacatacaggggattccattgtcgtagctccaagtcaaacgttgtcagatgttgaataccaaatgttacgtgatgtgtcattaaaagtaattagagcattaggtattgaaggtggctgtaatgtacaactagccctagatccacattctctcaattattacattattgaagtgaatcctcgagtgtctcgttcatcagctttagcttctaaagctacaggttatccaattgctaaattagcagcgaaaattgcagtaggtttaactttagatgaaatgttaaatcctattactggaacatcttatgcagcttttgaaccaacattggactatgttatttctaaaattcctcgtttcccatttgataaatttgaaaaaggtgaacgtgaactaggtacacaaatgaaagcaactggagaagtcatggcaattggacgtacatacgaagaatcattacttaaagcgattcgttcacttgagtatggtgcgcatcacttaggtttaccaaatggggagagctttgatttagactacattaaagaacgtattggtcaccaagatgatgaacgactattctttattggagaagctattcgccgaggtacaactttagaagaaatccataaaatgacgaaaattgattatttcttcctaaataaattccaaaacatcatcaacattgaacacgaattaaaagaacatcaaggtgatttggaatatcttaaatatgctaaagattatggctttagcgataaagtaatcgctcatcgttgggatatgaatgaagacgatgtttaccaattacgagtgaaaaatgatattaaacctgtatataaaatggttgatacatgtgcagcagaatttgaatcgacaacgccttattattatggaacgtatgaatctgaaaatgaatctgttgtaacggataaagagaaaattctcgtattaggttcaggtcctattcgcattggtcaaggtgtagaattcgattatgctactgtacatgctgtatgggcaattcaagatgcaggctacgaagctattattgtaaacaataatcctgaaactgtatctactgacttctcaatatcagataaattatactttgaaccattaactgaagaagatgtaatgaatatcatcaatttagaacaacctaaaggtgttgttgttcaatttggtggacaaactgccatcaatttagctgacaaacttgctaaacatggtgttcaaatcatgggaacttctttagaagatctaaatcgcgctgaagatagaaaagaatttgaggcgttactacgtcagattgaagtgccacaacctcaaggtaaaacatctacatctcctaaagaggcactcgaaaatgcgcgtgaaattggttatccagttgttgttcgaccatcttacgtattaggtggccgtgctatggaaattgtagataatgaccaagaattagaaaactatatgacacaagcagttaaagcaagtccagaacatccagtacttgttgaccgttatttaacaggtaaagaaatcgaagtagatgctatctgtgacggagatacagtgattattcctggtattatggaacatattgaacgtgctggtgtgcatagtggtgactcaattgcagtatatccaccacaaacgttaactaaagaagagattgatacgctcgaagattatacaattaaattagctaaaggattaaatattattggcttaatcaacatacaatttgtcatcgctcatgatggtgtttatgtgttagaagttaatccacgttcaagtcgaacggttccattcttaagtaaaattactgacattcaaatggcacaacttgctatgcgttctattatgggacataaattagctgatttaggttatcatcaaggaattcaaccatactctgagggcgtcttcgttaaagctcctgtatttagctttaataaattgaagaacgtagacattacgcttggacctgaaatgaagtcaactggagaagttatgggtaaagatcttactcttgaaaaggcgctttacaaaggacttacaggtagcggtgtagaagtaaaagatcacggaacagtattaatgacagtaagtgataaagataaagatgaaatcgtgaaaatagcacatcgcttaaatgaagttggctataaaattttagcaacaaaaggtacagctaaaaaacttgaagacaatcaaatacctgttgaagttgtaggtaaaatcggtggcgaagatgatttacttactcgtattcaaaatggtgaagtacaaatcgttattaatacgatgacgaaaggtaaagaggttgaacgtgatggattccaaatccgccgtacaactgttgaaaatggtgtaccatgtctgacatcacttgatactgcaagtgcattgactaacgtaattgaaagtatgactttcacgatgagaaatatgtaa

SEQ ID NO: 709 - DNA, 1101 bp, Staphylococcus capitis
atgcttgaaaaacgttatcttgtactggaagatggctcttattatgaaggatatcgcttaggttcagatgatctttcaataggcgaaatcgtatttaatactgcaatgacggggtatcaggaaactatttctgacccctcatatacaggtcaaatcattacatttacttacccattaattgggaattatggtattaaccgtgatgactttgaatcattgacaccgacattgaatggtgtagtagtgaaagaggcaagcacacatcctagtaactttagacaccaaaaaacattacacgaagtacttgttcaatatcatattccaggtatttctggcgtggatacaagaagtatcacacgtaagattcgccaacacggtgtattgagagctggatttacagataataaagatgacattcaagcgcttgtagaacatttaaaaactgctgaattaccaagagatgaagttcaaacagtctctactaaaacaccatacgtatcaacaggttcagatttaagtgtggttttactcgactttggtaagaaacaaaacattgttcgtgaactaaatacacgtggttgtaatgtaacagttgtaccatacaatacaacagcagaagaaattttaggcatgtcaccagatggagtgatgttatctaacggtcctggagacccagatgaagttgaagttgctatcgaaatgatcaaaggtatcttaggtaaaataccattcttcggaatatgcttaggacatcaactttttgctttatcacaaggtgccacttctttcaaaatgaagttcggtcatcgtggtgctaatcatcctgttaaggatttaagaacaggtaaagtagacatcactagtcaaaatcatggctatgctattgatcgtgattcacttgaaaatactgatttagaggtgacacatattgcgcttaatgatgggacagttgaaggtttgagacataaacaattacctgctttctcagtacaatatcatcctgaagcaagaccgggcccaagcgattcaaactatttattcgatgagtttataacgatgatgaatgagttcaaagaaaaggagcgtcattttaatgcctaa

SEQ ID NO: 710 - DNA, 1278 bp, Staphylococcus capitis
atgaaattaatcaaaaatggaaaaatcttaagaaacggaattttaaaagatactgagattttaattgatggtaaacgtattaaaacaattagtagtaaaatcaattcttcatctcctaatattgaagttatcgatgctaaaggaaatttaatcgcaccaggatttgttgacgttcacgtgcatttacgtgagccaggtggggaacataaagaaacaattgaaactggtacaaaagcagctgcaagagggggattcactactgtatgcccaatgcctaatacaagaccagttccagattcagttgaacatgttagagaattaaggcaaagaatttcagaaacagctaaagtacgtgtgttaccttatgcatctattactaaaagacaagctggaaaagaacttgttgatttcaaagagttagcactagaaggggtattcgcatttacagatgacggtgtaggtgttcaacaagctagtatgatgtatgcggctatgaaacaagcagcacgcgttaaaaaaccaatcgtagcacattgcgaagataatagcttgatttatggtggcgcaatgcataaaggtaaacgtagtgaagaacttggtattccaggtataccaaacattgctgaatcagtgcagatcgctagagatgtcttattagctgaagctacaggatgtcattatcatgtatgtcacgtttctactaaagaaagtgtacgtgtgattagagatgctaagaaagctggcattcacgtcactgcagaagtaactccacatcacttacttttaactgaaaatgatgtaccaggcgatgatgcaaactataaaatgaacccaccattaagaagtaaagaagatagagaagcattattagaaggtttattagatggaacgattgattgtatcgcaactgaccatgcgccacatgcaaaagaagaaaaagatcaaccaatgactcaagcaccgtttggtatcgtgggtagtgagacagctttcccattattatacactcactttgtaagaagaggtaattggtcacttcaacagttagtggattatttcactattaaacctgcaacaatctttaatttaaactatggtaaattgcataaagatagttatgctgatttaacaattatagatttaaataatgataaagaaatcagaagtgaagacttcttatctaaagcggacaatacaccatttatcggtgaaaaagtttatggtaacccgattttaacaatggttaaaggcgaagtagtatttgaggaggaaaaatag

SEQ ID NO: 711 - DNA, 882 bp, Staphylococcus capitis
atgaaaaatttattatctatggaacatctatcaacggatgaaatatatgatttagttacaactgcaagccagtataaatcaggtgaaagagctttaccgcagtttaatgatacgtatgtaacgaacttattctttgaaaattcaacaagaacaaagtgtaattttgaagtagctgaactcaaattaggattaaaacaagtgagttttgaaacgagtacctcttcagttaaaaaaggcgagtcgttatatgatacttgtaaaacattagaaagtattggagttaatttattagtcattcgtcactctcaaaatgcttattacgaggaattagaaaacattaatatacctatagcaaacgcaggagatggaagtggtcaacatcctacgcaaagtttgctagatataatgactatttacgaagagtacgggtcatttgatgggttgaatgtgttaatttgcggtgacattaaaaactctcgagtagccagaagtaattatcatagtttaagagcattaggtgcaaatgtcatgttctctagtcctgaagaatgggtagatgagacattagaggcgccatacgttaatatagatgatgtgattgatcaagtcgatattgtgatgttgttaagagttcaacacgaaagacacggcattgctggtgaagctaattttgcggcagaggaatatcatcaacaatatgggttaactcagtcaagatatgataaattaaaagatgaagccattgtcatgcatcctgctccagtcaatcgaggagtcgaaattaaaagtgatttagtagaagcacccaaatcacgtattttcaaacaaatggaaaatgggatgtatttaagaatggcagttataagcgcgcttttaaaatag

SEQ ID NO: 712 - DNA, 1308 bp, Staphylococcus capitis
atggaaaatgaacaaatgtttgagcgcactgtgaagccagtgcttgatgttagagacaaacctaaaccagcacaatgggcattcttaagtttgcaacatttatttgcaatgtttggctcaaccgtccttgtaccatttttaacacatttaccaatatcagcagcattacttgcttcaggtattggaacacttatttacatattaatcacaaaggctaaaatacctgcttatttaggttcaagtttcgcctttatcacaccgattattactggtctaagtacccatagcttaggagacatgttagtggctctgtttatgagtgggttgatgtacgtcattataggtttacttattagattaagtggaactggttggctaatgcatttactaccaccagttgtagtaggaccagttattatggttatcggattaagtttggcacctacagccgttaatatggccatgtatgagaattcttcagatatgaaaggttataacttaagttatttacttgtagctctaattacactcatagtcacaatcgtagtacaaggtttctttaaaggatttttatcactgatacctgtattaattggtattgtagttggttatattgtttctattttcatgggcttagtaaaatttggacctattgcccacgccaaatggttagattttccacatatatatttaccattcaaagattacacaccatcattccatttaggattggtattagtcatgatacccgttgtattcgtcacagtaagtgaacacatcggtcatcaaatggttatcaataaaatagtaggccgtaatttctttaaagatccaggattggataaatcaattattggagatggggtatctacaatgtttgcgagtattatcggtgggcctccaagtacaacctatggtgaaaatataggcgtactagcgattactaaaatatatagtatttacgtcattggtggagcagcagttatcgctatcattctagctttcataggtaaatttactgcgttaatttcatcgatacctactcctgtcatgggcggtgtttcgatactattatttggtattattgctgctagtggattgcgtatgatagttgaaagcaatgtagatttttcaagtaaccgtaacttagtcattgcatcagtaatacttgtagtaggtattggtaatttacttatcaatttaaaaggtattggaattaatttacaaattgaaggtatggcattatccgcactttctggaattattttaaatttaattttgccaaaagataaaaaagaagaaaattaa

SEQ ID NO: 713 - DNA, 528 bp, Staphylococcus capitis
atgtctgaacgaatcattttagatgaagccgcgatacagcgtacaatcactcgaattgcacatgagattttggaatataacaaaggcactgacaatttagtgcttttaggaattaagacacgaggtgcatttttagcgaatcgtatacaagaaaagattcattctattgagcagtgcaatgtaccaaccggcacaattgatattacacatttccgtgatgatattgataatgtcacccagcaatcagacatcaaagcatttgatatcgatgttgacattactgataaagtggtgattatcgttgacgatgttttatatactggtcgtacagtaagagcttcattagacgctatattgctacactcacgacctgttaaaattggacttgcaacacttgttgatagaggccatcgtgaacttcctatccgagcagactttgttggaaaaaacataccaactgcgcgtgatgaatccgtttcagtttatttaaatgaaattgatcatcagaacgcagtcataataaaataa

SEQ ID NO: 714 - DNA, 918 bp, Staphylococcus capitis
ttggaaacacatgaatttaagatcacagatgaaacacaagttggtcaaagaatagataaatttctatctgagtcgaatgatgcttggtctcgtagccaacttcaagattggattaaagaagatttagttaaagttaatgataaagtgattaaatcaaattataaagttaaattaaatgatcatatcattgtcactgaaaaggaagttgtagaagcagacattcaaccagaagatttagatttagatatctattatgaggatgatgatgtggcgattgtttataaacctaaaggtatggtagtacatccatctccaggtcattacacgggcacacttgtgaacggcttaatgtatcaaatcaaaaatttatctggtattaacggtgaaatacgtcctggtattgttcaccgtattgataaagatacttctggtttattaatggttgctaaaaatgacatcgctcatcgaggtcttgtcgaacaactaatggctaaaagtgttaaacgtaaatacactgcgttagttcacggtaatattccgcatgattatggtacggtagatgctccaattggtcgtaataaaaatgaccgtcaagcaatggctgtagttgatgatggtaaagaagctgtaacgcatttcaatgtaatagagcattttaaagactatactttgatagaatgtgaattggaaactggacgaactcaccaaattcgtgtgcatatgaaatatattggctacccgcttgtgggtgaccctaaatatggacctaagagaacattagatattggtggtcaagcattgcatgcgggtgtgattggttttgaacatccagtaacacatgagtatattgaaagaagtactaatttgcctaatgattttaaagatttattagaagatattcgacgtagagatgcttaa

SEQ ID NO: 715 - DNA, 477 bp, Staphylococcus capitis
atgaaaaagaaatattatattggaatctcacttcttttagcatttttaattataatttttgaccaaatttcaaagtggataattgcttcatccatgaaaattggcgattcctacgaagtaattcctcattttcttaatattacttcacatagaaataatggagctgcttggggaattttaagtggtaaaatgggatttttctatattatcacattagttattttagtagttctcgtgctgttttatattaaagaagctaaatataatttatttatgcaagttgcaattaccttactctttgctggtgcgttaggtaactttattgatcgtgtatttaatggtgaagttgtcgattttatagatacaaacatctttggttatgatttcccaatctttaatattgcagattcaagtttaactataggtgttatcttcgtaattatcgcattattaaaggatacaactaaaaagaactaa

SEQ ID NO: 716 - DNA, 801 bp, Staphylococcus capitis
atgatgtttcatagtaaagatgcacatttcgttaatggaataataataaatgtacgtgatatagaagttataagagccttttatgaagaagttttaggatttaattttgttaatgaatctatgaaggctgttcaatataaggttggagcaaacaatcaatatataacttttaatgaaattcaaaatggtagagagccactcatgtttgaagctggcttatttcatataggaattaagttgccagaactatcctctctagctgatttattagtacaattaagtgattttgagataccggttaatggaggagaacaaagtgttggaacatcactctttgttgaagatcctgaaggtaatgcgcttaaattttacgtcgattatgactttgaaatgtggaaatacgatgaagataatagagtgaaattggatattagaccaattaacgtacctcgattgttaaaagaagtttctaatgaaaaatggcaaggtgtacctaatgaagcgaaattaggtcatttgcatcttaaaactattagaatctcagaaattaaatcatattatcttaattatttcggtttagaagagtcagcttatatagacgatttctcattatttttgtcctcaaatcattattacaatcatttagcaatgaatcagtggttatcagggaccaagcgtgttgataatgaaaacacatatggtttagcgttaatagattttcactatcctgaatctacgcatttaaatttaaaaggaccagatggcttgtacttcaggtttaatcgaataaaagatgaataa

SEQ ID NO: 717 - DNA, 2751 bp, Staphylococcus capitis
atgaatttcaaagatactttattaatgcccaaaactgactttcctatgagaggcggtttacctaataaagagcctcaaattcaagaaaaatgggatgcagaagatcaatataaaaaagcattagaaaaaaataaaggtaatcaatcttatatcttgcatgatggcccaccatatgcaaatggtagtttacatatgggacatgcacttaataaaattattaaggattttatcgtccgttataaaacaatgcaaggattctatgcaccatatgttccaggctgggatacgcatggtttaccaattgaacaggctttaactaaaaaaggcgtagaccgtaaaaaaatgtcaattgctgaatttagagaaaagtgtaaagaatttgcacttaagcaagtagatattcagaagaaggatttcaaacgtctaggtgttcgcggtgactttgataatccttatattacacttacccctgaatatgaagcagcacaaattcgtttatttggtgaaatggcagacaaaggtttaatttataaaggtaagaaaccagtttattggtcaccttcaagtgaatcttcattagctgaagcggaaattgaatatcatgataaacgttctgcctctatttatgtagcatttaacgttaaagacgataaaggagttgttgattcagatgctaagtttattatctggactacaacaccttggacaattccttcaaacgtagctatcactgttcatccagaacttaagtatggccaatacaatgtagaaggacagaaatttattgttgctcaagccttatctgagactgtagctgatgctttaggttgggataaagatacaattcaacttgaaaaagaatttacaggtaaagagttagaatatgttgaagcgcaacatccattcttagatcgtacgtcactagtgattaatggagatcacgtcacaacagatgcaggtactggatgtgttcatactgctcctggacacggggaagatgactacatcgttggacaaaaatatgacttacctgtcatcagtcctctaaatgacaagggtgtatttactgaagagggcggccaatttgaaggtatgttctatgacaaagcaaataaagctgtcactgacttattaactgaaaaggacgcacttcttaaattagactttattacacatagctacccacatgattggcgtacaaaaaaaccagttatctttagagcgacacctcaatggtttgcttcaattaacaaagtaagacaagatatcttagatgcgattgaagagactaactttaaagtagattggggtaaaacacgtatctacaatatgattcgtgatcgtggcgaatgggttatttctcgtcaacgtgtatggggtgttccattaccagtattttatgctgaaaatggtgacatcatcatgacgaaagaaacagttaatcatatcgctgatttattcgcagaacatggatcaaatgtgtggtttgaacgtgaagcgaaagatttattaccagaaggatttacacatcctggaagtcctaatggtgaatttactaaagaaacagacatcatggatgtatggttcgattcaggttcatctcaccgtggtgtattagaaacaagaccagagttaagtttccctgcagatctttactttgaaggaagtgaccagtatcgtggttggtttaactcttcaataactactgctgtagcaactcgtggacaagcaccttataaattcctactttcacacggtttcgttatggatggtgaaggtaaaaaaatgagtaaatcgcttggtaacgtcatcgttccggaccaagttgttaagcaaaaaggtgcagatatcgcacgtctatgggtaagtagtactgattatttagcagacgtccgtatttcagatgaaattttaaaacaaacttctgatgtttatcgtaaaataagaaatacactcagattcatgttaggtaatattaatgattataaccctgagacagatcgtatccctgaaaatgaattactcgacgtagatcgttatttacttaatcgtttacgtgaattcacagctagtactatcaacaactatgagaattttgattaccttaacatctatcaagaagttcaaaactttatcaatgtagaattaagtaacttctatttagactatggtaaagatattctttacattgaggagaaagactctcataaacgtcgcagcatgcaaacagtgctttatcaaatcttagtagatatgacaaaattattagcaccaatcctagtgcatactgcagaagaagtatggtcacatacacctcacgttaaagaggaaagtgttcatttagcagatatgccagaagttgttgaagtagatagagaattattagataaatggaatactcttatggatctacgcgacgacgtaaaccgtgctttagaacaagctcgtaatgaaaaagtcattggtaaatcattagaagctaaagtggttattggcaataatgaatcatttaaagctgctgaattcttacaagaatttaatgatttacaacaattattcatcgtttctcaagttgaagttgttgattcagttgaaaatggtgaaacatataaatatggtgatattcgcatcgaacacgcagaaggcgaaaagtgtgaaagatgttggaactatagcgatgaattaggttctgttggagaacttgatcatctatgtccacgttgccaagaagtagtgaaaacattagtttaa

SEQ ID NO: 718 - DNA, 654 bp, Staphylococcus capitis
atgcctttcacaccaagtgagattaaaaataaagagtttagtcgagtgaagaatggtttagaacccactgaggttgctaattatttagatcaattaagcactgagattgaacgacttaaagaagataaaaagcaacttgaaaaagtagttgaagatagagacactaatatcaaatcttatcaagacgtgcatcagtctgtaagtgatgctttaattcaagctcaaaaagttggagaagaaacaaaattagctgctaataaagatgccgaagctacacttgctaaagctcaagttcaagctgataaaattgtaaatgatgcgattgaaaaagcacgtcgtttatccttccaaactgaagatatgaaacgtcaatctaaagtgtttagatctcgtttccgtatgctggtagaagctcaattagatttacttaaaagtgaagattgggattacttattaaattatgatttagatgctgaacaagtgactttagaagatattcatcacttaaatgataatgatcttacaccagaagaacgcgctatgaaggaaagccaatctcaagcagagaataatagtggaacaacttctacttctgaatcttcacgtacgtctaataatcaatcagagacttctacaactcatagtaatttataa

SEQ ID NO: 719 - DNA, 789 bp, Staphylococcus capitis
atgttaggagtgtctcacatcgatatatatcaacattttagaagagaagagcaagaattgatagatcaattaatagataagtgtaatcaagctgaaaatcactatgcgcctgtgctcactgcttttttagatccgagaggccaatacatcttagaagtcatcgtggggagttatgaaatgttaaaagtcaacttttatgggggtccctacgctgagagaaaacgtgctatcatagctccaacatattatgaagcacaagtggaagattttgaactgtcactcttacaaatcgattatcctgagaaattcgtttcaattcaacatcaacatgtgttaggcaccttaatgtctttaggtattgagagagaacaattgggagatattatagtcgcggatgatatacagtttgttttgacagagcgtttggaatcttatattatgtttgaattaaataggattaaaggtgccacagttaaacttaattctattcctataaaagatatgatacaatcaaaagagaattggaaaattcacagcacgactgttagtgcaatgagattggatgttgtattaaaagatatgatccataaatctcgtaatatagcaaagcaattaatagaaaagaaaagagtcaaagtgaatcatactataattgatacacctgactttcaattagaacaaaatgacttactttctatccaaggatttggcagagctcaaatcactcaaattggaggaagaactaaaaaagataaactacacattacctatcagacattatttaaatag

SEQ ID NO: 720 - DNA, 291 bp, Staphylococcus capitis
atggatatcggtctacttagtactatattccgatttatattatttttggttcaaatttattatataggaatgattatttatttcttcacgtcttgggttccaagcattagagaatctaaagtgggggaatttcttggtaaaatttatgaaccttttttagaaccatttaggaaaatcattcctcccattggcatcatagatatttcttctatagcagctattatagtattagtattatttcaaagaggtttagtttcaatttttaacatcatacttacacatttatcataa

SEQ ID NO: 721 - DNA, 603 bp, Staphylococcus capitis
ttggctttaaaggatttatttaatggattttttgtagtagaagatgaagaagaagttgaagcaccagaagaacgtgaaacatctcagacacgtgagcgtgcacaagaacgtgatgttgaatcacgaaatgaaaacaatgtaccatcaacgcaatcacaaaacaatgtaaacaaacaaaatgcaatcaaatctgtgcctcaaaagagcacaacaagaaaaggtgcaacttctgaagaaaggaattatcgtatgaataataattcaaagagtaattctcgtaatgttgtaactatgaaccaatcatctcaaaattatgcgacacaagaaagctctaaaatgtgcttatttgaaccacgtgtgttttctgatacacaagatattgcggatgaattgaaaaatagacgtgctactttagtaaacttacaacgcattgataaagtttctgctaaacgtattattgacttcttaagtggaacagtatatgcgattggtggagatattcagcgtgtaggaactgatatattcttatgtacacctgataacgtagaagttgctggaagcataactgatcatatcgaaaacatggagcaacattacgaataa

SEQ ID NO: 722 - DNA, 675 bp, Staphylococcus capitis
gtgagtgtaaaacaaaatttaaaacaaattgaacaagaaataagtgaacatttagaaaaaagttctaattcagcacaccctcacgtgattgcagtgacaaagtatgttacaatagagcgagctaaagaagcttatgaagcaggtattaggcactttggcgaaaatagattagaaggcttcaaagagaaaaaagcagcattacctgatgatgttgtatttcactttattggttctttgcaatctagaaaagttaaagaagtaattaacgaagttgactattttcacgctttagatcgcctgagtttagctaaggagattaataagagagcagaccatgttgtatcttgttttttacaagttaatgtttctggggaagaatctaaacatggtatagcattagacgaagttaatgaatttttaaaagaactgaaagcttatgaaaacatcaaagtaattggtttaatgacaatggcacctctaactgatgatagtgtgtacataaaatcaattttcaatgatttaagacataaaaaagaagaaattcaacaattcaatttagaacatgcaccttgcacagaattatctatgggaatgagtaatgactatcagatagcagttgaagaaggtgcaacctttgtcagaattgggactaaacttgtaggagaagaggagtga

SEQ ID NO: 723 - DNA, 792 bp, Staphylococcus capitis
atgactgaaaagtttataaagaaagaatattatttagattatgatgtaaaacctacttatagtattaagcttggtttcacaactagagagaatggactgagtcattatccaaaacacgcttttaacatggctagatacgtggatgataatcaagctaatattactcaacatcaggaaattcttgcaaatgaaataggcttcaatagaaataattgggttttcccaattcagacacatggaaataaagtcacagaaattactaaagaacatcgaggtatgaacattgaagaattaactgatgacttatatgggttagatggcatttttacttatgattccaatatattattaaccatgtgttatgctgattgtgttcctgtttacttttatagtgagaagcatggttatgtgggccttgcccatgctggatggcgtggtacttatggtgagatcgtaaaagaaatggttagaaaaattgactttgatttaaatgatttacaagtggttattggaccagcaacatctaattcctatgaaatcaatgatgatatcaaaggtaaatttgaaacattaacaattgactcatctaaatatattgactcgcgtgcagcagacaaacatggtattgatttaaaaaaagccaatgctttattacttgaagaagtaggcgtcccatcagataatatctatattactgagtatgctacttctgaaaatttagacttatttttctcttatagaattgaaaaaggtcagactggacgtatgttagcatttataggacgcaagtaa

SEQ ID NO: 724 - DNA, 1188 bp, Staphylococcus capitis
atgttagaatttgaacaaggatttaatcatttagctacattgaaagtcatcggtgtaggtggcggcggtaacaacgctgttaatcgtatgattgaccacggcatgaataacgttgagtttatcgctatcaatacagatggacaagcgcttaacttatctaaagcggaatcaaaaatccaaattggtgaaaagttaacgcgaggtcttggtgcaggtgcaaatcctgaaattggtaaaaaagctgctgaagaatctcgtgaacaaatcgaagatgctatccaaggtgcagatatggtattcgttactgctggtatgggtggcggtactggtacaggagctgctccagtagttgctaaaatcgctaaagaaatgggcgctttaacagtaggcgttgtaactcgcccattcggttttgagggacgtaaacgtcaaactcaagctgccgctggcgttgaagcaatgaaagctgcagttgatacattaattgttattcctaatgatcgtttattagatatcgtagacaaatctacgcctatgatggaagcattcaaggaagcagataatgtgttacgtcaaggtgtacaaggtatctcagatttaatcgctgtatcaggtgaggtaaacttagactttgccgacgttaaaactattatgtctaaccaaggttcagcattaatgggtatcggtgtatcttctggtgaaaatagagcagttgaagctgctaaaaaagctatttcatcaccattattagaaacttcaattgttggtgctcaaggcgtacttatgaacattactggtggagaatcactctcactatttgaagctcaagaagctgctgatattgttcaagatgcggctgatgaagatgtaaacatgatcttcggtacagtaattaatcctgaacttcaagacgaaattgttgttacagtgattgctacaggtttcgaagataaaccgtcatctcaaggtcgtaaagctacaagtactggtttcggttcaagtgttaatagtaattcttctaaccaaagtcatgctactcctaaagaagactcatttgctacaaacacttcaactagctctcaatcttcagaaggcgtaagcgaaagaagtcactctacaaaagatgacgacattcctagctttattagaaatagagaagaaagacgttctagaagaacaagacgctaa

SEQ ID NO: 725 - DNA, 1401 bp, Staphylococcus capitis
atggaggaacattactatgtaagtatagatataggttcatcaagtgtaaaaacgatagtaggcgaaaaatttcacaatggaataaatgtgataggtacaggacaaacctacactagcggtatcaagaatggtcttattgatgattttgatattgcgagacaagcaatcaaagatacaattaagaaggcttcaattgcctctggtgtagatataaaagaagtattcttaaagttacctatcattggtaccgaagtatacgatgaatcaaatgaaattgaattttatgaagatactgaaattaatggaacacacattgaatcagttttagacggaattcgtgataagaatgatgtaacagaaacagaagtgattaatgtctttcctattcgattcgtagttgataaagacaatgaagtttctgaccctaaagaattaattgctagacattcattgaaagttgatgcaggcgttatagctatacagaaatctattttaattaatatgattaaatgtgttgaagcatgtggcgtagatgtattagatgtttactctgatgcatacaattatggttcaattttaaccgctacagaaaaagaattaggcgcttgtgtcattgatattggcgaagatttaactcaaattgctttttatgagcgtggcgagttagtagacgctgattcaattgaaatggctggtcgtgatattacagatgatattgcgcaaggcttaaatactacatatgatactgctgagaagattaagcatcaatatggacatgctttctatgattcagcttcagagcaagatgtattctcagtagatcaaattgatagtgaagaacatgttcaatatactcaaaaagatttaagcgattttatcgaacaacgtgtagaggatatattctttgaagtgtttgatgtgttacaagaacttggacttactaaagtgaatggcggatttattgtaacaggtggttctgctaacttacttggtgtaaaagaattactacaagacatggtaagtgagaaagtaagaattcatactccatctcaaatgggtattagaaaacctgagttctcttctgctatttcgacaatttctagtagtatcgcttttgacgagttattagattatgttacaattagttatcaagataatgaaggatttgaagaggaagttatcgaatctgaagataaagataacgaatctaaatcgagcggttttgattggtttaaacgtaaatcaaacaaaaaagagaatcatgaggaagaacctgaatcacctcgtgaggaaacatatgaagaccgcagagaacatcacgaagatgattatcatcaatcagaaggtaaggacaaagaagaaggtaaatttaaaaaactaatgaaatctctatttgaatga

SEQ ID NO: 726 - DNA, 1416 bp, Staphylococcus capitis
atggatgaaaataataaaaacaaaaatgataaagtttcgcgcattgaagattttactacatctaagaaagacaataatgataaagatgatgtgagtctttttagaagaaataaagattttcgtaatagaaaaagaaaacgtttcggtgacagagttaataacgatgaatattcgaatgaggaaacacaagaaaatgatgttcccgataatgattctccagagatggaaagtactaatgaagataaaaagattcaatccgaaaatgaacatgataaagatagtctaaaccacggtgatgaagcaatacaacatcataaagactctcaaacagagattaatgaagacaatacaaatgaagacatcgaagatatagaagaacaatctcaatcagatagtaaaagtgatgcttctgaatctagtaaagatgagagtggtaaggcgaataaagacgttcatgaaaggaaaagttataaaaaaggttttataaataagatgccttttattaataataatagtgatcacaactcagaaaaagataaaaatgaacaacagaaacctttaacattagaagaaaaaagagcgttacgccgaaaaagacaaaaaagaatacagtatatcattattactgtattagtattattgattgttatattcttactttatatgttcacccctttaagcaagatttctaatgtgaatattaaaggtaataataatgttagtaaaagtaaaatcaataaagagttaaatgttacatctcattcaagaatgtacacatttagtaagaggaaagcaattaaaaatttgaagaagaatcccttgatcaaggatgttgaaattcataaacaattgcctaacactataaatgtaaaagtaactgagtaccaagttgttggtttagaaaaaagtaaagacagttacgttccaattatagaagatggcaaagaattaaaagattacagtgatgatgtttcacatgacggaccaattatcgatggttttaaaggaaataaaaaaacacgaatcattcaagctttatctgaaatgtcacctgaagtaagaagtttaattgctgaagttagttatgctccagagaagaacaaacaaaatagaattgaaatcttcactaaagatgacatgcaagttgtcggagatattactacaatagccgataaaatgaagtattacccgcagatgtcacaatctttaagtagagatgattcaggtaatctcaagactgatgggtatattgatttatcagtgggtgcttcattcataccttatagtggagcaacaggtgctgagtctgaatccgaccagaatgtaacaaaatctacacaacaagaaagtgaagctaaagaagaacttcaaagtgttttaaataaaattaataatcaatcaaaagataataattaa

SEQ ID NO: 727 - DNA, 1350 bp, Staphylococcus capitis
gtgctgaattacacaggattagaaaataaaaatgttctagtagttggcttagctaaaagtggttatgaagcagcaaaattattagctaaattgggtgcaaacgtcaaagtgaatgatggaaaggacctttcccaagacgcacatgcaaaagatcttgaatcaatggggatagaggtaataagtggtgaacatcctctttcgctacttgataataatcctattatcgtcaaaaatccgggtatcccttatactgtttcaataattgatgaggcagttcgcagaggtttaaaaatcttaaccgaggtcgaattaagttaccttatttctgaggcacctattataggtgtgactggcacaaatggtaagacgactgtgacatctctaataggggatatgtttaaaaaaagtgtcttaacaggtcgtctatcaggaaacataggttatgttgcttctaaagtagctcaagaagttaaagctgatgaatatttgattacagaactttcatctttccaattattaggtattgatgaatacaaacctcacatagcaatcattacaaacatatattcagcacatctagattatcatgagtctttagaaaattatcaaaatgcgaaaaaacaaatttataaaaatcaaactgaagatgattatctcatttgtaactatcatcaaagacatttaattgaaacagagaatttaaaatcaaaaacactttatttttcaacacaacaagaagttaatggaatatatattaaagacggatttatcgtatttaatggcgttcgtatcataaatgttaaagatttagttttaccaggcgaacacaacttagaaaacattttggctgcagtattagctgctattttggcaggcgtaccagttaaagccatcgtagatagtctgacaactttctcaggaattgatcatagactgcaatacattggtactcaccgtacgaataaatactataatgattccaaagcaactaatactttagctacacaattcgctttaaattcattcacacaacctattatttggttatgtggcggtttagatagaggtaacgactttgatgaacttataccgtatatgaataatgtccgtgtaatgattgtttttggagaaacacaagaaaaatttgctaaactaggtaatagccaaggtaaatatgtaattaaagcaacgaacgttgaagatgcagttgataaaattcaagacattatcgaacctaatgatgtggtgttactttcaccagcttgtgcaagttgggatcaatataaaacatttgaagaacgtggtgagaaatttatcgagagattccgagcacacttgccatcttattaa

SEQ ID NO: 728 - DNA, 966 bp, Staphylococcus capitis
atgttatttatatatgcgatcatcgcactactcataacatttatattagtaccagtgctcattcctacgttaaaaagaatgaaatttggccaaagcattagagaagaagggcctcaaagccacatgaaaaaaacgggaacaccaactatgggtggactcacgtttttaataagtattattattacatctattattgcaatcatatttgtcgataaatcaaatcctattattttattattattagtcactattggatttggactaattggatttattgatgattatattatagtagttaagaaaaacaaccaaggtttaacgagtaaacaaaaattcttagctcaaattttaattgcagttatattctttgtgctaggtgatgtttttcatttagttaatttcactacaaatttacatattccgtttactcattttgatttaccactctccttcgcgtatgtaatattcataatcttttggcaggttggtttctcaaatgcggtaaacttaactgatggactggatggcttagctacagggttatctatcattggatttgctatatatgcaataatgagctttatattagattccccagcaatcggtacgttctgtgtcattatggtgtttgcattaataggctttttaccttataacctaaacccagcaaaagtatttatgggtgacacaggtagtcttgcattaggaggaatattcgctacaatctcaattatgttaaatcaggaattgtcgcttttctttgtaggattagttttcgttattgaaacattatcagttatgatgcaagtagcgtcttataaattaactaagaaacgtatatttaaaatgagtcctattcaccatcattttgaattaagtggatggggagaatggaaagtagtaactgtattctggacagtaggtttaatttcaggattaataggcttatggattggagtgcattag

SEQ ID NO: 729 - DNA, 2238 bp, Staphylococcus capitis
atggtaactggtcattcaaatggtcagaatcttgtgatgaaggcaaatgaaaaatacttagtaaaaaattttgagcaaccagagcgtggtaaaatttatgatcgcaatgggaaggttcttgcagaagatgttgaaaggtataaagttgttgcagttgtcgataaaaaggcaagtcaaaatagtaaaaagccgcgtcacgtagtagataagaagaaaacagctaaacaattatctaaagttatagatatgaaagcttctgatattgaaaaacgactcaatcaaaagaaagctttccaagttgagtttggtcaaaaaggaaccaacttaacttatcaagataaagaaaaaattgaaaaaatgaatttacctggggtttcattatatcctgagaccgaacgtttctatcctaatggaaactttgcctctcatttaattggtatggctcaaaaagaccctgacacaggacaacttaatggtgctttaggtgttgaaaaaatctttaatagctacttaaatggaacgcaaggtacgcttaaatatatccaagatatttggggttatattgctcctaatactaaaaaagaacaaactcctaaacgaggagacgatgttcatttaacgcttgattctaatattcaagtctttgttgaagaagctttagatggcatggtagagaaatatgcgcctaaagatttatttgcagttgtaatggacgctaaaacaggtgaaatactcgcttatagtcaacgacctacctttaaccctgaaacaggtaaggattttggtaaaaaatgggctaacgatttataccaaaatacgtatgaaccaggttctacgtttaagtcttatggattagctgctgctatccaagaaggtaaatttaaacctaatgaaaaatataaatctggacacagagacattatgggttctgagatctcagattggaataaagaaggttggggcaatatacctatgactctaggcttcacctattcatctaacacattaatgatgcatttacaagatttagttggtgcagataagatgaagtcatggtatgaacgttttggctttggtaagaaaacagatggaatgtttgatggagaagcatcaggccacgtagcttgggctaatgagttacaacaaaaaacatctgcgtttggacaatctacgactgttacacctgtacagatgattcaagcacaatcagcatttttcaataaaggtaatatgttaaaaccttggtttgtaaatagtattgataatcctgtcactaagaaaaacttctatagtggtaaaaaagagtacgcaggaaaaccaatttcaaaagatactgctgataaagttgaaaaagagttagacaaagttgttaatagtaaacaaagtcatgcgatgaattatcgcgttaaaggttacgacatcgaaggtaaaactggtaccgctcaagtagcagattcaaatggtggcggatatgttaaaggtgaaaatccttactttgtaagctttataggtgacgcgccgaagaaaaatcctaaagtcatcgtttacgcgggtatgagtttagctcagaaaaatgatgaagaagcttacgagatgggtgtaagtaaagcatttaaacctattatggaaaacacactcaagtatctcaatgtaggtaaatcaagtgattctgcatctaaagctgattacagtaaggtacctaacgttgaaggtcaagaaacacaaaaagcagaagatagtatgaatgctcagtcgctcaaaccagttactataggtagtggtaagcaaattaaatctcaatctgtcaaagcagggactaagattttacctcatagtaaagtaatgttacttacagatggtgatatcactatgccggatatgacaggttggacaaaagaagatgtactcgcatttgaagacttaacacatattaaagtttccactaaaggtaatggttttgtaactaaccaaagtattactaaaggccaagcgttgaaaaacaaagataaagtagaagtgacactatctgctgataaaactgatgatagtgaagatgattcaaatgcaacagaagctagtaaaaattcgaaagatgaaagtaagtctaaagataaaaactctaaacaagattcaagctcatcttctaaatcagaatcaaaggatagttcaagttctgactctaaaaaagactccaatagcaattcaaaaaataattcaagttccagcgatgacagctga

SEQ ID NO: 730 - DNA, 402 bp, Staphylococcus capitis
atggctgtagaaaaaatttatcaaccttatgatgaagcaactcaaaccagtattccacaaagacaaccgcaatctcgtccagaaaaacagactgttaaaagaaaagtagtcgtccaattaactagatttgaaaaagttttatacataacgcttattacagtaattgccatgattagtatttatatgctatctttaaaaatggatgcgtatgatacgcggggaaaaattgcagatttagatcaaaaaatagaaaaacaatctagcgaaaacagcgcattaaaatctgaaatcaagaaaaattcttcatatgaacgcatttacgataaggctaaaaaacaaggtatgagcctacagaacgataatgtaaaggtagtgcgtagtaatggcgaagcgaaaaattaa

SEQ ID NO: 731 - DNA, 936 bp, Staphylococcus capitis
gtgtttcatcacgtcagcgtcatgttaaacgaaaccattgattatttaaatattaaagaagatggtgtgtatgttgactgtacgcttggtggtgcaggtcacgccctttatttacttaatcaattaaatgatgaaggtagacttattgcgattgatcaagatttaacagccttagaaaatgcaaaagttgttttgaaagaacacttacataaagtcacttttgttcataacaactttcgagaattaacgaatattttaaaagatttaaacattgaaaaagtagacggcatctattacgacctcggtgtttcgagtccgcaattggatgtccctgaaagaggatttagttatcatcatgatgcgaaattagacatgcggatggatcaaactcaatcattatctgcttatgaggtagtgaatgaatggtcttatgaagcattggtaaagattttttatcgttacggtgaagaaaagttttcaaaacaaattgcaagaagaatagaagctaatcgagaacaacatccaatagaaacgactttacaactcgttgacatcatcaaagaaggtatacctgccaaggcgagacgtaaagggggacatcctgctaaaagagtttttcaagcaattcgaatagctgtaaacgatgaattatccgcgtttgaagattcaattgaacaagcaattgagagtgtaaatgttaatggaaggatttcggtcatcacgttccattctttggaggaccgcttatgtaagcagattttccaagaatatgagaaaggaccagaagttccgagagggataccaattattcctgaaggttactcgccgaaattaaaacgtgtaaatcgcaaaccgataactgctactgaagaagatttagacgaaaacaatcgtgcgcgtagtgcaaaactacgtgttgcagaaattttaaaataa

SEQ ID NO: 732 - DNA, 432 bp, Staphylococcus capitis
atgttcatgggagaatacgatcatcaattagatacaaaaggacgtatgatagtaccgtccaagtttcgttatgacttaaatgaacgttttattatcactagaggccttgataaatgcttatttggttacacacttgaagaatggcaacaaattgaagagaagatgaaaaccttacctatgactaaaaaagacgcacgtaaatttatgcgtatgttcttctctggtgctgtagaagtagaattagataagcaagggcgtattaacatacctcagaatttgaggaaatacgctaatttaaccaaagaatgtacagtaataggtgtgtctaatcgtattgagatttgggacagagaaacttggaatgacttctatgaagaatcagaagatagtttcgaagatattgctgaagatttgatagattttgatttttaa

SEQ ID NO: 733 - DNA, 1614 bp, Staphylococcus capitis
atgaagtgcaatgtaataaagttaaatgaagatgatcagtttatctctaaaataaaaaatggcgattctcaaattgcgaggttttatgaatatgatgcaagtttaagcgatagtttctctaaaagacttaatactccaaataatggtagagaagagcaactttcttctgttataaaatcttatatgagtgatttagatttgtcagaatcacaaattatgaatattaaagatttagctgagggagctaaagtagtaattggaggacagcaagcgggattgtttggaggacctctctacacttttcataaaattttttcaattattactctaagtaatcaactgacaaatcaatataatgaaaaaattattcccgttttttggattgctggagaagaccatgattttgatgaagttaatcatacttttgtatttaatcataagaaggcaacgctcgataagattaaatatcatacgatgactccacctgaaactagtgttactcgttttactcctgataaagaagctttgttggagtcgcttaatcaattttttaaagaattaacagagacttcccatagcaatgaagtgtatcagttatgtcgtagcatcatcttacgctacgaaaattggactgatatcttcaaaggacttctacatgaaattttcaaagaatatggggtattactcctagatgctcaattcacagagttaaggaaaatggaaaagcctattttcaaagatatactagataaaagtgaaaaattggatcaagcttttcgagatacacaatccaaaattgaagcacaaggattaaatccaatgattcagacagacactaatactcatttatttattcatgatgaaaatatgagacagttattaaaatataaagatggcagatttattactagtaaatcggagaagtcatattcaaaagaagatttatttaacattattgaaaacgagcccgagagaatatcaaataatgttgttactcgtccagttatggaagagtggttatttaatactgttgcatttattggtggaccaagcgaaataaagtactgggcagaattaaaagaagtgtttaatttacttaatgttgaaatgcccattgttttacctagacttagaataagctatatgtatgatagaactaaaaaattattgaaacaatataatctgaaaactgaaactatcatttcatatggagtagaacaagatagacagaaatttgtacgtgaaaaagcctctcaagaattgatagatgaagtagagcaaatgaaagtaaaacagcaacaactaactgaaagattgaaatctcaagttgcaggaaatcatgataatgaattattgatagagaagaataatgaaattcaccaagaacaatatcattacttgttaaaacgctacttattaaatgtagaaagagagaatgatattagtatgcgccaatttagagaaattaatgaagtgctccatccaatgggtggattacaagaaagaatttggaatccattacaaataatgaatgattttgggaaaaatgtgttccatccctccacctacccaccacttcattacacttttgatcatataattataaaaccttga

SEQ ID NO: 734 - DNA, 441 bp, Staphylococcus capitis
atgagcgaggtaaaacatctagagataaattataaaactgatgagctctttgaagattttagagagttcggcaataaagatctctatatggttgaagaattaaaaggtcaaatgatagatgcaagttcagattcacctttttatggcatttttgtaggagataaattagcggcaagaatggctttactcgacaaaggcgaagttgaagaaacttatttcccagattgtgatgattacattttattatggaaattagaagttcttgaaaaatatcaaggtcgtggctatgctaaaaagcttatagattttgctaaagaaaataataaacctatcaaagccattgctagaaaaaactcaaaagactatttcttaaaacatggttttgaggatgtcgaagctaaaaaccctgaaggtcacgatgtattaatttggaaaccttaa

SEQ ID NO: 735 - DNA, 687 bp, Staphylococcus capitis
gtgacatataaacatatcttattagatttcgatgatacaatagttgatttttacgatgcagaggaaaaggcattttataatatggcaaaacattacggtcattttccgactaaacaagatttccaacattttagaaaggtcaatcaagcacactgggaagcttttcaacaaaatgaattgacgaaagaacaagttttatctcatcgatttattaattatttcaatgattattacatagaagtagatggtaaagaagcggatgagatatttagagatgaattagctaaagcgccgcttaaatttttcgatcaaacgattgaaactattaaccagctgaaagataaacattcattatatattgttacgaatggtgtgacaatcacgcaacagcgtcgtattgctcagacaaattttaatgatatatttaatggaatatttatttcagagcagactggttaccagaaacctatgcgagaattctttgattacatctttaatgagattggaaacattaatagagaggaaacaattatagttggagattcgttgacctctgatgttatgggtggcctcaatgctaatattcaaacatgttggtttaattaccgtgaaaaagaaaataactctaatatacaacctcattacgagattagtaatttgtcagaactaattaatattgttgaatag

SEQ ID NO: 736 - DNA, 135 bp, Staphylococcus capitis
atgactaaattagcagaagcaatcgcaaacacagtaaaagcaggacaagaccatgactgggcaaaattaggtacaagcatcgtgggtatcgcagaaaacggaatcggtttattaggtaaagtattcggattctaa

SEQ ID NO: 737 - DNA, 135 bp, Staphylococcus capitis
atgactaaattagcagaagcaattgcaaacacagtaaaagcaggacaagaccacgactgggcaaaattaggtacaagcatcgtaggaatcgctgaaaatggtatcggtgcattaagtaaaatcttcggtggttaa

SEQ ID NO: 738 - DNA, 135 bp, Staphylococcus capitis
atgcaaaaattagcagaagcaatcgcaaacactgtaaaagcaggtcaagatcacgattgggcaaaattaggtacaagcattgttggtatcgctgaaaatggtattaacgctatcactaaaatctttggtggttaa

SEQ ID NO: 739 - DNA, 135 bp, Staphylococcus capitis
atgactaaattagcagaagcaatcgcaaacgcagtaaaagcaggacaagaccaagattgggcaaaattaggtacaagcatcgtaggtatcgctgaaaatggaatcagcttattaggtaaagtattcggattctaa

SEQ ID NO: 740 - DNA, 135 bp, Staphylococcus capitis
atgcaaaaattagcagaagcaatcgcaaacacagtaaaagcaggacaagaccatgattggacaaaattaggtacaagcatcgttgatatcgtagaaaacggtgtaagtgcattaactaaagtattcggtggttaa

SEQ ID NO: 741 - DNA, 135 bp, Staphylococcus capitis
atggaaaaattattcgacgcaattagaaacacagtcgatgctggaatcaaccaagattggacaaaattaggaactagcattgttgacatcgttgacaatggtgtaaaagttatttctaaatttattggtgcataa

SEQ ID NO: 742 - DNA, 510 bp, Staphylococcus capitis
atgagtaagtggattattattagtgataatcataatgaatcagggattttgtatcacgtgtttgaaaagcatcaagatgctgatgcctttctacatctaggtgattcggagtttcaatataatgatacggaattaagtctatatcatcgtgttaaaggcaactgtgatttttatcctgaatttcctgaagaagagataattgaagaagagggtatgaaagctttttacacacatggacatttttacgatgtcaatcgtacgcgtatgaaacttgctgaaaaagcaaaatctctatcttgccaatttgcattttatggacatactcatgttgctaaatatgagtatattgctggagtacatgttattaatccaggtagcatctcacaatcacgcagtaatatagaagaaacatttgctgaacttattattaatgataccggctcacaggctgaactaaattttagaaatagagaaaataaaataatagatacagttatgataaatatttaa

SEQ ID NO: 743 - DNA, 588 bp, Staphylococcus capitis
atgtcagatattgtcattgcatcgaataacaaaggtaaaattaatgactttaaagttattttcaaagaagataatgtcataggtatttctgaacttttaccaaatttcgatgttgaggaaacaggtactacatttgaagagaatgctaaattaaaatcagaagctgcagccaaggtgttaaataagcgtgtgattgctgatgatagtggacttgaagtgttcgcacttaaaggtgaaccaggtgtctattcagcaagatatgcaggactagataaaagtgatgatgctaatattgataagctattggctaatttagagaatgaatctgatcgacgagcacaatttgtttgtgtgattagtatgagtgcaccaggtgaagaaactaaaacatttaaaggcacagtttctggtgaaattactcatgcaagacaagggactcatggatttggttatgatccaatcttctttgtgcctgataaaaagagaacaatggcagaacttactgacgaagagaagagtgagataagtcacagaggaaatgcgattcaactgttgaaagcgtatctagaaggtggtcaaaatgagtaa

SEQ ID NO: 744 - DNA, 801 bp, Staphylococcus capitis
atgaataaacctataggtgttatcgactcaggtgtgggaggtttaacggtagccaaagaaatcatgagacaattaccaaatgagacgatatattatcttggtgatattggacgatgcccttatggacctagacctggggatgaagttaaacagtttactacagaaattgctcaaaaattaatggaatttgatataaaaatgttagtcattgcttgtaatacagcaacagctgttgcattagagcatttacaaacattgttgcctattcctgttattggagttattgaaccaggtgcacgaactgcgattatgacgactaaaaatcaaaatgttttagtattaggaactgaaggtacaattaaatcagaagcttatcgtactcatattaaaaagattaatcctaacgtcaatgtttatggtgtggcatgtccaggttttgtaccgttagttgaacaaatgagatataatgacccaactatcacaagtattgttattcatcagacattaaaacaatggagaaacagtgatgctgatactgtaattttaggttgtacgcattatcctctattatacaaacctatttatgattattttgatggtgaaaaaactgtaatttcttcaggattagaaactgcacgtgaagtaagtgcgttattaacgtttagtaatgaacatgcgagttatacagaacatccaaaacatcgattctttgcgactggtgataccacacatatcaaaaatattattgccgaatggcttaaaatgaatgtacaagttgaacaaattacagtaggtgagtaa

SEQ ID NO: 745 - DNA, 837 bp, Staphylococcus capitis
atggctgaacaatcagtaaaagaaactccagaaactcaaggtaatcaacaaacaaaagaacagaatcaacaatctaatcaaaaaacagttaaattaatcattaaaagacaggacaataacgaatctaaaccatatgaggaaacttttgaaattccttacaaagagaatttaaatgttatcgcatgtttaatggagattagacgtaaccctgttaatgctaaaggtgagaagacgactccagtcacttgggatatgaactgtcttgaagaagtatgcggagcttgttcaatggttatcaatggtcgcgcaagacaatcttgttcagcaatcgttgaccaattagaacaacctatccgtttagaacctatgagtacgttcccagttattcgtgacttacaagttgaccgttcaagaatgttcgacaacttaaaacgaatgaaagcttggattccaattgatggtacgtacgatttaggtcctggaccacgtatgccagagaaaaaacgtcaaacagcttacgaattatctaaatgtatgacatgtggtgtttgcttggaagtatgtccaaatgtaacgcctaataacaaattcgttggggctcaagcgatttctcaagtgcgtttattcgacttacatccaactggttcaatgactaaagatgaacgtttagatgctttaatgagcactggtggtttacaagaatgtggtaactctcaaaactgtgtgaatgcttgtcctaaaggtattccattgacaacttctatcgcagctttaaacagagaaacatcattccatatgtttaaatcattcttcggttctgaccataaagtagattaa

SEQ ID NO: 746 - DNA, 1767 bp, Staphylococcus capitis
atggcagagaaaaaagttattgttgtcggtggaggacttgccggtctgatgtcaacaattaaagcggcagaacaaggtgcacatgtagatttattctcattagtacctgtaaaacgttcgcactctgtttgtgcccaggggggcattaatggtgcggttaatactaaaggtgaaggagattctccgtggattcactttgacgacacagtatatgggggagacttcttagctaaccaaccaccagtaaaagcgatggctgaagcagcaccaaaaattatacacttattagaccgtatgggcgtaatgtttagtagaacaaatgaaggtttattagatttcagacgttttggtggtacgttatatcacagaactgcatttgccggtgctacaacaggacaacaattattatacgctttagatgaacaagttcgttcttatgaagtagatggattagtaactaaatacgaaggctgggaattcctaggtatcgttaaagatgatgaagatgcagcaagaggtatcgttgctcagaatatgacaacatcagaaattcaatcatttggatcagatgcagttatcatggctacaggtggtcctggtatcatcttcggtaaaacaacaaactcaatgattaatacaggatctgcagcatcaattgtttatcaagaaggtgcaatttatgctaatggtgagtttattcaaatccatccaacagctattcctggagatgacaaattacgtcttatgagtgaatcagctcgtggggaaggtggacgtatttggacatataaagatggtaaaccttggtacttcttagaagagaaatacccagattatggtaacttagtaccacgtgatatcgcaacgcgtgaaatttttgatgtatgtattaaccaaaaattaggtatcaacggcgagaacatggtatatctcgatttatctcataaagatccacatgaattagacgttaaattaggtggtatcattgagatctatgaaaaattcacaggtgatgatcctcgtaaagtaccaatgaaaatcttcccagctgtacactactcaatgggtggactatatgtagactatgatcaaatgacaaatatcaaaggtctattcgctgctggtgagtgtgatttctctcaacatggcggtaaccgtttaggagctaattctttattatctgcaatttatggtggtactgttgcaggtcctaacgcagttaaatatgttcaaaacatcgaaacttcttattcagagttagacgacagtatttatgaaaaacgcgttaaagaagaacaagaacgttttgacaagctgttaaatatgcgtggtactgaaaatgcttataaacttcaccgtgagttaggtgaaattatgacagctaacgtaacagttgtacgtgaaaatgataaattattagaaacagataagaaaatccaagaattgatgaaacgttatgaagatatcgatatggaagatacacaaacttggagtaaccaagccgtattcttcactcgtcaattatggaatatgctagtattagcacgtgttattactattggggcttacaaccgtaatgaatctcgtggtgcacactacaaacctgaattcccagatcgtaatgatgatgaatggttaaaaactacaatggctcattatagaggtagaactgaaaaaccagaatttacttacgagccagttgatgtaagtttaattccaccacgtaaacgtgattacactagtaagtctaagggaggtaaaaaataa

SEQ ID NO: 747 - DNA, 615 bp, Staphylococcus capitis
ttggctcaatcaaaaaacgaattttaccttagacgactacattcgttattaggtattatcccaattggtgcattcttaattgttcacttattggtaaaccatcaagcaacacaaggcgcagaggctttcaataaagcatctggtttcatggaatcattaccattcttaattgtggtagaatttttacttatttatattccattgctataccatggactttttggactacatatcgcatttactgcaaaagaaaacatcggtcattattctttatttagaaactggatgtttttcttccaacgtgtaagtggtattttagctttcattttcattgcgatgcacttatggcaaacacgcttacagaaagcatttttcggtaaagcagtagattacgacatgatgcatgaaacgttaaaaaatccattatgggcaattttctatatcatttgtatcattgcggtagtattccactttgcaaatggtttatggtcattctgtgttacgtggggctttttacaatctaaaaaatctcaacgcgtattcacttggatttctttaattgtattcttagtggtttcttatatcggtgtatcagctattatcgcatttatgtaa

SEQ ID NO: 748 - DNA, 1785 bp, Staphylococcus capitis
ttggaggactatcaaaagaaaattaaggaaaaattgaatgtagtgccgttagaacctggttgctatttaatgaaagatagaaatgaccaagtgatttatgtaggtaaagcaaaaaaattaagaaatcgtctacgttcttactttactggtgcacatgatgctaagacgacccgccttgttagtgagatacgaaactttgaattcattgtgacttcaagtgagactgaatctttattactagaattaaatttaattaaacaatatcaaccgcgttacaatattttacttaaagacgacaaaagttacccttttattaaaatcacaaaagaaaagcatccaagactgattgttacacgcactgtgaaaaaaggaactggaaaatacttcggtccttatcctaatgcgtattctgctcaagaaacaaagaaattgttagatcgtatttatccttttagaaaatgtgataatatgcctgataaactgtgcttatactatcatataggccaatgtatggggccgtgtgtttatgatgttgatttagataaatatgcacaaatgactaaagaaattacggattttctaaatggtgaagataaaacgattattcataatttagagagcagaatgacaaaagctagtgaagatttagactttgaacaagcgaaagagtatcgtgatatgattcaacatattcataacttaacgaaaaaacaaaaaattatgtctactgataatacaattagagatgtctttggatataacgtttctaaggggtggatgtgtgtacaagttttcttcattagacaaggaaatatgataaaacgagatgcaacaatgataccgatacaacaatcagaggaagaagagttttatactttcataggacaattctatagcttaaatcaacatatcttacctaaggaagttcatgttccaaagaaccttgataaagatatgattcattcagttgtagatacaaagattgttcaaccttctcgtggggctaagaaagaaatggttgatttagctaatcacaatgctgaagtgcaacttgaaaataaattcgagttaattgcaagagatgaatctagaactattaaagctatagaagagttaggagaacgcatgggaattcaaactcctattagaatagaagcttttgataattccaatattcaaggtgtggatcctgtttctgcaatggtgacctttgtagatggtaaaccagataaaaaaggataccgtaaatataaaattaaaaccgtagaagggcctgatgattataaatcgatgagagaagtagtacgtcggcgttatacgcgcgttttaaatgagggcttacccttaccagatttaattattgttgatggtggtaaaggtcatatgaacggtgtgatggatgtccttgaaaatgaattaggcttagacattccagttgcaggacttcaaaagaacgacaaacaccaaacatctgaattactctatggagcaagtgctgaaattgtaccgttgaagaaaaatagccaagccttttacttactccatagaattcaagatgaggtacatcgttttgcgataacgttccatagacaaactcgacaaaaaacaggacttaaatcagtcttagacgatatagatggtattggcgccaagagaaaaactacacttttaagaacttttgggtcaattaagaaaatgaaggaagccaatttagatgatttaaaaggtgcaggcctacctgaaaaagttgctaaaaacctacaaaaagcactacaaaataaataa

SEQ ID NO: 749 - DNA, 315 bp, Staphylococcus capitis
atggcaatcgtaaaagtaactgactctgatttcgatactaaaattgaatctggcgttaaattagtagacttctgggctgcttggtgcggaccttgtaaaatgatcgctccagtactagaggagttagccggagattatgacggtaaagctgatattttaaaattagatgttgatgaaaacccatcaactgctgcaaaatacgaagtaatgagtattccaactttaatcgtgtttaaagatggtcaaccagttgataaagttgtaggtttccaaccaaaagaaaacttagcagaagtattagataaacatctataa

SEQ ID NO: 750 - DNA, 2349 bp, Staphylococcus capitis
atgagacaaaagacattagatgttttggaattcgacaagattaaatcctttgttgcggatgaaacaataagtgatttaggtcgtgaaaaagtagatgcaatgacaccagcaactgaatttgaaactgttgaatttcaaatcaatgaaactgatgaaatttctcaaatatacaataaacatcgattaccaagtttaagtggtttagctaaggtatcaccacttattcatagagcgaatataggtggcgttctaaatgtgactgaattgaatgtaattaaacgactcattcaagttcaaaatcaatttaagacgttttacaaccaactcttagaagaagatgaagaagtaaagtacccgatattagatgaaaagatgagtcagcttccggtactaactgatttatttcaagaaatcaaagataaatgtgatacttatgatttatatgaccatgcaagttatgcactacaaggtattagaagcaaaatttctagtactaatcaacgaatacgtcagaatttagatcgtattgttaaaagtcagagcaatcaaaagaagttatctgatgccattgtcacagttagaaatgaccgtaacgtaattccagttaaagcggaatatcgtcaagattttaatggtattgtgcatgatcaatcagcatctggacaaactctttatattgaacccagttcagttgtagagatgaataatcaaatcagtcgtttgcgtaacgatgaggctgtggaacgcgaacgtattcttactgagttgaccggtcaagtagctgtagaagtcgattccatacttatagctgaatcagtgatggggcaaattgatttcttaattgctaaagcacgttatgcacgttcgattaagggaacgaaacctacttttaagaaagagagaacggtttatcttcccaacgcgtttcatccattattagataaagaaactgtcgtttcaaatacgattgaatttatcgatgatgttgaaacggtgattattacagggccaaatacaggcggtaagactgttactttaaagacacttggacttattattgtcatggcacaatctggtttattaataccaacgcttgatggcagtcaattaagtattttcgaaaatgtatactgcgatataggcgatgaacaatcaattgaacagtctttatcaactttctcatctcatatgaagaatattgttgaaatcttacatgaagcagataaaaatagcttaatattatttgatgaattgggcgcagggactgatcctagtgaaggtgcagcgttagcaatgagtatcctagattacgttcgcaacctaggatcacttgttatggcaacaacccattacccagagttaaaagcatatagttataatcgcgaaggtgtcatgaatgctagtgtggagttcaatgttgatacgttaagcccaacctataaattgctcatgggcgtacctgggcgttcaaacgcattcgatatttctaaaaagttgggacttggcctcaatatcattaataaagctaaaacaatgattggtacagatgaacaagaaattaactcaatgatagaatctttagaaagaaattctaagcgtgtagatgaacaacgtattgaactagatcgacttgttcgtgaagctcaagaaactcacgatgcccttgcgaagcaatatcaacaatatcaaaactatgaacaatcattgatgaatgaagcgaaagaaaaagcgaatcaacgtgttaaatctgcgactaaagaagcggatacaattcttaaagaattaagagatttacgtgacaacaaaggtgcagaagttaaagaacatgaattaattgataagaaaaaacaattagatgaccaatatgaagcgaagtcaattaaacaaagtgttcagaagaaaaaatacgataaaattaacgctggtgatgaagtgaaagtgctctcatatggtcaaaaaggtgaggtgcttgaacttgttggtgaagatgaagcagttgtgcaaatgggtatcattaaaatgaaattacctattgaagatttagagaaaacgaagaagaaaaaagaaaaaccagctaaaatggttacacgtcaaaatagacaaacgattaagactgaacttgatttaagaggatatcgttatgaggaagcactaatagaattagatcaatatctagatcaagcagttttaagtaattatgagcaagtttacattattcatggtaaaggcacaggcgcgcttcaaaaaggtgttcaacagcatttaaaaaaacataaaagtgtcagcaaatttagaggtggtatgcctagtgaaggtggatttggcgtaacggttgcagaactcaaatga

SEQ ID NO: 751 - DNA, 1713 bp, Staphylococcus capitis
atgactaaaaaagatgtaattcaattgttagaaaaaatagcaacatatatggagttaaaaggggaaaacacgtttaaagtatctgcctatcgaaaagcagctcaaagtttggaaatagatgagcgtcctttagatgaaattgaggatgttaccgagcttaagggtatcggtaaaggtgtgggcgaagttatcaacgaatttagaaatcaaggtgagtctagcaccttacaagccctcaaagaggaagtacctgaaggattagtccctttattaaaaattcaaggtctaggtagtaagaaaatcgctaaactttataaagaacttcatattattgataaagaaagtttacagaaagcttgtgaagaaggtgaagtcagtaaactaagtggcttcgcaaagaagactgaacagaatattttagaagcagttaaagcactaggagccaaaaaagacagttatccgattgatcaaatgagaggtctgaataatgaaattattgatttcattaaaaagcttaaacatgtagataattattcttctgctggaagttttagacgttataaagaaatgagtaaagatttagacttcattattagtacggaacaacctctagaagttcaacagcaattgcttgatattcctaacaaagtaaaagaagtagcagttggggatactaaagtatctttagagttatcttatgatgatgagacgataggtgtagattttagattaattgagcctaaagccttctaccatacgcttcaacactttaccggttctaaagaccataacatccgtattcgacaattagctaaagaacgtaacgaaaaagtaagtgaatatggtatagaaaaagctgatggtacattactgcaatttcaaagtgaagaagagatttatcaccattttgacgtaaattggattgcacctgcaatgcgagaagatggcagtgaatttgataaagatttaagtgatatcatttctttagaggatattaatggtgatattcatatgcatacaacgtatagtgatggtgctttttcaattagagaaatggtagaagcaaatattgctaaaggttatcaattcatggtaatcacagaccactcacaaagtttgaaagttgcaaatggtttacaggtagagcgtctcttaagacaaaatgaagaaatcaaaaagttaaatgaagaatatgatgaaattgatatttattctggtacagaaatggatatattaccagatggttcacttgattatgatgacgaagtcttagcacaacttgattatgtgatagctgctatccatcaaagtttcaatcaatctgaagatgagattatgaaacgtttagaagtagcttgtaaaaatccatacgtgcgtcatattgcgcatccgacgggtcgaatcattggacgacgacctggttataaacctaatatagaaaaattaatgaaattagctgaagaaacaaatacgatattagaaattaacgcgaatcctaaacgtttagatttaaatgctgagactgtacgtaaatatcctaacgttaagttaacaattaatacagatgcacaccatacgaatcatttagagtttatgaagtacggtgtggctacggctcaaaaaggttttgtaacaaaagatagagtgatcaatgcgttatcacgagaagagtttaaatcactcgttgaaaataatattaaattaaagaaatag

SEQ ID NO: 752 - DNA, 522 bp, Staphylococcus capitis
atggttgttgatttagttgtcattatattgattttctactttatgatgattggtttccgtagggggacgtggttgtcgacactacattttatttcttcaatcgtatcattatggattgcatctcagttttataagcctatagcgcaaaggctgattgtgtttgtaccatttcctaaaacggtagcatatgacacagcttatgcaattcattttaatcaattgcaacaacgatttgaaaatattgttgcattcattattttagctacgctagctaagcttattttgtatctaattattgttacatttgataatatagtagcgtatcagaaacatcaattagttagtcgaattataggaattattctaggtttaataatgagcttaattgtgattcaaattggactatattttatttcattatatcccgagccattaattcaaaatcaaatagcacaatcgttaatatgtaaaaggataattttaaatttaccatacgtatcacaggttattttaaatttataa

SEQ ID NO: 753 - DNA, 267 bp, Staphylococcus capitis
atgagtgaatttaaaaatagaataaatgttacgatcaacgatcaacatttcacaatcattggcgatgacagtcctgagcatattcgttatgttgcacatcttgtagatgagaaaatgcaagaattaggtcaaaaatccgcaggcttagatactactcgtaaatcgattttaacagcggtaaatattatgcatgagaaagttttactagaagaagaaaatcgtcgattacaacaagaaatcaatcaatttaaacaaagtgaagattag

SEQ ID NO: 754 - DNA, 933 bp, Staphylococcus capitis
atgggaaatgtcgttcataaattaactcaaagtgaaatagatcaattattatcacaaattcaatttgaaacaactcaattgccacaaggcatgagagcacgaactaaataccaaaacactacaattaatatatatcattcaggaaaggtcatgttccaaggaaagaatgcagaattagtagctcaacgcatgttaccaaatcaagctatatcttcatcttctcaatcaaaaacatctacctctaaacagtcgtcaattcaatataacaaatataattgcataggtagtgatgaagcaggtagcggtgattactttggtcctttaaccgtctgtgcagcatacgtctcagagaaaaatgcacaagttttaaaaaccttaggcgtggatgattcaaaaaaattaacagatgacaaaattgttgaactagctgaacagctcattacttttatccctcactcactactaactttaaataatgtgaagtataatgagcgtcagaagatgggctggtcacaagtaaaaatgaaagccgttttacataatgaagcaatcaaaaatgttgttcaaaaaattgacgtggatcacttagattatatcgtgattgaccaatttgctaaacgggaagtataccagcattatgcactttccgaactaccatttcctaaaaaaactcaatttgaaactaagggtgaatcaaaatcactagctattgcagcagctagtattatctcgcgatatgctttcgtaaaacatatgaaccaaataacacaacaaattaaaatggaagttccaaaaggtgcaagtaataaagttgatttattcgcggctaaaatcattcaaaaatttggcttaagccaacttgatgctatatctaaaaaacattttaaaaatcgagataaagcactagctttaatcgagaaaaaatatacttaa

SEQ ID NO: 755 - DNA, 2403 bp, Staphylococcus capitis
atgttgatttcaaatgagtggttaaaagattatgtcaatgttgatcaacctgttcaagatttagctgaaagaattacacgcacaggtattgaagttgatgacattatcgattatacgaaagatattaaaaatttagtggttggtcatgttgtgtcaaaagcaccgcatccagacgccgataaattgaatatttgtcaagttgatttaggcgaggatgagccggttcaaatcgtatgtggtgctccaaatgttgatgaaggtcagcatgtcattgttgcgaaagttggaggtcgtctacctggtggcgttaaaattaaacgtgcgaagctacgtggtgaacgctcagaaggtatgatttgttcgttacaagaaataggtatttcaagtcacgttacgcctaaagcgttcgaatcaggtatttatgtatttccaacagaagtgactccaggtacagatgcgcttgaagcattatatcttaatgatcaggtgatggaatttgacttaactcctaaccgtgcagacgcattaagtatggtgggcacagcttatgaagtagctgctttataccaaactgaaatgacaaaacctcaaacttcaagtcaagaaagtgataaatcagccagtgatgaattatctgttacagttcaaaatgaagataaagtaccttattacagtgcaagaatcgttcatgatgtaacgattgcgccatcaccagtatggatgcaagcacgcttgatgaaggcgggaattcgccctattaataatgtggtagatatttctaactatgttctattagagtatggtcagccacttcacatgtttgaccaaaatcaaattggttcacaaaagattgaagtaagacaagcaaattcaaatgaaaaaatgacgactttagataacgccgagcgcgacttattagattcagatatcgttattacaaacggcaatgagccgatagctctaggtggtgttatgggaggagacttctcagaagttactgatcaaacacgcaatgttgttatcgaaggtgcaatctttgatccagtatctattcgtcatacttctcgtcgtttaaacctaagaagtgaatcatcaagccgttttgaaaaaggtattgcaactgaatttgttgatgaagcagtagatagagcttgttatttactagaaagatatgcttcaggtacagtgttaaaagatagagtagcagcaggtgatttaggagcaatggttactccaatcaatattactgctgaaaaggtaaaccaaacaattggatttaacttaagtgacgatgatatcgttaacatctttgaacaactcgggtttgatacccaaaatcaaaatggacaattaacagttaatgtgccatctcgtcgtaaagatatttcaattaaagaagatttaattgaagaggttgcacgtatatatggttatgacgaaattccttcaacgcttcctgtatttgaagatgtaacaagtggatcactaacagatcgtcaatataaaacacgtactgtaaaagaaactcttgaaggtgctgggcttgatcaagctatcacttattcattaatatctaaagatcacgctaaggactttgctttacaagatcgtcctactatcgaattattgatgccaatgagtgaagcgcattctacgttaagacaaagtcttttaccgcatcttattgaagctgtggcatacaatgttgcgcgtaaaaactcagatgttaaattgtatgaaattggtcgtgtcttcttcggtaatggggaaggagagttaccagatgaagtcgaatatttaagcggtattttaacgggacaatatgttaatcatgcttggcaaagtaaaaaagagtcagtagatttctatttagctaagggtgttgttgatcgcgtagctgaaaaactaaatattaaatttgattatagagcaggtcaaatccatggtttacacccaggtagaacagctatagtttcgttaaatggagaagatattggttttattggtgagttacatccaacacttgctgcagaaaatgatttaaaacgcacatatgtatttgaattaaattatgacgctattatgagagtatctgttggttatattaattatgaaccaatacctagattcccaggtgtatcaagagatatagcgttagaagtgaatcatgaagttcctgcttcagatttaatatctactattcataataatggggaagacattttaaatgatacgttagtatttgatgtatacgaaggtgaacacttagaagaaggtaaaaaatcagtagctattagattgaattatttagatactgaaaatactcttacagacgaacgtgtaacagcagtacacgacaaaattttagaagccttacaacagcaaggtgctacaataagataa

SEQ ID NO: 756 - DNA, 1059 bp, Staphylococcus capitis
atgactcaaaatgatacgatggcggaattaaaacaacaagctctcgttgatattaatgaagcagataatgaacgtgcattgcaagatgtaaaggttaaatatttaggtaaaaaaggttcagtaagtggtttaatgaaaaatatgaaagatttacctaatgaagagaaacctgcatatggtcaaaaagtaaatgaattgcgtcaaacaattcagaatgaattagatgaaagacaaaagttattaaaagaagagaaattaaaccaacagcttgctgaggaaacgattgatgtgacattacctagtcgccatattgagatgggttcaaagcatcctcttactcgaacagttgaagagattgaggatttgttcctcggtttaggttatgagattgtagatgggtatgaagttgaacaagattattataattttgaagctttaaatttacctaagtctcaccctgcacgagatatgcaggatagtttctatattactgaagaaatattaatgcgtacgcacacgtcaccagttcaagcacgaacaatggagaaacgtggtggacagggtccagttaaaattatttgtccgggtaaggtgtaccgtcgtgactcggatgatgcgacacatagtcatcaatttacacaaattgaaggattagtcgttgataaaaatattaaaatgagtgatttgaaaggtactttagagttattagccaagaaattattcggtgctgaacgagaaattcgtctacgtccaagttatttcccttttacagaaccatcagtcgaagttgatgtctcttgtttcaaatgtaaaggagaaggttgcaatgtctgcaaacatacaggttggattgaaattttaggcgctggaatggtacatccaaacgttcttgaaatggcgggctttgattctaatgaatattcaggattcgcatttggaatggggccagatcgaatcgcaatgttgaaatatggtattgaagatattcgtcatttctatacaaatgatgttagattcttagatcaatttaaagcagtagaagatagaggtgaccaataa

SEQ ID NO: 757 - DNA, 741 bp, Staphylococcus capitis
atggaacaaattacgtctgctcaaaataataaaataaaaaatgcaaataagttaaaaaagaaacgtgatcgtgataagacaggtctagctttaatagaaggaatacaccttatcgaagaagcgtatcaaagtggtattgaaataaagcaattatttgtaatagaacctgacagaacagatgaggacctaattgattacgcgaatgaaacatatgaaattaatatgaaagtggctgaagctctttctggtactgtaactccacaaggtttctttgcggtgattgaaaagccacattataatgataccgaagcgcaacaagtattattaattgatcgaattcaagatccaggtaatttaggtacattaattcgcactgcagatgctgctggcatagatttaattgtaatggaaaaggggactgcagacccatatcaagataaggtaatgagagcgagtcagggtagtatattccatattcctattgttattaaggatttaacaacttacattaatgaatttgatggcccagtgtatggaacagcactcgaaaatgcagtaagctttaaagagatagaggctcaatcacgatttgctttattattaggcaacgaaggtgaaggtgtgaaccaagaattattacaacaaacaacacaaaatcttatcatacccatttatggtaaagctgagagtttaaatgttgctattgcaggtagtatattactctaccagttgaaaggttga

SEQ ID NO: 758 - DNA, 324 bp, Staphylococcus capitis
atgaaatttatggctgaaaataaattaaaattagataaaggaacagctcaagatataatagaaaggttctacacaagacatggtattgaaacacttgaaggctttaaagggatgtttgtaacaaatactaaagaacaaccagattatgatgaagtaaaaattttaacaatatgggaatctgaacaagcttttattgattggttacaatcagatgtgtttaaaaaagcacataaaaatgttcgtcaccaatcagcagatgcatcaagcccaattcttgaaaacgtagttaagaaatatgatattggataccaatactttaaataa

SEQ ID NO: 759 - DNA, 729 bp, Staphylococcus capitis
atgattaaattcgttagacttattcaaattgtattaatagcagtcatccttatctttagttatcagttgtttaaaacatatcttgaagacaaagcgtcagctaaaaggtataaaaatttacaacaacaatttaagtcagagtccctgtctaacgaaaatgaggtacgtccacaattttctaaattagaatctattaataaagatattgttgggtggatacaacttaaaggaacatcattaaattatccagtattacaaggtaaaaccaatcatgactatttaagagaagattttgatcatgaaaagacacgtaagggaagtatttttatggattatcgaaattctgtaaaaactcctaattcgaatactattatttatggtcaccacatgggtgataatacaatgtttgatgtactagaaaagtatttaaaacaaagttactttgatcagcatcaagatattcaatacgacacgaaatatggaaaatatctattacaagtctttagtgcatatcgcactactacgaaagataactatatacaaacagattttaaaacaccatctaaatttcaacattttatagataatacaaagaaaaaatcggagatacaaacaaaagttcaaattagtaatcaagacaagatagttactttgtctacttgcgaggacgcttataaccaaacatcaggaagaattgttgttgtggcgaagctagtcaaaataaattaa

SEQ ID NO: 760 - DNA, 783 bp, Staphylococcus capitis
atgcgagttaaggggcttcattttcaatataagaatgattcggaaattataaaaaatctgtcattaacatttagctctaatgcaattacttctattatcggaccgaatggatgtggaaaatccactctgttaaagttactttctcgaaatttgaagccttcagaaggtgttatatatttagatgagttagatttgaaaacatttagtaagagagcatttgcacgtaaacttgctacagtgcatcaaaagatgaatattccggaaggattcactgtaagacaatacatagaacttggacgatatagtcatgaaagttggttgaaaatggatgtaaaaaaagaaacaaatgttcaaaacattcttcaacaactgaatttagtaaatcttcagaataaaaaattggcgtcattatctggaggtgaagcacaaagagtatttttagcaactgcattagtgcaagaacctcgttacatcttattggatgagccaaccacatatttagatattcattaccaatatcaagttttagatactattcgtactttaaaatatcattatcatattacttttataatggtacttcatgatattaatcaagcaatagaatatagtgatgaagtgatttgcctaaatgataaaggagttattgcgcaaggtgcgcctcaagaagtgattaatgaaacaattttaaaagaaatgtatcaaattgacgctaaaattataaatgacagtgaatgtggcatgattgtttgtagaaaaagggtgagggattcaaatgattaa

SEQ ID NO: 761 - DNA, 969 bp, Staphylococcus capitis
atgttacaacactactctaaattactctttctaatttcaattatcctcctatgtgtgactgtatatgtgtcatttattgttggtacgatacctatttctcttaaagatatattaacccaatttactactggtcatgtttctaatgtagacacaatcattgatttaagattacctagaatcattatcgctttatgtgttggtgcaatgctttcggtatctggggcattattgcaagcagttttgcaaaaccctttagccgaggcgcaactactcggtgtttcatcaggagcacttgtcatgcgtatgattctaatattggtgacaccccaattattttttgtcatacctttacttagttttctaggaggaatgataccttttctattattatttctcttaagtgtgaaattcaaatttcaacctacacgtatgatattaatcggtgtagcaatgtatgcaatgctaaccggagtacttgatttatttgcacagaatccatttctgaaaatacctcaaggactaactatgaaaacatggaatgatgttaagattatcggaatatcagcgagtataggtttagtaatcacaatgcttttaacgtctaaagtgaatttattagctttagaggataaacaagctaataatttaggctttcacattactaaatatagactaatcattgggggtgtagctgtgtttctagcgagtgcttcttctgcaattgtaggtccactagcttttgtaggcttaattattccacatattgtacgtaagttaattggtagtaattataaagaagtgataccactatctataattttaggaggatggtttgttgttacaactgatttattaggtagaacgttacatccaccactcgaaataccagcgaatgtcattatgatgcttataggtggtccaattttaatctatcttatttgtaagggagctgttaatgatgcgagttaa

SEQ ID NO: 762 - DNA, 882 bp, Staphylococcus capitis
atgagaaaaacccgaataatttttactatcatattatttatcgttttactcagtggttgcgaggcggatgatagcaataaaaagaaagataaagctgaatcgaaggatattcgtatcgtacctactaccgtcgctttaacgatgacattagataagttagatttacctattgtaggtaagcccacatcttataaaaagttaccagatcgatataaaaatgttccggaagtcggccaaccgatggaaccaagtgtagaggcagttaaaaaagtgaatcctacacatgttttgagtgtatctactattaaagatgaaatgaagcccttttataaacaattaaacatgaaaggttacttctatgattatgatagtttagatggcatggaaaaatctattactgaacttggtaaacagtttaatagggagaagaaggctaaagaactaaatcatcaccttaattctgtgaaagagaatattgaaagtaaagttgcaaaacaaaagaaacatcctaaggtactgatacttatggggatacctggcagttatttagttgccactgataaatcatatattggagatctcgtaaaaatcgctggtggagagaatgtcatacaagaccattctaaacagtatatttcttctaacacggaacatttagttaatgttaatcccgatattatattaagacttcctcacgggatgccagatgaagttaagaaaatgttccaaaaagaatttaaacaaaatgatatttggaagcatttcaaagcagttaaaacgaatcaagtttatgatttagaggaagtaccatttggtatcactgcaaacgtggacgctgatgatgctatgacacagttatataatctattttataaaaagtga

SEQ ID NO: 763 - DNA, 1080 bp, Staphylococcus capitis
atgatgaaattattcgttatagcgtttactttaggaatatctttaaataatgatacttatcaagtaaaggctgatgataaaaatctatcatcagccgattattatattaaagaaagctttgaaaaagataaaaatcatgcgaaacgccatagtgatcatcaacaaattagaaataagatagaacaaacgatagaattttacgttcgtaaacagaataatagggatgtttcacatatggatgagtatgtaaaacatcctggttatattgttaatgacggtaatcaaacatattttgtaatgactttattaaacagagaatggtgggaaagttataaattctaccaacatgataaagaattaaaagtgagtattgtaaatgaggataaagaacaagatacggtaaccattcaaataccccttattaacataaaagaagaagtaaaatctcgtatccacattaaaataccatcgatacattacgaccatacgtataccacttatatcgttatgaaacatagcgaaaagaatgatgaaaaggttaaccacaaagacgctcagaataacaagtctaatcagtttgatgataaagagagcctaagaaaaaatttaaaaacagaagaaggacaatttaatgaaataaaaaatgagaatagtcatctaaaagagtcaaaacaatcaactcaacaagatatgtcgtcaaatcagattatcaatagagaagaacaaaataaattttctaattcaaatagcaatctatcaattaaaccaagtacagataaaccgagctcagattcattaaatcggactaattcaaatactccagctagtttaaatacaaatactaattctaggtatagccaattgcctcaacttaatccttttaaaaaggaaaaagataaacctaatccaagcttcaatagagatgctgataagaagaaagttgcaaaaaaagaccataatgaggatgtactccctaatcatagaaatacatactatcttcttggctctgttattttattggcaattttagctttaatcgcaacatattttgttaaaagaaagagtgagtcgaaaaaatga

SEQ ID NO: 764 - DNA, 606 bp, Staphylococcus capitis
atgaaagtgacttataaaacgttaagttttgttttagttttaataatatttttagtgaattggggacctaatgtaagttacgcagccgaaggtaagtctattaattttgaagttttaaaatataatacaaatgatacttcgatggcaaatgactattttgagaagcctgcaaaattaattgaaaaagatgggaagaaagtacttcaaatcacagttaatcatagtcattggattactggaatgactattgagggtagcaaagagaaaattattagcaaagatgctagtaaagacatgagaacatctgaatttgtggtaaacaaagcttctggtaaagtaaacggaacaattgcagtttacatcaatgagccagtaaatggtaagccattcaaatatgatcatcattacaatattacttttaaatttgatggtaaagatggtggagcgactggatcaccaaatattgtccaagataaatcaactgctgaaaatcctcaaactagtggtggaatccctacatatacatatttaattcctatagcttctctatttgtattaattacaatttcagttttgtcattcaaattaaaaaaaggtaatgaataa

SEQ ID NO: 765 - DNA, 114 bp, Staphylococcus capitis
atggcatggaagggaatggaatggaatggaatcgtaaggaatagaatggcatggaagggaatggaatggaatggaacgaaatggaatggaatggaatggaatggaatggaatga

SEQ ID NO: 766 - DNA, 114 bp, Staphylococcus capitis
gtgattcaacaagcgcaagtacgtctgaatcactcagtacgtcaacatctgacagtacatcagagtcaacaagcagaagtgcatcagattcagaaagtgaaagcacgtcaataa

SEQ ID NO: 767 - DNA, 561 bp, Staphylococcus capitis
atggaacttagtaaacaaatacagaaatatagaaaagaaaaaaaattatcccaagaagatctagcagaaaagatacatgtaacaagacatacaatatccaattgggaacgaaacaaaaacatacctgatttaaatagtttaattttactaagtcaaatttttaatacttctctagataatttagttaaaggagatatacaaactatggaaaatcaattaaataacaaacgttttaataattggtcgatgattatgggaataatgagttttttaactgcaatatctataggtcccttattacatttttttaataattatgcttatataataattttattattagcaatacttacaggttatagcgctattaaagttgataaatataaacagaaaaatgacttatttacttataaacaaattttagattatataaatggaaagccaattaaaaaaattaatactaataaaacaaaacataaaatgattaatgcgattattagtattatatatattagtttgctaataaccatttttataattagtcttaataattttaactaa

SEQ ID NO: 768 - DNA, 204 bp, Staphylococcus capitis
atgaaacatagattaaaagaatttcgttcacataataaatatacacaaaaatacttatccgagtgtactggtatttctagacaaactatttcattaattgagcgaaataaactcactccttctatatcaatagctattaatttatctaaattttttaatgaaaaagtcgaaaatgtattcattatagagactcaagatttataa

SEQ ID NO: 769 - DNA, 180 bp, Staphylococcus capitis
gtgaaagttgttttaaataatggagaatcatttacgggatatattgttaaagaatatacttacgatatattactagtgaaaagtgatggaataaaagatcccaaagataacgaattagagaaacgtacaatgattcccaaacatgcaatttcttatactacaaattttatacatctatag

SEQ ID NO: 770 - DNA, 1221 bp, Staphylococcus capitis
atggaaaaagcaaaagcatttcttaataagtttaaatggtatttaataggaggggctattctattaatcgtcgttattttagcaatcaccttatttgtaaaaaatcataaagtgaatgtagaagatgatgtaaaagtctcattccacggctatgaaaaatcaggaactgctgagatcacagatgaatcttatgataaagtaacaaataaactttacatacgtgcattaaaacagtctggttttaaaaacaaagaaattataaaaatgatagagaacaataatggtgaagatatagaagaagatgatttaaattatgatgaacttcaacaaatgagacatgcttctaaaatcatggataatgttgattttaatattcataacaatgaaaatttatcaaatggagataaagtgaaagtacaattaaaactcgaaaaaggaacgtctaaaaaatttaaattaaaagcaaaagaatttacgaaagaatttaaggtacatggtttgaagaaaccaaaagaattaactgccaaagatttaattgaaggtttcaaccctaaattcactggtgtgaatggctctggatcacttaatttaataactaaagatactcctgacaatttgtctaatttatctctttcaagttatgagcttacagttcctaacaatggcagtttaaaaaatggagataatatcaagttaacaattccgcaagacctaatagacgatataaacaacaatgggtcaagttcatttaaaggtaagaaaacttatacaataaaagccaataaccttcccgagctaaataaactcgaaaacatttctgaaacacttgatagaaataataaacttattaaagacgaatacgatagtagtaaatatactaaatacaatactgaaaacatagataattactataaagttgactatggcgtatcaagtgatgattactttaatgatgatgaaaaagatagtgaaaaagtatcacctgtttctaaagttgaaccaacaaatattaccttggttacagcagtcaaagtgacgagaacaagtgagtatagtgatcctgaggtagattatagttataagggatataaaaattataaattagaaaacaatagacttgttaaagacgatacgacagaggaagtatctacatccagtgatgaagatgagatgaatgatttacatgatgaacttacatcagatggatacaaaaaattgtaa

SEQ ID NO: 771 - DNA, 201 bp, Staphylococcus capitis
atgtgcttgttgacccagattcactttctgatgttgatgtacttagtgattcagacgtacttgcgcttgttgaatcactctcgcttgtggattcagatgtactttctgattctgaaccacttattgacgtgctttcactttctgaatctgatgcacttgtgcttgttgactctgatgtactgtcagatgttgacgtactga

SEQ ID NO: 772 - DNA, 216 bp, Staphylococcus capitis
gtgaatctgggtcaacaagcacatcaagtagtgactccacaagtacaagtacatcaacaagcacaagtgaatcagagagtgcttcaacatctgacagtacatccgaatcaacaagcacatcagaaagtgattcaacaagtgaaagtacgtcattatcagaaagtacatcagagtcaacaagcagaagtgaatcaagtagtacaagtgaatcactaa

SEQ ID NO: 773 - DNA, 180 bp, Staphylococcus capitis
gtgactcgattagggagagtaggtcaatttcaacaagtacgagtgaatcagaaagtgactcaagtagtacaagcacatcattatcagatagtacgtcagactcaacaagtgaatccaatagcgattcaactagccttagcacatcaacttcagcaagcgagagtggctcaagtagtataa

SEQ ID NO: 774 - DNA, 129 bp, Staphylococcus capitis
atggaacagtcaatgaactcgaatggaatcatcattgaatggaatcgaatggaatcatcgagtggaatcgaatggaattatgatcaaatggaatcgaatgtaatcatcatcaaatggaatcaaaaataa

SEQ ID NO: 775 - DNA, 306 bp, Staphylococcus capitis
atgaaaaaaggattaatactagttctaattctttgcgttagtttagtgttatctgcttgtggaaatgcggaagataaagctcaaggtaaatgggtatataaagaagatgacgaaaaaataacactgaagatagaagatagtgatgctgagttaacttatatgggtttaacaatggaaggtgaaatagagaaagtagaaaaagataatttttcattaaaattggaagatgatagcacggtgagatttaaagtaaatggcaaagaattaaaagatgaagatgacaatgtttggaagaaaaaagattaa

SEQ ID NO: 776 - DNA, 114 bp, Staphylococcus capitis; identical to SEQ ID NO: 766

SEQ ID NO: 777 - DNA, 1065 bp, Staphylococcus capitis
ttgttaacggtaaatcaagttgaagaaatagtaggtgcattaaaagacccaattattgatgtacctttgaaagaaactgatggtatagttaacgttaccatcaaagaagatattgagcacgttagtgttaaagttgcaatggctcaattagggggacaaccacaattagatttacaaatggcaattgtaaaagctctaaaagaaaacggtgctaatacagtaggtattcgttttgaagaattaccaccggagacagtagaaaagtatcgtggtaaaggaacagaaaaacctaaaacaattgaaggtttactttctcaaaataatccagttgaatttattgcaattgcttccggtaaaggtggcgtaggtaaatcaactgtagctgttaatctagctgtagctttggcaagagaaggtaaaaaagttggactcgtagatgctgatatttatggtttcagcgttccagatatgatggggattgatgaaagaccgggagtagatggcaaagaaattattccggttgaacgtcatggcgttaaagttatttcaatggctttctttgtagaggaaaacgcacctgttatttggagaggtccaatgttaggaaaaatgcttactaatttctttacagaggttcaatggggagatttagattatcttttacttgatttaccacctggcactggagatgtagccttagatgtacattcaatgctaccttctagtaaagagatcatagttactactccgcaccctacagcagcgtttgtagcagctagagctggagctatggctaaacatacagaacactctattttaggtgtaatcgaaaatatgagttatttcgaaagtaaagaaactggtaataaggaatatgtatttggtaaaggtggaggtactaaacttgctgatgaattagaaacacagctatttggagagttgcctcttgaacaacctacgtggaaccctaaagatttttcaccatctatttatcagcctgaagatcgtttaggagaaatttatacatcaatcgccagaaaagttatagccagtactcaaaaatag

SEQ ID NO: 778 - DNA, 1443 bp, Staphylococcus capitis
atgtctagtatcgatttacccaaaacgaagcggaatttaattgtagcagtgatgttagtgagtgcgtttgtagcaattttaaatcaaactttactcaacactgctttacctcacattatgcgagaattaaaaattgatgaaagcacttcccaatggctaattactggatttatgcttgtaaatggtgtcatgataccacttacagctttcctaatggatagagttaaaactagacctttatatttaggagctatgggtacatttttattagggtcaattgtagctgcggttgcgcctaattttggtgtgttgatgacagcaagagttattcaagcaataggcgccggtgtgttgatgcctttaatgcaatttacacttttcactttattctccaaagaacatcgtggctttgctatgggactagctggtttagtcatacagttcgctccagctattggacctacattcacaggcttaatcattgataatgcaagttggagagtgccatttattattatagtcggtatcgccttaattgcttttatctttggtttaatttctatttctagttataacgaaacgaaggattcaaaattagataaacgctctgttgtatactcgactataggttttggtattatgctgtatgcatttagtagtgctggaaatttaggtttttctaatccaatagttataggatcgttaatcataagtattattattatctcaatatttgttagaagacaactaacgatttccaacccattacttaacctcaatgtatttaaaggtagaatcttttgtttcagtacaattacatcaatgattattatgttatctatggttggacctgcactacttatccctctatatgtacaaaacgctttaggtttatctgcgttgttatcaggtttagtgattatgcctggtgcgattataaatggaataatgtcagtatttactggacgtttttatgataaatatggaccgagaccattaatatatgctggttttagcttattaacgatttgcacattattgctttgtttcttaaaagcagacacatcttatatttatcttattgtcatttatgcgattaggatgtttgctgtttctctactaatgatgcctattaatacaactggtattaatgcattagacaataaagatatttcacacggtactgctattatgaactttggtcgtgtgatggctggttcattaggaactgcattaatggtaacgtttatgagtattggttcgaaatggattgggccatcctcgtctgcacatgctagtaaagaattattacatagacaaagtgttgctgccggagttgatgtttcattcgctctagttacaggttttgttgttgttgcattcttatttgcgttatttattaaagaacctaatagaaaatctcaaaatatgagagaagtctaa

SEQ ID NO: 779 - DNA, 468 bp, Staphylococcus capitis
atgaaattctttaaaaataaattttataatttagctgtaacacttattgttctcgctatttttgtattatccggggcgatattcttaacatttcttggttttggattatatgggttaagtaggattttaatattttttcatttaggttattttggctacaataaaggattttatgacaatttgttttactatggtagttatatagtattgggatattttactctttttgctgttgagcatttaatggactactttaagaagaaattgcctaacaatccttattttcagggtattacatttcatcttatttcttatatagtaacgacagtgatgttttattttatagtacatattcactatgtatatattaatattcaattttgggtaattatgttaatcataggatttctatttatttgtaaggagatattttatcctgaaagtgaaaacttgaataacaagaaatag

SEQ ID NO: 780 - DNA, 1347 bp, Staphylococcus capitis
atgaagtttaggtcgatattaacagtaaccgcattgatactaatcatgtttatggctgcaattgagacatctattatatctctagccttaccaacaattaagataaatttacatgcaggtaatttagtatctttagtttttactgtttattttattgctttggtcatagctaaccctattgtaggtgagctgttatctcgttttaagatattatatattgccgttgcaggtgtttctttatttgcaattggtagtttgatgtcaggtttaagtgaaacatttacttttttaattatctcaagaatgattcaaggttttggggcaggggtcatgatgtctttatctcagatagtccctaaactagcgtttgaaattcctttaagatataaaattatgggaattgtaggtagtgtttggggaatttccagtatcattggacccatactcggtggtgcgattttagaatttgcgacatggcactggctgttctttattaatatacctatagcaattattgctattgtattagtactaatgacatttcattttccagaggaagaacatggtaatcaaacacactttgatgtgaaaggattatcaatcttttatatatttatagcattgcttatgtttggattattaaatcaacaacatttatatctcaatattattgcaatcatcttggctttattagtattgattggcttgtttaaaatagaacaaaaacaaaataatccatttcttccgactaatgagtttaatagatcgataatgcttgctttcattactgatttatttatagctatgtcattaataggatataacctgtatataccagtatatttacaagaacaattaggtttatcacctcttcaaagtgggtttgttattttaccactatcagttgcatggattatattaaattttaatttagcgaagattgaagcaaactttactagaaaagcattatatattagtgcgtttacagttctcttaatttgcagtgttattattttatttggcatgaaagtgccattgttgatagcattttcagttatctttgctggacttagttttggatatgtatacactaaagatagcgtgattgtacaagaggaaagctctcctagaaatatgaagaagatgatgtcattttatgcattaactaaaaacttaggttcatctgtaggttctacaattatgggatatatgtatactttaaaatcaggtttattcggcactcatctacacaatgtattaggtttgattgccgtcatttcaatttgcttgtcaatgatgtggattttattttataaatctaataaaacttcaaattttaataattaa

SEQ ID NO: 781 - DNA, 684 bp, Staphylococcus capitis
atgtctcatacatctaagcataaaaaagcatcggtagttgaatcatttaaggacatcattcccttatcttttggcgaggaaataggtaatgcagcctcacatggtgcggctgcattattaacattgtttgtattaccttatgcagctgttcatagctacaatcatggtggcacattggaatcggtaagtgtgtctatttatattattagtatttttatgatgtttatttcttcaactatttatcattctatgcagaattatacagctcataagtatattttacgtattatcgatcatagcatgatttacgtagctatttcaggtacttatacgccagtattacttactatagtaggtggatggataggatgggtagtgaccctatttttatgggggactacattatggggaatattatataaatccattgctacgaaagttaatcataagctcagtcttattgtttacctagtgatgggatgggttggtgtgatatttataccagtgattatcatgcgcacctcttggttatttattttatttatattcctgggtggcctttcttatacaataggagcctggttttacgcgcaaaagaatagaccttattttcatatgatatggcatatttttattgtgattgcatcggttttacacatgatagggatattatattttatgtaa

SEQ ID NO: 782 - DNA, 1188 bp, Staphylococcus capitis
atgttagataaaaaccaattggagaaatataaccaagagcatttgtatgaatatgaaaaattaatgagtaataatgaaaaagatgcacttgaaaataaagttgatgagcttgatttagaaggaattcaaaaactatatcatgatttatatgttaatagaaaatcaatagatgatgtatcatcggtatcagaagttaagtatgaagtgaaatctcaactttctgatgaagataagcatacatatgaacaaaagggttatgaagcgattagaaatggtgaattcgcggtacttcttatggctggcggtcaaggaacgcgattaggttataaagggcctaaaggttcttttgaaattgagggtgtaagtttatttgagttacaggctcgccaactcattaatttaaagaatcaaacgggtcatacaattaattggtatataatgactagtgatataaatcataatgaaacaatagagtattttaagaaacatcaatattttgattatgatccagaacatgtacatttctttaaacaagcaaatattgtagccttaggtgaagacggcaaacttgtacttaacagagatggtcatattatggaaacaccaaatggtaatggtggagtatttaaatctcttaaagaggctggatacttagataaaatggaaaaggatcatgtaaaatatatcttcttaaataatattgacaatgttcttgtgaaagtcttagatccattatttgctggttacactgtaagtaataataaagatgttacatctaaaacaattcaacctaaacatggagagagtgttggacgtttagtcaacattgatagtaaagatacagttcttgagtattcagaattggatcccgaagtagccaatgattttgataatgctaatattggtatccatgcatttaaactggcctatattaaaagtgcagtagatagggaactaccatatcatttagctattaaaaaattaaaacaactagatgaagactttggcgttgtagagctaccaacattaaaatttgaattgttttatttcgatattttcaaatatggaacaagttttgttacattacaagttcctagagaagaggagttttcaccactgaaaaataaagtaggtaaagatagtgtggaaactgctacagaagatttaaaacgtatgagtttgatttaa

SEQ ID NO: 783 - DNA, 507 bp, Staphylococcus capitis
atgacaggtaaaacacatgcctcctgtggggctttaacaggagctttgacaactcaatattttcatactgatttatttacttcagtcactatattggtattatcaactctagcaagcctattgccagacatatgtcatacccaaagtaaaattggaagacgtttcagagttttaagttttgttattaggcttctatttggccataggacatttactcactctcttgctttcatcattatcattggttttttactgtacttaattcaaacacccatgtattatatggttgcaattgttattggaatagcttcacatgttatactagatatattaacacctaaaggggttaaattattctatcccttaccattgaatgttgtatcgccgcttcattttaaaacaggcggattagttgatttatctttagctacagcttttagctttggaacagtatacacgttgtttcaacccttttttaatgaatttatgttacagtggctaaattaa

SEQ ID NO: 784 - DNA, 261 bp, Staphylococcus capitis
atggcaatgacagtaaagaaaaacgataatgaagtacgtattcaatggagagtagcagatattaaaatacctaataatgaaattaaaaatatctcacaagaccaagatatccatgcagtacctgaaaaaaatggaaaagaaatctctcgtattggttctacatttggaaaaacaaaccgcgtaattatcgatactgatgaccatgaatacattatttatactcaaaatgatcaaaaagtttacaatgaactgactaagtaa

SEQ ID NO: 785 - DNA, 312 bp, Staphylococcus capitis
ttgttcgtcgtaacaaatagaataaccgtgaaaaaaggttttgcagaaaaaatggcacctagatttacaaaaggtggtcaaatccaatccttacaaggttttaatggtattgaagtttggcaaattgatagagatgattatagtgaagatatgtatgtaaatacatggtggaatactgaaaaagattttaaaaattgggtaaatagtgatgcttttaaagaagctcataaaaatactggaaaatccgaagactctccagtaattaaaagtgaaattgttaaagcaaatgtattgtcgaaattagataaataa

SEQ ID NO: 786 - DNA, 1374 bp, Staphylococcus capitis
atgaacggatatactaaaagcgaaattataaaaggtagaattaaatttataacaatgtccattctaggtatcatattatttttaattcctataccagttgttcaagatggacaaaaacaaacaacattacctgtggcatttcttgcaaattgtttaaaagatctgttagggaatattatgcccatattaattgtattaattattacaatttcaggtgtattaactcttttgtgctcaacaatttataaacacaagttaaatccacaaggcctaatgtataatgcatttaatgtcaaactaggttggctaatattaagagtattatcagttgtatttgtatggcttacttatttgaaggtagggcctaaaatgatttattcagaagatacgggggggctagtcttttatagtctattaccaactcttgtggccgtatttttatttgcggcactatttttaccgttattgatggaatacggactattagaattattaggacctgtgtttagaccagtaatgagaccgctatttactctacctggtcgatcaactgtagataatctagcatcatttattggtgatggaacggtaggcgtcttaattacaagtagacagtatgaggaaggctattattctagaagagaagcaacagtcatttctactacgtttagtgtagtatctattactttcgctatagttattgcttcaactattaaaatgcaagatcaattcttttatttttatatcactgtaattgtttcttgtttaattgcagcaatgataatgccaagaatttggcctttaaaaaatattccagatgaatatgctaaagatgtttcagaggatgcaagaacggagcaattaccagaaggaaaaacggcattaagacatggatatgacatggcgacagaggttggtataaaagctccaggattcaaaaagttctttatttctggatttaaaaccgttgtagatatgtggtttgtcattttaccagtagtaatgagtataggaacaatcgcaacaattatcgcgaattatacacctatttttgaagttattggaaaaccattcgttccactactagaattattgcaaattccagaagcttcacacgcttctcaaactattctcataggttttgccgatatgtttttaccatctatattaattgagggggtcaaaagtgacataacacgttttgttattggagcattaagtatatcccaattaatatacttgtcagaagtaggtggtgttattttaggttcaaaaattcctgtcagcataggtaaactatttatgattttcttaatacgtactttaatcacgcttcctattattgcattacttgcgcatttatttatccattaa

SEQ ID NO: 787 - DNA, 969 bp, Staphylococcus capitis
atgattaagagtagcaatagtatacgttatggaatcgtgattattttattagtcgtcagtacaatatttagtttatgtataggttcagttatgatagaccctatacacgctattgttggttttttcacacaagatgactttattttaaatgaatatcgtatacctcgaacattattgggattagtaataggtagcagtttagctatatctggtgctgttattcaaggtgtaattagaaatccgcttgcatctccggatgttattggaattactaaaggagcaagtctagcagcggtgattattattatgatatttccgtcggcacctttatttgtattacctttaggatcgtttgttggagcattggtgattagtttaatattgtccttccttatttccaaatttgatgtaaaaggatcgaaacttgctcttataggtttagccattggcgcaatttgtacggctatcgtacagttcttacttattcgtaatcctatggatgcaaataatgcattagtttggttaactggtagtttatatggacataatatttctaacttctatagtgtcttaccttggtttattatcactgtaccggtagtattattactcggttaccagctagatattttaaacttgggagataatgtcgctacagctcttggtgcacgtgttcgatttttaaaaatgatattactcatcttggctgtaatgttagctggagcttctattgcagttgtcggtggtattagtttcttaggacttatagcacctcatatagcaagacaactcgtcggacacaaaaatatacatgtcattatcatgtcaggtttaataggcgctatactattaacgcttggtgatgggttagctaggggaattcaaccgccacttgatattccagtaggtgtagttattgcagttattggagcaccatatttcttattcttactacgtagaatgaaatga

SEQ ID NO: 788 - DNA, 1032 bp, Staphylococcus capitis
atgactatgggtattaaaaatagtcaatccgctattgaacaaaaaaagagaaagcgcactacactcacttatatagtgggtgtgtgctttctttttatttcaatctatttgaatttagcgattggttcttcaaaaatacaatttcatgatattttaagttacttcactggacatattgaatcagaacaaacatttttaattcataacgtacgcatgcctcgaatgcttgcagggttagtgataggtggtgcattggggatagccggtctacttatgcaagcaataactagaaatccacttgcttcacctcaaatatttggtgtaaatgctggagcgtccttcgtcattgttttaattacagttttaattccatccctaggttcttattcaactatcctagcaattattggagctttttttggtggatttactgtttatacgttgtcaggatctacgaaatcaattacgccagtgaaacttgctttagcaggtatggcgatacatctattctttagtagcatgacccaaggaatcattcttttaaatgaggattctaatgatactgtcatgttttggttagtaggatcattagctgggataaaatggaatcaaattatgatgattttaccttgtatagtcattgctgtaattgtaactatttttatgggaagacagcttacaattatggaactcggagacgacattgcaagaagccttggtcaacgtactgaaattgtaagaatgattattggattgctagtgatagtattagcagggatgtctgtttcaattgcaggccccatcggttttgtgggcctcattgttcctcatatagttaaacgttatgtaagtaaaaattatctaattatgctacctctcacgtttatttttggtgcagatttattgttaatatctgacgttctatgtcgtttaatcacttatccatttgaatctccagttggtatagtgacttcatttgtcggcgccttttacttcttattcattactgtaagaggggtgaatcgcgtatga

SEQ ID NO: 789 - DNA, 999 bp, Staphylococcus capitis
atgagaggtctaaaattttttagtgctgttggcttaatgctagtattagttcttgttgcggcctgtggaagtaatggttctaataattcaagtaataaatctgcatctaaagatggtgtagaaattaaacacgaagaaggaaaaactaaagtacctaagcaccctaaacgtgtcgttgtacttgaatattcattcgtagatgcattagcttcacttgatgtaaaacctgtaggtatagcagatgataagaaaaaggaacgtatcatcaaaccattaagagataaaattggtaactatacgtctgtaggtgcacgtaaacaacctaacttagaggaaattagtaaactaaaaccagacttaattattgcagatagtaatagacataaaggaatttataaagatttaagtaaaattgctccaacaattgaacttaagagttttgatggaaactataatcaaaacattgatgccttcaaaacaatttctaaagcattaggtaaagaagatgaaggtaaaaaacgtctaaaagaacatgatgaaaagattgaaaaatataaaaaagaaattacaatgaataaagatgagaaagtgttacctgcagttgcatctaaatcaggtttattagcacaccctagttattcatatgtaggacaattcttaaatcaacttggattcaaagaagcattaactgatgatgtgacaaaaggtttaagtaagtatcttaaaggaccttacttacaaatgaacactgaaacattatctaaagtaaatccaggccgtatgttcatcatgactgataaagcaagtcctaatgagccttctcttaaagaattagaaaaagatgctgtatggaaaaaattagacgctgttaaacataatcgtgtagatgtgttagatcgtgacctatgggctagatcacgtggtttaatttcttctgaagagatggcaaaagaacttgtagaactttcaaagaaagatagtaataaagataataagtaa

SEQ ID NO: 790 - DNA, 1056 bp, Staphylococcus capitis
atggctagaatcaaagttaacttatcaaaaatacaatacaatgccaaagtacttcagacattacttgaacgtagacagattcactttacccctgtagtaaaatgtgttgccggagatgaacgcatcgtttctacaataaaatctcttggaattacacactttgctgaatcaagaattgataatattgaaagactaagagatttaaatatcacctttacactattacgccccacgacagaatttgaaactatggtttctactgtaaaactgagtattcaaacagaacttgatacgattaaacaattgaatgtaattgcaaaaagaatgaatgtaaagcatcaaatcatgttaatggtagattggaaagacggccgtgaaggtgtcttaacttatgatgtattagattatattaaagaaattatgagtatgagtcatatacaactagtaggattagcatttaattttatgtgctttaaatccaaagctccagaagaaaatgatgtctttatgattaataagttcattagtgccgttgaaaaggaaataggttacaagtttaaaattatttcaggaggtaactcaagcatgttacctcaaacaatgtacaatgatcttggcaagattaatgaattaagaataggagaagcactctttagaggaatagatactaccacgaatgaacctattgcaagtctctatcaagatgcgattgtacttgaagcggaaattattgaaattaaaccacgtattaatcaagtgacacaccaatcctatttacaagcaatagtggatataggttatttagatacatttacagatggtatcaagcctatcgccaatgatctgaaaatggttggcgcctcaagcgatcatttaatgattgatttgaataatcaagatcactatcaaattggggatagaattcaatttagtttaaattatgaagctttgtcacagagtatgtatatgaaaaatttaactaaatcatattacgacgattcaaagattcaaactttgattgaaaattttaacacaaccatatttgccaatacgtaa

SEQ ID NO: 791 - DNA, 1758 bp, Staphylococcus capitis
atggagcgtaatgaatggctgttagcagataaaaatatacaataccgtatcatgaacgcaataattaaggaacgtatttcaccagagggcatgaaaataacgaaagatgatagtgtggtggaaattcagtaccaaggcaaaagattaactgttcaagtaaaacgtaaaagtgctatggaaagatatgtgtttaaaggcgatattatgtatggttgtggtcaaaagtcacaacctattgaaagcttagaagatctgctcgaaacattaacacaggattttaatattgaaatttcagaacgtttgaatgaagaattgattcatagtagagacagttttattgaaacatataaacattttaacaacagacaatcactcatacatcaaagtatgaaattttcaagattgcctgaatcattaaactttatatcctggctacaacatttacaagatagtggcattatagatgatttaagttattcggagagtttgatagttgaaggacatcctacccatcctttaactaaaacaaaacttccgttaaataaaagcgagttgaaagcgtatgctccagagtttgaaaaggttattcctctaaaaattatgcttattgaaaagaatcacattgtcactacgtcaatggaagacgatgaccaatatattttaaatcgtgtcattccggaatatcgtcatcaactcaattcatttttggagcctttaaatttaaatatagaggattatagagtcatgattgttcatccttggcaatacgatcacactataggcggaaaatttagtcagtggattgctagtaaaatactaataccaacaccattcacagtagaatctaaagcaacgttatcatttagaacgatggatttaattcataaaccttatcacgttaaacttcctgtgaatgttcaagcaactagtgcagtaagaactgtttctacggttactacggtagatggacctaaattaagttatgcattacaaggacttcttgatcaatatccaggactccaagtggcgatggaaccctttggtgcatatgccgacgtggattctgatttggcaagacaacttgcatgcattattcgtcagaaacccgttatctttgaaaatggctcaacagtggtcacagcaagtttagttaatcctaatccaattgatcgtaaagcgattgtagatagctatttagaatggcttgaaactgaaataacaattgaccacattaaacattttattgcaacttacacacaaacattagtccaaccactcattgcatacattcaagattatggaattgcattagaagcacatatgcaaaatacgattgtcaatctaggtcctaactatcaaatgaaattcttagtacgtgatttaggtggttcacgtatagatttagatactttacaacagaaggtaacaaatattgaagtaacgaatgaaagtttattagctcaatccattgaggaagttattgcgaagtttcaacatgctgttgtacaaaatcaattagcagagttgattcatcactttaatcaatatgaagatgttaaagaaaaagagttatttgatatcgttcgtgaagagattgatctagcgattgatgatgataaatcccatgccgacattttgaggaaagtattatttggtccgacaataacagttaaagcgttattaagtatgaggatggaaaataaagttaaaaaatatttaaacactgaattagaaaatcctattaaaaaagaggtgtag

SEQ ID NO: 792 - DNA, 1182 bp, Staphylococcus capitis
atggcaaaatttttcttttccagttcttttcttctgtttttggggaattggattgggcaaataggattaaactggtttgtacttactacatatcataacgcagtttatctgggattagttaatttttgccgactcgtaccaattttattgctaagtgtatgggcaggctcaattgctgataaatatgataaaggaaatttacttagaataacgatttcctcttcatttatagtcactgcggtattatgtgttttgacatttactattgattctatcccaatcgctgtaatactcatttatgcatcgttaagaggtattctaagtgcagtagaaacaccagtaagacaagcggtgttacctgatttatcagataaaatttctacaacacaggcagtatcgtttcattcgtttatcattaacatctgtcgttcgataggtcccgcaatcgctggagtcattctagcagcttatcatgcgccttcaactttcttagcacaagcgatatgttatttagttgctgtactttttagtctgcctcttcactttgaagttgtttcaaatcaactcgaaaataaagaattctcattaaagatagttatgaattatttcaaacgtaatctagaggggagtaagatatttgttacttctctattaatcatggctacaggattctcttatacaacagtattacccgtacttacgaatcatatttttccaggaaaatcagaagtatttggtatagcgatgaccttctgtgctattggtggtatcgtagcaacaattattttacctaccattttaaatcatctaagcgcagttaaaatgtattatttaagttctttgctatttgggttagctttactaggcgtcgttatacataatttggttattatgttcatttgtatcactttaattggactatttagccaatgggcaagaacaacgaatagagtttattttcaacatagtgttaaagactatgagagagggaaggtattaagtattattatgatggaccgtggtatgatacctctcggtagtttagttatgagtttctttgcagatgtattcggaatactgacgacattcatgatcatgggtataactaccgtagccatttcagtaatattttacctaatacagcgtatgacgaagttggaggaaagtaataatggagcgtaa

SEQ ID NO: 793 - DNA, 1947 bp, Staphylococcus capitis
atgaatttcaatcaatttattaacaaacaagacattgagatgacccaagatgagcaaaatgtttttcagtttttacaacaatatgatgaacaatgggcatctattttccaagataaattattaactggtcgagataaagtaacaaagcgtttagttacttctatacatagagagaatttagttcatggtaatgatcatagtcagttacttaatagacgtaaatttgctggttatgacactcatgtaactgacattttagaaattcattttcctaaatcaaagctatacttatacgcaccagtaactggtcagcatgcatttaatcgtatagatgttgaaggccccttttattataaacgtgaacaatatcaagatgaatttaagcgtattttacatcctaatgacatattagactggattcttactgaatcaccagagttggacaatgaagcgagccaacaattcagagatgaccaaacgaacagtgcagccaatatgacatttgcgctgagctatcaatattttaaaatgaaggatgatcgagcacctctatacgatattattaaaaatcatcaagatagttatctaaggtctgagcaagccgtagtagaaggccaccctcttcatccgggagcaaaactgcgtaaaggtatggatgcgtttgaaacatttagatactcttctgaatttactcagcccatcgaattaaaaattgtattattgcatcattcagtggctcgtattcaagctttagatgcaaattacaatgatacgatgaaacatatgtttcctgatatatactcacacttagaaaaagaatttagcggacaagtcaatttagacgactatcaattgatgattatgcatccatggcaatacgaccatgtcctacatcaagattacatggaagaacttgatcaacgacttatgattgtgagtgaatattctatcccatattatgctggtttatcatttagaacgttggttcctgaattacctaataaagcgccacatattaaattatcaacaaatgtacatattactggcgaaattcgtacactttcagaacaaacaactcataatggacctttagttacacacatcttaaacgatatcttgactaaagattcaacatttaaacagtatgcttctactgtaattgatgaagtggcaggaattcatttttataattctaatgatagtgatgagatacaaacggatcgtagtgaacaactaggtacgttatttagaaataatttctatcattctataacgaatgatgtggtacctgtcattccatcaagtttaattgcaacgtatccttacaactctgaaacgcctattcaaacattaattcaaacatatcaagtttctaagggatttcagtcatttgaagaagcagctaaaacttggatgaatgaatatagtaaagcgttactaggtttagtcattcctttatattctaaatatggtattgctttagaggcacacctacagaattctgttgcaacctttaacgaagacggttcacttaataaactatatattagagatttcgaaggtttacgtattgatactgagcgcttaaatcaatcgggttatgagacgaaccattttcatgagaaatctagaattttaacaaattctaagacttccgtttttaataaagcattttattctacagttcagaatcacttaggagagcttgtgcttacaatagctaagtcatctcattcttcttcacttgaaaatgaaatctggaaggatatggcactcatattaaaggatattttaagtaatatcacagaattatctgaaggtcgtcgtagtaaaatcgaagaagttatctttgccccaacaattgattataaatgcgtgacgactatgcgattagaagatcaagcacatgaatatacgtatattaaagtaaacaatccacttcactaa

SEQ ID NO: 794 - DNA, 513 bp, Staphylococcus capitis
atggcagtagataataacaaagcaaaacaagcatacgataaccaaactggtgtaaatgaaaaagaaagacaagaacaacaaaaagaagttcaagaaaatcaacaaccacaattcgaaaacaaattaactttctctgatgaagtagttgaaaaaattgctggtattgctgctcgtgaagttaaaggtatcttagatatgaaaggcggattcactgacaacttcactaatgcattctcaagtggtaataacgtgactactggcgtgtcagttgaagttggcgaaaaacaagctgctatcgacttaaaagttattttagaatatggtgaatcagcaccaaaaatcttccgtaaagtaactgacttagttaaagaacaagtgaaatacatcactggcttagaagttgttgaagtgaacatgcaagttgacgatgtaatgactaaaaaagaatggcaacaaaaaaatgaaaaagacaacaaagacaacaaccacagtgatagacaaggtttacaataa

SEQ ID NO: 795 - DNA, 240 bp, Staphylococcus capitis
atggctgaaaataataatcaaaacggacaagactctacacaacaattaatcaatatatttaaagcatttaagtggcgtattattggatttttagcatttttacttatagctatattattcctaactattggattttggaaaacaattttaatcattgtcttgtgtttaattggaattggtatcgggtatattaaagaccgtacgcaagactttatgaatttcctcaatagatggagctag

SEQ ID NO: 796 - DNA, 537 bp, Staphylococcus capitis
gtgaaaagactaaaaaatttcatcctcggccttttaatagtcgcaattgttgggttcctattgtttatgtacataaaggatagtcgtattaaaagctatcaagactacttccttcatttcaattggttccaaccactattaattggacttgcgggattactaatattgattggactcatattagtattaagcatattcaaacctacgtatcgtaaacctggactttataaaacttttgatgatggtcatatttatgtatcaagaaaagcagttgaaaaatctgcgtacgatacattaactaaatatgatcaagtaagacaacctaatgtagtaagtaagctttatagtaagaaaaagaaatcatttatcgacattaaagcagatttcttcgtaccaaatgatgttcaagtgaaatcattaactgaaagtattcgctctgacattaagaaaaatgttgaacatttcacagaaattccagtacgaaaattagaagttaatgttcgtgaccagaaaacgtctggtccacgtgtgttgtaa

SEQ ID NO: 797 - DNA, 1575 bp, Staphylococcus capitis
atgaaatcaacaaatacaagtaaaatcagcattgtattttgggtagcattagcaatttgtacagcatttgttatttatggtgcgattctacctaaacaacttgaacaagttacgcaaactgtaacttcatttatagcagttcatttttcatggtattatcttctacttgtcctactcatacttatagtaagtgtttatttattattctctagatatgcatcaattacattaggtaaagaaggagaagatcctgaattctcacttccttcatggtttgctatgttatttagtgcaggtatgggtatcggattagtattctggaccactgcggagcctataagtcacgcgtttactttaactccaatacataaagctggaacgcagtcagccattaatgacgccatgcaattttctttcttccattggggtatacatgcctgggcagtttacggcattgtagcgctcgtctttgcgtattttagtttccataagggatatcccggtcttgtaagtgcaacattaacgcccattttcggtgaaaaagctatgcgaggtccgataggtggtgcgatagatgtattagcagtcatagcgactgtaacaggtgttgcagcaacattaggatttggagcattacaaattaatgaaggccttaacttcttgtttaaagtgccaaataactttggaacacaagttatccttattatcgttgctactatattatttacttggtcagcatggtcaggtattgataaaggtattaaaactttaagtaacatcaatatggggttagcatttctagttttagtcggattattcattgttggaccgacactttatattttgaacacatttacgaatggtttagggaattacatagccaatttctttaaaatgagtttgagaattccatcaggtggagagaaatttaaatggttacaacaatggacaattttctattgggcatggtggatttcatgggcgccatttgttggaatctttatcgcacgtgtctcaagaggtagaacaatcaaagaatttattttaggcgtactatttgttccagcactagtatgtttcttattctttgcagtcttcggtgcttcagcaatttatttacaagatcatcatatagctaatattgctaaagcagctacagagacagctacatttgcaacgttagaacaatatccgcttggatttatattaagtattattactctagtagtgattatgattttctttgtgacttcagccgactccgctacttatgtactgggtatgttaagtgctcgtggagatataaatcctgcttcatttgtaaaggtaagctggggtattatcatggcactatttgcaataattatgatttacactggtggcacacaagcaatacaaaacttacttatcatagctgcattaccattttcactcgtaatcatagttatgatttggtcgctctttaagtcgcttagtgatgaaaagccacgtcctagcaataaggtattagttaaggataagaattctgacattctagaataccgtagttctaaaaacgaaaaaaatttaacataa

SEQ ID NO: 798 - DNA, 1014 bp, Staphylococcus capitis
atgaaagcaataggatttaatgcaccgttcaatctagaagatggtaatcaatttcaagaaattgaatttaatattccaaatccaactaggaatcagttattaataaaggttcaaagtataagtgtcaatccggttgatacgaaacaacgcatcttaccagttaaccatgcaccacgtatattaggatttgatgcggcaggtattgtcgaacaagttggagaagatgtcacaatgtttgagccaggagactatgtgttttattcaggttctccaaatcagcatggctctaatgaagaatatcagttaattgaggaagaattagtagcgaaagcaccatctaatcttaagcctgaacaagcggcaagtttacctctcactggtctcacagcatctgaaacattatttgatgtgtttcaaatatctcatgaccctgaaaagaacaaaggtaaatctcttcttatcattaacggggccggtggggtaggtagtattgctacacaaattgctaaagcacatggcttaaaggttattaccactgcatctcgtgaggaaacgattgaatggacgaagtctatgggtgctgatattgtaatcaatcataaagaagatttaaagacacaacttgagcatcacgatattaatgaagtagattacattttctgcacatttgatacagatttatattatgagaaaatgattgaacttattaaaccattaggtcatatcgcaacgattgttgcatttaaagaaaagcaagacttaaatctactcaaacctaagagtgttaactttactcatgaatttatgttcgccagaccagtcaatcgcacgaatgacatgattaaacatcatgagtatttgaaagatatttctgaaagggttgaacaagggcaatatcaccatacaactacgaaggtgattaatggtttaaccaccgagacactttaccaagctcatcaaattttagagtcaaatacgatgataggtaaattagttattaatgtggaaaaataa

SEQ ID NO: 799 - DNA, 1005 bp, Staphylococcus capitis
atgaaaaatgaacaaatcgtatttaacaaagttccagatggaatgccacaagatgatacattcaaatatgaagaaactgatgtacaagaacctaaaaataatgaagttcaattagaaacattatatatttcagtggatccatatatgagaggccgtatgacgaatgcagattcctatgtccagccttttaaaaaaggagagccattcaatggacatatcgtagctaaagttattcaatcaaatgctaaagattataatgaaggtgacattgtcgtgggcatgcttccgtggaagaaaataaacactgtatcaacagagcatatcgataaagtaccttcaacagatgtgccacttgacttatatttaagcgtcctaggaatgccagggcaaactgcttatcatggccttttagacattggacagcctaaagaaggtgaaaccgtagttgtttcagcagcttcaggtgcagtaggttcagttgtcggccaaattgctaaaattaaaggatgtagagttgtaggtatcgcaggaggagataagaaagtaaattatcttactaaagaattagattttgatgcaggtgtagattataagaaagatgatttcgcccaaacattagcagatgctgttccagatggcatcgatgtctattatgaaaatgtaggcggtgaaataggtgatgaagtatttaaacacctaaacacacatgcacgtattcctgtttgcggtgccatttcttcttataaccatcctgaagaagatattggtccacgtattcaagggacactcatcaagaaacaagcgatgatgagaggtttcttagttgccgaattcgctgatgactttaaaaatgcaagcgaacaactcgctaaatgggtacaagagggtaagattaagactcaagtatctgtagaagagggtttcgataaagtacctcaagcatttagaaatttactcactggtgataattttggtaaacaagtaattaaagtctctgacgtttag

SEQ ID NO: 800 - DNA, 1221 bp, Staphylococcus capitis
atgaaattaagcatattagattatgtaccgatatttgaaggtagaagtgcacacgaagcatttcagcatagtgtagagttagcacaacgagctgaacaattaggttatgtgagatattgggtggctgagcatcatcaagttcgttctgtggcatcaagcgcccctgaaatggtcatgatgacattattggaacagacgagtaatatcaagattggaagtggtggtgtcatgttgccacactacagcccgtataaagtagctgaacaatttaagatgatggaagcacgccatcctcatcgtgtagatatggcgataggacgctctccaagtttcaacaacgtgaacgctgcattaaatgagaataaagaaagaaaactagattttgatacacagttagatgatttgaataaatacttgaatgatgacattgataaagcgcaccgcttcaagacgttattagctaccccgttaatcccgaccaagcctgaaatgtatattttaggtatgagtgaacgaagtgcaaagttagctggcagacgcggtttgccatttgttattgctaaaatgggacaatcgtcaagtgctattgaagaagttataaatgtctacaaaaatgagtttgcacgttggcatggtagatattggaaatcgtctggcgatggcgataatcgtgcttttggtaggacatctcatggaagttcagaggaagattttgctggggattcacatagaggtgttaaggattattctggcgaacatgtgcatgaggcttttgaagaagaatctagagaccatgtgcatgaagcttctgaggaagattctagaggccatgtgcatgaagcttttaaagaactttctggtggtgtgaaaccgtatgtgatattagctacatttgtagtaacgggtgataatgaggttgaagttgaagagcttttaagcgcattacaactttggttgttacgtattaattatttagatcaacctcagttttacccatctattgaaaccgctaagaatcgagtttatagcgagcgcgagaaagagaaacttgaacagaataagcgtagaattatttatggctcgcctcgcgaagtatcacgtcagttaaaggatattaaaagtttgtttggagtagatgagttaatgatattgccaaatgtttatggagaagatgcgcgttttgagttaattgaattattggcacgagaattagatatttag

SEQ ID NO: 801 - DNA, 870 bp, Staphylococcus capitis
atgatgaaatcaaaatcttctgcgatggtctttatacttattattattgttactttgatattatttactgtactttgtagccgtcaatcgggcaaacatattccgtcttcagttactcaacatcaacataaacttgtggccactctatttatgcatggatatggaggaagcgaaaaatcagaaagtttcatggttaatcaagcagttaaaaagggcgttacaaaggatgtgatgatagcaaaagtatctcgcaatggtaatgtgacttttattggttctatagataaaaatgtaaaaaatccaattataaaaatcgaatttgaaaataatcgcaatggtgattttaatgaaaatgcacgatggattaaaaatgtcttgtctcaattgaaatcccaatataatatcaataaatttaattttgtagcacactcaatggggaatatgtcatttgcttattatatgaataactatggaaatgataaatatttgccacaccttcaaaaagaagtaaatattgcaggtacttataatggcgtactaaatcttaatgaaaagataaatgaaataaacttagatcgaaatggtaagccaaataaaatgaacgatgatttcaaaaagttattatctttaaaagaagtttataaagataaaaacattgatgtactcaatatttatggagatattcaagatggcacacattctgatggtcgtgtatcaaatagttcatcaaaatctttgaaatatttactaggaaatagtccaaaatcttacacggaaaataaatttaccggtaaaacagctcaacatagccaattacacgaaaataaaaatatagcaaacgacatcattcaatttctatggagcaaataa

SEQ ID NO: 802 - DNA, 1413 bp, Staphylococcus capitis
atgactaagaaattacctgaagattttatttttggtggagcaacagcagcttatcaagcagaaggagcaactcaaactgatggtaaggggcgtgtcgcttgggatacatatcttgaggaaaattattggtatacagcagaaccagcaagtgatttctataataaatatccaatcgatttagaattaagtgagaaattcggagttaacggtataagaatttcaattgcatggtcaagaatttttcctaaaggctatggagaagtaaaccctaaaggggtagagtactatcataagctatttaaagaatgtcataaacgtcatgttgaaccattcgttactttacaccattttgatacaccagaagtacttcataaagatggagattttttaaatcgtaaaaccattgattatttcgtagattatgcagaattttgctttaaagaattcccagaagttaatttctggactactttcaatgagatagggccaatcggtgatggtcaatatttagtaggtaaattccctccaggtattaaatatgactttgaaaaggtttttcaatctcaccataacatgatggttgcacatgctcgagctgtaaagttatttaaagatgggcaatattcaggtgaaataggggtagttcatgccttacctacaaaatatccatttgattcttctaatcctgaagatgttaaagcagcagaattagaggacattatccataataaatttattttagatgccacatacttaggtaagtattctcgtgaaacaatggaaggtgttcaacatatcttatctgttaatggtggtaaattgaatatccctgacgaagattataaaattttagatgctgctaaagatttaaatgacttcttaggtatcaattattacatgagtgattggatgagaggttatgaaggtgaatttgagattacgcacaatgcgactggagataaaggtggttctaaataccaacttaaaggtgtcggtcaaagagaatttgatgtagatgtacctagaacagattgggattggatgatttatcctcaaggattatacgatcaaattatgagggttgtgaaagattatccaaattatcataaaatctatgttactgaaaatggtttaggatacaaagatgaatttgatgaaaaagagaaaactgtacatgacgatgcccgtattgattatgttaagaaacatttaaacgtgattgctgatgcaattgcagatggtgctaatgtgaaaggatacttcttatggtcattgatggacgtattctcatggtcaaatggttatgaaaaacgttacggtcttttctacgtcgattttgatacacatgaaagatatcctaagaaaagtgcttattggtacaaagaattagctaaaacaaaagaaatcaaataa

SEQ ID NO: 803 - DNA, 1746 bp, Staphylococcus capitis
atgaataagttaatagcatggatagaaaaaggaaagccgttctttgaaaaaatatctcgtaatatttatttaagagcgattcgtgatggatttattgcagcaattcctattatcttgttctcaagtatatttattttagtcacttatgtaccgaatgtatttggatttacttggagtaaaacaatggaaggtatattaatgaaaccctataactttacgatgggaattgttggtttcattgtagcagggacaacagccaaatcactgactgattcatttaatcgacgattggaaagcacgaatcaaattaactttatttcaacaatgatggctgcaatgtgtggtttcttgttcttagcagccgatcctgtaaaagatggagggtttttaagtgctttcatgggaacaaaaggcttattaacagccttcttatcagcgtttataactgttaatgtttatagtttctttatcaaacataatattacaataaaaatgcctaaagaagtgccacctaatatatcacaagttttcaaagatatattcctattatcagcagtaatcattattctttatgcgttagatttaattgctagagcctttattcataccaatgtagctaacgcagtattaaaaatctttgaaccattatttacagcagctgatggttgggtcggagtgacaattatctttggtgcattcgctttcttctggtttgtaggtattcatggaccatcaatcgttgaaccagccattgcagcaattacttacgctaaccttgaagcgaacttacatttaattcaagcaggcgaacatgctgataaagtcattacacctggtactcaaatgtttgttgtaactatgggaggtactggtgcaacattagtcgtacctttcatgtttatgtggctaactaagtctaaacgtaataaagcaattggacgtgcctcagtagttcctactttctttggtgtaaatgaacctatcttgtttggtgcgcctttagtattaaacccagtgttctttattccatttattttagcgccaattgtcaatgtatggatatttaaattttttgttgatgttctgaatatgaatagttttagtatcttcttaccttggactactccaggtcctctaggtatcgtgatgggtactggttttgcgttttggtcatttgtattagccattgtcttaatcgtagtagatgtcattatttattatccattcgttaaggtttatgatgagcagattttggaagaagagttaggtaataaagaagttaataatgaattaaaagaaaaagtttcagctaactttgatactaaaaaagctgatgctattttagcaactgccggagcgaatgaagcttcgcaaagtcatgattcacaaccagaagtgaatcaagatcattctgacagcaatattactgaacaaacaaatgtcttagtattatgcgcaggaggaggtacaagtggtttattagctaatgctttgaataaagcagcagatgaatacggtgtacctgttacagcagcggctggtggttatggtgcacatatggatattatgaaagaatatcaattaattatattagcaccacaagtagcctcaaattatgaagatattaaacaagacactgacaaattaggtataaaattagctaaaacacaaggcgctgaatacattaagttaactagagatggtcaagcagcactcgaatttgtaaaacaacaatttaaaaattag

SEQ ID NO: 804 - DNA, 315 bp, Staphylococcus capitis
atgaatagagaagaagtacaattattaggttttgaaattgttgcttacgctggagatgcacggtctaagtttttagaggcattaacagccgcacaagagggagagtatgataaagccgaatctttaatagaagagggtaatcagtgcattgctgatgcacatcgtgctcaaactagtttattacaaaaagaagctcaaggagacgacattgcttatagtgtaacgatgatgcatggtcaagatcatttaatgactactattttattaaaagatctaatgaagcatttaatcgaattatataaaagaaagagttga

SEQ ID NO: 805 - DNA, 981 bp, Staphylococcus capitis
atggtaaaaacaactcaaaaaacggcatcaattgaacatctaagtaatgataaaggtgtcatctcagctttagcttttgaccaacgtggtgcgttaaaacgtatgatggcaaaacatcaaacagatgaacctacaattgagcaaattgaacaattaaaagttttagtatcagaagagttaacgcaatacgcgtcatctattcttttggaccctgaatatggtttacctgcatcagaagctcgtaataaagagtgtggtttattacttgcctatgaaaaaacaggatatgacgttaacgcaaaaggtcgattacctgactgtttagtagaatggtcagctaaacgacttaaagagcaaggtgcaaatgccgttaaattcttgctttattatgacgtcgacgatgcagaagaaattaatattcagaagaaagcttacattgaacgaattggatctgaatgtgtagctgaagatattccatttttcttagaagttctcacttatgacgataatattccagataatagtagtctagaatttgcgaaagtgaaaccaagaaaagtaaatgaagcgatgaaactattctcagaagatcgctttaatgttgatgtcttaaaagtagaagtaccagtaaatatgaaatatgttgaaggattcactgatggagaagtagcttattctaaagaagaagcagcacaatattttaaagaccaagacgcttcaacaaaattaccatatatttacttaagtgcaggcgtttctgctgaacttttccaagagactttaaaatttgcacatgacgcaggagctcaattcaatggagtactttgtggtagagctacttgggcaggcgcagttcaagtatatatcgaaaaaggtgaagaagcggctagacaatggcttcgtactacaggattcaaaaacattgacgagttgaataaagttttagaaacgactgcaacatcatggaaagagagagtttaa

SEQ ID NO: 806 - DNA, 933 bp, Staphylococcus capitis
atgattttaactttaacattaaatccttcggtagatatctcttatccattggatgaattacatattgatacagttaatagagttcaaaacgttagtaagacagctggtggaaagggactcaatgtaactagggtgttatcacaactcaatgaacaagttgttgccactggctttttgggtggtaaaataggcgattttatagcagaaaagttgaatcacaatcaagtgaaacattcatttttcaaaattaaaggtgaaactaggaattgtattgctatattgcataatggcaaccaaacagagattttggagcaaggaccaacaataactgtggatgaatcaaccgggtttttgaagcatttaaaagatctaataccaaaagctaaatcggttgttatttctgggagcttaccaaaaggtgtagattcaaattattattcaaaaattattgatatatgtaatgaaaatgataaaccagtcgtgctggattgtgctggagaaacattaaaggaagcgttacaaaataatcacaaaccgacagtgataaagccaaatattgaagaattatcacaattgatttctacagaacttaatgaatcaactgaagagctgaaaaaagctttaaatcatcaattatttaaaggtattgagtggattattgtttctttaggtgcgaatggtgcgtttgctaaacataataatcaattttataaagtaaacattccttcgattaaagtacttaatccagtgggttctggagattcaacagttgcaggaatagcttcagcaattgttcatcatgaaagtgatgagaatctacttaagaagtcgaacactttaggaatgttaaatgctcaagaggcacaaacaggttatgtaaatatgtctaattattctcagctctttgaccaaattgaaattatagaggtgtaa

SEQ ID NO: 807 - DNA, 516 bp, Staphylococcus capitis
atgaaaattgctttaggttgtgaccatattgtcactgatacaaaaatggaagtatctcagtttttaaagtcaaaaggacacgaagttattgatgttggaacatatgacttcacacgtacgcattatcctattttcggtaaaaaagtaggagaagaagttgtaaacggtaatgctgacttaggtgtatgtatttgcggtactggtgttggtattaataatgcggttaacaaagttgctggcgttcgttctgcacttgtacgtgatatgacttcagctttatatgcgaaagaggaattaaatgcaaatgttattggttttggtggtaaaatcatcggcgaacttttaatgtgcgacattattgaagcatttatcaatgctgagtataaaccaacagaagaaaataaaaaattaattgcaaaaattaatcatcttgaaagtcataatgctaaacaagaagatccacatttctttgatgaatttttagaaaagtgggataaaggcgaatatcacgattaa

SEQ ID NO: 808 - DNA, 429 bp, Staphylococcus capitis
atgacaattattattggttctgatgtagatggtaaacgtcttaaagatttaattaaagtttatttgaaagagaacgatttcgaagtattagatgtaacagagggtaaagatttagattttgtagattcaacagtatctgttgcacgtgaagttcaaaagtctgacgacaatttgggtattgccatcgacgcttatggtgcaggtagttttatagttgctacaaaaattaaagggatgattgcagctgaagtttcagacgaacgttcagcatatatgactagaggtcataataattcaaaaatgattactctaggttcagaaattgttggggacacattagctaagaatgtagttaaaggtttcgttaatggacactacgatggtgggcgtcaccaaattcgcgtagatatgctcaataaaatgtgctaa

SEQ ID NO: 809 - DNA, 756 bp, Staphylococcus capitis
atgaataaatatgatagactcgacgaaattacaaaactcatcaacaaaagaggaacggttagaacaaatgaaattgtagaaggtcttaatgtatcagatatgactgttcgacgtgatttagcagagttagaagagaaaggcgttctcactaagatacatggtggagctcgtcgtaattctgcatttcaatataaagaaatgtctcaccaagaaaaacatacgcactacattgaggagaaacgctatatcgccaaaaaagcagtagagcttatagaaaatggtgacacaatattcttagggccaggtactactgtgcaaaaattggcagaagaaattcaccaccattcacttactgttatcaccaattgtttaccagtttttaaaattctcatgaataaacagagcttacattttagagtgtatctgctaggtggagaaatgagagatttaactgaagctttcgtaggagaaatgacgaatcaattattgaataacttgagatttagtaagatgttttttagtagtaatggagttaaagatggtgtagcgatgacatcttcaatagatgaagcttacacccaacaacttgctttaaaacattcaatagagaaatatttacttattgattcttcaaaaattggaaaagatgatttttcatctttctgtgaattaaaagaattaaatgcggtattaatggataataataattcggaaaagacagaacaagttgaaaaatatgttgaggtcattgactaa

SEQ ID NO: 810 - DNA, 732 bp, Staphylococcus capitis
atggaaaaggaaattcaactattaaaaagtattttagaaagatccaataacattgtgttttttacaggcgcgggtgtttcagtagcaagtggtattccagatttccgctcgatgggaggtctatttgatgagatatcaaaggatggtcaatctcctgagtatttactaagcgtagatcatttaaatgatgataaagagagttttattgatttttatcataaaagattattaatagctgataaaaagccaaatattgtacatcagtggattgctgctttagaacgtgaacacaaatctttaggtgttattactcaaaatattgatggcttgcattcagatgcaggaagtcgtcatgtcgatgagttgcacggcactttaaatcgcttttactgtatcaaatgctacaatgaatactcaaaatctcaagtgatggaaaatcacataagatattgtgaaaaatttgggcagattataagaccagatattgtattatacggagaaatgttaaatcaaaacacagtatttagagctttagaaaaattacaaaaagctgacacgctagttgttctagggtcttcactcgtagtacaaccagcagccggctttgtttcagaatttaaaggtgacaatttaataataatcaatagggatcgcacgccatatgatcaaagtgctgacttagtcatacatgatgatatgacagaagtcgtcgaaaagatcatgaaaaaatag

SEQ ID NO: 811 - DNA, 393 bp, Staphylococcus capitis
ttggcacaagttgaatataaaggtacaggccgtcgtaaaaactcagtagcacgtgtacgtttagtaccaggtgaaggtaacattacagttaataaccgtgacgtacgtgactacttaccattcgaatcattaatcttagacttaaatcaaccattcgatgttactgaaactaaaggtaactatgacgttttagtaaacgttcacggtggtggtttcactggacaagctcaagctatccgtcacggaatcgctcgtgctttattagaagctgaccctgaatacagaggttctttaaaacgcgctggattacttactcgtgacccacgtatgaaagaacgtaaaaaaccaggtcttaaaaaagctcgtcgttctcctcaattctcaaaacgttaa

SEQ ID NO: 812 - DNA, 438 bp, Staphylococcus capitis
atgcgtcaaacatttatggcaaatgaatcaaacattgagcgcaaatggtatgttattgatgctgaaggccaaacattaggtcgtttatcatctgaagtagctgctatcttacgcggtaaaaataaagtaacttatacaccacacgttgatactggtgactatgtaatcatcatcaacgcttcaaaaatcgaattcactggtaataaagaacaagataaaatgtaccaccgtcattcaaatcacccaggtggtttaaaatcaatcacagcaggtgaattaagaagaacaaacccagaacgtttattagaaacttctatcaaaggtatgttaccaagttcacgcttaggtgaaaaacaaggtaaaaaattatttgtatatggtggcgctgaacatccacacgctgcacaacaaccagaaaactacgagttacgtggttaa

SEQ ID NO: 813 - DNA, 804 bp, Staphylococcus capitis
ttgcgaattttagtagaaatagcataccagggtaatcaatttttaggatttcaaatccaacaacaaggaagaactgtacagcaacaatttgaaaagattttaaaacgtatgcataaacggcatgtacgaattcatcctaccagtcgtacagatagaggggtgcatgcgtatcaacaatttttccattttgatactgagttaaatatagataatcaacaatggcaatatgcgatgaatcgttttttacctgatgatatttacgtcaaaaacgttcaaacagtagaagaaaactttcattgtagatatgattgtgtcggcaagagatatcgctataaagtttatcaaggtgaacatcgtaatccctttaaaagtggtctcgaaacatttataaatagtgatttagatttatcaaaaatgaatgaagctgcgcatcattttattggtacacatgactttacggggttttgttctcagaaaacggaagtggaaagtaaagtaagaacgttataccaaagtgaagtggttcaaactgagacaggttttgattatgtggttactggttctggatttctttataacatggttcgtgttcttgtagcatttttaatagaggtgggaaaagggaagcgacaacccgacgaagttccgcaactacttgaagaaaaaaatagaaacaatgtgccttttactgctccggcagaaggactttacttagaaaagatttatttgtcgccagaatcactaacagaagagtttggaaatgatattaaaatacatcttaaaaaatcattggaaaatgactga

SEQ ID NO: 814 - DNA, 807 bp, Staphylococcus capitis
atgaaaaataaattaatcattggacgttatctcccaaatcattcgactgtacatcatctcgatcctagagcaaaacttatctttgtttttgtgtttatagtctatattttcttttgccattcgtttggaacttacgcatggatatttttactgataattgtttttatgaaattggctaaaataccattcggatttttaatgaaaggtctcacgcctatatttttctttttaatatttacttttttaatgcatattttctttaccaatgggggtaagatactttttcattggggaatccttacaatagagtccgatggtgttcttgaaggtatctatatctctctaagacttatatttattgttatgattgcgacaataatgacattatctactagtcctatagatttgactgatgcatttgaaagattattatcacctctaaagctagttaaggtgccagtgcatcaattaagcatgatgatgtccattgcattaagatttattcctacgttaatggatgaattagaaaaaattatcttagctcagaaatcaagaggttccgaaataagttcaggtagcatagtaactagaataaaagcattcatccctttaatgattccattatttatttctgctttccaaagagccgaagaattagcaatagcgatggaagttagaggatatgatatgaatgttaaacgtacgagttataggttattacattggcgtctaagagatacatttgctttattaacattaataccaattgcaattatcctatttattattaaattctcaggagtgtag

SEQ ID NO: 815 - DNA, 849 bp, Staphylococcus capitis
atgaataatgtcagctacacttatcaaaaaggaacgccatatgagtataatgcaatagaagatgtcaatttaacatttgaacaaggtaattattacgctatagtcggtcaaacaggtagtggcaaatctactttaattcagcatattaatgcacttttaaaaccaacaaaagggtctattacatttgatgaaatagaaatatctcataaaactaaagataaatacttaagacctattcgtaaaaaggtaggaatggtcttccaatttcctgaatctcaattatttgaagatagtgtagaaaaagaaatagagtttggccctaaaaattttaaattggacttagaaaaggtaaaggaaaagtcttatcaattattattagatttaggtttttctagagatattatgtctctttctccttttcaaatgtctggcgggcaaatgagaaaaatagcaatcgtatctatattatctatgaatcctgaagttattattttagatgagccgacagcaggtttagatccacaaagtaaaaaacaaatcatgtctttaattaaacgcatacaaatagaagaaaacaagacaatcattcttgtttcacatgacatgaatgatgtcgcacgttatgctgacgaggtcatagtcctaaataaagggcgagtggtagaaactaaagagccgagagcgttatttaggtctacaagccaaatagaagattggcatattactttgcccaacatagtaaaattacaaaaagactttgaatataagtataatactactttacctaaattagcgttaaacgaagaagaatttgcgagtttatatagggagtggcagaatgaaaaataa

SEQ ID NO: 816 - DNA, 810 bp, Staphylococcus capitis
gtgaaaagtcttgataatatcattgaatttaataatgtatcatttcagtatcaaagtgatgcggcttttacattaaataacgttagttttacaattccttctggaaaatggacttcaattgttggacacaatgggtcaggtaaatcaactattgctaaattaatagtcggaattgagaaagctaatgaaggacatatactatttaaaaataaaaaaattgatattaatagtattcaagaagttagaaatcacataggtattgtatttcaaaatcctgataatcaatttgttggttctacagtaaagtttgatgtggcatttggccttgaaaatcatgccgtacctcatgatgagatgcaaaagattgtcgatcgttccttatcggaagtagatatgttagataaagctgattatgaaccacattcgctctcaggagggcagaagcaacgcgttgctatagctggagttctagcactaaacccgtctgttataattttagatgaggcgacgacaatgcttgatcctaatgcaaaggcatcacttttaaaactcgttcatgaagttaaagaggataatgacgttacgataatttcaatcacgcatcatttagatgaagttattgaagcagataatgttatcgtgatgaataatggaacggtattcaaacaggggtcccctcaagaaatatttaaatatacagatgaacttactgctataggtttggatttacctttctctatgaaaataaatcaacgattaggtttcgattcgtcatttgttacttacgaagggttggtcaaaaagttatga

SEQ ID NO: 817 - DNA, 369 bp, Staphylococcus capitis
atgggttacagaaaattaggtcgtacttctgatcaacgtaaagcaatgttacgtgacttagcgacatctcttatcgtaagtgaacgtatcgaaactacagaagctcgtgctaaagaagttcgcagtgttgtagagaaattaatcactttaggtaaaaaaggagatttagcttctcgtcgtaatgcagctaaaactttacgtaatgttgaaatcttaaatgaagatgaatcaacacaaactgctcttcaaaaattattcggtgaaatcgctgaacgttataatgaacgtcaaggtggttacactcgtatccttaaagtaggcccacgtcgcggtgacggtgctgaatcagtaattatcgaattagtataa

SEQ ID NO: 818 - DNA, 945 bp, Staphylococcus capitis
atgatagaaattgaaaaacctagaattgagacaattgaaattagtgaagatgctaaattcggtaagttcgttgttgaaccacttgagcgtggctacggtactacactaggaaactccttacgtcgtatcctactatcttcattaccaggtgcagccgttaagtacatcgaaattgaaggagttttacacgaattttcagcagtagacaatgttgtagaagatgtttcaacaattattatgaacattaaaaaattagcattaaaaatttactctgaagaagacaaaactcttgaaattgatgttaaagatgaaggcgaagtaactgcaagtgacattactcacgacagcgatgttgagattttaaatccagaacttaaaatcgcaacagtgtctaaaggtggacatcttaaagtgcgtcttgttgctaataagggtagaggttacgcattagctgaacagaataatactagtgatttaccaattggtgtaattcctgttgattcactatattcacctgtagaacgtgttaactacactgtagaaaatacacgcgtaggtcaaagtagtgattttgataaattaactttagatgtttggactaacggttcaatcactccacaagagtcagtatcattagcagctaaaataatgactgaacacttgaatatctttgtaggtctaactgatgaagctcaaaatgctgaaatcatgattgaaaaagaagaagatcaaaaagaaaaagtacttgaaatgtctatcgaagaattagacttatcagtacgttcatataactgcttaaaacgcgcaggaatcaattctgtacaagagttagctgataaatctgaagctgacatgatgaaagtgcgtaatttaggtcgtaaatctctagaagaagttaaatataaattagaagatttaggattaggattaagaaaagaagattga

SEQ ID NO: 819 - DNA, 390 bp, Staphylococcus capitis
atggcacgtaaacaagtatctcgtaaacgtagagtgaaaaagaatattgaaaacggtgtagctcatatccgttcaacattcaataatactatcgtaactatcactgatgaattcggtaatgcattatcttggtcatcagctggtgcattaggattcaaaggatcaaaaaaatcaacaccattcgcagcacaaatggcttcagaaacagcttctaaatcagctatggagcatggtttaaaaactgttgaagtaacagttaaaggacctggccctggccgtgaatcagctatccgtgcattacaatctgcaggattagaagtaactgcaattagagacgttactccagtacctcacaacggttgtcgtccaccaaaacgtcgtcgcgtctaa

SEQ ID NO: 820 - DNA, 366 bp, Staphylococcus capitis
atggcacgtattgcaggagtggatatcccacgtgaaaaacgcattgttatctcattaacatacgtttatggtatcggcacttcaactgctaacaaaattgttgaagaagctaacgtatcagcagatactcgcgttaaagatttaactgatgacgaattaggtcgtatccgtgaagttgtagatagctacaaagtagaaggtgacttacgtcgtgaacaaaacttaaacatcaaacgtttaatggaaatttcatcataccgtggaattcgtcaccgtcgtggcttaccagttcgtggtcaaaaaactaaaaacaacgcacgtactcgtaaaggcccagttaaaacagtagctaataagaaaaaataa

SEQ ID NO: 821 - DNA, 114 bp, Staphylococcus capitis
atgaaagtaagaccatcagtaaaaccaatttgcgaaaaatgcaaagtcattaaacgtaaaggtaaagtaatggtaatttgtgataatcctaagcacaaacaaagacaaggttaa

SEQ ID NO: 822 - DNA, 219 bp, Staphylococcus capitis
atggctaaacaagatgtaattgaattagaaggtactgtattagatactttaccaaatgcaatgtttaaagtagaattagaaaatggtcatgagattttagcgcacgtaagtggtaaaatcagaatgaattacattcgtattctacctggcgacaaagtaactgttgagatgtctccgtatgatttatcacgcggtagaattacttatcgttataaataa

SEQ ID NO: 823 - DNA, 648 bp, Staphylococcus capitis
atgaatatcattttaatgggtttacctggcgcaggtaaaggaactcaagcgagtgaaattgttaagaaattcccaataccacatatttctactggtgacatgttcagaaaagcgattaaagatgaaactgatttaggtaaagaagctaaatcatatatggatcgtggagaattagttcctgatgaagttactgtaggtatcgttaaagaaagaatttctgaagacgatgcaaaaaaaggattcttactagatggattccctcgaactatcgaacaagctgaggcattaaatagtattatgtctgagcttgatagagaaattgatgcagttatcaatatcgaagttcctgaggaagaacttatgaatcgtcttacaggtcgtcgtatttgtgagaaatgtggtacaacttatcatcttgtatttaatcctccaaaagttgacggtatttgcgatatcgatggtggaaagttatatcaacgagaagatgacaatccagaaacagtatcaaatcgtttgagcgttaatgtaaaacaatctaaacctattttagagtattacaatgaaaaaggtgtcttgaaaaacattgatggttcaaaagatattgaagaagtaaccaacgatgtcattgatatcttagatcatttataa

SEQ ID NO: 824 - DNA, 1293 bp, Staphylococcus capitis
atgtttcaaacgcttgtgcgtttctttacaactaaagaagtgcgtaacaagattttcttcactctagcaatgttagtaatttttaaaataggaacgtatattcctgctccaggtgtaaatcctgaagcatttaaccatccacagggttctcaaggtgccactgagttattaaatacttttggtggcggtgccttgaaacgtttctctatctttgcgatgggtattatgccctatatcaccgcatccattgtaatgcaattattgcaaatggatattgtgcctaagttctctgaatgggctaagcaaggtgaaatgggtcgaagaaaaattaataatgtaacacgttatttcgctattattctagcttttatccaatcaataggcatggctttccaatttaacaattatcttggtggcaaattgattatggataaatcaattatgagttatttattgattgcagttgttttaacagcaggaacagctttcttaatttggcttggtgaccaaatcactcagtttggtgttggtaatggtatttctcttatcatctttgctgggattttatctacattgccatctagtatagaacaatttggccaatctttatttgttggtcaagatgatacttcactagcatggttaaaaattgctggcttaatcgtagcattaatcttactaacggttggtgctatattcgtacttgaagctaagcgtaaaattccaattcaatatgcaaagaaacaatctactcaacgattaggtacacaagcaacttatctacctttaaaagttaactcagccggggttattccagtaatctttgcgatggcgtttttcttattaccaagaacgttgactttattcttccctaaagctgaatgggcacagaatattgcggacactgctaatccatcaagtaatattggaatgatcgtttatattgtattaattattgcttttgcatatttttatgcatttgttcaagttaatcctgaaaagatggctgataaccttaaaaagcaaggtagttatgtcccaggtataagacctggtgaacaaaccaaaaaatatattactaaagttctttacagactgacatttgtaggttctatattcctagcagttatagctattttacctatagtagcaactaaatttatgggcttaccacaatcaattcaaattggtggtacgagcttattaattgttatcggggtagctattgaaactatgaagacattagaagctcaagtgactcaaaaagagtacaaaggctttggtggtagataa

SEQ ID NO: 825 - DNA, 441 bp, Staphylococcus capitis
atgaaattacatgagttaaaagcagctgaaggatcacgtcgtgtacgtaaccgtgtaggtcgtggtgctgcaactggtaacggtaaaactagtggccgtggtcaaaaaggtcaaaaagcacgttcaggtggtaaagtaagaccaggatttgaaggtggacaattacctctattccgtcgtttacctaaacgtggtttcactaacattaaccgtaaagaatatgctattgttaacttagaccaacttaataaatttgaagatggtactgaagtaactccagctttattggtagaatctggtgtagttaagaatgaaaaatctggtattaaagtactaggtaatggttcacttgataagaaattaacagtgaaagctcataaattctcagcttcagcagcagaagctattgatgctaaaggtggagcacacgaggtgatctaa

SEQ ID NO: 826 - DNA, 180 bp, Staphylococcus capitis
atggctaaattacaaattaccctcactcgtagtgttattggtcgtcctgaaacacaacgtaaaactgttgaagcattaggtcttaaaaaaactaatagttcagtagttgttgaagataaccctgctatccgtgggcaaatcaacaaagttaaacatttattaacaattgaagaaaaataa

SEQ ID NO: 827 - DNA, 501 bp, Staphylococcus capitis
atggctcgtagagaagaagaaactaaagaatttgaagaacgcgttgttacgataaaccgtgttgctaaagtagtaaaaggtggtcgtcgtttccgtttcactgcattagtagttgtaggtgataaaaatggtcgtgtaggtttcggtactggtaaagctcaagaggtacctgaagctatcaaaaaagctgtagaatcagctaaaaaagatttagtagttgttccacgtgttgaaggtacaactcctcacactattactggtcgctatggttcaggtagcgtattaatgaaaccagctgcacctggtactggggtaatcgctggtggacctgttcgtgcggtattagagttagctggaatcactgatatcttaagtaaatcattaggatcaaatactccaattaacatggttcgtgcgacaatcaatggtttacaaaacttaaaaaatgcagaagatgttgctaaattacgtggcaaatctgtagaagaattatacaattaa

SEQ ID NO: 828 - DNA, 363 bp, Staphylococcus capitis
atgatcagtaaaattgataaaaataaagtacgtttgaaaagacatgctcgtgttcgtacaaaattatcaggtacagctgaaaagccacgtttaaatgtgtatcgttcaaacaaacacatctacgctcaaattattgatgatgttaaaggcgaaactttagctcaagcttcatcacaagataaagatattgcaaacgaatctgcgtctaaagttgatttatcaactaaagtaggtcaaacaattgctaaaaaagcaaacgatataggtattaaagaaatcgtattcgaccgtggaggttatttataccacggacgtgttaaagcattagcagatgctgctagagaaagcggattagaattttaa

SEQ ID NO: 829 - DNA, 537 bp, Staphylococcus capitis
atgagtcgtgttggtaagaaaattattaacattcctagtgacgtaacagtaacttttgataataatcatgtaactgttaaaggtccaaaaggtgaattagaaagaactttaaatgaaagaatgacattcaaacaagaagaaaacacaatcgaagttgtaagaccttctgattctaaagaagatagaacagaccatggtacaactcgtgctttattaaataatatggtactaggtgtttctcaaggtttcgaaaaatcacttgaacttgttggtgtcggttaccgtgcgcaaatgcaaggtaatgacttagtactaaatgttggttattctcacccagttgaaattaaagctgaagacggtattacttttgctgttgagaaaaacacaactgttaaagtatctggtgtttctaaagaacaagttggtgcgattgcatctaacatccgttcagtaagacctccagaaccttataaaggtaaaggtattcgttaccaaggtgaatatgttcgccgtaaagaaggtaaaactggtaaataa

SEQ ID NO: 830 - DNA, 399 bp, Staphylococcus capitis
atgacaatgacagatccaatcgcagatatgcttactcgtgttagaaatgcaaacatggttcgtcacgagaagttagaattacctgcatctaatattaaaaaagaaatcgctgaaatcttaaaaaatgaaggtttcattaaaaacgttgaatacgtagaagacgataaacaaggtgttattcgtttattcttaaaatatggtcaaaacaatgaacgtgttatcacaggattaaaacgtatctctaaacctggtttacgtgtatatgctaaagctaacgaagtacctaaagtattaaacggtttaggtattgcattagtctcaacttctgaaggtgttatcactgataaagaagctagaaaacgtaacgtaggtggagaaattatcgcgtacgtttggtaa

SEQ ID NO: 831 - DNA, 186 bp, Staphylococcus capitis
gtggctaaaacttcaatggttgctaagcaacaaaaaaaacaaaaattcgctgtacgtgaatatactcgttgtgaacgctgtggtcgtccacattctgtatatcgtaaatttaaattatgccgtatttgtttccgtgaattagcttacaaaggccaaattcctggcgtacgtaaagctagctggtaa

SEQ ID NO: 832 - DNA, 540 bp, Staphylococcus capitis
ttgaaccgtttaaaagaaaagtataactctgaagttactgagaacttagtaaaaaaattcaactatagttcagtaatggaagtacctaaaatcgaaaaaatcgtagtgaacatgggtgtaggtgacgcagttcaaaactctaaagtattagataatgctgtagaagagttagaattaattactggtcaaaaaccattagtaactaaagcaaaaaaatcagttgcaacattccgtttacgtgaaggtatgccaatcggtgctaaagtaacacttcgcggtgaaagaatgtatgaattcttagataaacttattgcagtatcattacctcgtgtacgtgacttccaaggcgtttctaaaacagcttttgatggacgcggtaactacactttaggtgttaaagaacaattaattttccctgaaattgattatgataaagtaagtaaagttagaggaatggatattgttatcgtaacaactgctaatactgacgaggaagctcgtgagttattatcaaacttcggtatgccatttcgtaaataa

SEQ ID NO: 833 - DNA, 318 bp, Staphylococcus capitis
atgcatatcaaaaaaggtgacaacgtaaaagttatcgcaggtaaagacaaaggtaaagaaggtaaagttgtagcgactgaacctaaaaaagaccgtgtcgttgtggaaggtgttaacgtaattaaaaaacaccaaaaaccaactcaattaaatcctgaaggtggaatcttagaaacagaggcagcaatccatgtttctaacgtacaattattagaccctaaaacaaacgaacctacaagagtaggatacaaaattgttgatggtaaaaaagttcgcgtcgctaaaaaatcaggcgaagaaatcaaatctaataattaa

SEQ ID NO: 834 - DNA, 369 bp, Staphylococcus capitis
atgatccaacaagaaacacgtttaaaagtagcagacaactctggtgctcgtgaagttcttacaattaaagtattaggtggatctggtcgcaaaacagcgaatatcggtgatatcatcgtatgtactgttaaaaatgcaacaccaggtggcgttgttaaaaaaggcgacgttgtaaaagctgttgtagttcgtactaaatcaggtgttcgccgtaacgacggttcatatatcaaatttgatgaaaatgcatgtgttatcatccgtgatgacaaaggcccacgtggtactcgtatctttggtcctgttgctcgtgaactacgtgaaggtaacttcatgaaaatcgtatcattagcaccagaagtactataa

SEQ ID NO: 835 - DNA, 264 bp, Staphylococcus capitis
gtgagcgaaagaaacgatcgtaaagtttatgtaggtagagttgtttcagacaaaatggacaaaactattacagttcttgtagaaacttacaaaactcacaaattatacggtaaacgagtaaaatactctaaaaaatacaaaactcatgatgaaaacaattcagctaaattaggagacattgttaaaattcaagaaactcgtcctttatcagcaacaaaacgttttagtttagtagaaattgttgaagagtcagtaattatttaa

SEQ ID NO: 836 - DNA, 210 bp, Staphylococcus capitis
atgaaagctaaggaaattagagacttaaccacttcagaaatcgaagaacaaatcaaatcttcaaaagaagagctttttaacctacgctttcagttagctacaggtcaattagaagaaactgcacgtattcgcacagtaagaaaaacgattgcacgtctaaaaactgttgctcgtgaaagagaaattgaacaaagtaaggctaatcaataa

SEQ ID NO: 837 - DNA, 435 bp, Staphylococcus capitis
atgttactaccaaaacgtgtaaaatatcgtcgtcaacatcgtccaaaaacaactggtcgttctaaaggcggtaactacgtaacatttggtgagtatggtttacaagcaactacaacgtcttggatcacatctcgtcaaatcgaatctgctcgtattgcaatgacacgttacatgaaacgtggcgggaaagtttggattaaaatcttccctcatacaccgtatactaaaaaacctttagaagtacgtatgggtgccggtaaaggtgcggttgaaggctggattgcagtcgttaaacctggtagaatcttattcgaagtagctggtgtatctgaagaagttgcacgtgaagcattacgtttagcaagtcacaaacttccagtaaaaactaagtttgtaaaacgtgaagaattgggtggtgaaacaaatgaaagctaa

SEQ ID NO: 838 - DNA, 654 bp, Staphylococcus capitis
gtgggtcaaaaaattaatccaatcggacttcgtgtcggagttatccgtgactgggaagcgaaatggtatgctgaaaaagacttcgcttcattattacacgaagatttaaaaatccgtaaatttattgataaagaacttaaagaagcatcagtttctcatgtagacattgaacgtgctgctaaccgtatcaacattgctattcacactggtaaaccaggtatggtaattggtaaaggcggttcagaaattgaaaaacttcgtaataaattaaacgctttaacagataaaaaagtacacattaacgtaattgaaatcaaaaaagttgatattgatgctcgtttagtagctgaaaatatcgcacgtcaattagaaaatcgtgcttcattccgtcgtgtacaaaaacaagctataacaagagctatgaaacttggtgctaaaggtatcaaaactcaagtatcaggtcgtttaggcggagctgacatcgctcgtgctgaacaatattcagaaggaactgttccacttcatactttacgtgctgacatcgattacgcacacgctgaagccgacactacttatggtaaattaggcgttaaagtatggatttatcgtggagaagttcttcctactaagaacactagtgaaggaggaaaataa

SEQ ID NO: 839 - DNA, 354 bp, Staphylococcus capitis
atggaagcaaaagcggttgctagaacaataagaatcgcacctcgtaaagtaagattagttcttgacttaatcagaggtaaaaatgctgctgaagctattgctattttaaaattaactaacaaagcttcatcaccagtaatcgaaaaagtattaatgtccgctttagcaaatgcagagcataactatgacatgaacactgatgaattagttatcaaagaggcatatgcaaatgaaggaccaactttaaaacgtttccgcccacgtgcacaaggtcgtgcaagtgcaattaataaacgtacaagccacattacaatcgtcgtaagtgacggtaaagaagaagctaaagaagcttaa

SEQ ID NO: 840 - DNA, 279 bp, Staphylococcus capitis
atggctcgtagtattaaaaaaggacctttcgtcgatgatcacttaatgaaaaaagtagaagcacaagacggaagtgaaaagaaacaagtaattaaaacatggtctcgtcgttctacaattttccctaacttcatcggtcatacttttgcagtatacgatggacgtaaacatgtacctgtatatgtaacagaagatatggtaggtcacaaattaggtgaatttgctcctactcgtacatttaaaggacatgctgcagacgacaagaaaactagaagataa

SEQ ID NO: 841 - DNA, 834 bp, Staphylococcus capitis
atggctcttaaaaaatataagccaataacaaatggtcgtcgtaatatgactactttggatttcgcagaaatcacaaagacaacacctgaaaagtcattattacaaccgctaccgaaaagagcgggacgtaacaaccaaggtaaattgactgttcgccatcatggtggaggacataaacgtcaataccgtgttatcgatttcaaacgtaataaagatggaatcactgctaaagtagattcaattcaatatgatccaaaccgttcagcaaacattgctttattagtatatgctgatggtgaaaaacgctatatcatcgcacctaaaggattacaagtaggtcaaactgttgaaagtggttcagaagctgatattaaagtaggtaatgctttaccactacaagacattccagttggtactgtaattcataacattgagttaaaaccaggaaaaggtggacaacttgctcgttcagctggtgctagctcacaagtattaggtaaagaaggtaaatatgtattaatcagattaagatctggtgaagtacgtatgatcttatctacttgccgtgctactatcggtcaagttggtaacttacaacatgaacttgttaacgttggtaaagctggacgttctagatggaaaggcgttcgcccaacagttcgtggttctgttatgaaccctaacgatcacccacacggtggtggtgaaggtcgtgcaccaatcggtagaccatctccaatgtcaccatggggtaaaccaactcttggtaagaaaacacgtcgtggtaaaaaatcatcagacaaacttatcgttcgtggacgtaagagaaaataa

SEQ ID NO: 842 - DNA, 276 bp, Staphylococcus capitis
atggaagcaagagatattcttaagcgccccgtaatcactgagaaatcttcagaagctatggcagaagataaatatactttcgacgttgatactcgtgttaataaaacacaagtcaaaattgctgtagaagaaatcttcgatgtaaaagttgaaagtgttaatatcatgaactataaacctaagaaaaaacgtatgggccgttatcaaggctatacaaataaaagaagaaaagcgattgttaaattaaaagaaggttcaatcgacttatttaactaa

SEQ ID NO: 843 - DNA, 624 bp, Staphylococcus capitis
atggctaattatgatgttttaaaagtagacggatctaaatctggttcagttgaattaagcgattcagtattcgctattgaacctaataatagcgttcttttcgaagctattaacttacaacgtgcgtcattacgccaaggtacacacgctgttaaaaatcgttcagctgtacgtggtggcggacgtaaaccatggagacaaaaaggaacaggtcgtgcacgtcaaggtacaatccgtgctccacaatggcgcggtggtggtatcgtattcggaccaactccaagaagttattcatacaaaatgcctaagaaaatgcgtcgtttagctttacgttctgcattatctttcaaagttcaagaaaatggatttacagttgttgattctttcggttttgacgctccaaaaacaaaagaattcaaaaatgttttatctactcttgaacaaccaaaaaaagttttagttgttactgaagacgaagatgtaaatgttgaattatcagcacgcaacatccctggagtacaagtttcaactgcacaaggattaaacgttttagatattacaagcgctgacagtgtagtaatcactgaagctgctgctaaaaaagttgaggaggtgctcggataa

SEQ ID NO: 844 - DNA, 663 bp, Staphylococcus capitis
atgaccaaaggaatcttaggaagaaaaatcgggatgacacaagttttcggtgaaaacggtgaattaatcccagtaacagtagtagaagcaagccaaaacgttgtattacaaaagaaaactgaagaagttgacggttacaacgcaatccaagttggatttgaagacaaacaagcatataaaaaaggttctaaatctaataaatatgcaaataagccagctgaaggtcacgctaaaaaagctgacacagcacctaagcgcttcattcgtgaattccgcaacgttaacgttgacgaatatgaagtaggtcaagaagtctcagttgatacatttgaaactggtgacatcattgatgttacaggtgtttcaaaaggtaaaggtttccaaggtgctatcaaacgtcatggtcaagcacgtggaccaatgggtcacggttctcatttccacagagcgccaggttctgtaggtatggcttcagacgcttcaagagtatttaaaggacaaaaaatgccaggtcgcatgggtggaaacactgtaactgttcaaaacttagaagtcgttcaagtagacactgacaatagcgtaattttagttaaaggtaacgtacctggacctaaaaaaggcttagtagaaatcacaacttcaattaaaaaaggtaataaataa

SEQ ID NO: 845 - DNA, 309 bp, Staphylococcus capitis
atggcaaaacaaaaaatcagaatcagattaaaagcttatgatcaccgtgtgattgatcaatcagcagagaaaattgttgaaactgcaaaacgttctggtgcagatgtttctggaccaattccgttaccaactgaaaaatcagtttatacaatcattcgtgccgtgcataagtacaaagattctcgtgaacaattcgaacaacgtactcacaaacgtttaatcgatattgttaacccaacacctaaaacagttgatgctcttatgggcttaaacttaccttcaggtgtagacatcgaaattaaattataa

SEQ ID NO: 846 - DNA, 408 bp, Staphylococcus capitis
atgaaaaacggagttaaaatgactttagcaatttcaggggttttccttatcgtttgtgaatttttctatgggattccttttttaggtggtagtgtcattttaagttttggttggcaaccattattacttaatgcttttctctatcttattattacaattatcttacttgtagatactcaaaattctattaaaccaatggttattataccgattttaggtatcgtaggatcatttattgcatttatcccagtagttggtatggtagtacattggattttattcttcttaatgatattttttgtattcattgttttatctgctccaacttatctaccaaataaagatgctcgagtaatctacactcaatataagaacgataatagagaaaaagaagaaattcatagataa

SEQ ID NO: 847 - DNA, 1335 bp, Staphylococcus capitis
gtgaaaaaatactttcagttcgataagcatggaacaaattatagaaatgaaattttaggtggtatcacgacgtttttatctatggcttatatccttgccgtaaatcctcaagttttaagtttggctggggtaaaaggtgtttctagcgatatgaaaatggaccaaggagcaatttttgttgccactgcattagctgctttcgttggttctttatttatgggacttatcgctaaatatccaatagccttagcgccaggaatgggattaaatgctttcttcgcatttactgttgtgcttacaatgggaattccatggaaagtaggtttaaccggcgtacttttctctggggtgttctttgctatcttaactgccacaggattaagggaaatcattattaatgctataccttatcagatgaaaatggctgtttcagcaggtataggattgtttatcacctttgtaggacttcaaagttctggaatcattattaaaaatgattcaacacttgttacacttggtcacttaactaaagcgccagtattattagcgatatttggaattataattactgttattttatacgctaaaaaagtaccaggttctatatttatagggatgattattacagcgattgtaggtatgattacaggtcaaatccatactccatcaggaattgtaggtcatattcctagtattaaaccaacttttggtgtagcgtttgaatcatttaaagatcctggtcaattattcacagttcaatttttaatcgtcattttaacatttttattcattgacttctttgatacggcaggtacacttgtagctgttgcaacacaagctggtatcatgaaagataataaattacctagagcaggaagagcgcttttctcagattcacttgctacgattgtgggagcaatttttggtacaacaactactacttcatacatagaatctacatcaggtgtagcggtaggtgcccgtacaggttttgctagtattgtaactggtatttgtttcttacttgcactattctttagtccacttatcgaagtggttacaagtgctgtgacgacgcctgctttagtagttgtaggtgtgttaatggcttctaactttgctgaaatcaattggaagcgatttgaagttgcggttcctgcatttattaccattattatgatgcctttatcatattcaattgctacaggtattgcgtgtggatttatattctatccacttacaatggttatcaccaaaagacataaagaagtacatcctattatgtatgtactcatggcattatttatactttactttgtgtttgttcataaataa

SEQ ID NO: 848 - DNA, 2136 bp, Staphylococcus capitis
atgaaatccttaatattagctgaaaagccttcggtagctcgagatatagctgaggcattaaatatcaagcagaaaaagaatggatatattgagaatgaaaagtatatcgtgacttgggcattaggccatttagtcacaaatgcaacaccagaacaatatgatgtttcatataaagaatggaaacttgaggatttacctattatacctaaacatatgaagactattgttattggtaaaacgagtaagcaatttaaaactgtaaaatcattaataatggataaaaaggtgaacaacatcattatagcaactgatgcggggcgagaaggggaacttgtcgcaaggctcatacttgataaagttggcaacaagaaaccaattcaacggttatggattagttcggtaactaagaaggccattcagaacggttttaaacatttaaaagatggacgtgcatatcatagtctttatcaggcagcattagcgaggagtgaagcggattggattgtaggaattaatgccacacgtgcgctgacaacaaagtatgatgcacaattatcactaggacgtgttcaaacaccaactatacaattagtgcaatctagacaggaagaaattaatcatttccaacctgagaagtactatacattatcaattaaggtagatgggtacgactttcaattagattcaaataaacgttataaaaataaagaaggtttagaagcacttgcacaacaagtaaaaaaccaagaaggcaaaatattagatataaaaactaagcataagaaaatgtacccacaaatgttatataatttaacggatttacaacaagacgcgtatcgacgttttaaaatgggaccgaaggacacgttaaatacattacaaaacttatatgaaagacataaaattgtgacgtatccacgtactgactctaattatttaacgaatgatatggtggatacgattaaggaacgtttacaagccttactcgctactgaatataaagcccatgtgcgagaacttatgagtcagtcattttcacctaaaatgaatatatttaatgatggaaaagtatcagatcaccatgccattatacctacggaagtaagaccatcacttgatcaactcagtcaacgagaattaaaaatttatacaattattgttcaaagatttttagaaactttaatgaaaccttacgaatatgaaaatgttgtgattaactttggtataaaagatttaatctttacattgaaagaaaacattcctaaacaattaggttttaaggcacttaaagaagaggaattacgtcaaacatcatcacatcgatttactaaaaatcttaagttcaaagttcaaaaagtgaatattcatgaacatgaaacgaaagcacctgattattttaatgaaggttctctattaaaagcgatggaaaatccacaaaattatattaattttagtaataaaaagtatgctcaaactcttaaacaaactggaggaatagggacagttgcaactcgtgcagacattattgataagctttttaatatgaatgcacttgaatcaagagatggtaaaatcaaagttacatctaaaggtaaacaaattttagagttatcgcctgatcaattaacatcacctcttttaactgctcagtgggaagaaaagttgattcttattgaacaagggaaatataactctcagaaattcatgaacgaaatgagagacttcactaaacaaattgtagacaaaattaaaaatagtgaacaaaaatataaacatgataatttaactacgaccgaatgtcctacatgtggtaagttcatgatcaaagtaaaaactaaaaatggtcaaatgcttgtatgccaagacccctcttgtaaaactaagaaaaatgttcaacgtaaaacgaatgcgcgttgtcctaattgtaagaagaaaatgactttatttggaagagggaaagaggcagtatacagatgtgtttgtggtcattctgaaacacaagctcaaatgaataagcgtatgaaagagaaaactaacggtaaagtttcacgtaaagaaatgaagaaatatatgaataatacagaagagatagataataatccatttaaagacgctttaaaaaatttaaaactttaa

SEQ ID NO: 849 - DNA, 888 bp, Staphylococcus capitis
atgatgaatatcgttcaattgcgtgaaccacaagaaataaaagcatttatagactcatctcgttacctatcaacatcttatttatataaactacctcaagaatatgaggattttgacacattattaaatgaagctattactcatccaggcgtgattgcaatgactgaaaataatcaaattcaagcgttgatacttgctttctcatatgataatcatcggtacaaaataataggaccatttattgcacaagactttactttgactgataatcaattcaaattactgtttgataaattgatagaacaacaaccggatgaatccatattcaacttttcatttgaagaaggtgcacaagaatataaaacctatatgaagacaatccatgctagttataattttactgattattatttggaagcacaaaaagaccttggagatcattttaataatcaaaatatcatcgaatatcaaaaaggtttttatcgtgcatttagcaaattacatatgatgacctttaaacataacgcaatgactccggatgaaattatagaatcactagatgaacataatcgattatttatatttgtaagtgaaggtctattgaaggggtatttatacttacaagtcgatactgaacgcaacaatgccgaaattaagtactttagttcccatatggattatcgactcaaagggattgcttttgatttacttgagtatgctttgaaatacgctttcgagcattatactattcacaaagtctactttaaaatacgtaataaaaatagcaaattggttgaacgtttcaacgagttgggcttccaaattaactatgaatataagaaatataaatttgaacctagacatttgcaccaggatttctcaagttga

SEQ ID NO: 850 - DNA, 864 bp, Staphylococcus capitis
gtgcaatttttagactttctcatcgcactattaccagccctgttttggggtagtgttgtaattataaatgtgtttgtaggtggtggaccctacaatcaaatccgtggaacgactttaggtactctaattgtcggtatcggtttactactaactggtaatgctgcttttgataatttaacagttattattgtaggtttaatctctggtgcgctttgggcctttggtcaaggtaatcagttaaaatctgtcaacttaataggcgtttcaaagacgatgcctatttctacaggaatgcaacttgttggtactactctatttagtgccattttcttaggagaatggagtaccatggttcaagttgtaatgggcctcatcgcaatggttttactagtggttggtattgctctaacatcacttaaagctaaaaatgaaggcacatccaataatccagaattcaaaaaagcaatgggtatcttgcttatttcaactattggttacgtaggctatgttgttcttggagatattttcggagtcagtggtactgatgccctattcttccaatcaatcggtatggccatcggtggatttattctctctatgaatcatcaaacttctattaaatctactgcattgaatttaatacctggtgtagtatggggtattggtaacttatttatgttctactcacaacctaaagttggtgtagccacaagcttctcattatcacaattacttgttatcgtttctactttaggtggtatctttattttaggtgagaaaaaagatcgtcgccaaatgattggtatatggtcaggtatcattgtgataatcatcgcatcaattattctaggtaacttgaaataa

SEQ ID NO: 851 - DNA, 792 bp, Staphylococcus capitis
atgtttaaagaattagaaaacaaagtagttgttattactggagctggtagtggcattggtaaatcatttgccgaaaactttgggaaagctaaatctaaagtagtattaaactatcgctctgatcgtcatttagatgaaatagatgaactaaaaaatacgattcaaaatgctggcggacaagctattgcagttcaaggtgatgttgctgtagaagaagatgttaaaaatcttgttcaatcagcagttgatcaatttggtacattagatattatgattaacaatgctggttttgaaaaaccaatcccaacacatgaaatgtctaatgctgaatggcaaaaagtcatagatattaacttaacaggtgcatttacaggttctcgtgaggcgattaatcaatttcttaaagaaaataaaaaaggtgtcataatcaatacctcaagcgttcatgacacaattccttggcctaactatgtcaattacgctgcaagtaaaggcggattaaagttaatgatggaaactatgtcaatggaatatgctcagtatggtattcgtatcaataatatttctccaggcgccattgtcactgaacatactcgagaaaaattttctgatcctaaaacacgtgaagaaacgttagaaatgatcccagcacgtgaaattggtgaagctcaagatatttcaaacgtcgcattatttttagcctctgatttagcaagctatattcatggtacaactatttatgttgacggtggtatgactaattatccagcatttatgggtggtaaaggataa

SEQ ID NO: 852 - DNA, 909 bp, Staphylococcus capitis
gtgactgaacaatttgtcatgattatattacttattgcgctcggttattttcttaagcgcattaattatttaaaagcaactgatagtcaagttctttcaacgcttgtattaaacgtcacattaccttctcttgtcatcgttaacttaaatagtgctgacctaaatatgtcattctcaatcttaccaatcatgatgatagtctatggtattgttgccaaaatcattgtgatatggttctttaggaagtatagtaaccaaatgcgtggttctgtaggaatgatgacaggttcaatgaatatcggtctgttcgcgtatcctttagttaatgctatttggccagaaaaaggtatggtatattttggaatggctgatattggtggggcaatgattatgttcggtttgacatactttgtgggaagttatttcagtgaaggtggagaccaattcaattttaaatttttagggaagaaattgattcagtctgtaccattagtaacatatatcgttatgtttacactaaatatgtctaatattcatatatggaagccagctatagacttcttcagcattctttctaaagctaatatgccattatctatgatattactaggtgttatgttgagctttagcattgatagagaatacttacctgtaaccattaagtatctttgcttacattatggattagctattgtagcaggaacacttgtacatttctttttaccggtatcagatccaatgattaagacgacgttattaattacgtggctcttaccagtaggtgtagctatcataccttactccattcaatttaagtataagacgttgccatttgttgggatggtcactaacttaactataataattagtattgttattctatatgtttatcaagcactttttgtttag

SEQ ID NO: 853 - DNA, 165 bp, Staphylococcus capitis
atggatttagaatctaaattaacagaactaaaatatgattatgtacgattacaaaatgatttagataaaaaggaatcgcttaatcaaaatgttgatccactactaaaacagctagaagatattgaacaacaaatttctgacattcgagctaaaatgaatgagtaa

SEQ ID NO: 854 - DNA, 318 bp, Staphylococcus capitis
atgcaattttatctaattttgttgcccattttatacttaattgtcgcatatattagtatttttaaaatgcactcgattttcacgagaattttaagaattattatgggtattttattattgttcgtcgttgcgattacgacgctacaatttccgaaagaaaattggtgggtatttatcgtgttattactcctagttggtaacattgaggttacaggctttaaagaacttaaaggcgataaaaaaggtgttaacattttaaatatcatttcaattattttgatagtaatttatgtaattttaacgctatttttatattaa

SEQ ID NO: 855 - DNA, 3180 bp, Staphylococcus capitis
atgattaaaaaattattacagttctcgctaggtaataaattcgctatatttttaatggttgttttagtcatcttaggcgggatttattcgagtgcaaaattaaaactcgaacttttaccagatgttgagaatccgatgatttctgttcaaactactatgtctggtgctacccctcaatcaactgaagatgaaattagtaggaaaatagataatcaagtacgttccttggcttatgtaaagagtgtgaagacagaatccatacagaatgcatcaattgtaacagttgaatataatgatggcacagatatggataaagctgaagaacaactaaaaaaagaaattgataaaattaaatttaaagacggagtgggagatccggaattaactcgaaactctatggatgcctttccaatcgttgcatattcatttacaagtaataaacatgacttaaaagatgtaactaaagagcttaatcaacaacttatccctaaattacaaacgattaatggtgttcaaaatgctcaattaaatggtcaaactaatagtgaagtaacacttaaatttaagcaagatgctctagatgataaagggttaactgctgatgatgtcgaaaattacataaaaactgctactcgtgaaacaccgttagggttattccaatttggtaaaactgataaatcgcttgtcgttgacggtcaatttaaatcagttaatgctttaaaaaatctaaagattcctttatctatagcaggacaaggcaatcaaagtagtgatgattctaataatagtagcgattctgataatgagagcttaatgcctaaagaaaattccaactcttcgcaatcaggatcaaaaatggcaagtagtaatgggaaaatgccatcagtaagcttaaaagacttagctgacatttctgtaggagataatcgaacttcaatatctaaaacgaatggtaaagacgcagttaacttacaaattatgaaatctcaagatgctaatactgttcaagttgccaaagaagtccagaaaaaagtagatgaatttgttaagaataataaggttatgacatcaacgaagacgatggatacagctaaacccattgaagattccctttataccatggtagaaaaagcagctctaggtacgattgtagctattatagtaattcttctattcttacgtaatattagaacaacagctatttcagtagtatcaatcccattgtccattctaatagccatggtggctttaaagttaagtaatgtatcattaaatattctgacattaggtgcattaactgtcgcaataggacgtgtgattgatgactctatcgtcgtagttgaaaatatttatcgtagactatcagattccaatgagacaatgcaaggtgaaaatttaataataaatgcgacaactgaagtatttaaacctatcatgtcctctactttagtgacaattgtcgtatttttaccacttgtctttgtatcaggttccgtcggtgaaatgtttagaccatttgcgctggcaatcacatttagtcttttagcgtcactccttgtttccattacagttgtgccggctttaggttctacacttttcagaaaaggtgtgaaaacgaagcgtcagcgtgaaggtttaggtgtgattagcaaagaatatagacgaatactaaaatggtcactcaatcataaatggatagtcattgtgattagtatagtgattctgattggtagtattgggttaggtgcgacaacattaggaacaagctatatttcatcgggagataataaattcttagcattaacttatacgcccaaacccggcgaaactgaaaagtcagttttaaatcatgcgaaggaagtacaaaaatacttagatagtaaagataaagttcaaaccgtacaatattctgttggaggaccgacacctcaagatccaacaggtagcacaaatagtatggcaattatggttaaatatgattcaaatacacctcactttgatgaggaaccagataaagtgcttaaacacattgagacgtttaagcaaccaggagattggaaaaatcaggatttaggaactggtgcaggtaatgattcaatagaagtgactgtaaaaggtccttcaccagaagcaattaaagatacggttgaaaatatcgagaagaaaatgaaaaatattgatggtatcgtaaatgttaaatccgatttatcacaaacatatgatcaatatgaaattaaagtagatcagaataaggctgcagataatggtatttcggcaagtcaattagctatgaatcttaatgagaacttgcctgaaaagacaattactacagttaaagataaaggcaagaaaattgatgttaaagttaaacagaataagcaaactgattggtctccgaagaaactgaataatatagaattgaaaaaaccaacaggtggaacaattaaattaagtaaaatagcttcattacagaaaactacgacaccaagtaagttaacgcaagaagatggagactatgcaacgactgtgacaggtaaagtttctgataaagatgtcggaggtaagtctcgcgaagtcatgtctcaactaaatgatattcataaaccgaacaacgttaaaatgaatgttggtggtgcgacagatgatattaatacggcgatgtctcaattagctatagctatgttagctgctattattattgtttatttaatacttgtcattactttcaaaggtggcctagctccatttacaatactcttctcattaccatttactgttgtaggtgttgtattggctcttgttataactggcgaaacaatttccgtaccaagtttaattggtatgttgatgcttataggtattgtggtaactaacgcaatagtcttaattgaccgagtaataaacaatgagaagaatggtttggaaatgaaagaagcattgattgaagcgggtggcactcgtatcagacctattttaatgactgcaatagcaacaattggtgcattaattccattattatttggtcaagatagttcaattcttatttcaaaaggattggcagctactgtaataggcggtttagtttcttcaacaatattgacactcatcgtcgttccagttatttacgaaatcttgttcaccctaaagaataaactttctagaaaatggaataataaatag

SEQ ID NO: 856 - DNA, 1251 bp, Staphylococcus capitis
atggaaaagatgaatatcactaatcaagaacatgacgcatttgtaaaatctcatccaaatggcgacttactgcaattatctaaatgggcagatactaagaaattaactggatggtactcaagacgaattgcggttggtgaaaatggtgaaattaaaggtgtaggacaattactattcaaaaaaatacctaaattaccattcactttatgctatatatcaagaggttttgtaactgattataataataaagaagctttagagacactgttggaaattgctaaacaggtagctaaagaagagaaagcttatgcaatcaaaattgatcctgacgttgaggttgataaaggcgcagaggctttaaaaaaccttcgtgatttaggatttaaacataaagggttcaaagaaggattatcaaaggattatatccaacctagaatgacaatgattacgcctatcgataaatctgacgatgaacttatccaaagttttgaacgacgcaatcgttctaaagtacgtttagcacttaaacgaggtactaaagttgaacgtactggacgtgagggcttaaaaactttcgctaatttgatgaaaattacaggtgaacgagatgggttcttaacgcgtgatattagttactttgaaaatatttatgatgcattacatgaagatggagatgcagaacttttcttagtgaaattagaacctaagccagttttagaacaagttaataaagacttagataatctttcaaaagaaaaagaaaagctacaacagaaaaagcaagacaaaaaaacattaaataaaataaacgatgctgaaaataaaattaagaaaacgcatgaactaaaagtgaatttaacagagcttgaaaaagaacatccaaatggcatctatttatcgggtgcattattgatgttcgcaggtaataagtcatattatctatatggtgcctcttcaaatgatttccgtgatttcttaccaaatcatcatatgcaattcgaaatgatgaagtatgctcgagagcacggtgctaccacgtatgattttggtggaactgataataatccagataaagattcagaacattatggattatgggcatttaagcgtgtttggggcacatacttaagtgaaaaaataggtgaatttgattatgtccttaatcaaccgctatatcaattgattgaacaagtaaaacctcgtttaactaaggctaagattaaattatcacgtaaactaaaaggtaaataa

SEQ ID NO: 857 - DNA, 252 bp, Staphylococcus capitis
atgagaaaagtcattctattcttatttatcattttaaacttattagctattataacatcgttagctcaaccgctcactgtatcaaattttagtttgagagtaatgtttgtagcattatcatttgttttatctattttcttctcacttataagaacatctcgttttgacactattttaagtatgatttcagtaatcattgcattcattcacattgcaatcattgctcaaagtacttatgaatacctatattaa

SEQ ID NO: 858 - DNA, 762 bp, Staphylococcus capitis
atggagcttaagtttgatcacattattcattacattaatcaactcaatcaatttgaatttcctgggaaattattaaagttacataatggtgggaaacatcatcaatttggtacgtataaccagttatcttatattaatggtaattatattgaattgttagatgttgaagataaagaaaaacttaagaaagtagctaaaacagaagagggacgtgtctcatttgctactaaaatagcccaagatgactttaatcaagggttcaagacaatttgtttgcgaactaaagacatagaagaagttaaagcaactttacaaaagaaaaatattgatgtcataggacctattcgtatggaaagggaaaataaaaaaggggataaagtaggatggcaacttttatatatagcagatcctagctataatgttaaacctccattcttcattcaatgggatgagagtgaagcatataaaaatgaaagtttaaaagacttgtatcagaagcaattttcaatagaaacgcttgttgtgagtagtgaaaaacgcaacttaacagtagacaattggatcaaatggtatgacatgaaagttgtagatgaaactgatacgtatactgacctcattttagcggatgatgatatcctttttagaattgaagatggaaaagacccaggctatcacactctagtaattaaagattcagaagccacatcaccatattctataataattagaggtgcaaaatatcgctttgaacctataaattaa

SEQ ID NO: 859 - DNA, 432 bp, Staphylococcus capitis
atgttaaacaatgctttcttcaatagttttataggtgtatacagaccatacacaaaattaactcaaccgattttagataaacatgatattcatactgggcaatggcttgttttaagagacatagcaaattttcaaccaaccacattagtaaaaatttctaatcgacgttctatcgaaaaaccaactactcgtaaaatagttaaagtactccttgataacaaatggattagtacagaacaaggtagtgataagagagagaaattactaagactaaccactgaaggacaagccctgtttgaaactataaataaagaaatttcggtaatacaaaaagatattataaagaaagtaggcttaacagaagcacaactaacagaaattacaaaagttatgtctcaaatacatgagacacttattaaggaggaaaaataa

SEQ ID NO: 860 - DNA, 1200 bp, Staphylococcus capitis
atgaacgaagcgatacctactaaagatcccatatttactaaaagctttaatctcaattttgtaattaactttttcgtttatttatgtatgtatcttttgatagtagtcatagctggttatagtaaaacagaatttcatgcttctgattcacttgctgggctggtcgtaggtttattcatagttggctcacttattggacgatttatcacaggaaaatacgttaactcttttgggccaaaaaagatactcattttcggattaatttgtttaatcattactcaattactttacttcattccgggttcagtgtggttcttgatgatagtaagattacttaacggtattgctactgcaatcgctactaccgcaacaggtaccattgctgcttacgtgacaccaactacacgtaaaagtgaaggaattagtttattttctttaagcttagttttgggtacagcgattggtcctttcttcggcatgttgctaatgaattcattttcaattcaaattctatttatgatttgtgtaatattaggagtattgagtggtttactatcactctttataaaaattgattttaaaaatgttgcatctaaaaatgatacgtctaatcgaaaaacatttagtttggggaattttatcgcaaaagaagcaattcctgttgcgattgtcatgatgttaattggtgtcacatacgctgcgattctcacttacttacaagcatttgcagttgagagaaacttagtaactgccgcaagttacttctttatattttatgcagtggcctcacttgtgacacgcccaattgcaggtcgattaatggatgataaaaatgaaaatgtagttgtttatcctgcatttattttcttaatcataagttttgcaatgttaatgtttagttttgatggctgggtattactcattgctggtattgcattaggtatcgggtatggtaacttatcttcctcaatgcaagccattgcaattaaagtatcatcttcaacgaagtacggtttagctacatcaacttattttatcggtttagatatcggtattggcttcggaccatcattcctaggccttttcacacatatgattacttatagtcaattatatggcattatggcaatattaggcataattacgttatttatttattttgtagttcatggtcgtaatgttaagcatcaatcgatttaa

SEQ ID NO: 861 - DNA, 351 bp, Staphylococcus capitis
atgagtaacaaagtacaacgttttatcgcatctgaaagagaattaagtcaacttaaacattggttaaagacgacttatcgcatttcgattgaagaatttgtggttttatacaaagtttatgcagatactaagattagtggtaaagaactccgtgatacattacattttgaaatgttatgggatacaagtaaaattgatgtaattataagaaagatttacaaaaaagagttaatttctaaattacgttctgaaacagatgaaagacaagtattctatttctttgatgctaaacaaaagaaattattagataaaatgactggtgaaattgaaacaattagtattgctaattaa

SEQ ID NO: 862 - DNA, 1026 bp, Staphylococcus capitis
atggtagtagagcaaattaaagataaattaggccgccctatacgtgatttaaggttatctgtcacagatagatgtaactttaggtgtgattattgtatgcctaaagagatatttggagatgattttgtctttttacctaaagaagagctactaacttttgaagaaatgactcgtatatcacgtatttatgctgaattaggtgtcaaaaagattagaattactggaggcgaacctttattacgtcgtaatttatatcaattgattgaacagctcaatgagattgagggtattgaggatattggcttaacgacaaatggcttgcttttaaagaaacatggccaaaatctctataatgcaggactccgtcgcatcaatgtaagtttagatgcgattgacgatgaggttttccaagcaattaataaccgtaatattaaagcttctactattttagaacaaatagactatgcagtttcaatcggatttcacgttaaagtgaatgtcgtcatacaaaaaggtgtgaatgatgaccaaatcataccaatgatagactattttaaagataagcagattgaaattcgatttatagaatttatggatgttggtaatgacaatggctgggattttagtaaagttgttaccaaagatgaaatgctaaatatgattgaagaacattttaatattgagccactagaacctaaatattttggagaagttgctaaatattataggcataatgataacggagcgaagtttggtttgataactagtgtgtctcaatcattctgttctacatgtactcgagcacgactctcatcagatggtaaattttacggatgtttatttgctactgtggatggatttaacgttaaatcattcatgagatctggagcaacagatgaagaattaaaagaacaattcaaagcgctgtggcatattcgagatgaccgatattctgatgaacgaacagaacaaactgttgctaatcgcaaacgtaaaaaaataaatatgaattatatcggaggatag

SEQ ID NO: 863 - DNA, 606 bp, Staphylococcus capitis
gtgaaagcaatgatattagcaggtggtcattctgaacgctttggtaaacctaaagcatttgcagaaatagaagggcaaccattttataaaaaaatcataaacactttgacttcaacaaatatgtttaacgaggttattattagcaccaatgaacaattagcgcctttatttgaacatcaaaacgttgttattgacgataataatagtagaaataagggcccattagcaggaatttattcagtaatgaaacaatattctaatgaggaattattttttgtagtttcagttgatacacctatgattacaagtaaagctataagtggattatatcagtttatgatttctcatctcattgaggatcacttagatattgcggcttttaaagacgcagaaacaaaaatacccacgattgccttttatagtccgcatgcattgaaaacgatagaggcagctttgcaatcagatgactatagtttgcgacatgtgtacaatcaattatccactgactggttagacgtttctgaaattcattctcctcattattggtacgataatattaactatcagcaagacttggactctctaaaaacgaagataagaaattaa

SEQ ID NO: 864 - DNA, 234 bp, Staphylococcus capitis
atgaaagtactttacttcgcagaattgaaagaaattttgaatcaatcatctgaagagatagatactcaaaaaacgatgacagttcaagaatttgaagcatatctgtttgaacaacatccggaaattgaaagtaaaaaatttcaagtcgcagtgaatgaggagtttgtcagaaaagatgatattgtacaacctcaagatactgtagcacttattccaccagttagtggaggttaa

SEQ ID NO: 865 - DNA, 453 bp, Staphylococcus capitis
atgaagcaatttgaaatcgtgactgaaccgattcaaactgagctatacagagattacacacttaatgaacatcaaggtgcagttgtggtttttactggtcatgttagagaatggacaaagggagttcgaacagaatatctagaatatgaagcttatactcctatggcagagaagaaactagcccaaattggcgatgaaattaagcaacgttggcccggcacgataactacaattgtgcatcgtatcggaccgttacaaatttctgatatcgcagtgcttatagcggtatcttcaccacatagaaaagatgcttatcaagcaaatgagtatgcaattgaacgcataaaagaaattgttcctatatggaaaaaagaaatttgggaagatggtgaagagtggcaaggccaccaaaagggtacccatcaagaagcgaagagggggagaacattatga

SEQ ID NO: 866 - DNA, 480 bp, Staphylococcus capitis
gtgattatacaaattgtaggatataaaaattcaggaaagacaactttaatggcacatgcggtttcatttctaaaagaaaagggatttactgtagcgacaattaaacatcatggccatttgggtaatgatattacactgcaaaatgatgacgttgatcatatgaaacattttaatgcaggcgctgatcaaagcattgtacaaggtgaaacatttcaacaaacagtaacacgtataagtaaacagaatcttactgatattattaaagaatctgttacaattgattgtaatatcatcttggtagaaggttttaaagaagaaccgttcaaaaaagttgttgtatatagagatgatagcgacttagaaatgttatctaagctaaccaatgtatgtttcactatcaatttgaacgaatcaaatgtttatgaaaaatttgagattgcattgttagaattgattaagatagaaggattgaaaaattaa

SEQ ID NO: 867 - DNA, 1260 bp, Staphylococcus capitis
atgccagttgaaaaaagaaatcctattccagtaaaagaagcgatttctcgcataatgaaacaaaatgtgtcgattcgtactacgaaagtggatttagatgaaagtttggggcatgttcttgcagaagatattgttgcaacgtatgatattccacgttttaataagtcaccatatgatgggttcgccatacgtagtgaagattctaaagatgctagcggtgaacatcgcattgaatttgaggttatcgatcatataggagcgggttcagtctcaactaagactttagggaaaaatcaagcggttcgtattatgactggtgcgcaaataccagagggtgctgatgcagttgtgatgtttgaacaaactattgaatctgaatcaacttttactatacgtaagccgtttgatcatcttgaaaatatatcactaaaaggcgaagaaacgacaactggagatatcgtacttaaaaaaggacaacatattaatcctggtgcgattgcagtattagcaacgtatggctatacacaagttcctgtaacgattaaaccaagtgtagcaattatagcgacaggtagtgagttgttagatgtagaagatgaattagaacctggtaagattagaaattcaaacggacctatgattaaagcgttagctaaaaaaattggtttagaagtaggcacatatcaattacaacaggataatttggaaagtagcattcaagtagttaaagatgctttatctcaacatgatatcgtcattactacaggtggtgtgtcagtaggtgatttcgattatctaccagaaatatataaagcgatagatgcaaatgtcttatttaataaggttgctcaaagaccaggaagtgttacaacagtcgcatttagtaatggacaatatttatttggtttatctgggaatccttcagcttgttttactggttttgaattatacgttaaaccagctgttaataaattgataggcgcaagtgagtgttatcctcaaataatcaaagcaacacttatggaagattttactaagcctaatccttttactcgttttatcagagctaaagcgactttaacaccttcaggtactacagttgtcccttcaggttttaataaatcaggtgctgttgtagcgattgcacatgccaatgcgatgattatgttacctagtggaacacgaggattcaaagcagggcacacggtggatgtaatacttacagaatccaatgcgtttgaagaggaattgttgttgtga

SEQ ID NO: 868 - DNA, 489 bp, Staphylococcus capitis
atgaataactttacacatataaacgaacaagggaacgctaagatggttgatgtttctgacaaagaagtaactaaacgtcaagcacgtgcccattcaagtattactgtaaatgaaacgatttataggcaaattatcgataatactaataaaaaaggtaatgtactcaatactgcacaaatagcaggaattatggctgctaaaaacacatctacaattatacctatgtgccatcctttacctctaacaggtatagatgtcaattttgaatgggatacatctcaatcacctcactatatattgaatatcactgcaattgtttcaacaactggtaaaacgggcgttgaaatggaagcactcactgccgcatcagcaacagctttaactgtttatgatatgactaaagcagtcgataaagggatggtcattggtcaaacctatttagaatctaagtctggtggtaagtctggtgactatcaaagaaaagtatga

SEQ ID NO: 869 - DNA, 519 bp, Staphylococcus capitis
atgaacaatcatcaacatgaacatgttcaattagaaagaaatattaatgtagcaatactaactgtttctgacacaagggatttcgatagtgataaaggcgggcaattagttcaatcacttctaaaagagattaatgtaagtatagaagaacaccattataagattgttaaagatgataaaaatgcaattacattacagataaaacaatggttagaagacaatgaaaatatagatgtcattattacaacaggtggtactggtatttctcaaagagatgttacgattgaagcggtaagaccactattaactaaagaaatagaaggatttggagaattatttcgttatttaagttacacagaggatgtgggtacacgcgcattattatcacgcgctattggaggcacagcaaaagataaattaatctttgctttacctggatcaactggggcagtcaaacttgcaattgaaaaactaattaaacctgaattaaatcaccttgttcatgaattaacgaaataa

SEQ ID NO: 870 - DNA, 1005 bp, Staphylococcus capitis
atgaatcaagaacgttattctaggcaaatgttatttaaacatattgggcaagaaggacaaagaaagattgaaaatcaacatggccttattattggaatgggcgcattgggtacgcacttggcagaagggttagttagagcaggcattggtaaattaactatagttgatagagattatattgaatatagtaacttgcaaagacaaacactttacacagaaaatgatgcacatgaagcattacctaaagtgatagctgcaaagcacaggctaattcaaatacgtaatgatgtcgttattgagacatggatagaacatgtggattatccttttttagaacaacatggtaaagaagtagatttaatacttgatgcgactgataatttcgatacaagacaattaatcaatgatttctcttataagcatcatattccttggatatatggtggggtagttcaaagtacttacgccgaggctacatttatcccaaaacaaacaccttgttttaattgtcttatgcctcaattgccttcagtaaatttaacatgtgatactgtaggcgtgattcaacctgcggtgactatgactacaagtcttcaattaaaagacgcattaaagttgctaacaggtcatgatattaagactcagttgacttatggagatatatgggaaggtgatcattataggattgggtttagtaaaatgcatcaagatcaatgtccgacatgcggtagtcgccctcattttccatatttaaatcaggaacgccaaaattatgccacactttgtgggcgagatacagtacagtataagaataaaaatatttctcaggaaatacttactacctttctagaacagcatcatatacattatcgcacgaatcattatatgactattttcaaatttaggggtcatcgtattgttgcattcaatgggggcaggttccttattcataatatgactcaacctcaacaagcgatacaattaatcaatcaattgtttggataa

SEQ ID NO: 871 - DNA, 612 bp, Staphylococcus capitis
atgttgaagattcaattagaatacttattaaaagatatcaatatccgtgtcgacattaatgatgaaatccctaaaatatatgccattcgaggtccgtcgggaataggtaaaactactgtactaaatatcatagctggtttaaagaaagctgaccgagcactaattaaagtgaataatcgtatcttgactgatacggaaaataaaattaatgtcaaaattcaacaacgtaatgttggatatctatttcaagattatcagctttttccaaatatgaacgtgtataaaaatatcacttttatgactgaaccatctgagcatataaataatttaattcagacactaaacatttctcacttagttactcaatatccaatgactttatctggtggagaagcgcaacgtgttgcattagcacgttcattaagtacgaagcctgatttgatattacttgatgagcctttctcaagtttagatgatgcgacgaaggatgagagtattgcactagtgcaaaagatatttgatgagtggaagatacctattatttttgttacacattcaaattatgaagctaagaagatggcacacgaaattgtaaatattggcaatgaataa

SEQ ID NO: 872 - DNA, 672 bp, Staphylococcus capitis
atgcctgatttaacatcattttggatatcattacgtgtcgcgattacaagtacaattattgtaacaattttaggaatatttgtttccaaatggttatataataaaaaagggcattgggtaaaaatccttgaaagttttataatattaccaatagtacttccacctacagtacttggttttatattattaatagttttttcaacaagaggacctataggtcagttcttcaccaatattctacacttaccagtagtttttactttgacaggtgcagtacttgcatctgtcattgttagttttcctctaatgtatcaacatacaattggtggatttagaatgatagataagaaaatgctaaatactgcgcgtacaatgggtgcaagcgaaactaaaatatttttcaaattgatattacctttatccaaacgttctatattagcaggcattatgatgagctttgctcgcgcgattggtgagttcggtgcgacgttaatggtggctggatatattcctaataagacaaatacgttgccgcttgaaatttatttcttagttgaacaaggtaaggaaaatgaagcttggctatgggtacccgttctagtcgccttttctgtagtcgttattactacgattaatttaatcaatcatgataaatatagggaggtcgattag

SEQ ID NO: 873 - DNA, 795 bp, Staphylococcus capitis
atgaaaataaaacattttttagttgctatgttagttctgtgtctagtgttagcaggatgttcgaactctagcaatagtagtaaagatagtgataaaaaagatgaaagctcgtctgataatagtaaaaagcaagaattacaaatctctgctgcagcgagtttaactgatgttagtaaagcacttgcgaaagaatttaaaaaggatcacaaaaacgctgatattaaatttaattacggtggttctggtgcgttaagacaacaaattgaaacaggtgctcctgtagatgtatttatgtctgcaaacactaaagatgtggatcaattaaaagacaagaagaaagcgcatgatacatataattatgctaaaaataaacttgtattaattggtgacaaggataagaattataaatcagttaaagatttaaaagatggtgataaacttgctttaggtgaagtgaaaactgtaccagcaggtaagtacgctaaacaatatttagaagataataatttatataattcagtaaaagataaaatcattaatgccaaagacgttaaacaagtattgaattatgttgaaaaaggtaatgcacaagaaggttttgtatataaaactgacttatacaatcaaaagaaaaagaccgataaagtaaaagagattgaacaagttaaattaagtaaaccaatcacttataaagctggtgcaacttctgagaagaaactagctaaagaatggatgaaattcttaaaatctgataaagctaaaaaaattcttaaagaataccaattctcggcttaa

SEQ ID NO: 874 - DNA, 789 bp, Staphylococcus capitis
atgaataatgatgtttcgagtaatcaatcaattataagatatgaaaacgggcaattatttgcaaccgaagacttttatgttacagaattccctttaactatcatggtcaacggcgaagaatttgctactattatttgtagcccaaccaatatggaagaacttgtactaggatttctcgcttcagagggagccattctaaagagagacgaattaaaatcaattcaaattgatgatagtaaagggtttgctcatgtagaattaactaaatcattgggagatcgttttgaatattctacgaaacgtatgattgcctcatgttgtgggaaaagtcgtgagttttactttcataatgatgccgccattgctaaaacttcgatgtctaaaatcgaattacatcctcaacagattttaaggatgatgactcaacttcaaagtgctagtgtgatcttcaaacaaaccggcggcttacacaacgcagcaattagtgatggtaataccttttttgaacatagacaagatattggacgtcataatgcacttgataagttatatggttattgtatacaaagacatatttcggtaagagataaggtattaatatttagcggtcgtatttcttctgaaatattaattaaagcagcaaaaattggcgtaggtgtgatactttctaaatcagccccaacaacattagctgtgcaattagcgaaagacttaaacattacagcaattggatttattagagatggtaactttaatatttatagccatccagaacgtataaaaggctag

SEQ ID NO: 875 - DNA, 756 bp, Staphylococcus capitis
atgaatcacatcacgttaaatgatatctatgtcgatggtgtgaaatattcagaagacaaccgtaaaatcatttatttaacgccgggacatccacttaaatttgatagtaatacatggatctataaaaaaatgcccacaataagtcaatggacagaagatttgaaagaacaacaggaatatcatcttaaacaaggttcaaatcatttgtcgttttattttcctgaaaatgaagttcttagtaaacaatggttagatattattagacaacaaggttttgaactaggtattttggaattgtatgcaatagaggctaatgaactaaggcaattgcctcaaaataatcaagtgataattcagcaagtgacaaagcaaaacattgatgattatgtatatattcataactactttgctctgccttttggagaacagtatgccaaagaaagtgcaaagcaaatcaaggaatgcttcttgtcagatggaaaaaataggttaattgcgtacttagggaaaaagcctgttggaattgttgatttaattattacatcacgtacgttggaaatagatggattaggtgtgatggagcaatacagacataacgctattggttcatcaattcaatcgcacgtcggtaaattagctaaaaccaagccagtaattcttgtcgcagatggtgaagatacagctaaggatatgtacataaagcaaggttatacatatttgggttttaggtatcaaattttaaaagaaaacatctaa

SEQ ID NO: 876 - DNA, 549 bp, Staphylococcus capitis
gtgagtacaaagaatttagtttttacagctttgatgactgccattatttgcattttaggattagtacctggtgtgcctttaccgtttatgccggtaccaattgtgttacagaacattggtatctttttagctgggatcatattagggcgtaaaatgggcgcattgagtgtaattgtctttttattgttagctgccacaggtttaccagttttatccggaggacgtggaggaataggtgtatttgttggcccatcagcaggattcctatttttatatccatttatagcttactttattggattaattagagaccgttattatgggaaaattaatttccttatactcttcgtcactacattaattatcggggttctagctttagatatcatcggtactatcattatgggattcattatacatataccgatttctaaggcatttttactatcatttacatttatgcctggagatattattaaagctattatatctagcttgattggtgcgaccatcttaaatcacactcgttttaaaagtttgatacaataa

SEQ ID NO: 877 - DNA, 936 bp, Staphylococcus capitis
atgactaaagtttattttaaccatgatggtggagttgatgatttaatttctttatttttattactgcaaatggaagatgttgaattaattggtgtgagtacaattggagccgactgttatcttgaaccttcattgagtgcatcagtaaaaattattaatcgattttctaatcaatcgatacaagttgcaccatcttacgaaagaggtaaaaatccatttcctaaagaatggagaatgcacgccttctttatggatgcattaccaattttaaatgaaagccaaacgcctaaacgagctaatgaaagtaactatgaagcttatgaagatataatccaaaaagtaaacgcaagtactgaaaaggtgacattactctttactggtccacttaccgacttagctaaagcgatgcgtcatgatcaatcattcctatcaaatgtagaaaaattagtatggatgggtggaacttttctagataaaggcaatgttgaagaaccagaacacgatggcactgcagaatggaatgcgttctgggaccctgaagcggttaaaacggtgttcgatagtaatcttaagattgatatggtagctttggaaagtacaaatcaagtgcctttgacattagatgtgcgccaaaaatgggcggacgagagagaatttgtagggattgattttttaggagtaagttatgctgcagtaccaccattaacgcatttctttacaaattctacatactttttatgggatgttctaacaactgcatatgttggtatgcctaaactagtaaaatcagtaaaaatgaatgtgaatgtaataagtcatgggccgagtcaaggaaagacatacaaagatgataacgggcgtaaagtgaatgtagttaattatgttgaacataatgcgtttttcgattatatttcttatttagcgaaaaaagcttaa

SEQ ID NO: 878 - DNA, 921 bp, Staphylococcus capitis
atgagaaaattattattacctttatttgtcttagtcctagtattagcagcatgcggaaacaactcaggaaacagctcaaaggactcagataaaaaggcagaaactaagtcatataaaacagatgatggtaaaacaattaaaatacctaaagatccaaaacgtattgcagttgttgcaccttcatacgcaggtggaattaaaaaattaggtggaaatatcgttgcagtaagtaatcaagttgatcaaagtcatattttaaaagataaatttaaaggtgttactaaagtgggagacgacgatgttgaaaaagttgccaagcaaaaaccagatttaatcatcgttttagatcaaaataaaaatattaaaaaatataaaaaaattgcagctactgtacctttcaattaccaaaagcataaatacctagagcaacaagaggaattaggtaaattacttggtaaagaagacgaagttaaaaaatgggaaaaacagtggaaagaaaaaacagctaaagacggtaaagaaatcaagaacaagataggtaaagatgctacagtttcaatcttcgatgaatttgataaaaaattatatacatacggtgataactggggccgtggtggcgaagtattatatcaagcattcggattaaagatgtctaaaggtcaaaatgatttaactaaaaaagcaggttgggcagaagtaaatcaagagcaaattgagaaagttgcaggggattatatcgtgtcaacaagtgccggtaaatctactccaggttatgaaaaaacaaatatctggaaaaatttacctgcagttaaaaaaggccacgttgttaaggtaaaagctgaaacttattggtataatgatccttatacgttagactttatgcgtaaagacttgaagaaaaaattaatggatgcaaaataa

SEQ ID NO: 879 - DNA, 1146 bp, Staphylococcus capitis
gtggtacagtcgtttctagtacgcacagaaattcaaaaaagatggatcgcaaagtttaaacaagtggaagatatatttaaacaacgagctgcggaaaatgatattcaaggtcaatttccatttgaaaatataaaatggttagtcgatgagggatatactaaattgtctttacctaaagagtacggtggagaaggtgcaacaatagaagatatggtcatcttacaaagttatttaggtgcaatagatggcgcaacggctttatcaattggatggcatctcagtgtggttggtcaattatatgaacaaaatatgtgggagcaaagtatgctcaatacattcgcgaatgagattgtaaatggagcgctagttaatcgtgctgttagcgaagcagaaaccggtagtcctactagaggtgggcggccaggtacacatgctgttaaagaagacaatggttatgtgctaaatggagttaaaacatttacctcaatgagtaaagcattaacgcattacattgttggagcttatgtagaagagctcgatacagttggattcttcttagtacctcgagaatttgatggcgttgaagttgctgataattggaatatggtaggaatgcgtgccactgaaagtcatgacttagttcttaatgatgttcatataccatacgagtattttgttgaagctagtcgtaaacctcaaccgaatgggtggattcttcatataccaagttgttatttgggtattgcgcaagctgctcgagattatgcagttcattttgcggaaaattatagccccaatagcatcgaaggaacaatagcagatttgccgacggttcaacagaatttaggtaaaatggaaagtttattattgtcggcgcgccatttcttatggagtactgcacaaggttaccaaatatatgaagaagatgcacaaatttggaatgtaacttcagctagtaaggtaatggtgatgaatcaagggatggaagtcatagatttagcaatgagaatcgttggagctaaaagtttagagatggatcggccgttgcaacgttattatagagatatgagggctggattgcataatcctcctatggaagacatggcttatacgaatattgctaaaagtattacaggtaagatgtaa

SEQ ID NO: 880 - DNA, 900 bp, Staphylococcus capitis
ttgaaaacaattgaagtaatattgaaaaatatcgctcaggtattattgattaatagtaaatggactggtttattagtattgattggtttatttgttgcgaattggaaagtgggtttaagtgcacttcttgctagtagtattgcttacttacttgcaccgtatatgaactactcacaagaagaaattgacaatgggttagcaggatttagtccggtactaactgctatagcattaatattattcatagacaataattggagtggtgtattaattacgttaattgcaacaatattaacactacctatgggttcagcaattagagaatttctgaaatcatatggtgtatctatgctaacttcaccttttgtcattatgacttggattactgtattaatacctggacaagttaaacatttaactactgaactagatatcattcctggtcatattaaaaaagcgtcatttgatcttgggaatgaacatatccaattttttaaatctcttatagaagggtttagccaagtatttcttgtaccaaattttataggtggtttatttatcctagttggtatatttataggttctaggaaggctggcatttacgcagttattgctaatcttgtgggtttcgtcatcgttggattattaggtggtaattatacagacatcaatgaaggtttattcggctataatttagttttaacggcaattgcactaggtgttacttttaaaacaacgatgaatagctatttggttacaggttgtggtgtattgttaacagtatttatacatctcggattaaatacgttgcttgaaccttttggtttgcctgcattaaccatgccgtttattttagcaacgtggttgatgctgtttgcaggagggaaacatcgcacttaa

SEQ ID NO: 881 - DNA, 303 bp, Staphylococcus capitis
ttgcatttcacacaacgagagcaagataagttaatgatagttgtggctgcagaagttgctcgtcgccgtaaagcacgaggccttaaactcaatcatcctgaagcacttgctttgattagtgatgaactacttgaaggagcaagagatggtaaaactgttgctgaactaatgagctatggcaaaacgattttaaatgaagacgatgtcatggacggtgttgcaagtatgataaaagaaattgaaatcgaagcaacatttccagatggaactaaattaattactgtccatcatccgatagtttaa

SEQ ID NO: 882 - DNA, 408 bp, Staphylococcus capitis
atgattcctggtgaaataaaagttaaaagtacagaaatagaaatcaataaacatcatcctgaaactgttattgaagtaaagaacacaggtgacagacctatccaagttggttctcattttcatttctttgaagctaataaagctttagcatttgatcgcgaaaaagcttatggaaagcatttagatatccctgctggagctgctgttagatttgaacctggtgacgaaaaggaagttcaacttgttgaatatgctggtcatcgtaaaatctttggtttccgcggtttggtcaatggtgatatagacgaagaacgcgtctatcgtccaactggtaaaaatgatgaaaatgctggcattttcggtgatgaaggcgaacaaaatgcgaataaaaaaggtggtaagcaataa

SEQ ID NO: 883 - DNA, 1716 bp, Staphylococcus capitis
atgagttttaaaatgacacaatctcagtatacaagcttatacggtcctaccgttggtgattcagtgagattaggagacacaaaccttttcgcacaagttgaaaaagactatgctaatttcggtgatgaagctacttttggtggtggtaaatcaattcgcgatggcatggcacaaaatccgaatgtaacccgagatgatagaaacgtagcagatcttgtattaacgaatgccctaattatcgattatgacaaagttgtcaaagcagatattggcgttaaaaatggctacattttcaaaattggtaaagcaggtaatcctgatattatggataatgtagatattattattggttcaaacactgacattatcgctgcagaaggtaaaatcgttacagccggaggtatagatacacacgtacactttatcaatccggaacaagctgaagtagcccttgagagcggtattactacacatattggtggtggtactggtgcatctgaaggtactaaagcaactactgtgactccaggcccatggcatatacatcgtatgttagaagccgcagaagaactccctattaatgtaggatttactggtaaaggtcaggccgtaaatcatacagcgctgattgaacaaattcatgctggtgtaatcggtctaaaagtacacgaagactggggtgctacgccttcagcattaagtcatgcattagatgtcgcagacgaatttgatatccaaatcgcacttcatgcggatacgttaaacgaagctggctttatggaagatacgatggcagctgttaaaaatagagtgttacacatgtaccatactgaaggtgctggtggcggacatgctccagacttaattaaatccgctgcttatccaaatattttaccgtcctctacgaatcctaccctaccttatacacataatactgtagatgaacacttagatatggtaatgattacccatcatttaaatgcttctatacctgaagatattgctttcgcagattcaagaattcgtaaagaaacgattgcggccgaagacgtacttcaagatatgggcgtattcagtatgattagttctgactcacaagcaatgggacgtgtgggtgaagtgattattcgtacttggcaagttgcccaccgcatgaaagagcaacgcggattactagaaggtgactctgaatataatgacaataatcgtattaaaagatatattgctaaatatacaattaaccctgctatcactcatggtatttcagattacgttggttcaattgaaccgggtaaatttgccgaccttgtcgtgtgggacccagcattctttggtgtcaaacctgaactcatcgttaagggggggcttattaattcagctgtgaacggtgatgccaatggttctataccaacttcagaaccacaaaaatatcgtaaaatgtatggtcaatacggtggtaacattactcatacagcaatgacttttgtatcaaacactgcttacgaaaatggtatatcccgtcaattaaatttacaacgcgtggttcgtcctgttaaaaatatacgtcagttatctaaagcagatatgaaaaataataatgctacacctaaattagatgtagatccacaaacctatgaagtatttgtagatggtgaaaaaatcactagtgaagctgctactgaattaccattaactcaaagatacttcttattctag

SEQ ID NO: 884 - DNA, 453 bp, Staphylococcus capitis
atgattatcgaagaaattcaaggcaacattgcgaatttatctcctgaagagaaacaaaaacacattgaaaaagtttacttagagaactctgatttagtaaaaagaattcaacgtgtcaaaactgatcacggtaatgaaataggtatcagattaaaacaaccgattgatttacaatacggcgatatcttataccaagatgaaacaaatattattgtggtcgacgtaaactctgaagatttattagtaattaaacctagaaaccttaaagagatgggagatattgcacatcaactcggaaatcgtcaccttccagcacaatttacagatactgaaatgttagttcaatatgactatttagttgaagatttacttaagcaattaggtattccttttaatcatgaagatagaaaggtaaatcaagcatttagacatataggacattctcatgattga

SEQ ID NO: 885 - DNA, 690 bp, Staphylococcus capitis
atgattgatcatcaacatctaagactttttcagttctgtgattctcaatttccgactggtgcatttagtcactcatttggtcttgaaacttatattcaacgacagacggtacatgatgctgaatcatttacacaatggcttacactctttttaaatgaacagttgacttattcagatggtttagcaatgcgaattgtatatgatgctttagaaaataataatcagacaaaaattttggacatcgataaaaaaatatttgttcaaagtgtgccaaaagaaactcgagttggtacgaaacaaatgggcacgagaatggttaaattggcaatggaactttatgatgcaccgtggatccagtggtatcatgaacaaatgaatctcaaaaaagcaaagctacatcctgcgatatgctttactattttaggtcatcatttaggaatgaacattgacacaatcatagattattatttataccaaaacgtatccagtttaactcagaacgctgttagagctatccctcttggtcaaactgccggacaaaaagtcgtaacgaacatgattccatatattgaaaaaacacgtcaacacatattagagctagcagaatctgattttggtatgactgctccaggattagaactaaaccaaatggaacatgaaaacgtgaatgtgagaatatttatatcatag

SEQ ID NO: 886 - DNA, 615 bp, Staphylococcus capitis
atggctgaaccaattagaattggaattggaggacctgtaggtgcaggtaagactcaattaatagaaaaagttgttaaacgtctatctcaagaaatgagtatcggtgtcataactaacgatatttacactaaagaagatgaaaaaatattagtcaatagcggtgtgctacctgaagatagaattatcggtgtagaaacaggtggttgcccgcatactgcaatccgtgaagatgcttctatgaactttgctgctattgatgaattattagaacgcaatgatgacattgaactcattttcattgaatctggtggcgataatttagcagctacttttagtcctgaacttgtagacttttcaatttatattattgatgtggctcaaggtgagaaaattcctcgcaaaggcggacaaggaatgattaaatctgatttcttcattataaataaaacagatttagctccttatgttggtgcttcgttagaacaaatggcagaagatacgaaagtctttcgtcgtaaccgtcctttcgctttcactaatttgaaaacggatgaaggtctagatgaagtgattgaatggattgagcgagatacactacttaaaggattagcttaa

SEQ ID NO: 887 - DNA, 837 bp, Staphylococcus capitis
atggcacaatctaaatggacaggagaactcgacttaacagtctttaataacgggcatcgttccgttgctcgaaatatcttttttgagaaagcactgaaagtccttcgtcctgtgtatcttaatcaatctacaattccaacattttatattgttaacgtcggtggtggctatttagatggagatcggtatcgtctaaacataaatcttgaagaaaacgcccaagttaccttgacatcccaaggcgccacaaaaatatacaagacactaaatgatcgcgtagaacaatatcaatcttttaatttggcgaatcactcttatatggaatttgtagccgatccaattatcgcttatgaaaatgcaaaattctatcaacataatacgtttcgtttagaagctgaaagttctatgttttacacagatattctaacgcctggctattcttcagacgatcatgatttcacttataaatatatgcacttaattaatgaaatttacgtagaagacgagttagtcgcatatgataatatgctattaaaccctgagaaaaatcaacttagttcaataggctatatggaagactatacacatttaggctcagcttattttatacatccaaaagtaaatcagaatcttattgatgatatttataaacaagtatcgcattatgaaaatgaattgaattgtagattaggcattacacagttacccacacacggacttgcaatacgtattttagcgaatcgtacacaaactatcgaaaaaatattaacgaaagttcaatcatatatcgctcaagtactttatcagcgcgaaatagaatttttaagaaaatattaa

SEQ ID NO: 888 - DNA, 342 bp, Staphylococcus capitis
atgggaaaaatcaaagatatcaatgatttggtcaatgctacatttcaagtaaaaaagtttttcagagatactaaaaagcaatataatttaaattatgaagaaatttatattcttaatcacattttaaaaagtgaatctaacgaaatctcttctaaagaaattgctacatgttcagaatttaaaccttattatttaactaaagcattacaaaaattaaaagacttgaatttattatcaaaaaaacgaagcgtgcatgatgaaagaacagttattgtatttgtaacagcggagcaacgagagaaaattaaaaaattaattgttgaattagaacaatatatttaa

SEQ ID NO: 889 - DNA, 324 bp, Staphylococcus capitis
atgattttagataatgtaaatccggacgatttgttcccaactgaaaagaaaggaccttctgtattaggtatcattgaatacaatgtacaggggcaaagtgaatttgaaggtgcattcattgctactaatgaacgtttgattatgaatgtagatatgaatggtcaattctattatagaaatattagatatgatgaagtaaatcaagtggtatttgatggcaaagatattatgtttgaatttaatatcggtaaagtgcctatgaaacaaattaaaactgaagatgttcaagcatttgtagattatgttaaacagaaaattcaataa

SEQ ID NO: 890 - DNA, 729 bp, Staphylococcus capitis
atgcatcaacagaagattaaaagttttctagctcactttgtattagatcacatttcgatagaatatttgagagtttcctataatttaacggtggaacaattaaaattattacaattcatataccattttactgagaaacataaagaaggattaagtttgaatgctattatcttttatagaaattattcaaaaaaccatcttcttaaattaataaatcaactatatgattttaattggctcactaaaaaacgtgatccgcttgatcaacgacgattaatcatttgtctatcagcagtgcaacatgaaaaaatagcccttatgtttgaggattttaaatcatttttagaattaaaatctaaatccatcgcttacattaatcaacatactgcacttccttattatttaaattgtcatgaccaatttgaaagcattgaaaaagtgccgtttcaagaccagttatctttagaagaattatatatattagggctactgattattagtaatgaaccatccacttataaaaatattaaagctcatttattaaaaggggttgttacagtcagccctattatcaaaaaattgtatgccaaaggatatattaataaaagtagaagtactgaagatgagagaaatattgttttaagtgttaatgaagaaaaagtggactacattaaatcaaccattagtgaatgttacaatagcttggaaacgggaatagaacgactataa

SEQ ID NO: 891 - DNA, 1971 bp, Staphylococcus capitis
atgagagagaattattcgatacgtgttattaatcaattagctattaaaacaactaaagcattaaatgtaagagtattctattgtttacaaggtaagagtgagttaactattaatttgaacaagtatgaattaattaaagatgaaattgcattcgtacttttaaatgatacatactcatttaaaagtgaaaatgattcaatttgctgtgttattgatataccttatgattcatatcttagaattgcgaataactcaatgttatctaatggtctaaaaataaataaaaatgagcaagaaagagttaaattttggataataaagttattggaattacatactctaaaaaaagcttacaaaacagaggccaataaattaattctgtatttaattgttgaactaagtcattttgagaatactgaccacccatttaatcaaaaaatgtacatttcagaagaagttcatgaatatttagttaatcaccatgaaaataaaataaataagcaagacttagctaatgcagttcagttatctaatcaaacacttacaagtatgtttaaagaaacgccctttcaaacatttaaccaataccttaaccatctacgtttaaagttttgtctaaatgatattttaactacacgtcgacctatagaagagatagcaattgatcatggcttccaccattattctcgatttatacaattatttaaagatacttatggtaacacacctaaattaattagaagagattatatagcaacgtctatcttccaaaataaatctgaagaaattgatttaaatcgacatattctaaagtctctaagtgaattcagagaagaaacttcacttgaaatagaagagcgtacaattaaagtggcagaaagtaacaatatatatcaatcaccggacttttatattgaacatattaacaataattattttgaccaatgttcatttctaaacatgaaaagagcactaaatatcaataaaggaaatgtacattatatagtagatttaaattataaagatatatttaaagatagagagtcgtttataaaagagttgttacaacttcttcaatttatatctgatttaaatatgcatcctatatttaaagtatcaacttcaaggccagatgtatttaactcatcagagaaaatgtcatttcatcaagcattggaagtattatttatatttttgcgtcaatttaatcattttcaattagggtttttaatagaagaagttaagtgtagtttaatccaccagttacaacaatctattaataagtgttttgatgattatcaattgatttatcgagtaaaacctggccaatatgaagagttaggtttagcgcgaatagtaaatgatgtggataaaataatgataccgattaacttattagaggacctcgatatttatcagtctaaaataattattgaagtagaccaattaataaaaaataaggaaaaactactaaatatacaaacaattgattatataagattattaatgaaccaatatgataaagtgagtggtttatcgttaccttatttagaaaaatatgtggtagttaatatagctcaacaagagccgaatgcattccagttagtatcttatgtaatcagtatgttaaaccaactgagaggcgaaatagtttatagaaataaccagatggtaatgactcgatataaacacgagtatcaagtaattacatattttttaaatatcaaatcaaagatgaatgtgaatcaatatcgattaattttttcagatattaaacaactcaaccatgcagaggtagagtatttcgatattcaaaggtatgcgataagtgagaacaatagtctggacaatctaatgctttatcatcaacaccattggttagcaaaattaaatttcaaagaaatttcaacatcttcgatagaaattcctaaagatagtattgcccatattaaatttcttatttcattgtag

SEQ ID NO: 892 - DNA, 711 bp, Staphylococcus capitis
atgaaaaaaatcgctacagctacaatcgcaactgcgggaatcgctactttcgcttttgcacacaacgatgctcacgcagcagaacaaaataatggtggttataatccaaatgatccaacttcatatagttactcatacactatcgatcaacaaggagattaccactacacttggaaaggtaactggagcccaaatcgtttaaattctcataacaattatagttacagtaactactcaaataataattacaatagcagtaattatagtaattctaataaccaaactggtggcttaggtgctaactattcttcaacaagtcgtaacgtacatgtaacaacaacttctgctccatcttcaaatggtgtgtcattatcaaacgcatcttcagcaggtggtaacttatatacttcaggtcaatgtacatactatgtatatgataaagttggtggaaaaatcggctctacttggggtaacgctaataactgggcaaacgctgccgcttcagcaggatatacagtaaataactcaccttcacaaggtgcgattttacaaacttcacaaggtgcatttggtcacgttgcctatgttgagagtgtcaacagcaatggttcaattactgtttcagaaatgaactatggccacggtgtaggtgttgtaacatcacgtactatctcagctagtcaagctgcttcttataattatattcactaa

SEQ ID NO: 893 - DNA, 1341 bp, Staphylococcus capitis
atggtaatagtggtagtaataggatttatcttctttaatatacctattcagatattattattaatatcatcagcttatgctgcatttattgcatatcgagttgggttaagatgggaagaattagaagaaggtataactaagaggcttactacagctatgcctgctatttttatcattttagccgtagggattatagttggcagttggatgttttctggaacagtgccagcattgatttattatggcttaaagttcttaaatccgagttattttttagtttctgcatttatcatcagtgcaattacttcggtcgctacaggtacagcttgggggtcagcatccacagcaggtatagcattgatttcaatttcaaatcagttaggcgtagcgcctggtatggctgcaggtgcaattattgcaggtgcagtgtttggcgataaaatgtcgcctttatcagatacaactaatttagccgcattagttactaaagtgaatatctttgctcatatcaaatcaatgatgtggacaacaattcctgcatccatcattggcatgattgtgtggttctttgcgggattgcattcaaaaggtcatacgaatcctaaacaaatacagacattactccatgagttagataaagtttataacattaatttaattgtatggattcctttagttgtaattgcggtttgtttatttttaagagtctctacagtaccatccatgctcatttctagtttaagtgctttaattgttgggacatttaataatcatttcaatatagttgatggtttgaaagcaatgtttgaaggttttaatcatagtatggtaaatcaatcacacttatctaagaatgtgaccactttaatagaacaaggtggtatgatgagcatgacagaaattattgttactattttttgtggctatgcctttgcaggtattgtagaaaaagcaggatgcttagatgtcatgttaaatactgtatctaaaggtgtaaaatcagttggaactcttatacttattacagtggtttgtagtttgatgcttgtttttgcagcaggtgttgcttctattgtaattatcatggttggtgtgttaatgaaagaaatgtttgaaaagatgaatttatcaagatcggtattatctcgaacacttgaagattcaagcactatgattttaccacttattccatggggaacttcaggtatatattattcacaccaattaaatgtgtcagtaggagatttctttatttggacagtaccttgttacttgtgtgcactaatagcaattacttacggttttacaggtataggtataaagaaattaaataaaagttaa

SEQ ID NO: 894 - DNA, 1071 bp, Staphylococcus capitis
atgaaaatagctattgtaggttcaggtaatggtgcagtaactgcggctgtcgatatggtagacaaaggtcatgacgtaagattgtattctcgtaacgagtcaattgaaaaatttaatgctgctttcgaaaaaggcggttttgattttaataatgaaggacaagaaaaatttatacctttcacaaatattagtgatgatattgaatatgttctagaagatgcagatatcgttcaagtcattattccatcatcctttattgaatattatgctaaagtcatgtctcactttgtgacagataatcatcttatctttttcaacatagctgcttctatggggtctattcgttttatgaacgttttagaggatcgtcacattgatgtacaccctaattttgctgaagccaacacgcttacttatggtacacgtgttgattttgaaaatgcgcgagtagatttatcacttaatgtacgtagagtatttttctcaacatttgatagaagtgaattaaatgatagttacgaaaaagtatcacaaatttatgaatatctagttaaagaggaaagtctgttaaagacaaatctagagaatggtaacccagaagtacacccgggtcctactttactaaacgtaggtcgaatagattatgctgagaatttctcattatataaagaagggataactaaacatacagttcgattattacatgcgattgaacttgaacgattgaatttagggagaaaattagggtttgagttatctacagcaaaagaatctcgtattcaaagaggttatttagaacgacaagatgaagatgaacctttaaatcgtctatttaatacgagtccagtattttctaaaataccgggacctaaccatgtagaaaatagatatttaactgaagatatcgcttatggattagtcttatggtctagtttagggagagttatagatgtaccaacacctaatattgatgcggttatagttatcgcatcaacaattctcgaacgagacttctttgaagaagggttgacaatagaagaattaggattagaaaaattagatttagaataa

SEQ ID NO: 895 - DNA, 561 bp, Staphylococcus capitis
atgaataatagtgaaaatcatcgttttgatcattcagaaacaacttcagaaggtcaaatgtcatctcaaaacttaaatagtgaacgaaaccaatctaatcaaaatagtgattaccaacaatataatagaagcaatcagtatacttcacaagaaaacaatcaaatcgcaaaagatgaagagcaagacgagcgattaatgtcaatgttaatttatctattaggtttatttacaagttttattggtccacttgtaatatggttagtaaaacgaaaagattctaaacttatagatacagctggaaagacatatctaaattactacatttcttattttatatattctgtagttgcagtgattttagtctatggctttcttttcatatcaaccttgagtgataataatacaggtattcaaatttttgcattaatttgtatgttaattctcactcttgccttacttgttttatcaattattagtatagtatgtactattattgggtgcgttaagtatttttcaggcaaaacctataaaataccattcagcctccctatcataaaataa

SEQ ID NO: 896 - DNA, 675 bp, Staphylococcus capitis
atgaaaaaattagttacaattacgacattaacagcaggtattggtgcatctttatttggaactacgacaaacgcacatgctgcagaaaatagtcatggtaatcaacagtggaatcaacattctcaccatcccatgaacaatggttttcaagaacataataatcacttgaagcattttaactatcacccacaacgtccatttaactactacaaggatcagcatagcttaaatcaaaatacacatacacacacttttaaaaatacaattacaacatcatctgacttaaactcctcatcaagctctaattcaagcagctcatctactacttcaactaagataacgtcttcttcaggaaacttatatacagctggtcaatgtacttggtatgtttatgataaagttggaggtaagataggttcaacttggggtaacgcaaataactgggcaacatcagctcaatcagctggttatactgttaatcatactccagaaaaaggctcaattcttcaatcatctgcaggtgcatatggacatgttgcttatgtagagagtgttggtagtgatggttcagttactgtatcagaaatgaattataatggtggaccatacgttgtagatacacgtacaatctcatctagtgaagcaagttcttacaattacattcacctcgactaa

SEQ ID NO: 897 - DNA, 330 bp, Staphylococcus capitis
atgcaatggctaaaggtaattatagctggatttgtagaaatcatctgggttacaggattagataatgcgcattctttattaagttgggttgttaccctcttttttattgccctcagtttctatcttgtcattgatgcatctaagcatttaccagtaggtaccgtttatgctttttttgtaggtataggtgctgtaggtacggtacttgtagatatgattttcttcaatcaaccctttacacctaccaagcttatattaatcataattcttattgcaggtattataggcttaaaactcactactaatgaaaatgaagaaggaggtcaataa

SEQ ID NO: 898 - DNA, 315 bp, Staphylococcus capitis
atggcgtggatttttcttttaatagccggaagcttagaaatactcggtgtggtactactgaatgaattatcacgtacacaaaataaattattcatcatattacttggcctcgcctttattttaagctttagcactttaaaacttgccatgcatgaaatacctatgggcacagcttatgctatttggacaggtataggaaccgcaggcggtaccattatcggcatgttattttataaagaatcgaaacactttagtcgaattatttgcattttaatgatacttgtagctgtagtcggattacgtttgattggctaa

SEQ ID NO: 899 - DNA, 960 bp, Staphylococcus capitis
atggaaaaagtatatatcgcaggcgcaattcctgaagtaggattaaacttattgaaagaacattttgaagttgagatgtacgatggcgagggaattattgataaagaaactttaaaagaaggcgttaaagatgccactgctttagtaagtttactctctactaatgtggataaagacgtaatagatagcggtaaaaatcttaaaattattactaactatggcgctggtttcaataatgttgatgtcgattatgcaagggaaaaagatatcgatgtgactaacacacctaaagcatccacaaatgcaactgctgatttaacaattggcttgatacttagcgttgcccgccgaattgtcgaaggtgatgaattatcaagaactaaaggctttgacagctgggcgcctctatttttccgtggaagagaagtttcaggcaagacaattggaattattggtttaggagaaattggtggtgctgttgccaaacgtgcacgtgcatttgatatggatgtattatattcaggcccacaccgtaaagaagaaaaagaaagagaaatcggtgctaaatatgtagatttagatactttattagagaatgcagacttcattactattaatgcggcttataatcctgaccttcatcatttaattgatagtgaacaatttaaacagatgaaatccacagcatatctagttaacgctggtcgaggacctatcgtcaatgaacaagcacttgtacaagcgcttgaaaataaagaaatcgaaggcgctgccctagatgtatatgagttcgaacctgagataacagatgagctcaaatcgtttaaaaatattgttcttacaccacatatcggtaatgcgacatatgaagctagagatatgatggctaaaatcgttgcaaatgatgcaattaaaaaattaaatggtgaagaaccacaattcgtcgtaaatcgtaaataa

SEQ ID NO: 900 - DNA, 1125 bp, Staphylococcus capitis
atgaaagttgcaattgtaggcgcaggaattggtggtttgactgtcgctgcattattagaagagcaaggtcatgaagtgaaaattttcgagaagaataattcaattagtgaagtaagtgcagggataggaataggggataatgtactaaaaaaattgggtaatcatgatcttcaaaagggcattaaaaacgctggtcaaaatctaacagctatgaatgtatatgatgaacgtgggcgcgaattagtgtccgctaaattaaaaaataatactttaaatgtaacgctagcgcgacaaactttaatagatattattcaatcatatgttaagtcttcttcaatatatactaatcatttagtgactggtttagaacaaacaaattctaaagtaacagttcacttttcaacacaagaaagtgaagcatttgatttgtgtatcggagcagatggcattcactcaaatgtaagggaagctgttggtgcctctaccaagttgatttatcagggctatacttgctttagagggattgttgatgatgtcaatcttaaaaatgaacatgtagctaatgaatattggggtgcaaagggaagagttggtgttgttccattattaaataaccaagcttattggttcattacggttccagctaaagaaagggatcctaaatatcaaacatttggtaaaccgcatttacaagcatattttaatcattttccaaatgaagtacgacaaatacttgataagcaaagtgagacgggcatattattaaatgacatttatgatatgaaacctttaagaacctttgtatatggaagaacaattttattaggagatgctgcccatgctacttcaccaaatatggggcaaggtgctggacaagcgatggaagatgcaatcgttttagtcaattgcttggaagcttatgatttcgataaagcacttgaacgatatgataaattacgtgttaagcacactgccaaggtaattaagcgatcaagaaaaattggaaaggttgcacagaaacgtaataaattaattgtgaacatacgcaattcaattatgaaaatgatgcctaacgcttatgcatcatcacaagcaacatttttatataaatcaaaagaaaaataa

SEQ ID NO: 901 - DNA, 774 bp, Staphylococcus capitis
atgaagaatactagatttcgtataacgacaatcttaataatagctattttagtaatatttggaattctattcctcatttttgatactaatcttttcaaaaatgatatcaaatatactttcaatgaagctgtagaaagacagataggtgaaggtacactaaatactaaagagagagatggaaagtttgtcaatgcgaaagaaaaagatgttgaacaagccatgagtattagccatggagacaatccgttgaaatatatggatatttctgaaaaagtgcctatgtctgaatcagaagtcaatcatattttaaaaggtaaaggtattcttgaagatcaaggccatacctttataaaagctcaagataaatatgaagttaatattatttacttaataagtcatgcattagtagaaactgggaacgggaaatcagaacttgctaaaggcgttaaggatggaagtcatagatactacaacttttatggaattggcgctttcgatgaaaatgctgtccatactggtaaaagctatgctaaacaacaatcctggactacacctagtaaagcaattatgggtggcgcatctttcgtacgtaatcattattttgaaaataatcaacttaatttatatcaaatgcgttggaatccacagaatcctgggcaacaccaatatgcgagtgatattaagtgggtagacaatattgctgatatgatgaaaaaatattatgacaactttggtattaaaaaagaaaatatacgaaaaaaatactatagatag

SEQ ID NO: 902 - DNA, 222 bp, Staphylococcus capitis
atggcaatcacttccaatgtcttattagttattggtattgtatttctaattatgctaaaacttatgcttgcaatagcattcttcgcagtatctttagctattagtctagtcatatttaatgtcatgtttagagatcgcacaggtatgaagattgcaatcaatgtatcattctttattgttgtcattgcaattgttatcgcatatttcgttttatcaaaataa

SEQ ID NO: 903 - DNA, 468 bp, Staphylococcus capitis
atggctgaaagaattactgaaattaaacgtctaaaaaagtcacctgagcaaataaagaatgaaaatttaaacgaagtccttgatgctattgctgagaataaagatagcattcttaaagcaatccgtttaattcatactttagatgaagcgaaaattttagatgcactcaatggtggatttaaagcacgacaagtaattatcaataagtttgcagtggagttaaataaggatatttacacaggattattatctaatatggcacaaatggtctttttacttggtgacttaaatgtgaaagatttaagtgaaatgcttaatcgtcttaacaaaggtcttcatgttgcaaaccaagcaagtcctaatgcacgtacatctattagaaacttaatgggtatccttaaagatgacgacatgaatcgtagtttaacttacatgcttaatttacttaagggcatgtcacgagaataa

SEQ ID NO: 904 - DNA, 2955 bp, Staphylococcus capitis
atgcaagaacatttggtagtcacacttgatggcacagattatcttgtcgaaccaggcacaaatttacttgagtttattcgatctcgagatactttcgttccagcgatttgctacaatgaatcgatggggccaattcaaacatgcgatacatgtatggttgaaattgatggagaaattgcgcgtgcatgtggcacaacaatagaccgtccaatgaatgtaaaaacagataacaacgatgttaaatcaagtcaaaaagaagcattagatcgtattttagaaaaacatatgctttattgtacggtatgtgactataataatggagactgtgaaatccataatactatggatgagtggggcatccagcatcaaacatatgaatataaagaaaaaccttatgagaaagattatggtccattctatcgttacgacccagaccaatgtatattatgtggtcgttgtgttgaagcctgccaagacatagaagtaaatgaaacaataagcattgattgggatcgtgaacatccacgtgtcatctgggataatgatgtaccaattaatgaatcttcatgtgtatcatgtggtcaatgtgcaacagtatgtccatgtaatgccatgatggaagtgaatatggaaggcaacgttggttacatgactgatactgagccagggtcacttgtagcaatgatcgacttaatcaaaaaatctgaaccaggatatggtccattattggcactttctgactcagaatctgaaatgcgtaaagaacgtataaataaaactaaaacagtatgtacatattgtggtgttggttgttcatttgaagtttggacaaaagatagagaaattttaaaagttcaaccatctcatgattctcctgctaataaaattgcatcatgtgttaagggtaaattctcatgggggcacatcaactctgatcaacgtattactaagccattagtaaggaaagatggtgctttccatgaagtagaatgggaagaagcactgcaagtgatggcagataactttaacaatattaaagatcaacacggtgcagatagcttgtcatttatttcatcttctaaagcgacgaatgaagagtcatatttaatgcaaaaatttgctcgacaagtgataggaacaaataacgtagataattgttcacgttattgccaagcaccagctacgaaaggtttgactcgtacagtaggaatcggcggcgacgctggtggtattgatgatttagaaaaggcagctatgacagtgttgattggtacaaatactgctgaagcacatcctgtcattgcttcaagaatgaaacgtgctcaaaaattattcggtcaaaaatcccatgtctttgatattagaaaacatgaaatggctgaacgtgcagatgaattttatcaacccaaaccaggtactgatttagtatggttaggcgcggtgacaaagtatattatcgataatgatttacatgataaggcattcttagacgaatgggtcgattattttgatgaatattataaatcattagaaccattcacaatggagttcgctgaagaaacaacaggtattccaaaagaacgattaattaagttcgctcatgaagttgcgaaagctgaatcagttgcaatctgctgggcgatgggtatcacgcaacaagacatcggtagtgattcaagtacagctgtttctaatttattacttgtaactggtaattatagaaagcctggcgctggagcatatcctcttcgtggtcataataatgtacaaggttgtagtgatatgggtagtatgcctgatcaattccctggttaccagcttgttactgatgatgaaattagagctaaattcgaaagagaatatggcgtagaattaagtgcaactcctggtcgcgataatcatcaaatgatagaaggtatccataatggagacgttcattcactttatttatatggtgaagacacaggtatcgtagattctaatattaattttgttcaagcagcttttgagaaattagacttcatggttgtacaagatgaattcttaacattcactgctacttatgctgatgtggtattacctgcaagtccttctctagaaaaagatggtacatttaccaacacggaacgtcgtgtgcaacgtttatataaagcgttagattcactgggggattctaaaccagactgggaaatattccaacttattgctaataaattaggcgcagattgggattatagtcaccctggagaagtgatggatgaaatcgctcgacttactccgtcatatgcaggtgtaagctacgaccgtttagaaggttttaatagtcttcaatggcctgtagataaagatgggaaagattctccaattctttatttagatggatttaactttgaaaataaaaaggcaaagctttatccattaacatttgataatttcttcaaagaagatgaagtttatgatattcatgttaataatggtcgtttacttgaacatttccatgaaggtaacatgacttatcaaactgaaatgattagatataaagtaccacatccatttgttgagatttcaccagaactagcacaagatcgtgatatacatgaaggtgctgaaatcaaattgatttcagaaactggtgaagcaacgttggtagctcatattacagatagagttaaaggtaaagaaatctatattccacttaataatgatgctttagaaaatggagatatgggagcaattaacttactcacaaatagtgatgtagataaatacactgatacaccgtcatacaagcgaacaaatgcacgcatggaggttatatctaaacgtggtaagtcaccattaaatccaactaacttccgtgttgataaacatcgtcatcctcaatatagtgttcaagtacagaaaaaatggaatcgttctgattacgtattcccagggaagcagagtgataaataa

SEQ ID NO: 905 - DNA, 951 bp, Staphylococcus capitis
gtgaaacgttcagataaaagaaaaatgagcctgccaactaaaattttactttggatagtaggagtattatttttactcgctgttattgcagtaatatacatctgtgccaagatatatattacaggggataagatacataatcctctaaatagaagccattcagagttacgctcaggaaaggttaatttaaaagaaggcgacccttttacaattgcattatttggtgtggattcagatgcggagcgaaaacatcaaggtggtggagagcgtagcgataccattatgattttatcaattaatcctaaagagaaaaaaacagaactcgttagtattcctcgtgatactcaagctcaaattgtaggacgaggtacgacagaaaaaattgctcatgcctatgcttacggaggacccaatatggcggtaaattctttagagaaattaatgaatgtaccaattgaccactatgcaacaattgatatggatggattacacgatatgattgataccttaggtggtgtggatgtggtaagtaatgacaccttcacaattagtggtttacattttgtaaaagggcaaaaaacacatgttgatggggatgctgcaatgagatttatacgtagccgcaaggaagaaggtgctggtggggactttggtagacaagaacgccaacaacttgtacttgaagctatggctaataaaatgacaagtccaacatcaataacacattttaattcattaatgagcgaaatacagcaaaatgttaaaactgatttatcattaagtgatctgaatcttgtcagaaaaaattataaagatgctaacgataacgtaaaccgtcatcaacttgacggagaaggtggtattcaaagtgatggtttatattactttgtcccaagtgatgcttctaaaaatagcaacacgcaactactaagagataatttagatttataa

SEQ ID NO: 906 - DNA, 789 bp, Staphylococcus capitis
atgacagaaagtttaaagcagattgatcgtttaatttgtgattggttaaaaattgttgatgatattttaccgcgtcttattcaagagatgcatacagatactaaaaaggatcgttttgatttagttactaacgtagacaaacagattcaagaccattttcaaacattcttgtcaaatcaattacctgggcatctactattagctgaagaaaaaaataatgatgatattgatccttatcatggacatgtttggattatggatcctattgatggtacggctaaccttgtaaagcaacaagaagattattgtattatactaggatactttgtggatggagagccaaaactatcttatatctacgattatcctcataataaattatataaagcaatagcaggtgagggagcatatgagaatgatttaccgatgttaaagcctgcaacactaaccattgaagatgcaatattgtcgtttaacccacatgttttaaatgatagaacgataaacgcacttttccaaacttcatttagttatcgaattattggttcatgtggtttagattcaattagagtcattaaaggtcaattcggcgctcacatgaatacgaatcctaaaccttgggatatagccgctcagtttctttttgcgcaagaacttaatttgaaaatgactagcttagatggtggcaaagttgattttggtaagggtggcccttttataattagtaaccctggttgtcatcaagatgtactggatattttgaatagcggtaagggctatcaaaaataa

SEQ ID NO: 907 - DNA, 699 bp, Staphylococcus capitis
ttgaataaattagaacgccaaaatcaaatcattcagtctatacaaaattcagataaaatgaccgcttcacaacttgcaaaactatttaaagtttcgaaacgtactattttaagggatattgatgatttagaagaacaaggtgtaaaagtgtacgcacaacacggtaaactcggtggttatcaaattaaagatgctcaatcaaaaatttctttatctttaacagaaaatcaactgtcagcgttgtttcttacactaaatgaaagtcagtcttattctactctcccttatcaaacagaaattcaagccattattaaacaatgtttaggtttacctcaaacacgattacgtaagctattaaaaaagatggattattatattaaatttgaagatagtaataattactcattaccacaactattttcggatatattaatatactgtacagaacgaaatgtcatgcttgttgattatattgaagaaggaaaagcgcacgctgaaaatgttatttttataggtttattgtgtaaagatggtcagtggcatgcagtgatctttgatataggtcgtggtcatacacgtgaattatcaatcatggacatacacgatatttcttactcattcgaaaaaactattaaaactcaagatatctcaatagataactatcagcaatttttaaacccagctgacataaacagttaa

SEQ ID NO: 908 - DNA, 747 bp, Staphylococcus capitis
atgaggcagaaagaagttaagaaaaaatataaatttagtgatattgcgtggagagatttaagtctaattgcagtagtattggtgggactttttctatttagcgttgcaggtatggcgctaggtgcgctttttctaaaacatatgtcacagttacaattagcgatgattagtacattagcgcagttaatggcttatgttgttgtgatatttgtattttactttttacacatccatacatttggagagaggtttaaaaaaggtttacaatacttgaaacgacgatggttcattattattatcgcttttttattagcgtatggtttgtctagtttatatgaatggttaatgcagtttttacctaagcatctacaatattctgatacgcaaaatgagatggctttagatcaattgttcaaattacatgcatttatacctttcgcgtttttattaatcgtgattgtaggacctatcgtcgaagaattagtgtttagacacatactaataggagagttaggaaagaagtttaattttattgtaatggggattatatcagctgtattatttacttacatacatgtaactgatgcgaaatcaccgtttgaattcggagcatactttattttagccattgctttagtctcagtgtatttagtttcaaagagaaatttagcagcatcgattagcttgcatatgttaaataatctagtgtcatttatctatactctatggtcaatattttataattag

SEQ ID NO: 909 - DNA, 339 bp, Staphylococcus capitis
atgaattatttagaaatcacacgacacattgaacaacgaattataaaattgctctctctgactgaaaatgctaaatattatgtactcaatcatcataacaaatttgaagaaactttgaacgtatttaatcaagaagtagaagttgaaaaaatttggatagaatcgcataaatcaatattaagtaccacaccagaattaacatcttactattatgtcattcttcatttatcagaacaccctcttataccaatcaaacaaggagacatgcttttttatattcatatcaaacaacttttattacatgaacaacttttaaaaatcaaaccttcgacttcctaa

SEQ ID NO: 910 - DNA, 1077 bp, Staphylococcus capitis
gtgcttggcttctcagtttatttaggaaatgctttagataaagagtatattcttaacatggcttctatgggttatgatgtgatctttacatctttacaaatccctgaagaaaacaagcaacatcagttgtcatattttggggaattatgtcagcttctttcatcatataatatcacttatatcattgatgttaatccttctttacttaatccaacgctttacagttatttaaatcaattgccacatggggcattttctatacgtattgatgatcaattggatgttgaactcatccatgaagttcaaagtcatggtttccaatgctgtcttaatgcgagtaatatcacagaagatatgttgaagcgcatttataaacaagattatcagtctcaactattatactgtcacaattattatccacgacctgatacaggtctttcatattctttcattgaatataaaaatcaacttattaaaacttacgataaacatgcaaaaatatatgcctttataccaggaacagagctaagaggccctttacataaagggttaccaacagttgagtcacatcgttcatcacatcctttagttgctacgcatgaattacaatccctagatatctctcatgttattatcggtgacacagcaatcaatttattaattgctcaacaattgtctgatatgatgcatcgtcgacattttacgctcaagcttaaagacttggatccatcattttctgagagagtcttaagaacacatacatcgcgcattgacgcaccagagcatatcatacgttctcaatattcacgtgttaacaatgatactcctatagatcctataggaataactgaaagagacattggggatatcactgtagataaccaactaaatgggcgatatgaaggtgaaattcaagtcgttaaaacaccactcaaaggacattctcatattaaccatattgcaacagtgagcgatgaagatcttcaattattaacactgattcagcctggagatacttttaaatttacatatacgaaggagaatgacaatgaatcgtttaacaacagaaactcgtaa

SEQ ID NO: 911 - DNA, 888 bp, Staphylococcus capitis
atgaatcgtttaacaacagaaactcgtaacactcaaacgatgcatttagatgaaatgactattcaagatgcactactaacaataaatcgtgaggatcaaaaagtaccaaaagccattgaacaagtgattcctcagttatcacaggttataactagtgctatccaacgttttaatcgtggaggaagaataatctatataggcgctggtacaagtggacgtcttggcgttttagatgctgctgaatgtgtaccaacttttaatacacgtcctgaagaggtcgttggtattattgctggtggtcaaaaagcgatgaccgtcgcagtagaaggggctgaggatgatagcgagcaaggcgcacaagacttaaaagatattcagctaaatgataatgatattgttattggaatatctgcaagtggtcgcacaccttacgtcaaaggcgccctcacttatgcaaacgatattcatgctgatactgttgctctttcgtgtaatacaaatagtgaaataagtgcttgtgcagagtatattttagaagttaatgtgggaccagaagttttaacaggatctactcgtttaaaatctggcactgctcaaaaactcatattaaatatgatttctacaatgacaatgattggggtcggaaaagtatatgataacttaatggtggatttacgacctacgaataaaaaattggtcaatcgttcaatcaccattattcaagatatatgtgatttagatgaacaagctgcacaaacattgtatgaagaagcgggaaatcatattaaaacagcagttgtcatgtatttatgtaatacaactaaagaagatgcagagacgcgtttatataaaagtaatggagtgatcaagcaagccatcaacgtttaa

SEQ ID NO: 912 - DNA, 1443 bp, Staphylococcus capitis
atgaacaaagaagaacgtcttgctaaagatatcactaacgccgttggtggtaatcataatattgataatattattcattgtatgactcgtgttcgaattaaaattcatgattacgataaagttaattacaatgaattgaaaagtattgatggtgttttaggtgttgttgaagatgaacgcctccaagttgtagttggaccaggcattgttaacaaagttgcaaattatatgtctgaaacaagtggcgcacctttagatgatgatacttctcatactgaaaatacaagctataaagcgcaagctgaagaacaagcacgacaaaataaacagaattttcaaagtcatcgcaaacaaagtaaatggaataaagttttaaagtccattgctaatattttcatacctttaatcccagcatttataggtgccgggttaataggtggtattgcagcgatattgaataacttattaacagctggaactctatctggagattggcttaaacaagttgtttcagtgctgagtgtcattaaagatgggatgctcgcctacttagctatcttcactggaatcaatgcagcgaaggtgttcggcgctacgcctggattaggtggtgtaattggtggtgcaaccttacttactggtataactgatgaaaacccaattaaaaatatctttactggtgaacacctcgtcgcgggtcaaggtggaattattggcgttatatttgcggtatggttgcttagtttaattgaaaaaagattacataaaatagtcccaaatgctatcgatattattgtaactccaactatttcattattaattattggtttattaacattgtttattataatgccagttgctggctttatatctgatggattggtgcatgtcattaactggattattggtgtaggaggcatatttagtggtttcatcattggtgctttcttcttaccactagtcatgctaggattgcatcatattttcacaccaattcatatcgaattaattaataaaacgggttctacttatctgttacctattgcagctatgtctggtgctggacaagtcggtgccgcattagctttatgggttagatgtcgtaaaaatactaaattacgtaatactttaaaaggtgctctacctgttggtttcttaggtattggagaacctttaatttacggagtcacattaccattaggtcgaccattctttacagcttgtattggcggcggtattggtggcgcttttgttggtggtattggtcatatcggtgctacagctgtagggcctagtggtatttctcttctaccgttaatagataatcatatgtacctcggttatattgcaggtttacttgctgcttacgctggaggtttcattttcacttatttctttggcacgactaaagaaatgagaaattctgatcaaatgggtgattaa

SEQ ID NO: 913 - DNA, 768 bp, Staphylococcus capitis
atgaattctcaagatatagcagaagttttagataccagcccctcctctataataaggtttagtaagaaaataactgaaggtggctttcacgaacttaaaattggtttatctaaatttctgcctaaagaagcatctgtatacaatgttgaacttgtagacaatgaaaatacagattctctcaaaaagaaaatgcactctcgtgctaaaggtgcgcttaacaacgccaatgaaaaaattgacgataagacgatagaccgaatttgcgatttatttaaatgtgcagaaaccattttcatctatggttatggtgcttcatttgtagtggctacagatttatatcaaaaattatctcgcattggtttaaatatacaattggtacaagaaacacatatcttcacgaccatgttagcgacacataatgctaaagactgcgtcgtatttattacaaacaatggtatgcaaagtgaaatgcgttcaatagccaaagttgtttcagactatcatataccagttgttactattactagtacgaaagataatccagtagccaatcgttcagatatcgtcttgtcttacggccaaactgatgaaaatgaaatgcgcatgggtgcaacgacttcattgtttgcacaaatgtttacaatagatgtactttattatcgttacattgctctaaattatcaatcatccttagattttataacacaatctaaaatggctttggataattaccgtaaacatttatcaaatattgaatttaaacattaa

SEQ ID NO: 914 - DNA, 1419 bp, Staphylococcus capitis
atggaaaacaatgaattacaaaggggactaagtgcacgtcagatgcaaatgattgcacttgggggaacaattggtgtcggtctgtttatgggggcaacaagtacaatcaaatggactggcccatcagttatttttgcatacttaatcgctggtatatttttattcctaattatgagagcaatgggggaaatgatttatcttaatcctacaactggatcattcgcaacatttgcaagtgattacatacacccagcagcgggttatatgacggcttggagtaatatattccaatgggttgtagtagggatgagtgaagttatcgcagttggtgaatatatgaactattggttcccaaatttacctaactggatacctggtatcgtagcagtggcattattaatgggagcaaaccttgtttcagttaaagcctttggggaatttgaattttggtttgcattaatcaaagttattacaattattttaatgattatcgcaggttttggcttaatcttattcggaattggtaatggtggtcatgcaatagggatttcaaatctatggtctcatggtggatttatgccacatggaatcgttggtttcttcttcgcactgtcaatagttattggatcttatcaaggggttgaactcattggtatttctgctggagaaactaaagatcctcaaaagaatattgttaaagcagtgaatggagttatttggagaatattaatcttctatcttggtgcaatttttgtaatcgtttctgtttatccttgggacaaattaggtgacataggaagtcctttcgttgcgacatttgctaaagtagggattactttcgcagctggtttaataaactttgttgtattaacagctgctatgtcaggttgtaactcaggtatatttagtgctagccgtatgatttatacattatctaagcaaggacaaatgcctaagattttctcgaaagtattaaaaaatggtgttccgttctacacagtacttgcagtatcaatcggtatcttaatcggtgcattactaaacgtcattctccctttatttattaaaggtgcagcaagtattttcgtttatgtttatagtgcatctatattaccaggaatgattccttggtttatgattttattcagtcatttacgctttagaaagttacatcctgaagaagttaaaaatcatccgttcaaaatgccaggaggcgcatttgctaactatcttacaatagcattcctaattttagtcttaatcggtatgctatttaataaagaaacagttgtttctgtagttattggtattgtgttcctagcagttgtgacactttattatttcgttcgttataataaaaaggatcaacaagctaaaaaagcagcattaactcagaaaaaccaaaaaggcttagaataa

SEQ ID NO: 915 - DNA, 354 bp, Staphylococcus capitis
atgaataaggcactcattaatcgttcaattaaagttacattaatatttatgattatatttttcctacttaattattttactatgaaacaacctgatatcatgtctgtcgtaggtcgaacacttcttgctacggtagccttcttcattctttatttagttgcctttaccattctaagttctccagaacgaaaaatgatttatggcacaaccattccaatagcacttataatttgtatattagttggagctttgttcttcacacctcaaataggaatcattagtggtttagttattggaattataacaggcgttatatgggagcttataacaagaggaaatcatggaggtaagtaa

SEQ ID NO: 916 - DNA, 186 bp, Staphylococcus capitis
atgacaataattataggtgtagtcattatcatactattagtaattagtttgataccaaattatcaagcaatgaaattagctaaaaaccaaggtcagaaacctacacgatacacaattatggtaggtatagatttaattttaatcgtactcatcgctataacattaattttaaaaatgaatagttaa

SEQ ID NO: 917 - DNA, 639 bp, Staphylococcus capitis
atgtacagagcagttatctttgatttcgatggaacaattatcgatacagaacgtcatttatttgagacaataaataaacatctcaaatttcataaagctgaacctatttcagtagatttttatagagaatctatcggagggacagctacagatttacatcagcatctcgagcaggccataggcgcagataataaagaaaaaatatatcaagaacatcatcaaactagtggtaatttgccaattatcagtacaatcaaagagttaatggattatcttaaaaagcgtcatatacctatggcaattgcaactagtagttatcgagaagatatatatccaacatttaaaaagttgggtttagataactatattgatgtcattattggtagagaagacgttgataacgttaaaccagatccagaaccttatttaatggctgttcaaaaccttaattataatccaacaaattgtttagcaattgaggattcgttgaatggtgctacagctgctatgatggcaggattagatgttgtcgttaacacgaatttgatgacagcagaacaaaatttttcaactattaattacgtcggaaaagatatgtcgattgaagatattgtgacatctttatttgagaagaaatag

SEQ ID NO: 918 - DNA, 915 bp, Staphylococcus capitis
atgttaagtagagtcagtcagtttgcgactaaaacgtttttattttggatgttgattgcagcaattataggatttgtttttccgaaatcattagcgcacttgggaacattagtgccataccttttgggtatcgttatgttaggaatgggaatgacaattaatccaaaagattttaaggtggtatttaaatcacctaaaccggtcataattggggtgatactacaatttacaattatgcctacattggcttttttaatagcaaagatttttcatctcccacctgaaattgcaataggtgtaatattagtaggatgctgtccaggtgggacatcaagcaatgttatgagttacttagcaaatgctaatgtagctttatcagtagctattacaagtgtttccacattgttagcgccaatagtgactcctgcattgatttatctttttgcaaatgaatggttaaaggtttcatttctgagtatgttttggtcagtggttcaagtcgttttaatacctatagcaattgggtttattttccaaagtattactaaaaaagttgcagagaaaactgtggctatattaccaaatgtttctgtaatagcaatttcgcttattcttgcatctgttgtaggtggcagtaaggaacaaattcttaaaactggtttacttatatttttagttgtcatagtgcataatgttctaggatatactatcggctttattttagcacgtgtatttaaacttgaacgccgtgatcaaaaagcagtatcaattgaagtaggtatgcaaaattcaggtcttgcagtatcattggcaactgttcattttagtcctctagcagctgtgccaggtgcagtatttagctttgtacataatatttcaggtcctattcttgctaaatattggtcaaaacgctaa

SEQ ID NO: 919 - DNA, 531 bp, Staphylococcus capitis
atgttgattgataaatttgaaacctacattatcaatattgcaggtttgaaatctcgctcaacgcgaaaaaaattaactcatttatgtaaagaaataaaattttgtgagtcatttcaattttcgattttcaaacaaaataacatgtttgcacttgaggtcagtttacctaagcaacagttaccatatttaataagctttttgagcttccacaattattctatttaccaaattttgtctcctaagcatttcgatgaacttcttgattcagaacatctctatcaatcagccaagcgttttgatttagctatcgatggtttacaagatgctttcattaaagacaaagtaattgatatcatgaatatgtttgctaaccatcacgatgtaaactatacattgaataacaattgtgcaagtgtcgtatgttctccagagatattcgctcaattgctacatacaattgcaacacgtaatatagatattttatcagcaagctatcgtgccaaaatgcttcataaagctagaatttcataa

SEQ ID NO: 920 - DNA, 1599 bp, Staphylococcus capitis
atgaatgctatcaaacgattcggtagtgcgatgatcgtgccagtgttgatgtttgctttctttggtatcgtacttgggtttgcgacacttttcaaaaatccaacaatcatgggcggtttagcagatcagcatacattctggttcaaattctggtcagtgatagagtcaggcggatgggtcatctttaatcacatggaaatcgtctttgttgtgggtttacctctatctttagctaaaaaagcacctgggcatgcagcattagccgcgttgatgggttatttaatgtttaacacatttattaacgcgattctaacgcaatggcctcatacgtttggtgctaacttaaagaaaggcgtagaaaacgtcactggattaaaagctatagcagggatagaaacgttagatacaaatattttaggggctattattatttcagggattattacatggatacataatcgatactatagtaaaagactgccagaaatgttaggggttttccaaggcctcacatttgtagttaccatttcattctttgtaatgttacctattgcagcaataacatgtgtggtttggccaacaattcaacatggaattgcatcaatacagcattttatcatttcttctggatacgttggcgtgtggttataccatttcttagaacgcgtattaatccctacaggattacatcactttatatacgcgccaattgaggtaggacctgtggtagtaaatcacggtttaaaagcagaatggttacagcatttgaatcaatttgctgaaagtagtaaacctttaaaagaacaattccattatggttttatgttacaaggcaatggtaaagtatttggatgtttaggaattgcgcttgcaatgtactcgacaacaccgaaagaaaatcgtaagaaagtggcagcactactcatacctgcaacgctaacagcgattgttgctggtattactgaacctcttgaatttacattcttatttattgcaccatatttatttgtgatccatgctatcttggcagctacaatggatactttaatgtatgcttttggtgttgtaggtaatatgggaggcggtgtgctagatttcttagctacaaactggatcccgttaggtaaagatcactggatgacatatgttgctcaagtagtgattggttttatatttgtgggaatctacttcttcctatttagatttttaattcttaaatttgatataccacttccaggtcgaaaaaaaggaacagaagaagtaaaactattttctaaacaagattataaagataagaaaggtggcactgcttcatcagaacaaccaaaatcaactgggaacgaatatgatgacaaagcagcttactatttaaaaggcctaggtggtaaagagaatattaaagacgtaacaaattgtacaactcgcctacgtttaacagtgaatgatgaaagtaaagttcaagatagtagttattttacacataatcaaatggctcacggtttagtgaaaagtggtaaaagtgtgcaagttgtagtcggtatgtctgtacctcaagtacgagaagcgtttgaacatttagtttacgaggaagaaaagtaa

SEQ ID NO: 921 - DNA, 762 bp, Staphylococcus capitis
atgatactagatgaacgtgtgaacactcatttcgataaattgaatgataatgatatacaaatcgcaagttatgttaatacacatatagaagaatgtaaaaatatgaaaattcaagatttagctgtacatacgcatgcatcaaatgccactatccaccgttttacacgtaaactaggatttgatggctacagtgattttaaatcatttttgaaatttgaaaatgaaaaaaagaatcagcttccttctgattcaatggaacaatttaaacaagaaatagcaaatacctttagttatttagatcgcattgattatcaattattaacgaataaaatgcatgaagccactacgatttatctttacggaacaggacgcgctcaaatgaatgtggctgaagaagcacaacgtattttacttacaatgcataaaaacattataatcctacatgatgttcatgaattaaaaatggtgttaaataaaactgttccagaggatttattctttattatttcattatctggcgagacatatcaattgaccgaagttacacagcttcttcaattaagacagaaatattttatctcagtaacaacgatgaaagataactcactcgctcaacaagcaaactataatatatatgtttcaagtaatacattttatttaaatgacggtaccgattattcaagctttattagttaccatatcttttttgaaacacttttaagaaaatataatgaacgtaaagaaaaaaatgaattattataa

SEQ ID NO: 922 - DNA, 513 bp, Staphylococcus capitis
gtggcaaaatataatgtagagaatgaacacgtagaaatcgacatcgaacgtttactaaaatttactccagaagttgtttatgaagcatggacaaaagtggagattcttaaacaatggttcatgacaacaccacgtacaaataagacttttgaagcggatgtccaagaaggcggtacatatcgtatagtagatagtagaaatgggaagcaaaatgttatcgaaggtaaatacgaagagcttgtaatggatgaatacattaaaatgacaataggtatgcctggtttaagcgccgaagaggatgtcatagaagtagaattctttgaacgtgaaaatggtggtactcaaatgttgttttactaccgctcattagttgaaaaggaaagacgtttaactgcgttggagtacaaacagaagaagaaagaatatcatgattcaactgcgcatggttttgaattaatgattgatcaaatgcaacatatattagaagaactagaagaacaacagcataattaa

SEQ ID NO: 923 - DNA, 1302 bp, Staphylococcus capitis
atggagaaagtaaagaaaggtaacgcgtgggccctgctcccattactcctatttgtattactctttttaggtgtaggaattatttcaggagattttacaactatgcctttaaatgttgcaattacaataacagtaatcgttgccttacttatgaatagaaaagaatcttttgccaagaaggtagaagtatttactaaaggtgctggacattcgaacattatcttgatgatgttaatttttatcttggcaggtgcgttttcaactactgctgaaaaaatgggtggtgttacatctactgttaatttaggtttatcattgattcctcaaaatttaatcattgtaggcctatttgttatttgtatgttcgtgtctatttcgatggggacatcagttgggactgttgcagcgatagccccagtaggatttggattcgcacaagcaacacatgtgcccgcagctttagctatggctacggtagtcggtggtgcaatgtttggtgataatctgtcaatgatttcggacactaccattgctgcagtaagaactcaaaagactaagatgaatgacaagtttagagttaattttaaaatcgttttaccaggtgctattttaacgattataattttatttttcttaacgaatggtatttcaatcgatcatgccaaaagttatgattataacttaattaaagttattccatatttattagtactgatactcgcacttgtaggtgtaaacgtcatcattgtactcattggtggtacagccttagcaggtttaataggattaattgatggttcctttggttggaaaggacttctcagtgccgtatctaaaggtataattggaatggaagatattgcaatgatagcattactgattggtggccttgtaggtatcattcaacataatggtggcatagattggttactacagtttgtacgtgctagagttaaatctaaacgtggtgcagaattaggtattgccagtttagtaagtgccgcggatatatctactgctaataatacaatttctattattatggcaggacctttagccaagaatattgctgatgagtatgatgtcgatccgcgcaagtcagctagtatattagatatattcggaggatgtttccaagggttactcccatatagtcctcaagttatttcagcagctggtgttgctggtatttctccattcttacttgttccttatagtatctatccaattttattaggaatctgtggtttagtggctattattttgagagtccctcgtttaaaagataaacctcaaaaataa

SEQ ID NO: 924 - DNA, 591 bp, Staphylococcus capitis
atgaagaattttttaatcagatggttacctaatatcttaattgctttagctttaccgtcactaatattgtgccatcataatctaatagtaatattagctatagctgtgattatttgtacatatatttctgcagttaatgtttatttagttaacgagaatgtaaaaaaaggtataacttggtttaatcctgtgattgattatattttagcaattgtttctgcacttgcttattttggaatgttcagttgggttattacacaacctttttcaaatgttacgatgctactaatcattatttgttctggaagtattgcttacgtccttgaagtgaagcttaaaattagtgaagcaaaaaatggtaaatttcttcatggcgtcgaaatgagtgaatataaaattgtatcggttagaactgaaaaaattttcaaaagggtatctttatgttcaacaattataagcattttactcatatttataagtctttatttgaaatggtggattgtttttggtgtagctattgtgttattgattattgttgctttagcaatcacgatttatgagaaatttttcactacacagattgaagaataa

SEQ ID NO: 925 - DNA, 885 bp, Staphylococcus capitis
atgatgtcagcacaagatcctagaaataaatttaaaacgtctgattatgatcaacaagagcaagagttaccaggtctacaatcgaaaatgacacctcaacctgattgtggtgaaacatcttacaaaggtcatgagagattaaaaggctataagatgttagtgactggaggagattcagcaattggacgcgcagctgcaatcgcttatgctaaagaaggtgcagatgtggctattaactatttaccgagtgaagaagaagacgcacaagaagtaaaacaagtgattgaggatgctggtcagaaagttattctaattcctggagatttaagggatgaacagtttaactatgatatggtagaaacggcttataatgaattaggcggtttagataatgtaacgttagttgccggccaccaacaatatcatgatgatattcacggatttaatactgaagctttcgcagagacgtttgaaacgaatgtatatccagtattctggacagttcaaaaagcgttagaatatttaaaacctggctcatcaattacgacgacgtcttccgttcaaggatataatccgagtccaattttacatgattacgcagcttctaaagcagcaattatttcattaacgaaaagtttctctgaagaacttggtgcgaaaggtattcgagtgaattgtgttgctcctgggccattctggtcaccgcttcaaattactggaggtcaacctcaaagtgcaattcctacatttggacaacaaacgccactgggtcgtgccggtcaaccagttgaattatcaggtacttacgttttacttgcttcagaagattcaagttatactactggccaagtctttggtgtaacaggtggtacgcaaatcgactaa

SEQ ID NO: 926 - DNA, 1137 bp, Staphylococcus capitis
atgccaaattattcagattatgttaattggagacgtacatttcatcaattcccagagctttctgataaagagtatgaaactacaaagcgacttaaacgtatacttgaaagttttgatataaccattttagatgtacctttagaaacgggtttagtggctgaaataggtagaggtgaaccggtgattgcagtaagaactgatattgatgcattaccgataaacgaacaagttgtgcacgagtttacatctacaaatgaaggagtaatgcatgcatgtggtcatgatatccatatggcaagtattttaggcgtagcaactcaacttaaagagcttgaaaacgaattaagtggacgagtgagaatattgtttcaagcttctgaagaattaggtcatggtgcaattaagttaagtgaaactggagtacttaagaacgttaaagcagtcttaggttttcataattatccttcactagacattggtgaattcgcgattaaaagtggtgtaatcacttccgctgtagatcgttttgagtttcatattcaaggaaaaggtgctcatgcagcaaaaccagaacaaggaaatgacccggtcattgtagtaggtcaactgattaacagcctacaatctattgtgagtcgtaatttatcagcatttgatagtgcggtcgttacgataggggaagtgtcatgtgggaatacatggaatgtcatcgctgatcaagcttatattcaaggtactgttcgttcatttgattctaaaaaacgtcaacttataaagcaacgtatgaaagaaatttcagatgggttatctctagcatttaatgtagacattaaattcgaatatacacaattaccgggtgctgtcgtaaatgatgaaacacttacccaacaagcgattgaagcagctaaggaagtaggttacaacattcaaatgatggaagaaccactaacgattggtgaagatttctcaggttatacgaaagattatcctggtgtctttgctatcattggctcaaatagtgaatatgatttgcatcatcctaaatatgacccagatgaacgtattttagagaaagtaccaacgtattttgtaacgctcgttaaaaagttattgaatggtaaatctatacggcaatag

SEQ ID NO: 927 - DNA, 1179 bp, Staphylococcus capitis
atgaccgagttgcataaaattgcttatatagaggaatggaaaggtcattatggtcaaaatattttagcaggtatactcatggcattagcactattaccggtcgctattgctttttcttttatagtacatattaagccaacgttaggactgatgagttgtggtttaatgatgtgtctcatttctttgttcggtaaaaggttagcaatggtttcaggaccaagtagtggtatttctatcataggtgggcctttagtagaacaatatggggttcattatttggctcttgcaacaatactcatgggaatgattttatttatatatggtttatgccatattgataaaatattaaaactcatacctaatactgttgtgatggggtttatgaacgccttgggacttctattattgtggacacaaatgaagtatatatttggtatctcaatagcaacttatgtggtaagtgcactcacttttataattatttttatttcatctagaacaattaaagtaattccggcaccgctgattactattatcgtattaacatttgcgacatggcttattcatccgaatttgcaatacgtacatgatatggcggatatacacttttcaatgccatcgattcatatacctcaagaaatgtttgaactgagtgctttcttcattgctttaaaatatgctttcacaatgtccgttatttcagtaatccaaaccaacttaacaaatgatatgatgaatatgatttcacaacatccaactaataaagacagagagattgtaggacaagggttatcaaatattatcgttggtttattcggaggatatggttcaagcggtttagttggacaatcgaaatttaattatcgtatgggagcaagaacacgagtagcgacgctcactaccggtattttcttattattatgtgtgttcgtcttaggacaactcgttggtttaataccaatggtggtactcgcttcggtactcattactatttctttgaatacctttgatagacgcacttttcaacatattaaaggtgcaccagttaaacgtggattggttatgggattaacgatgattttaattttaattactaataatttagctattggagttattgcaggcacgttattttactacattttacgcttattttttaaaaaagaagggactgaatag

SEQ ID NO: 928 - DNA, 1236 bp, Staphylococcus capitis
atgaatgatttaataatccaaaatattcaagaattaattttacctaaatctactgacaaacctttaaaagggggagagttggacgaattagaagttgtagagaatggtacagttgtaattaaagatgggaaagtggtttactctggacctcatacagatgactatgaggctaaagaggtcattgatgctagtggtagagtggtatctcctgcacttgtagatgcgcatacacacctcatttttggtggctcacgtgaacatgaaatgtcattaaaacgccaagggaaatcctatttagaaatattggaatctggtggaggtattctttcaactgtaaagtctactcgagaaattagtgaggaagatcttttcaaaaaagcagagcatgatttactaacaatgattaaacatggtgtgttaacagtagaaagtaaaagtggctatggtttagataaagaaaatgaattaaaacagttaagagtatcgaaccgtttagctgaaaaatataacctaaacatgaaacacactttcttagggccgcatgcagtgcctgaagaagctgaatctaatgaagcgttcttagaagaaatgattaaattattaccagaagttaaagaatatgcagattttgctgatattttttgtgaaactggtgtattctcagttgaagaatctaagcgatatatggaaaaggctaaagaagctggatttaaagttaaaattcacgctgatgaaattgatccgttaggcggattagagttggctattgatgaaggtgcaatttcagctgaccatttagttgcttctagtgaagaaggtaaagctaaacttaaaaatagtgatactgtggcggtattattaccagctacaacattttacttagataaaaatgactacgcagatgcacgtggtatgttgaataatggtggtgcgattgcagtagcaactgactacaatccaggtagtagcgtaacaaataatttacaacttgcgatggcgattgctgcattgaaattaaaattatcaccaaatgaagtttggaatgccgtgacagtaaacgcagctaaagcaattgatgctgatgcaggtacgattaatcaaggggaccaagcaaatattgtaatttgggatgcgccaaaccatgagtatatcccatatcatttcggtattaatcacgctcaaaaagtgattaaagatggtaaagttatcgtggataatgaatttaagttagattaa

SEQ ID NO: 929 - DNA, 1662 bp, Staphylococcus capitis
atgagaaaaattcaagcaaaaaagggtttagatattgagtgtaaaggttgggagcaagaagcggtattaagaatgttatataacaacttagacccagaagttgctgaacatcctgaagaattagttgtttacggaggtattggtaaggctgctcgtaattggaaagcgtttgaagcaattgaaaacactttacgtgatcttgaagcagatgaaacgatgttagtgcaatctggtaaaccagttgccgtatttaaaacgcatgaagaagcgccacgtgtcttaatatcaaactcagttttagttccagaatgggcgaactgggatcactttaatgaactagataaaaaagggttaatcatgtatggtcaaatgaccgctggaagttggatttatataggttcacaaggtatcgttcaaggaacttatgaaaccttcgctgaattagctaatcaagaatataaaagtgatttaacaggaacaattactttaactgcaggtttaggtggtatgggtggggcacagccacttgctgtaactatgaataacggagtcgcaatttgtgtggacgttgatgaaacacgtgttgataaacgtgtagaaacaaaatattgtgatgttaaatctacggatttagatgaagctctaaaaatggctcaagaggcaaaagacaaaggtgaagctctatcaattggtttagttggtaatgcagtggatattcataaagcaattttagataaaggtttcaaaattgatatcattacagaccaaacgagtgcgcatgacccattaaatggttacgtgccacaaggctattctgttgaggaagcgaagaaattacgtcaagaagatccaaaaaaatacgtagaattatctgaagcttcaatggctaagcacgttgagttgatgttggaattccaaaaaattggtgctgtagcatttgattatggtaataatattcgtcaagttgcatacaataatggtgttgaaaatgctttcgactttccaggattcgtaccagcatatatccgtccactcttctgtgaaggtaaaggacctttccgattcgcagcattaagtggtgatcctaaagatatcgaacgtgctgatgaagaaatgagaagattattcccagataatgaaaaattattaagatggttagatttagctgaagaaaaaatttcgtatcaaggtttaccatcaagaattgcatggctaggttatggtgaacgtgcaaagatgggtctagctttaaacaagcttgtacgtgatggagaaatttcagcacccattgttataggacgtgaccatttagactctggttcagtagcaagtcctaaccgcgaaactgaaggtatgcaagatggcagtgatgcagttggtgattgggctgtactcaacgcattgattaatactgcagctggtggttcttggatttcattccatcatggtggcggtgtaggtatgggttattcattacacgctggcatggtagtagtagcagatggttcagaacgtgctgatagaagattaggacgagttttaactacagatccgggtatgggagtagcgagacacgttgatgcaggatatgacatcgctattaaaacggctaaagataaaggtgtccaaattccaatgattgatgaagcaggtgataaataa

SEQ ID NO: 930 - DNA, 870 bp, Staphylococcus capitis
ttgaagattattcagcttgaatattttttagctatagttaaatataataattttactaaagcggctaatttccttcatataagccaaccttcgctaacagcaacaattaaaaagatggaagctgatttaggttatgacttatttatgcgtacaactaaagacattaaaatcactgaaaaaggcattcaattttataagcatgcgacacatatcgtacaggaatatcgttccacagttgaaaaaatgtatgacttaaatattacatctgaacctagaattaaaatgggaatgttagaatccacaagtcaatggatgggtaaagtgataaaacaacatcataatgattatcctaatcaacaatatcgtatgtacgaagtacatgaccgtcattcatctatagacaaattgcttaattttgatgttcattttgcactaacgaatgaagaaatcactcatgaagatatcgcatctattccattgtataaggaaccttatgtgttaattacgcctaaggatgaatttccaaatcagaagacaattactattgagcatcttcctctaataatgccaaacaaaaattcacaagtacgtgaccatttagatgattatttcaatcgtatgaatcaacaccctaatatagtcttagaagccgatcgctttgaatcagcaacaaactttgttcatttaggattaggttatgcagtgatacctcgtttttattatcaatcaaattttactaatgatttggatagtattaaaattcgcccgaatttaggacgtaagatttttattaattatttaaataagcgtaagcattctgaacaagtaatgtctttaatacaactttgtatagcgtattgggatacttaa

SEQ ID NO: 931 - DNA, 936 bp, Staphylococcus capitis
atgtatagacttgcggaaccggatttatggaaaggtcgtttagatagtgaaacagattcaagacaatttagacatttccaaactgtaaaatttggagatttaactaaagttgaaaaaactaataaccccaaaggtgtaggtatacttggatatgctgtagataaaggggttgaattaaataaaggtcgtgtaggtgcaaaagaaggacctaataaaattaaacaagcctttgctggattgccagatttaaatcaatgtgaagagctcattgattacggtaatgtagaacatgatcatgattcacttatagatacgcaacaagagtatgctgagcttgcagcgaaatcaattcaaaatcataaacaaactttcttacttggtggtggacatgatattgcttatgcacaatatttagccacgcgtaaagtttatccaaatgagtctatcggtgttataaatattgatgcacattttgatactcgtgacgaaggtgagtctacgtcgggtactagttttagacagattctagatcaagacgataatgctgattacatggtattaggtatttctcaaggtggtaatactcaaggtttattcgattttgctaaagagaagaatgttcaatatgtgtacgcagatgagttgctacaccaagtttctcccccgattaaagatatgattgaacattttatacatgatcatgatgtcatcatgtttactgtgtgtatggacgttgtagacagtgcatttgcgcctggtgtgagtgcgcctgccgttttaggtatctatcctcatactgtatttgagctagcgaaacgtattattcctagtgagaaagtggcttcgattagtatagcagagatgaatcctgagtatgatttagataatcgtactgcaaaactagtagcaaacttagttcatcatttcttaatttaa

SEQ ID NO: 932 - DNA, 1077 bp, Staphylococcus capitis
atgaaaaactctcgaatttctgggtttcaatgggcaatgatggtctttgtcttctttgttattacaatggccttatccattatacttagagatttccaagcgtccattggagttaaaagatttgtttttgacatcaaagacttagctccatttattgcatcattagtatgtattttagtatttaagtataaaaaagaacaattagccggattaaaattttcattcagtctaaaagttattgaacgtatcctattagcactcattttaccgcttatcatttttatgattggtatgttctgtttcaatacttttgctgacagttttatccttttacaaacatcagatttatcagtatctttaattacaattctaattggccatttattaatggcgtttgttactgaatttggtttccgttcatacttacaaagtattcttgaatctaagatgaacacattctttgctagtattattgtaggtgtaatttattcaatcttcaccgcaaacactacttatggtattgaatatgctggttaccatttcttatatacatttatgttctcgatgattattggtgaattaatcagagcaacacatggacgtacaatctatattgcgactatattccatgcagcaatgacattcgccttagtttttcttttcagtgaagaaactggtgatcttttctcaatgaaagtgattgcactttccactacaattgtaggcgtattgtttatcattatcagtttaattattcgtgccattgcttacaaaacaacgaaacaaagtttagatgaagtgcaacccaataattatttagaccacaccgaagaagatgattttgaaagtcataaaaatgatgattcaaaaaatcatcaatttgaaaatgatagcgttgctaataaagaagataataattcagaagcgagttcagagcattcaaacacgagtgatacagatttaaaggacagcgctaaatatacagaagatcgtcattcatctgttgttagcgatgtaaagaaagaaattaatcaagttgaagaacaagacatgagtgattcaactaaaaaagaataa

SEQ ID NO: 933 - DNA, 687 bp, Staphylococcus capitis
atgaaagacgtaaaagaacttaaacttatgacattagatgatgtaacgagccaaataaaagatggtatgacactcggaatcggtacaggaagtactattgagttgttagtacctaaaattgctgagttgattcatcaacatcattacgaaattacaggcgtgtgcacatcaaataaaactgcttttcttgccaaggagttagatataaacattgttgaagtcaacgacgtaaaaaaaattgatcttgctatagatggtgcagatgaagttgatccaaatctcaaccttattaaaggtgggggcggtgcactgttcagagaaaaagtgattgatgaaatggctgaaaggtttgttgtcattgccgatgaaaataaaatcgttgactatttaggtcaaacgtttgttttaccagttgaagttgataaatttaattggtatcaagtttccaaaaagattgagagtattaagggcgtaaaagtgaatagacgtgtgaatgaagacgttccatttacaacagataatggaaattatatattagattgtaatttaccagaaggcattgatccgtatgaaatgcatgaatttttgattcatttaacaggagtattagaaacaggatattttctcgatatgactgatcaagtgattgtaggtacccaaaatggcgtaaaaatcatggataaataa

SEQ ID NO: 934 - DNA, 1011 bp, Staphylococcus capitis
atgatagttgaagttgagcatcaaagacatgatgttgatttaattaaaatcgataatgatgaaacaaaaattgtattctcgaactacggtgctagaattgtatcgtggaaatatcatgacaataacattattttagggaatgtagtagaagcggatgaattctattttgaaaatccatttaactttggtgcgacaattggtcgttatgcaggtaggattaaagatgcatcatttaagttagatggacatacatatgaattagagaacaatgatagcccacatcatattcatggtggttccaaaggtctggataaacgtatctttgattatgaaattattgatgaaattggacaaattaaaattatattcactacaacaattaaagaaatggaagatcattatcctggagatatgactattaaggtaacgcatacatatgatgctgaccatcgatggactgtacaatatgaagctgaatcaacgaaaaggacattattcaaccctacaaaccatgtatattttaatttaaatcgtgataacaatgtggttgataatcatcgaatgtccagttcatcgttaaagatgtatacacttgatgatgaaaatatcgtgacaggcgatgagccactcaactttagtcaaatatttgaagacgaacacattctctttaaagatatatttgatagtacgaatcaaaagcttcaagaacaaatgcaacgttataaaggtttagatcatccatttgaagtgggtgaccaacaacttgctatagataataaagagtttgaacttctgatcgaaacggacatgcccaatatggttatatttacatttaacgaacctcaaaattgggacagcgattttaatatttataaatctcattctggtttcacagtagaaacgcaacatattcctaatgacattaatatgtatggagaaaaagcacaatcaattttaaacccccatacaccatatttttctaaaacaaattatcaaatcaatgaaaagtaa

SEQ ID NO: 935 - DNA, 327 bp, Staphylococcus capitis
gtgttttatccagtatttatttttatattagcaggcctttgtgaaattggcggaggctatttaatatggttatggttaagggaaggccatacatattggctaggtttaatgggaggcatcatactcatactttacggcgtggttgcaacgtttcaatcatttcctacttttggtagagtatatgcagcttatggaggcgtatttattataatgagcctgttttgggcttatgtagtagataaacaatcgccagataaatatgatgttataggcgctataatatgtatcatcggtgtgcttgtcatgttattacctagcagagcttaa

SEQ ID NO: 936 - DNA, 1236 bp, Staphylococcus capitis
atgagtaaattttggtcaacattcaaactcacttatatgagtaaaattaaatcaaaagcatttattatatttatggccatcgttgttgtgctcatggttggactttcaaacatagataaaattatggggttatttgatcatggtccagataaagtaggtatagttacacagaatgaacaaatatataaagtgttaaagcaacaaggacatagtcttgaagatgacgcgaaatttaaaaaagtaagtaaaatcaaagcagaaaagttagttaaaaatgaaaaattagatagagcctatatagtcaaacaaaataaagataatcaattgtcaggtactatattaagtaaggacaatgttgatgttgaagataaacagcggtttactgaagtattaacaacaatgcaatctcatttagttgcctcaaagcttgacttaagccaaaaagagttaaaacaattgcaatcgcaaagtcaagtagatagtaaaatcatgtctgataaagaagatagtcaattaaattctggccaaaaaacgctaaattacattttgatttacgcaacattaatgctaatatttttcatcattttcaactttgcaggtcaagtggcaatggaaattgctacggagaaaacatcccgggtgatagaaatgataattacaagtgtttcaccagttgtacatatacttgctaaaattgctgcagtaattgctgttgctttcactcaagttatcatgattattcttacagcattaatatgtatatttgcatttgatttaaagaaattgttcaaaaactttgatatacaaatgaatcaccttgcatggcaaattattgttgtgagcttgctatgtctgattgtaggtattttctcttatgtgttgcttgcagctattcttggatcgctcgtctcaagaattgaagatatgaatcaaactttaatgccattaacattattagctatgattgcattttacatcgcgatatttagtatcatgaagccagatatgttactcactaagattacaagttttataccatttttagcaccgttcgaattattagtacgatctcaatcatctgatctagacatatgggaaattattgttagcatggggttatcagtgattgtgattatcttattattatggatagcagtaaaaacatataaagattctgttctcacatttgagaaaggattatttaaatctatacatcgactcattaaaaataaataa

SEQ ID NO: 937 - DNA, 900 bp, Staphylococcus capitis
atgggtttgttaattgaacatgtcaccaagaaatttggagattttacagcagtaaatgatatttcgctaagacttgataaggggaaaatgttgggattcttagggagaaatggtgcgggaaaaacaacgacatttcgcatgattcttggcttaagtgaaacaacaacaggccatattacatatgaagggaaaaatattaacaaacatatgtataacaaagttggctatttgccagaagagcgtggcctacatcccaaaatgactgtagaggaagaactcacttatcttgccactttaaaaggtttatcaagtagagatattcaacaacgtattgattattggttagagcgatttgcaattactgagaatcgaaagaaacgtattcaatctttatctaaaggtaatcaacaaaaaattcaattacttgcaagtatgcttcatgagccagaattacttattttagatgaaccttttagtgggctagatcccgttaacgttgaattacttaaacgtgcagttaaagatttaaatgataaaggatctactataatatatagctcacatcgaatggagcacgttgaagaactatgtgatgacgtttgtattattgataaaggacaacttgttgtttcaggagatatacagaaagttcgctctgaacatggtaataaattagttatcgtcgaatcagatcaccagatagatggtcttgatgatataccaggaatcttgaaaaaggagcatcgtaaacatgatgttcgtttaacgattgaaaatgaagcggttgcggaaaagatttataatactgtaattaaacaaggatacgtgagacgttttcaagtcttagaaccatcgcttaatgatatatttatcgataaagtaggtgaactacatgagtaa

SEQ ID NO: 938 - DNA, 1620 bp, Staphylococcus capitis
atgagctacagtattggaattgattatggcaccgcttctggtcgagtgattctggtggatacatcaaatggcgatattatttcaagctatgaagagacatatcctcacggtactattgctgaatcactatacggggaaacgttaccgcgtaattattttttacaaaatgctgatgattatcagtacatacttgaaaatggtgttacgcatgtattagaagaaagtcaagtgaatagaaatgaggtaataggaattggtgtagattttacaagttgtactattgtatttttagatgaacatttcgaacctctacatagacatgataattttaaaagtaatccccatgcatatgtcaaattatggaagcatcatggggctcaagatgaagcaacacaaatggttgaagttaatcaacaagagaatcagaactggcttgattattatggttcaagcgtcaatagtgaatggatgattccgaaaatacttgaaatgaaacataaagctcctgaattgttagaacacactcattatattatggaagctggagattacattaccagtttacttacatataaaaatatacgttccaattgcggtataggttttaaaggcttttggaatagagaaaatggttttaactatgcgtttttcgaagctgtagacaaagatttacctaatattgtaaaagaaaaatgtgaagcaccagtaattaatattggagaaagcgcaggcactttagctgaatattatcaggaattgtggggacttccctctcaagttcaaatttctccatacatgattgacgcacattcaggcgttctaggagcaggtgccattgaacaaggcgaattcacatctgttattggaacgagtacctgccaccttatgctagatcctaaacaagaacctattcctgcaattactggttcagtaaaagatgctattatacccggtttatatgcctatgaagcaggccaagccgctgttggtgatctatttagttactcagaacaactggctccaaagtcaattactgatactgcccttgaaagtgatgtccccttacttgagtacttggaagagttagcaagtaatattaatgtagaagatcaacatgttatagtacttgattggcacaatggtaatagaagtattctaagtgatagtcaccttacaggtagtgtgttcggtttaacattacaaacacctttcgaaatgattcatcgtgcttacttagaatctactgccttcggtacaaaaatgataatgaatcaatttgaagaccatcatattcctgttcataccgtttatgcttctgggggtatccctaaaaaaagtaaactcttagtcgatatttacgccaatgtgttaaataaaaaagtagttgtgctggaatcatcaaacgcaacagcattaggcgctgctatgttaggcgcaaatgttggtggtgcttattcgacgcttaaagatgctgtagagcatatgaagcaacctattcattacgttaaagaacctgaaagcgaaaaagtgaaagcttataaaagactctttgataagtatcgtcaacttcatgatattcttggacgtgaacatccaactttatcttatatacacaaataa

SEQ ID NO: 939 - DNA, 747 bp, Staphylococcus capitis
atggttagcaagctatttaatgtcaaagacgagtatcaactagaacaatttaatcgcttatttgccaaaataagtgcccttgtatctattttaatgttggctttgttatattttgaagctatttttgatgttgagaggtcttatttatcaccttatttaataggtgtattactttgtctcatcgtattagcatgtatgttaatgacaaatgggtatagtgaagaatcgaaagaaatatatgttagaaatgaagaagagaaaaagtggcttaaaaaaatgagtttaaaaaaacgtatgatagctttcggtattactagcatttatttacttttagtaaatttaatcattgtgcctttagtaactaagggccatatcgataggtttcaattttcgcaaattactccatttattgtaccatttataattttgatactcagtgataaaaggattaaagtatcaaagacacctaccgcaccagctaaggaaaagctgaataccacagataggttacttaatttaatccctcaatacaattttagcgatgagtatgaacgaatgagaatagaaatggaatatgccaaaaattgtatatggttattacctgcattattaatcatatccattgtagatatcatcatttcagtggttatgcaccatatgccgtatgcacctttgattacacttcttataattgtcatttttatagccattgctttattcaaagtacacaagataaaaaaagcttaa

SEQ ID NO: 940 - DNA, 198 bp, Staphylococcus capitis
ttgaatagagtaaagcaatatagagcacatcaaaaaatatcgcaacttgctttagcccgagcagtaggcgtttctcgacaaacgattaatatgatagaaaatgatagatataatccatctttgaaattatgtataaacatcgctaaagaactcaatgtcacattgaacgatttgttttgggaggataaaaatggttag

SEQ ID NO: 941 - DNA, 594 bp, Staphylococcus capitis
atgcgacaaaaagcgagatttggacaagcgcttaaattattttggtctaactatgtgaacttcaaaggacgctcaagacgtagtgaattttggtatgctatgttgtggaatttaatatttatgattcctggcatcataggactatttcttgggtacgtttttattatttctggtgcaataagtaataaagaaggtagtcttctcttcggtggagcgtgtcttattataggtggtttatggtatctaatctattcactcgcaacattaattcccaatttagctattttagtgcgtagatttcatgatttgtcactttcaatgttgatacctatttgttttattgttgccaattttatcatatatatcatatctaatattattgtggaaaatcctaatacgtctgaaaatggatatgctttaacttttattatgatattaaatatattcatctgggttttctcaatttatgttttagtgatgacatgtttaaatagtaaaaaagaaactaataagtatggtccgagtcctaaatttacagatttcaatcatagtttagatggcgaaaatcataatccattagataaagatgaataa

SEQ ID NO: 942 - DNA, 609 bp, Staphylococcus capitis
gtggactttattaataaacaaacgattcaaacagcaaaagatttattaggggttaaaatcatatatcaagatgaataccaatattattctggttacattgtagaaactgaagcctacttaggttttaaagacaaggctgcacatggttatggtggaaagcaaactcccaaagtcacctcactatacaaaaatggtgggaccatatacgcacatgtcatgcatactcatttattgattaattttgttactcgcactaagggtgttccagaaggagtactcattcgtgcaattgaaccagaagacggtattgaagcaatgaaagctaatcgtggaaaaactggatatgagataactaacggtccaggtaaatggactaaagctttaaatataccaagagctatcgatggctcaacattaaatgattgcagattatccatagatactaaaaacagaaaatttcctaaagaaataattgaaagtggaagaataggcatcccaaataaaggagaatggactgataaacccttacgttatactgtcaaaggaaatccctatgtatcacgaatgcgtaaatcagactttcaaaacccagatcatacttggaaataa

SEQ ID NO: 943 - DNA, 750 bp, Staphylococcus capitis
atgtggtataggtctgtatgcacaaggagaaaaactaaaaaagatagctacaacgataaagtaacgacaaatctctcaaaaaaatataaaaaagatattcgctcgattgaagtcaattctgacatgagcgatgttacaatcaaaaaaggaaatcacttctcagtaacatctagaggtgatgataagaatgtaaaagttaagagttacattaaagataaacagtggattcttaaagaagaaactaaagaatcagtgattaactttaggcctttaaataatgtcgaaaatcatatcactataacagttcctaaaaaaactaataaattgtctgtgaatgcgagtgatggagatttaaaagtaaataatattaatgttgaaaaagcaaaattgaatgctgattcagctgatatatcaattaacaaaggtaagtttgatcagctttatgtgaataatgattcaggagacatttcaacatcaaatattaattccaaaaaacttataaaattgatcaatgactcaggagatattaatttgcaaaaaatgcaacctgatgtaaatacaaatattaaaaatgattcaggagatatttcattacattataaagaaaagcctaaagatacccttttaaaaatacataatgattcaggtgattcttatgtagggttaagggaattaaaagataaaaaagtaggtaatggtagtaaaaaactacaattatttaatgattcaggagatattaaagtgaattaa

SEQ ID NO: 944 - DNA, 561 bp, Staphylococcus capitis
atgaataaagatcattatttaaagttactaaagagatatttaggacatatcaataatgatgagaagcaagatattctaaatgagtatgaaacacatttctatagtggaaaacaagaagggaaatctgaagaacagatttctcaagaactaggtaatccaaaatctattgcaaaagaattaagagctactgcagcggtcgagagagcaaaaagtaatagctcaataagtaatattttttctgcgattattgcagttatgggactcagtttattcaatttctttattatattgttccccgctgtcatgatcttttttgcaattgtatctttaattctcttcactatttcaatgctaggtgcaccaataatgctaattgttaaaggatttattgatggttttagttcaattattctttacgatgtttttatggctggactaatgttcggcattggattaatggtcgtagttataactatttatattattaaatggatatatattatgattgtgaaatatctaaaatggaatgtctcagttgtgaaaggaagtgttcagtcatga

SEQ ID NO: 945 - DNA, 324 bp, Staphylococcus capitis
atgaacactcaatttaaaaagggcgctctagagttaattgtcttattaattattaaaaaagaagatcaatatgggtattctttagttcaaaatatctcacgctatatgactattgcggaagggactgtgtatccattgttaagacgtttagtcaaaagtggagaacttgctacttattatcaaccatcatcagaaggtccatctcgaaagtattatagtcttactgaacaagggctggaaagattagacatacttaaaaatgaatgggatttattctctaaagcagtcaatcaatttatagaggagagtgaagcaaatgaataa

SEQ ID NO: 946 - DNA, 1209 bp, Staphylococcus capitis
atgatagagttagatgcaatcacaaccttgtgtttagcatgtgttctatatttaatcggacaatcaatcattaatcatgtatcgatattaaggagaatatgtatacctgctccagttataggcggtttactcttttcaattctcgtagccattcttgattctttacatattgttaaaatcaaactcgatgcatcatttatacaagatttctttatgttggcctttttcactactattggtttaggcgcatcattaaagttgtttaaaattggcggtaaagtcatgcttctttatttcatgttttgtggaatcatggcgatatgtcaaaatattataggtgtatctctcgctaaaattttaaatatccagcctttattagggttaactgctggctctatgtcaatggaaggtggacatggtaatgcagctgcatacggtaaaacaatccaagacatgggtattgattccgctgtaaccgcagcacttgctgccgcaacactaggtcttgtttttggaggattaatcggcggaccagttgttaaatacttaataaaacgatataaccttactccagaacatcgtgatgaatcatataagaattatggtgaagtagaatataaccaatcacttcataataaatttaaaccaacacaaatatttttcattcaatttacaattctagtattttgtatggctttagggacatatatcggagatacattcactcacatgattggcgtcaacattcctatgtatgttggttcaatgtttgttgccgttatcattcgaaatgtatcagaatttgctggattaaacattgttgatttaaaaattaacgaccaaattggtgatatctcacttggtatctttttatctttagcattaatgagtattcagcttaccgaaatttattcactcgctattcctttaatcatcattgtattgatacaagtcgtcttcatggtactattctctatcttcgtattattcagaggactaggtaaagactatgatgctgcagtaatggttggtggatttattggtcatggtttaggtgcgacacctaatgcaatggctaaccttgacgttattactaaaaagtatggtagctcatctaaagcatatcttgtagttcctatagttggtgcatttttaatagatctaatcggcgttattattgtaatgagctttatacaattttttagttaa

SEQ ID NO: 947 - DNA, 1050 bp, Staphylococcus capitis
atgagtgattcactgagagaacaaagaaaaaatgaacatgtagaaattgctatgtctcaacatgatgcgcctcaatctgattttgataaattaagatttgttcatcattccattcctagcattaatgtcgatcaagttgatttaacaagtcatacttctcactttgatatgcaatccccagtgtatattaatgcgatgacgggcggtagtgattggacgaagcaaattaacgaaaagttagcagtagtcgctagagaaactggactagcaatggcggttggatctacacatgctgctttaagaaaccctaaaatggcagaaacatttaacattgtaagacagactaatcctgagggtatgatatttagtaatgttggtgcagatgtgcctgttgaaaaggcgttacaatcagttgaattacttgaggcacaggcattacaaattcatgtgaattcaccacaagaattggttatgccagaaggtaaccgtgaatttgtaacttggatggataatatagaagctattgtgaatcgcgtggatgtaccagtaattgttaaagaagttgggtttggtatgagtaaagagacctttaagtctttagctgaaattggcgttcaatatgtagatgtaagtggtcgtggtggaacgaattttgttgatatagaaaatgaacgtcgttcaaataaagatatggattacttaacccaatgggggcaatcgacagttgaatctctacttgaaagtacagattatcaagataaattaaatgtatttgcaagtggtgggttacgtacacctttagatgcagtaaaaagtttagccttaggtgctaaagctgttggtatgtctagaccatttttaaatcaagtagagcaatcaggtattactaatacgattgaatatgtagaatctttcttaaatcatatgaaaaaaattatgacgatgttagatgctaaagatattgattcacttactcacaaagatattgtatttagtcctaaactactttcttggattgaacaacgtggcttagatattcacagaggctaa

SEQ ID NO: 948 - DNA, 948 bp, Staphylococcus capitis
atgacaatgaccgtaagatatcaatctttaacacaacctcttacggaagtatcaaatattcaagacgtccctagtgatgcgacaattatttggtatgattttgaaaatgcttcaaataaagaaaatgaatttctaagaaataaattcgattttaactatttagaaattgatgatgctattacaggtataccacgagttaaatacaaagaatataaagaatatcaatatatgatttttcacagtattattgataaagattattcacccatcgcattaaatgtatttcttcaaaataatatacttgtcacgtatcatcataaaccttttcaatctttaaagagggtcgccgaatataatgctgaaaaccatgattcagaattagattgcgcggatatagtgatacatatacttgatagtatggtagataaatatttcgatttcgtatatggtattgaagataaagtttataattttgaagctcgtcatgttgatgatcgctatagtaagaatgtgatggaaaacgtttttcagttacgttcagatttgattaaaattaaacgagttatgtttccaatgcaagaagttgttgatacgattaagagtgaaggtaatatcattaaagatgctaaacactcaatgtacattcaacatattgatgaccaccttattaaacagagaaatgtcattagaacagctcaagaaatgacaaatgaaattcgagaaaattatgagtcattcacctcatttagaatgaatagtattatgcaaatactcacacttgtatcagttattttctcacctttaacatttatagctggtgtttatggaatgaactttgattatatgccagagttaaaatggcattatgcttattttatatgtttaggcgtaatgcttgtgataacaattgttttagtcgtctttttcaaaaggaaaaaatggttctaa

SEQ ID NO: 949 - DNA, 477 bp, Staphylococcus capitis
atgtctaaaacatttactgtaacacgaaaagtaactgaagatttgattgataataataaccatatgcatgatgcatattataatgtaatttttagcgatgtaattaatgagtttaattatagtcatgggctatctcttaaagaaagagaagaaagtcaatttacagtatttacaatagaagcacatactacatatttagcagaactgtctcttgatcagtcattcactgtagaattatacctttacgactatgattataaacgtacgcacttatttttaagaatgttgcatgaagatggaactatagctgctacaaatgaagtaatgatgatgggtatcgacaagaatcaacggcgctctgcaccatttcctgagaaatatatggaaattatagaagcttatgatttagaacaggaaaaaattgagtggcctaaacaaataggacatcgcattggtatacctaagaaaggagaatag

SEQ ID NO: 950 - DNA, 393 bp, Staphylococcus capitis
atgcctactaggaaacgtataaaaaacgagcttatagatttgaaagatgacgttaaatttgagttgagtgagttaaacaatcagaaagaattagtcatcaatgggcctgcatctcaactttttaaacgagcaattcatatgagttatttacaaggacaaaagtttgcgattgatgaaatatttacgcttattgatgagaaccaaatcgatgaagaatttcttattcaatataataattttgaaaaatatgttcaagatcaaaacttagaaaagaaatttacttttagtaattttactgacataccacgtcaatttgatgattttatggcatctttttactatttaaaaggacaaaattttattgtcacacatattaattcgataatagaataa

SEQ ID NO: 951 - DNA, 900 bp, Staphylococcus capitis
atgaaaaatcgtttaatgaatagagtagtcaataaatatatacttcataacagatcaatatttttcgaaaatgacgatgaggtagagcaatttttagaaaaaagaagagacgaaaatagtaaaaaacataaacaaccctcatcattaaatgtaaaagcaaatcttgataaattatctttaggggatatgcaagtattcagatttaatttcagacatgagtctaataataaaattctgtatttacatgggggatacaatacattgcaaccctcaccattccactggagattgttagataaattagcattaaatacattacatgaagttgtgctacctatttatcctaaagcgcctgaatatcacctagaagatacatacaacgcgattaaggaagtttatgatgaattagtagctgaagttggtgttgatcatatcgtcatcatgggagacggttcaggtggcggattagctatgcgatttgtacaatccttaattgaggaaaatgaacctgttccaagtaaactattcttaatttcaccacttttagatgcgacactatcaaataaaatgattaccgaagacttagaagacgaagatatattagtaagtcgatttggtgtgaatgaacttatgaaagtatggtctaatggtctaccattaacggataaacgtgtttcaccactctatggtgagctaagaggattacctcctgtatacatgtatggaggaggcaaggaaatacaaaatcctgatatgaaagagctcgcacgtttactagaagattatggtcaatatgttgagtttaatgaatacccaaaaatggtgcatgattttccattatatccaataagacaatcacataaagtcatcaaacaaattacgaaggctattcggaaataa

SEQ ID NO: 952 - DNA, 639 bp, Staphylococcus capitis
gtgtctgaacctaatcaaaatccaagtaacttcaacgctcaatttcatgagcaagaaatacaccgaggcaaaagatatgggaagaaaaagcgttcatgggttagtattatcatccatctgatcatactcattttaactgctataacaggttatagtatgttgaaacaacctatttttaaccttgctttcgctaataaaacaattaatttccatgaaattcaaaacttccaagatactctaactaaaatcggtaatttaaatattaatttgggcaatatggatgatctacaaaaatctatagataacctcataatggtgtttaatatattctttattctttgtttagttagtatgtttattactgtaattacaattattcttaatagaactttattgaagattttcaatttatttattttagcagctatgttactgattactttgtattttagctatattattcatacaattgcgcaaaaaatttctgaatctcttaaacaatattatttaactgtttctccagaccaagtaattaatgaagctgatgcaatacataatgcactcattttacttgcttgtagtattgcactcttattcattagtttattcttccgtaatcgactagcacgtataagataa

SEQ ID NO: 953 - DNA, 2052 bp, Staphylococcus capitis
atgacagcgaccttcattattgtttatattgttatagcgctcatacttattggtcttattaatgtttttctttctaaatctaggaaaaaagcaaaaggtcaaaaagcggaacaacgttcgactaaggattctaagaatcaaagttatcaatctaaatttaaagcaagtgatctagataaacaatctgagtctaacaatgcttcaagtcatgtcagaaatcattctgataatatcgaagatgataaaagaaaacatcacttcgaatctactaaagagggagatcaaagatcttctaatgcaacacattcagaaagtagatatgatgactatcctggttctttacgtcgttcagatcaacatgaagaagaaaacgtagagaaacacgataatcaaaataatcattctacagaatcaaatgaagaatcagatgaagttttaaatcctattaaccctaattctgtagaaggtagagttaatgagaaaattaaaaaccaagaatctaacttcatttttggtaaaggtatttcaagaggtaagattttagctgcaatgttatttggtatgtttattgcgattttaaaccaaacattattaaatgtggcattgcctaaaattaatactgaatttaatatttctgcatcaactggacaatggttgatgacaggtttcatgttagtcaatggtattttaattccaattagtgctttcttatttaacaaatattcgtatagaaaactatttattgtgggcttagtgctctttacgattggttcacttgtctgtgcgatttcgtttaacttcccaattatgatgggaggacgtgtgttacaagccattggtgcaggtatcttaatgccattaggttctaacgttattgtaacgattttcccacctgaaaaacgtggtgttgcaatgggtacaatgggaatagctatgatcttagcaccagccattggtccaacactatcaggttatatcgttcaaaactatcattggaacgtcatgttctatggtatgttctttatcggtttagttgcaattattgtaggtatgttttggtttaaactttaccaacgtaccacaaatcctaaagccgatataccaggaattatctatagtacaataggtttcggtgctttattatacggtttctccgaagctggtaataaaggctggggttctacggaaattgtaacaatgtttgttattggtattatcttcattgttctatttgtaattagagagttaagaatgaaggctccaatgttaaatcttgaagtattaaaatatccaacatatacacttacaacagttatcaatatgattgtaatgatgagtttatatggcggtatgattttacttcctttatatttacaagatttacgtggcttctcagcattagactcaggcttactcatgcttccgggtgccttagtcatgggtgctttaggtcctatagctggtaagctattagatactataggtattaaaccattagcaatctttggtatcggtattatgacttatgctacatgggaattaagtaaattgaacttagaaacgccatatcttcatattatgggcatatatgtattgcgttcgttcggtatggcatttattatgatgcctattatgacagcaggtatgaatgctttacctgcaagattgatctcacatggtaacgcattggttaatacaatgagacaattagcaggttctatcggtacagctatattggtaacagtaatgacgactcaacaaaccaatcatgttgcagcattcggggatgaattagataaaaccaatcctgttatccaagatcatatgcgtgaattagcacaacaatatggtggcgaatcaggtgcattaaaagtgttattacaatatgttaataaacttgcatctgttgaaggtgttaatgatgcatttatcattgctactgttattagtgctatcgcattaatcttaagcttattcttacaaagtaagaaaaaagcagaagcgtcagctaaaaaagctaacgcagaagataaaacagctcaccaagagtaa

SEQ ID NO: 954 - DNA, 648 bp, Staphylococcus capitis
atgaagaaaatggtattagtgaatgtcattactatcattgtcttagtagttataggtgttctagctttctggttctggaacaatgcgactagctacgtaactactgacaacgcaaaagtagacggagatcaaattaaaatctcaagtccagcttcaggacaaattaaatctcttgatattaaacaaggagataaacttgataaaggtgataaagtagctgaagtttcagctcaaggtgaaggtggtcaatctaaagatatgagcatcaaaatgcctcaaaaaggtactatcgtaaaaactgatggtatggaagggtctatggctcaagctggtaacccaatcgcttatgcatacaatttagatgatttatacattactgctaacgtagatgaaaaagacatttctgatgtagaaaaaggaaacgatgtagacgttgatatcgacggtcaaaaagcttctatcaaaggtaaagttgaacaagttggtgaagcaactgcagctagtttctcattaatgccttcatcaaacagtgacggcaactacactaaagtgtctcaagtagtgccagttaaaatttctctagattctgaaccatctaaaaatgttgttccaggtatgaacgctgaagttaaaatccataaaaattaa

SEQ ID NO: 955 - DNA, 552 bp, Staphylococcus capitis
atgaagcaacgtgctaaatataaaatcattcaaagtcttattgaattacttgaagaatatccatttgaggacattactatcaaaatgatttgtgcatatagtaacgtaaatcgctcaactttttatgatcattttcaagataaatatcatttattagaacgtatacaaaattatcatctcgataaatataaagctttacttaattctttttatcatgactttcatagcattaagcaagatcaaaagaaaatgtataaattctttttacttgttgcgagttatatcaaacgtagggaagccttttataaagcaacattaattactcatcctaataaagatattgctttggattatattaatgaaactagagattgttatgaaaaggtgatgaatagatatgaaacctcaattcagaataaacacatgtttgttgtttattctgtaggaggtcaagccggtattattatcgattggttacgacgtggttgtgtagagtctccaaaagtcatagcagaagtcttactcgcaaatactattaaactgcaaaggtaa

SEQ ID NO: 956 - DNA, 1197 bp, Staphylococcus capitis
ttggagcaatcacaacccaaacatcgcaattccctattatttatcatcattttaggtgcgcttactgctataggaccgttgtcaattgacatgttcttaccaggtctacctaacattaagaatgattttcatacaacagcatcaaatgctcaattaacaatttcatttttcatggtgggattagcattcggtaacttgtttgctggtcctatttccgattctaaaggtcgtaaaaagcctcttcttattgcgatggttattttcacgctggcaagtttaggaatcatttttgttacgaatatttgggtgatgattatattacgtcttatacaaggtctaactggtggggcaggtgcagtcatatccagagcagtggcaagtgataaatactcaggaaatgatttaaccaaattcttatcacttctaatgttagttaacggtgttgcaccagttatcgcaccagcacttgggggtttgatactaagttttactggtagaatggtctttattatattgaccattttcggtttacttatgttcataggaacacttttcaaagttccagaatcccttgaaaatgaacaccgtgttaatagcaacattggcacaatgtttaagaactttaaagatttatttgctacaccaagatttgtattacctatgttgatacaaggcgtgtcatttgttttattatttacttacatttcagcctcaccatttattgttcaaaaaatatatggattttcgcctttacagtttagtatcatgtttgcatccataggtattactttaattatttcaagtcaactgaccggaaagttagtagattactttgataggcaatctatacttagaatgatgactgtaatccaaattttaggtgtcatcatagtaagtatgacattaatcaatcattggaatatctggttattagcgtttggctttgtaatacttgtagcacctgtaacaggtgtagcaacacttggtttctctattgcaatggatgaaagtaaaagtggaaaaggcagttcttcaagccttcttggactatttcaaacattattaggtggactgatgtcaccactcgtaggtattaaaggggaaaatgatccaacaccctacattattattgctataacagctgtaattctgattatattacaacttttaaatagacgcgtatttaaaaaaagctaa

SEQ ID NO: 957 - DNA, 1398 bp, Staphylococcus capitis
atgaatcaatgcccaaactgtggacatacagttagtggtgataatgaaagctgtccaaattgtgggcaatcattatcaagagataagaaaagaaaaaataaaactaaacagcaatcatctcaatcgcaaaataataacgctacgaacctcaaattacgtagaattgttccactaggaatcgtcttttttattttaatacttattgtggttttatttttcctattaaagaactttaattctccagatgcacaagctaagattcttgttaatgcagtagataataatgatacgcaaaaagtagcaactttattaagtactaaagataataaagtagatccagatgaggcgaaagaatatattaaatatattaaaaacgaagtaggtatgaaaagttttattagtaatattcgagagacagtggacaaattgaataaaaataattcaagtgtcgcatcgtatatccaaacgagaagtggtcaagacgtactgagaattagtaaaaatggtacgagatatttgttctttgataatatgagctttactgcacccacgaaacaaccaattattaaacctaaagaagaaacaaaatatgaatttaaaacaggtggtaaacgcaaaactgtcattgcagatgcacacaagaatacaccattaggtgatttcataccgggtacttatcacatgcctgctaaaaagattactaagaatggtacattcaatggctatttaaattttgattttagagaaagtagttctgagacagtagaagcttcggaagattttgatcagacctatttaaatatcaaattaaaaggtgcaagtaaattaagtgatagttcagaaaaagtaaaaattaatgatcgtgaaatgtcatactcaaattctaaagagtatggtccgtatccgaaaacgaaagatattactatatctgccacaggtaaagcaaaaggtagaaaatttagttcagaaaccaaaacaattagtgctgatgatttaaaaaataatacgactgtgacattaaattttgaaagtgataaaatcaatagttatgttgagaaaaaagaaaaagaagagaacagtctcaaaaataaattaacggagttcttcagtggttactcaatggcgattaattcagcttttaatatgaataattttgattttatatcaagttattttaaaaagaattcttctatttataaacaaatgaaaaataactttgcaaatcatacaactgtttcaatgctatcaccacaagtattaagtgccagtagaagcggagataaaattaaaaccacgattcaacaaattgataactcaggtaactttgttaacaaagactatgaactagaaattgactctgataatagtaatatgcaactcacaaaaggtgatgaataa

SEQ ID NO: 958 - DNA, 456 bp, Staphylococcus capitis
atggtaagacgaatagaagatcatatcatttttttggaaaaattcataaatgacgtaaatacattaactgcaaagctacttaaagatttacaaattgaatatggcatttctatagagcaatctaatgtgttgaatatgttaagtaatgaatcattaacagtgagtcaaattactgaaaaacaaggcgtcaataaagcagcagtaagtagaagagttaaaaaattattagatgctgacttagttaaactcgaaaaaacaaatgccaatactgaccaacgcttaaaaattgtaattttatcagaaaaaggcaaagaatatattgtaaaaagaaaagcaaacataagtaatattgctaatgatatgacaagtgatttctcaacagaggaaatagaaaaagttagacatgttttagaggtcattgatcatcgtatcaaatcgtttaattctaaattataa

SEQ ID NO: 959 - DNA, 963 bp, Staphylococcus capitis
atgatatcaattatactaacaatcattgcttttatccttattgcatctttgtatgtcaatcaaccactcactcttaatttaagagcttatatttcttctattattatcggatttatcattactatttatcatttaattcatttaactattccgtatgatttaacaagcttaatgttgattgcttcattatttattctcattaaacatcgacatttatttaactttaaacgtggacgtctatttttgaaacacatgtttatttacctttatcgcatcatattattcctatcagcatgtatatatatcagtacggtagacatcccaattattaatggattggccttatggttcgccaccatcgcttatagtactatattcgcttttatttgttatatttcttggtcatcagcttatggtagtcatttatgttctaaaaatgtagacctaattatggtactaggagcaggtatttttacagaggaagtcactcctatgcttgctgaacggttaaattgcgcaatcaaagtttatgaatctcaaaagcattctccatatatgttagtaagtggtgggcaaggtcccgatgaacccattactgaggcgctagcaatgaaacgctatctcatcgcgaagggtgtgccggagaaacgtattctaatggaagaacaatctactaatacgtataccaattttcaatattcaaagccaatcatagaaggacattttggaagacgggcacaattcttatgtgttacaagccaattccatattttaagatcattgcgtcttgctaataaagtaggtttagaattctatggtctcgggagccatacaccctatcattttttcagtatagcgcttatcaaagattttttaggattaatgtatcaatataaagtaattctaactatttattttgcgattatcttttgggtaagtcttatacgcatgatcatcgtctaa

SEQ ID NO: 960 - DNA, 663 bp, Staphylococcus capitis
atgacattaatggtagataatattgttaaaacttttggagaaaatgaatctgaaacgcaagttttaaaaggaatcaattttgaagttcaggatggagaattcgttatcttaaatggtgcttctggttccggcaaaactacattattaacgatactaggcggtttattatcacctacatctggtaaactcatctatgaagaaagccctttatttaataacaacaacaatactaaaatgaggctcaacgacatcggctttatatttcaagcgtcatatctcatcccgtacctcactgtagaagaacaactgatcactgttggtaaagaagcgggaatgtctaaaagagaagcaaagttacgggctaatgaattacttgatgagattggtttaacacatagggtgaaaagctatccctatatgttatcaggtggagaaaaacaacgtgtagcgattatgagagcgtttatgaatcatcctaaaatcatactagctgacgaacctaccgcaagtttagatgcagagagagctagagatgtcgtagcaatgattaaagaacagattagtgacaaacgtatgattggtataatgattacacatgatgaaagtttatttaaatatgcagaccgtgttatagaactttatgacggtaaaataatcaactaa

SEQ ID NO: 961 - DNA, 1056 bp, Staphylococcus capitis
atgaatttagcatggaaggaaattaaattttataaattcagatttattcttataatgcttatcgtatttttaatgtctacgatggttttatttatcagtgggttggctcaaggactagccagggaaaacatttctctatttgatcacctcaaagggaaccaatttattattcagaaaatgaaggaaccacaactagaaaaatcttcattaaactctaaacaacaatttaaaataaacaaaatcgttaacgagcaaccaataaaaatgatgtcaaaaactttaaatataaaaggtaatgaagaaaatgtcgttgcattaaactatacgaccgaaaataaatttaatctaaaatctggaacatatccaaatcataaaaatgaaattgtagtgaatgaaaaacttatcgcaaaagggattaaaaaaggagataaagtgaagttcaccaaagaaggtaagccatataaagtcgtaggaattcttaaagatgctatgtattcgcatagtaatgtgattcttatgaatcaaaacgtatttcaaaataaaaataatggtgtggcttcattttattcattgagtcatttatctagtaaacagaagcatgaaatcaattcaattaaaggtgtgcaacatgtaaaagcacaagaattaacgaatcatattgctagctacaaagctgagcaaagtccattgaaaatgatgatttatagtttatttattatcacagcaatagtattaagcgcattcttttatgtaatgacgatacagaaaatttccgagataggaatacttaaagctataggcatttccacaccacatttacttatttcattaatcgttcaaatttcagtaattactctgattggtgtaattatatctgaagctttaattatattaataaatcaaattttaccggttacaatgccatttcatttagaagtgagcaacatgttagttgtattaataatatttttattcgttggtttaattggcgcgtcactctcgttcattaaacttttaaaaattgatccgatagaagcgatagggggaaatgaataa

SEQ ID NO: 962 - DNA, 678 bp, Staphylococcus capitis
atgatggcgagctgtttagttgttgatgatgatcgaaaaatattagattatgtaaaatctcatctaataaatgaacattttgaaacacacgcttttttaagtggtgaggaggcacttcattttcttgaaaaagagaatgtcgacatagctatcgttgatattatgatgaatggcataaatggtttcgaattatgtaaaactttaaaagaggattatgatatacccgttattatgttaacggcaagagacgctttaagtgataaagaacgtgctttcttaagcgggacagatgactatgtaactaaaccatttgaggtgaaagaattactatttagaatcaaagcggtgttaagaagatatcaaatcaatgctgagtctgaacttaaacttggaaatttaacactcaatcaaccatatatggagataagcgttgatgctaaaacgataaatcttcctaataaagaattccaattattatttttattagtgtctaatccaaaacacatttttactcgaaatgacatcattgaaaaaatttggggctttgattatgaaggtgatgatcgaactgttgatgtacacattaaaagactccgtcaaaagttgtctagattaggtgcatcaatttcaatacatacggtccgtggacaagggtataaggtgaatcaagatgtttaa

SEQ ID NO: 963 - DNA, 1368 bp, Staphylococcus capitis
atgtttaaaacactttattctagaattgcaatctataccatcacagtgatactttttagcgcctttataagctttgtccttacaaatatctattatcattttaatttaaaagcctctaatgatgctaaaattatgaaaaccttagaagaagcacgcaattatgaaaacgcacaaaacactcaatcactctcctcttattttaaacatttgggagatatgaattatcaaatacttactgtagataatcatggtacaaaacatttttatggagaaccattccgtcgagatacattaccacaatctgctattcaatctgtaatgaatggtaaaaattatcacggtattaaaaataagccatttgaattatttgtcacaggttttttcgataatgaaacggataacacggtaggcttacgctttaaaactaacgataaaccagttgcggtatttatgcgtcctgatattggtgaaacatttagtgagtttagaatatttttagccgtgttacttgggctattacttgtcatctcaatttcattagttattgcttctacgtattcaattattaaacccgtttctgctctgaaaagtgcaacccatagactgatgaaaggcgattttcaaactcctatcaatcaaacacgtcaagatgaaattggcaccttacaatcaaggtttgatacaatgcgcaaacgtttaggacaagtagatgaaatgagacaacattttgtccaaaatgtatctcatgaaatcaaaactccactgacacacattcaaagtatattaactcaactacaattttctaaaagtaaagaagaaagacaaatgcatgttaatgagctatttaatattactactcaagtcagtgatttaacgcaagaactattattactatctgaattagataacgcagaacatttaactttagataatcgcatccacttaaatgatttaattaaagatattgtcagacatgagcaattccatattgaagaaaaagatttagtaattatgacagaattagatgaggtatatttcctaggaaatgaaagacttattcatcaagcgttaagcaatcttatcattaatgccattaaatacacaccacaatatggcttaatccagatacatttatcaatagaagcttccaatattatttttaccatcgaaaatgagggcgcagtcagtgataaagatatgtctcacattttcgaaagattttataaattaaacaatgatcagagtagtaatggtttaggtctcgcaattacaaaatccatcgtagaattgcacaatggtactatttctgttcaatctaacgacgctacaatcttcacaattcaattaccaattaaaaacactgtataa

SEQ ID NO: 964 - DNA, 1479 bp, Staphylococcus capitis
atgagtacacaacatagcaaaacagatgtcatcttaattggtggcggcattatgagtgcaacattaggaacattacttaaagaattatcacctgagaaagaaattaaattatttgaaagattggaccaacctggtgaggaaagttcaaacgtttggaataacgctggtacagggcattcagcattatgcgagctgaattatactaaagaaggtaaagatggctcagttgatatcactaaagcgataaagattaatgaacaataccaagtgtctaaacagttttggacgtatttagtacgtacgggtcaattagatagcccaggtaagtttatccaatctgtaccacacatgagttttgttaagggcgaaaataatgtgcgtttcttgaaaagtcgtgtagatagtcttcaaaaaaatgttcttttcgaaaaaatggaaatctctgaagatcctgaaaaaattaagaaatgggtaccattaatgatggaagggcgtaagtcagaagagcctattgctatcacttatgatgaaacagggacagacgtgaattttggtgctttaacgaaaaaattaattagcaatttacaagagaaacatgtcgaagtgaattataagcatgaagttcaagacattaagaaacaggataatggtaattggaatgttgttattaaagatttaacatctggtcaaataacaaattatgaaacggaatttgtatttatcggtgctggtggcgctagtttacctttattacaaaaaacaggtattaaagaatctaaacacattggtggtttcccagtaagtggattattcttaagatgtaaaaatcctgatgttattaaacagcatcatgcaaaagtgtatggtaaagcagaggtgggagcacctccaatgtctgtacctcacttagatacacgttttgttaacggtgaacgttctttattatttggacctttcgcaggtttctcacctaaattcttaaaaactggctcatatttagatttaattaaatctgttaaaccaaataatatagtaacgatgttaagtgcaggtgttaaagagtttaatttaactaaatatcttgtatctcaattaatgttatctaatgaagaacgtgttgatgacttacgtgtgttcttccctgaagctaaagacgaggattgggaagtaattactgcaggacaacgtgttcaagtgattaaagatactgataaatctaaaggtaacctacagtttggtacggaagttattacttctgaagatggtacactagcagctcttttaggtgcttcaccaggtgcgtcaacagcagtagatattatgtttgatgtattacaacgttgttatcaatcagaatttagtggttgggaatctaaaatcaaagaaatggtaccttcatttggcttgaaactctcagaacatgaagatgtataccatgccgtaaataaagaaattacaaagtatttaaatgttaaataa

SEQ ID NO: 965 - DNA, 1146 bp, Staphylococcus capitis
atgaaatcgttcacgtttttcatgcataatatatatgctatgggtggaacagtaaaatctatttcccagctcgctaatactctgtctaaaaaaggtcactcagttacaatcatctcagtatttagaggcgctcaatcgccctattttaaattaaacaaagatattaatattaaagtattagttgactatcgttttaaagccaaaaatttcaaagcgattgtcgctaatcgtgtaaaatcttacactccacttttaaaaccgcaaaaaatttctcaacatgaaccaggatttaatcagttttcaagttatgtcgaaaagaaaatgattaaagccatcaaaaatgtgtcttcagatgtattaattggtactcgtgcgagcttcaatattttaatctcaaaatatgccaaaactcatatcaccaaaataggtatggaacacatgaattttgatgctcatcctgagcaatatcaaagagaaattattgctgcctatagaaacttaaataaagtcactacattaactgaaagtgatcaaaaaaactatcaatctcgacttaaaactcctgtatacgtcgtaccaaacatggtaactgagaaaaaaattgctgcgccgaagaaaaatattatcttggccgctggtcgtttagaatatgaaaaaggattcgatttacttcttgagagtgtgagacttatacaagattatttaagaagtttaaactatgaagtacatctttatggggatggaaaagaacaacaacaattacaagaatttatcgatcaatataacttaagcgatattattcaaatcaatgcgtctacacaagaattaaatagtaaattagcgcaaagcaaaattgttgttgtaccttcacgtaatgaaggttttgggatgattattttagaagcgatgcttcaggataatatagttattagttttaaaggcaatgtaggtcctaaagctattataaaaaatggccataatggttatcttgtagagtatgaaaatgtatcacaattagccaagcaaattgatttaacaacacataattataatgaacttgatcatattattcaaaataccaaagaaaccttaaaattatatcacccggattcagtatatgaagactttatgaatatgttcaaataa

SEQ ID NO: 966 - DNA, 1602 bp, Staphylococcus capitis
atgttagtacaaacatttaatccatttggtaatttaatattatcaagtttagtagcagcaatacctatcattttatttttactatgtttaacagttttcaaaatgaaaggaatttatgcagcgataactacacttgtagtgacattgctcattgcaattccatttttcaaattaccagtgggaatcgcttctggtgcagttgtagaaggtttcttccaaggggtgatacctattggttatattgtaatgatggcggtattactttataaaattactttagagtctgggcaattttcaactatacaagatagtataacaagtatttctcaagaccaacgtattcaattattactgataggattttcgtttaatgcgttcttagagggtgctgcaggttttggggtgccaattgcaatttgtgctttattattatcacaacttggctttaaaccacttcaagcagcaatgttatgtttagtagctaatgcagcgtcaggtgcctttggggcaataggtataccagttggagtggtcgatacattacatttaccgggaaatgttacagctatgggtgtttcacaaaccgcaacactgacattagccattattaacttctttattccgtttttattaatttttattattgatggcttccaaggtattaaagaaacattaccatctattttagttgtttctgtcacttatacagttttacaagcactattaactgtattcaatggaccagagttagcagatattattccgccacttgcatctatgctagctttagctttattttctaaaaagttccaacctaaacatatctttagaattcaaaaagatgttgaaccagaaccagttaaacatcataaaggtaaggaaatattatatgcatggagcccattcgttattttaacaatcattgtcatgatatggagttctccatcatttaaagggttattcttaccaaaaggtaaattatcatcacttgtgtttaactttaatctaccaggtacattcagtgatatagcacacaaaccaattgtattatcacttaatattattggccaaacaggtacagctattctactaacgatcgttattactatattgatgtctaagaaagtaaactttggagatgctggtcgtttatttggtgtcacttttaaagaactttggctaccagtccttactatttgctttattctggcaatctcaaaaattacaacatatggtggattaagtagtgcgatgggtcaaggtatttctaaagcaggtagtgtcttcccaatcttatcacctatacttggatggattggcgtattcatgacaggttccgtcgtcaacaacaactcattgtttgcacctattcaagcatcagttgctcaacaaataggtactagtggatcattgcttgttgcttcaaatactgtaggtggtgtggcagccaaactcatctcaccacaatctatagcgattgcaacagctgccgttaaagaggttggtaaagaatctgagttacttaaaatgacattacgatacagtatcggtttactcgtattcgtatgtttatggacattcatcttatcattattactataa

SEQ ID NO: 967 - DNA, 1680 bp, Staphylococcus capitis
atgataaaacaaataaacatttcacatatggagaagttggaaggactattagaaaaagctttacatgagggttacacacattttgtaccctattcaaatgaaattcagattcatcaatcaatgttaaaatccattgagctaccttcaacttcatttgttgtcgattatacaatacataatacgtatcttaatgattgtagatactttggtaaaacatatattaactttgaagattgggtacaaaatattaatttatatcctaatgttatttacgaaatcaattcagtgcttaagatattgaataaatttgaggttgaaacgatatttgacttagctttatttactattcttaagggccatgtagctgtagaaggacatgtggcacttgattttaaagactccctccgaacaagcaaggtattctggagaagttttgaccgtaatggattaaattatagagatcaattctttcttaataaaattgcatatgaacatcaacgtagaatccctttcacacgtgtacctttcaatgatcatgatagtatacgttattctgattccgtgttattaagtactaaattcaaagcaccaagatggctcgtaaatccaattaaaaattattcattacgtaaacataaggaaattagttatatttatgataaagatgattctaaaattaaatcacatgtcgtatttttaggttttgattatcattatagaggaaattctaagtatctatttaattactttgtaaaacataacgctacagtagaatcatattttattactgatgatagaactgtcccacatttcatatctcctaatgatgagagtgcaaaggaagtcattgaaactgctagtgttgtaatcatagaaagctatctacctgatgatgttcgtcctaatggaaaggtcattcaattatggcatggaacacctattaagcgtctctttttagatagtaaagaaccgcatcaaaatctaaacatttataactatcgagcacgtaaatataataaatgggtccatcaagattatcttgtcgttgattctacagaggttgtaaaatattttgaatctgcttttccgagtcataaattagatatcctacctatcggttatccaagagtcaattatttattaaataaatctcaagatctcaccctaagaaaaagaattatcaaagggttacaattagatacctctaagccagttctgttgtatgccccaacttggaaatcaaatacatctgaagaagatatactacctttatctgataagttactcaataaatataatgtaatattcaaagggcacgttgaaagtaaagataattacattcctgatggcgtgattgtcccacctgaaagtgtagaaacacaagatttaattatgatagctgatattgttctaaccgactactcttctattatttttgatgcactcactcttaataaaaacgtatgtttatatacgccaaatcatgctcaatatgttgaagaacgtggtgtatatgaagatgtactcaatagcttaaaagaagtatggtatacagatgcagaagtacttacaaatcatttaatttctgattcaataccacatgtaaatagtaaatatattaatagacaaaatcattcattagacaaacttagtcatttaatagctcagcaaatacattga

SEQ ID NO: 968 - DNA, 597 bp, Staphylococcus capitis
atgaagagattattcgcaagtatcacagttctaacattaatactagcagcatgttctcatagtggaagtgatgaaaatgagaaaaatgatgatagttcgaagaaggaacaaaaagagaaaaagtctaaaactgattcaaaggataagtctaaaaatcataaagataaagacagtacatctaaatctagtagtaataatgaactttcgtcgtctgattcacaaactgaaaatactaatacatcaaaacagcaacctcaatctaaccaagataatagtaaaaataaggactatgttgcaccttatcaaagcaaccacgcgacacaggtcgctagaagcttgtctccatttaatggaaatgaaggtcaagcactacaacaacttccaaattttgaaacagcactagatatagcaaagaatgaggcaaacatgtttggtaactcacataaaaaatataatgactactcactcgaggctactaatgatggatttagatatgtatttagctttaaagatgcctcaaaagacaatagttattcaatagtcacagtgaatcgtcaaggtcaaccaacacttatagatccaaactatcatcaatag

SEQ ID NO: 969 - DNA, 2169 bp, Staphylococcus capitis
atgagtacactgacaattattgtcacatattacaactcagaagagtacataaaaagttgtattgaaagtattaaacaacagagaactcaagattttgaagtgattatcgttaatgatggttctactgacaatagtgaacaattaatgaatgaagctttaaaagattatgataaagatattaattatatcaaattagagagtaatcaaggacatgcacatgcacgtaatgttgctctagaacaagtggaaacaccttattttatgtttcttgattcagatgacgttttagcctcatatgcaatcacattttatctagataaatttaattatactgatggcttgatagcgcctattcattcatttacacttcaacgtcctcaatacgttgatttagatcgtgttagagttgagtattacaatgctgacgcgaacgttaattcatttttaagaaagcaaacagcttgtaatataatattccgaactgcaatcgtcaaagcacatcatctgaaattcaacgaagatttaagtatttatactgattggtcatttacgcttgaatatatgaagtatgttaataagtttatgcgtatttttaacttcccgttctacttccgtggagaagtttacgatccttttgaaacagtaacgttaagtgagcaaagttttgatgttctttttgaagaatatgtaaagagcttctatgatgctttagaacgtacttcgaataaaatgacgcgaacatttattattaataaaatggaaaatagaatttcccgtgattttgatccaactcattatgatattaaagcgagatacgaggctcacaaagatacacttgttgaattagcacaatatcttaacgtccaactagttaaacatcaaaaacttatcaatatcatagaaacggttttattgatgaatcaagatacagagaatgcttttaaagtgaaccaatttagaaagacattgcgtcatgttaaaaatgtcttactcagaagaaaaaataaagatcgttctatatatgaacttactgataaagaagaaaatgttaatcaaggaacgattgttttcgaggcatttggtggtaaaaattatagtgatagtccgaaatatatatatgaatatatgcaaaaatactatccaaattacaattatgtttggtcacttaaaaaacctgataagagtgtaattccaggtaatgctaaaaaagtgaaacgtggttctgctgaatactatcaagcatactctgaagcaagtcattgggtaacaaatgcacgtacaccgttatatttaaacaaaaaggataaccaaacttatattcaaacttggcacggtacgccattaaaacgacttgcaaatgatatgaaagtcgttcgtatgcctggtacaacaacttcaagatataaacgaaacttcaaccgtgaaacgtcacgttgggattatttaatttcgcctaatagatattcttcagaaattttcagaagtgcattctggatggatgaacctagaatattagaaataggctatccaagaaacgatgtattagtgaatcgtgcaaacgatcaagactatatcgatgaaatcaagacaaatcttaacttaccaagtgataaaaaagtaattatgtatgctccaacttggagagatgatgaatttgttagtaagggtaaatatttatttgagttaaaaattgatttagaaaatctatacaatgagctaggggatgattacgttatcttattacgtatgcattatcttatctctaatgctcttgatctaacaggatatgaaaactttgcagttgatgtgtctaattataacgatgtttcagagttattcttggtaagtgattgtttaatcactgattattcatctgttatgtttgattatggtattttaaaacgtcctcaatttttctttgcatatgacattgataaatatgataaaggattacgtggattctacatggactatatgaaagatttaccaggtccaatttatactgaaccatatggattggctaaaaaactcaaagacttagataaagttcaagatgaatatcaagaccaaattgatgctttttatgatagattctgttcagttgatgatggtaaagcttctcaatatatcggagagcttattcacaaagatatcgaagaaaacaagtag

SEQ ID NO: 970 - DNA, 519 bp, Staphylococcus capitis
atgagtgagagtatccgtgaggtaagaagtgatgaagttgaaatattacaggatatagctaagagaactttttatcatacatttaaatcgtcttatgatgatagagattttaataaattttttgaagaggcgtataacattaatcaattatctcgtgaacttcaagagaaagattcatttcactatttttttagagatgaacaaaaagtagtaggatatttaaaattaaatattaatcatgcccaaacagaaaaaaagggagaagattatttagaaattcaacgaatctatttcgatgaggcatatcaaggtggcgggagaggtaaaaaattcattgacttggctgtcaaaaaagcaaaggaatatcataaaactaagatttggcttggtgtatgggagcacaacccacaagcacttcgattttatgaaaaaagagggtttgtcgttacaggttcacatgaattttatactggtgatgtcgtagataaagatttaattatggaaaaaagtttaatttaa

SEQ ID NO: 971 - DNA, 222 bp, Staphylococcus capitis
atgtttgaaaatatgtttgtcgtaggtatcactggtcctacaagtttagtcgtaatcgcaattatcgcattaattatttttggacctacaaaattaccacaatttggaagagctgttggttcaacgttaaaagaatttaaatccgcagcagaacatattgatgaagattcacacgagactcccagtaaagcttctaaatcacagcgagaacaatcaaaatag

SEQ ID NO: 972 - DNA, 666 bp, Staphylococcus capitis
ttgatcgcacttatcgtttcagtcttcttagtttatatttcatcacattggtggatgcaaccttttataaaatatattaaacgagcacatgttactttacataccttctcgtttaccgaaacgatacaaatttatgtaatgattattttcacagtagcaatatgtttaattgtacctattattttctatcagctatggtcttttatagcaccaggcctacatgtttatgagcgacaatttatttataaatatagttttttctgtgctttattattcattataggagtagccttcgcattttttgttggctttccaatgattattaatttctctgaaaaactatctcatatgctcaatatagaccaagttattggatttaaagcatacctaggagagctaattagatggctcctcgtttttggatttatattccaattacctatattatttatgggattagctcattttggacttatagatgttaatcagttaggtcattatagaaaatatgtttactttgcttgttttgtagtagcaagtattatcgcaccacctgatttaatattaaacttagcattaacacttccattaattctcttatttgaaatcagcatgtttatcgcaaaattcacttatagaaaacaaaaaatcacaaatgaactctaa

SEQ ID NO: 973 - DNA, 1719 bp, Staphylococcus capitis
gtgaaacactattcgattaagatacttatcgtcttaattctaatattaagtttatttaaaatagcaccagtacatgctgaaaatgcctcaatgagtgaagtatatgtttcaattacggatgctaaatcaacgattagtgataattcaaaaaaggatagcgataagaaaaaagctatcaagcaagttagaaaagaaattaatgctttaaaagtaaaagataataaagaaggtaaagcagtcaagaataaactgaaggaagttgaaagtgctaaaacttcagatgatcaagctgataagttatcagacttaactaaagcattaattacatatgaaaatacacaaagttctaaagatgcatcaggtcaaattaaagaattaaagcaagcagtagacgccaaagatgaacctattcaaaaagcgattaaaaataaaaatcgttcagaactcgaatccattaataatagtttgaaccaaatttggactagtcatgaaactgtcattcgtaattacgatgaagggaaatatgggacgattgaagtgaatttaatgcaacttcgtgtagccatacaaaaggaaccattagatccaaagaaagttaagaacgcttgggatacgttcaaatcaagtatagatactgtggaccaaaaacaatcatcagaagaaaatggtaagtacaaagtgtcacaattgaatgatgagttagataaggcgataactggtatcaataaaaatgatttaaaacaaacggatgcggctttatctaaatttattcaaatttggccatatgtcgaaggtaaaattcaaactaagaataatagcttatatacaactattgaagataaaataccttattatcaaagtattttagatgacagcaacaaagagcgtgtcaaagacggtttaaaagagatcaataatgatattaaagatacggttggaacaggagattatactttcgttgatgtaatggtaatcttcttacgtgaaggcttagaagtactattaatcgtcatgaccttaacaaccatgacccgcaaggtgaaagaccataaaggtacatctagtgtgataggtggtgcactcttaggattagtattaagtatagcattagcagttgttttgatttcaacaattggcaataatggtattattcgtgagggtatggaagcggtacttggtatcgtagccgttattttaatgtatgtggttggtgtgtggatgcataatcgatcaagtgcaaaacgttggaataaaatgattcagtcgatgtaccaaaatgcaattagtaacggtaaccttgttttattgggaacaatcggcttgatatcagtacttcgtgaaggtgttgaagttatcatattctatatgggtatgattggtagtattaaaacgcaagactttataataggaatagtaatagcgattgtaattttaatcatcttcgctttactatttagatttattgtcaagttaattccagttcactatatatttcgagtgctttcaatactaatcttcattatgacatttaaaatgttaggtgtaagtatccaaaaagctcaattactaggttggatacctcaacatagtatcgaaggtttgcctacagtgagttggattggtttctatcctagtgtcgaaacaatagtagctcaaatcattttagttattttaatactattatttgtatttaaacaacgtaaaaagaatcaacaataa

SEQ ID NO: 974 - DNA, 1227 bp, Staphylococcus capitis
atgagtaaactagacaaagaccaatcatcacaaatgtcacgccgttcatttctaaaaatgttaggcataggtggcgctggtgtagtcattggtgcaagtggagtaggaagtatattctcttttaaatcaatgtttgatacaccagaagatgaagagaaagatgcatatgagttttatggcaaagttcaagccggtattactacacccacacaacgctcaattaactttgtagctttagatttaaaatcgaaagataaagctgcaatcaaagatatgttcaaacagtggacgaaaatggcagcgcagatgacggacggagattctgtcggtaaagagagtagtaacccattattaccacctgttgatactggtgaagcaattggcttaagtgcgagtaaattaacgcttacgttcggagtaagtaaatctttcttgaaaaagattggtatgaaagacaagataccgaaagattataaagatttaccacatttccctaatgatcaattatcggatgattttagtgatggagatatcatgattcaagcatgttcaatggatgatcaagttactttccatgctatccataacttaataagaccatttagagatattgtacaagttaaatggactcaaacaggttttgtttcaggacaacttcatgaaacgccacgtaacttaatggcatttaaagatgggactgttaaccctcgccatactgacgagtacaaggattatgtatttattgatgacggttgggctaaaaatggtacatattgtattattcgacgcatacagattcatattgaaacatgggaccgcactgcactcgaagaacaagaagcgacgtttggacgtaaacgaatctctggtgctccgctaactggtaagaaagaatttgatgaaatggatctcggtgcaaaggatagtagtggagagtatgtaattcctgcagatgctcatgcacgtttagcgcatgaagcgaagacgtccattaaacgtcgtgcttataactacactgcaggaacaaatgacaaaactggagctttagaaacagggttattatttattagtttccaaaaggcgactcaacaatttattgatattcaaaaccatttaggtcataaagataaattaaatgaatacattacacatcgtgcctccgcaacatttatcgtattacctggtgtgaaaaagggaggatacctcggtgaaacactattcgattaa

SEQ ID NO: 975 - DNA, 855 bp, Staphylococcus capitis
atgaaaaagttaccggttattttattagcatcaacgttaatgttagcagcatgtggaaacgacaataatagtaaagatagttcaagttcaacaaataatagtagtggtggtaataaaaaggaattaaatgaagctactaagaagtatgaaaagtacacagataagcaactcgatcaattcttaaaaggtacgcaacaattcgttgatgcaattaaagataacaatctgcaaaaggctaaagaattatatcctaaggtacgtatgtattatgaacgttcagaaccagttgccgaggctttcggtgatttagatcctaagattgacgctcgtttagcagatatgaaagaagaaaaaaaagaagatcaatggactggatatcataaaattgaaaaacaactttatcaagataataaaattgacagtacaactaaaaaggatgctgatcaattgttaaaagatgctaaagaattacatgcaaaagctgatacattagatattacacctaaattaatgcttcaaggatcagtagatttattaaatgaagtttcaacatctaaaattacaggtgaagaagaaatttattctcatactgatttgtacgactttaaagctaatattgaaggcgcgcaaaaaatatatgagttatttaaacctactctagagaaaaaagataaaaagttaagttcaaatattcaaaagaactttgacaaggtaaataaattacttgataaatataaagacggtgatggttataaatcttataatgatgtaactaagaaagatagaaaagcattggctgatgctgtaaatgctttaggtgaaccattaagtaagatggctgtggttacagaatga

SEQ ID NO: 976 - DNA, 999 bp, Staphylococcus capitis
atggtagaaaagtttcaagcatttatagttgatcaagacgacaaaggtaacgtttctcatgattttaaaaagataagtaaagaggatttacctgaaggtgacgttctcattaaggttcactattctggaattaattataaagacgctttggctacacaagataacaatgcaattgtaaaaagttatcctatggtgcctggtattgatttggctggtactattgaagaaacgaatgcacctggattagaagttggagatgaagtcattgttacaagctatgacttaggtgtaagtcattatggtggtttcagtgaatacgcacgtgtgaaatcagagtgggttattaacttaccagagggacttactctagaagaagctatgatttatggaactgctggatatacagctggcttagctattgaaaaattagaaaaagctggcatgactattgaaggaaaagaagttttagtaagaggagcaacaggtggcgttggcacacttgctatgcttatgttagagaatctgggatatgacgtgatagctagtaccggacgaaagaatgttgacgctgatttaaaagaacttggtgctactgaagtaatcaatcgcctaccagataatgatgaaaaagcattggcatcacgcacttggcaagcagccattgactctgtcggtggtcaaaatttaccttatattgttaaacgtttagataataatggcagtgtagcagtaattggtatgactggtggcaatgagtttgaaagttcgattttcccatttatcttaagaggtgtaagtattattggcattgattcagttttcacaccaatcaagttacgtcgtcgtgtatggagaagattagcaagagatttaaaaccaaatcaacttcatgatattaagcatgtcatttcttttgatgaacttcctcaagctattgataaagtgattaaccatgaaaatactggtcgcattataatagattttaatgcttcaaaataa

SEQ ID NO: 977 - DNA, 402 bp, Staphylococcus capitis
atggtagaaattaattttgaagcacctaaagttcaagaatactgtgatttaagactcaacgctggtatgagtcctaagtcaattgaagctgctgaaaaggggttacccaatgcctgtttcaatgtcactatttatgatgacaataagctcattggtatggggcgtgttataggagatggtggtactgcttttcagattgtagatatcgcagtaaataaagaataccaaggtttgggacatgggcgtactataatggaagaaattatgaagtatattgatcgagtggctgaaaaaggaacatatataagtttaatggcagattatccagctgataaactttatgaaaagtttgggttcataagtaccgagccatattcaaaaggaatgtatatcaagtattaa

SEQ ID NO: 978 - DNA, 1035 bp, Staphylococcus capitis
atgaaagacgttacgattataggtggcggtccagctggcttgtttgcaagtttctactctgggttgagagggatgtcagttagaatcattgatgtgcaagataagttaggtggtaaaatgcaaatttatccggagaaaattatttgggacattggtggtgttgcacctaaaccgtgctaccagattataaaagatatgattgaacaaggtttacattttaatcctaaagtaaatttaaatgaacgtgttactgatatacgtaaagtttcagaaagacattttgaaattgaaacaagtgaagggcacatttatgaatccaaagcagttattttcgctattggaggaggaatcattaatccaaaaccgcttgatattaaaggtgcagaacgttatcaacttaccaatcttcactatgtcgttcagtcattttcaaaatttagagataaagatgtccttatttctggcggaggaaatactgcattagattgggcgcgagatattgcgaaaattgccaaaagcgtaacggtgatttatcgaaaatcagaaacaagtggttatgaagctatgaatgggattcttaaagaacttggtgtacaattactgccaaacactaaaattaaacaacttattggaaatgacaatgatacacgtattcatcaagtgaaactggagaatgttgagagcggtaaaatcgaaactcaagcttttgatgaagtcataattagtcatggctttgatcatgagaatccattactcaaagattgtacatcacaatttgaactttatgatgaataccgagttaaaggctttgggaatacgactactagtatagagggtatttacgcatgtggcgatatcgtgcaccatgatgctaaagtacatttaattgcgagcgcattcagtgatgctggtaatgctgctaatttagctaagacgtacatcgaacctcatgcagcaactgaaggttatgtatcaagtcataacgatatctttaaggaatcaaacaaagatattgtgaaccaatatctatactaa

SEQ ID NO: 979 - DNA, 417 bp, Staphylococcus capitis
atgcgtagattactatattcttttttattctatatgattataggactattaagtggtttctattacagagaattaactaaagcgcatcattttacgggtgatacacaattagcattagtacatactcatacacttatactcggaatgtttatgttcttacttttattaccacttgaaaaggtatttaaattaagtagttattatttatttaattggttctttatcgtctatcatttaggtgtcatagtgacaataggcatgatgacttataaaggtactttacaagtgattggtgcaaaatattcaccagaagctttagcaggctttgctggtataggtcatacgggaatgctagcaggactgttattattattctttttacttagacaagcaattattactgaacctaaggattaa

SEQ ID NO: 980 - DNA, 597 bp, Staphylococcus capitis
atgttacgcaaattgatatcaatgacaattgttttattttttgcgattggatgttttaaatacgccgatgcgcacgtgacacttaatcccaaccaaagtgaaccaggatcttatgacaaatatgatgtgagggttccagttgagcaagataataacactgtcaaagttgaattgaatgtccctaaaggtgtcaacgtagcaaacgttgcacctgttgaaggatttaaacatcaatttaaaaaagataagaaaggcaatatcacaaaaattacatggaaagctactggtaaaggaataggacctaacgagtttatagaatttccgattgtagcagctaatcctgaagatgagggcacatttaaatggaaagcatatcaaacgtatgataacggtgatgttgtaaaatggactggtaaagaaaatagcgaacatcctgctccaactactactgtgaaaaaaggtgcaagttcaaatggtaataaatctgaagcatctacttcaaatggtggaggctcaatcgctttatggattgtgtccatctttgcaataattatttcattagttgctctatttaaacatgcacgtaataaaaaataa

SEQ ID NO: 981 - DNA, 1251 bp, Staphylococcus capitis
atgttagtacatagtaaaatgacaaagtacatgattgcattgatagttataatattaatgacattgattccagcctttcagcaacaagcttctgcacatgcaactttagaaaaaacaacaccgcaagatagaggagttgttaaagataaaccagaagacatacagctggaatataatgagccagtcaatgcaaagtattcaaatataactttatataatgataaaggtaaaaaaataagtgaagttaaacctacaacttcaggatggtcaaaaactttagaatttcctggagatcaaattgctaaagggacaaatacagttgaatggcatgcgatttcagcagatggtcatgaagtgagtaataaatttgagttttcagtaggcaaggtgactgctaaaaatgttgatacctctgattctttttatgaacaaccaagcttttggtttggtgtatttagataccttacagaaggtgcaacgattattttagttggcttgttctggatgaatggtattgctaaacgtcgaggattaaagcaatttaacatattacctaaacaggtcggtgtcgcatggataatggggatgtcgattcttatgtcgatactcgtttatatgatgacactcacatcagatgtgttaaacgatattttatcttttaaagctaacgtcattatgcaatttccatatatcattagttcaattgcgcttattgtattatttatattaatggttcttaaagatatggaaaaattatggtactggcttgtgtcgtttgcaatgatattagctgtagcaatgtctggtcatgcgtggtcacaacatgtgccactttggtctatagtaattagaacgctacatttagcaggaatgacactatggttaggcgcgttagtctatctgatttgttacgctaaaaatggacgtggcaatcaattaacaaatgttagacatatgcttttgaaaacgaatattacagcggtagctatattgataatttctggtgtcctgatggctattgatgaaacgaatgtcttagctatatggaataatatacaagcttggacagtatttatcattattaaagtgattggtacattaatcatgatgattttaggattttaccaaacataccgtgctttaggtaaaagaaatcatgtaaacaaagtaactctatttacagaacttattatcggcattattttaatttttgccggtgtgatgatgagtcaaattaatatcccaagttaa

SEQ ID NO: 982 - DNA, 1278 bp, Staphylococcus capitis
atgaatatctttaaaagcaaattattatggttagcaccaattgctgcgattttaatcttagttattttttcactagcattttatccagcatttaatccaaaacctaaagatttaccaattgccatcgtcaataatgatgaaggtacaactattcaaagtaataaagttgatattggtaagaaaatagaagataaattattagatagtgattcagataaaattaaatgggttaaagttgataaagaatctgatttgaaaaaaggattcgataatgagaaatattatggggcagttgtatttgaaaaagacttttcaaaaaatgcaatgagtaaaactcaaaaagttgttatggatagtaaaaagtcagagatgaaagaaaaagttgaatctggtgaaattccagcacaacaagctcaaaaaatgaaagaaaaaatgggtaatcaaagtgttgatgtaaaacaagcaaaacttaaaacgattgtaagccaaggttcaaatttacaagcatcaaacattgttacaaatgtactatcaagtgtcggacaaaacataaataaacaaattactaaacaaagtttatctacacttcaaaaacagaacgtagatgtaagtcctaaagatatccaaggcattactaatccagttaaagttgatgatcacaaagtaaataaagttaaagatcatcaaggtggcggtaatgcaccattcttaatgtttatgccagtttggatgggctcaatgattacttcagtgttattattctatgcgtttagaactagtaataactttgcgatacaacatagaattattgcatctgtaggacaaatggtaactgcagtacttgcagctttcctaggcagctttgcatatgtgtactttatgaaaggtgtattaggattccatttcgatcatcctaatagagttgctttgttcattgctctagcaataatgggatttgttggattaatactaggaattatggtttggttaggtatgaaatctctacctatcttcatcttactcatgttcttcagtatgcaaatggttactttaccaaaacaaatgctcccagaaggatatcaaaaatgggcttatggatggaatccatttacacactacactactacactcaaagagcttatttatatgaataaagcaattgagttaaacagtacagtttggatgctaattggctttatgattttcggtatcatttcaagtttaatcgcagcaatagttagaaaacatagtactaaacgtactgaaataccttcataa

SEQ ID NO: 983 - DNA, 612 bp, Staphylococcus capitis
ttgaaagaagataggcgaataagaaagacaaaatcttccattaagaaagcatttacaacattattacaatacaaagagctcgataaaattacgattagagatattacaactgaagctgatgtgaatagaggaaccttctatttacattatgaagataaatatatgttgctttcagatatggaagatgagtgtatttcagagctagctcatctaacggattttaatcaaatagatggggacactgttgaagctatttcagaactctttatagatagagttcttactaaaatccttcaacatatagatgataatttagatttttatcaaatcattctacagttagatcgtcgaagtaaacttgaagagaaaataagtttattaattaaacaaaatatgaatcgatatatgagtattaatcatgaaatagatggtataccagagatgtattttcatagctatgtcgcaggcgctacaataaatactattaaatattgggttttagacccaaatcgtatttcagttgatgaattaacacatcatatttataaaattgtttataatggaccattacgaattatggcagaatataaatataaaatgaatcatgcctaa

SEQ ID NO: 984 - DNA, 948 bp, Staphylococcus capitis
atgattactgcttataaacatgaaagtataaattcaaatgaaatcattgaaactaaagtggatcatagcgcgtcttggattaacgttgttgaacctgaacgtgaagaaattgaagaattaatggaattctacaacattccagaggactttatccgtgacccattagattctgaagaaagtgcacgtatagaatatgacgaagatactggctattcactcattattatcgacttacctattgtcaactctacaaaccgtcgcgtactttcgtttgttactattccactaggtatcattataggtaatggcattatcatgaccgtttgtgatgccgaaaatgaatttcttgaaaattttgcaagacaagatgatattaatttaaaatttcatagtcgctttgcacttgaaattttattaacaattgcaaatcactataatagaaatttaagattattaaataaatcgcgaattcgtatcgagaaagatttaaagaataacattactaacaaacaattatttaaacttatggaagttgaaaaaagcttagtttatttcttagcggcattaaaaggtaatgatacaattattaaaaaactatttcgtttacctgcaatcaaacgctttgaagaagatgaagaattacttgaagacttagtaatcgaaaataatcaagctattgaaacaaccgaattacatcaacgtatccttgaaagtattacaacatcttatgcttcattactatctaacgacatgaatacaataatgaagacattaacactgtttactgtattacttactcttcctacgctcgtgtttagtttcttcggtatgaacgtaccattacctatagacgaccatagttatgtttcatgggtaatcgttgtaggtatatcattgatacttgttgcaatagtgagtatctatttatggcgtaaacaaaagctttaa

SEQ ID NO: 985 - DNA, 1443 bp, Staphylococcus capitis
atgagctataagaaatctgctgaagatatattacaagcaataggtgaggaagaaaaccttgatgctattgcacattgtgctacaagattaagattagttcttaatgatgaaagcaaagtagatgaagaaacgctaaataatatggatgtagtaaagggaactttctcaactgggggacagtatcaaatcattattggatctgggactgttaacaaagtatttaatgaattagagaaaattactggtaaagaggcatcaacgacatcagatgttaaagataagtcgactaaaaatatgaatcctttacaaaaatttgtgaaaatgttgtctgatatatttgttcctattattccagcaattgtagctggtggtttattgatgggattgaataacattctaactgccaaagatttgttctataaaggacaatcattcattgatgttcacagtcaattcgctggcttggctgaaatgataaacgtctttgcaaatgcaccatttactttacttcctattttaataggatttagtgcagctaaacgttttgggggtaatcctttcttaggtgccgcactaggcatgatattagttcatcctagtttaatgagcgcttatgattttcctaaagcagtggaagcagggaaagctattccccattgggatatttttggattacatattaatcaggtgggctatcaaggacaagtgcttcccatgttagttgctgcgtatattttagctacaattgaaaagtggctacgtaaagtgataccgactgttttggataatttactgacaccattgttatctatatttgttacagcttttatcacatttttattcgttggacctattacacgtcaattaggatattggttatcagatggactaacttggttgtatgattttggtggggctataggaggtctcatattcggcttactttatgcaccaattgtaattactggcatgcatcatagcttcatcgcagttgaaacgaccttgattgctgacgccaccaaaacaggaggttcgttcatctttccaattgctactatgtctaatgttgctcaaggtggtgcagccattgcagcattctttataattaaacataataaaaaactaaaaggtgtggcatctgcagctggaatttctgcattattaggtattacggaaccagcgatgtttggtgtcaatcttaaattaagatatccatttataggtgctgttgtgggatctggattaggttcagcttatatttcatttttcaaagtgaaagctattgcactgggtactgcaggtttaccaggatttatatctattaatccagcgcatgcaggttggttacactatctcataggtatgatgattgcctttattgtgtcaatcgttgttacatttgttttatcgaaaagaaagacctataaagctgcagctaaataa

SEQ ID NO: 986 - DNA, 369 bp, Staphylococcus capitis
atgaaagaacgtggaaaaatagaaaagctttggcgagaagagaaatatcgcgtattactacatgttcaaaatgcctataacaaaattagagcactgctaaaagaatcaccctctcttgaagaagtacaatttcaaattaatgaagcaattaatcattctccaacaactggctcaataattaatgcctatgaacacatgtggggttattttaaaaatatagcaactgataatgaaaaacataaggcattgatgttaaaggatgactttatgaatcatcaaattgaattggacgccctactaagttatttgagtcaacttgctaataagtatgacattaaataccttcaagaaagtacagtactaaattaa

SEQ ID NO: 987 - DNA, 2106 bp, Staphylococcus capitis
atgacatgtcatttaaatatttatcaacagtatcattcacccccaactcgaaatatcaatcgaatcattttaatgttctcacttacaaatcatctagaaattacgattaatggtgaaactaaagatttagataatcatattgctattattaatcaagctgatattttttatgtaaatcaatcctcgaacttggttatgctctctattcctgtattttatttctatagtgaggatgaaaatttcttcaaatgttattttgatcgacatttacttcaatctagcggttttgtaaaaaatattattttacaatcaattcatcattatatgaacgaagaagagcaagatactcaagctatttcaaaaattattcagactttatttaaggaaacagtgataagatacaaggaaaaatatatccctcaagttgctatcaatcatccaatatttatccaaggacttagctacattcattccaaagtttcagatacgttatcattacgcgaagttgcaaattattgtaatatttctgaatcatattgttcaaatttatttgttcgctacttaaatatgaactttaaagattactttacaagtttaaaagtcatttatgccataaaattgctattatctacagatgattcaatcaatgcgatttctgaacgctctggttttagtagtcatacgaacttcactaatcaattcaaaaatcatctaggctttagtcccaaacaattccgttctatgatctctaaaatttcattaaatccagtaatggattttagccaaactcattttttagattacaaagatttaatcaatcaatttgaatttaatgatcaattagcaactgaaattactgagatagatcttaatcaatttaatcctaaagatcataccaaaagctctaaagcatttatccgatttgaaaactttaacaaattattccagttcgtttttaacgagtactacgatatcgatttctcttatttgccacaacccgtagtatttatccaagatattcacgatatcgcaattagtcatattaaccttaatttgttaaatcgttgttttgaaaagttattcgaaatggatatcggtctagcaatgcaaattaattctacgcaacaatttgaagcaattaatcaaatcatattatcatttttacaaagcaatcaagattataagaataataaaaagctagttaaactcatgcttgtttttaattcagaatatatgactgtaaacgaaatccatttatgccatttaaaaattaaaaataaaaatcgtgaaattaggtatggtatcaccgttgaaggtttacttcgtgattcgccttccattgatcaaacttacgatataatgaaacgtcttaactttgattactatttcattgacattgagaatcttgaaactaaaaatttgttattaaccaaacgtaagacatatcatcattcatctactcattttgaaaattacaagcaatttatgctagattcaggaattccaactacaaattttgtatacaataatttatcacttaagtgttttaagtatactaataatggcactaatccattacagttatcagatttagtatgtcaccttatcgcccttatgagatacggtggtggcataagttatcaacttatcgacgatcactcacaatatatagctttatttaacaattatggtagccctttacctttaatgcacatttataaaatgggtgattcatttgtcgacgaacctttagaacttgggaataactatctaataagccgtaaagatggaaattatcatatcttattatttaataaaatcaatgatcgttatttatctgatagtaaacagaagttcattttcaaaaataatttaaaacagaattcactcattattataaaaacgttaaataatgagcacggttcaatccaaaatctacttcctaaaagcaaagaattattatatatagaacgtaatatacttgaagaattagataaatgtaatcgccctaaaacagaattagctattcaagaagaaaacaacaaaccattccaaatgactttgaagcatgatgaagttaaatatatatgttttaaacccatttaa

SEQ ID NO: 988 - DNA, 423 bp, Staphylococcus capitis
ttggataaacaaaaagcaactcaagcaattgaaaaagtattagaaacttctaaagttggcgtattatcaactgcttataataacaaacctaatagtagatatatggttttctataatgatgatttaactttatatactaaaactagtatcaattcagtaaaagttgatgaaattgaagataatccacacgcttacattcttttaggctacaatgagacaactaataatagctttgttgaaattgatgctcaaattgaagtagttaaagatcagaaagtcattgattggttatgggaaacacaagataagacattcttcgattctaaacaagatccagaattgtgcgtcttaaaagtaattcctaaatcaattaaattaatgaatgatgatgagttagatactcctatcacaattgaaatttaa

SEQ ID NO: 989 - DNA, 351 bp, Staphylococcus capitis
atgaaaaataaaaaagctttaggttttggacttatcgcaattatgcttgtgctgtgtatcgtacttgtcattatgatgatggtaggtggtaaaaaagatacatactacggtattatgaaaaatagtactactatagataaaatgattagcaaaaaagatgaaaaaattgaaaagaatgttaaattaccttcgaacgctaatgtttctgtaaaaaaagaagactttgtaatgatctttaaagatgaaaagtcaggaaaaatcacaaaagttaaaaaagtaaaacacgatgatgtacctcatggtttaatgtctaaaattcatgatatgaaaggcatgaaccacggcatgtaa

SEQ ID NO: 990 - DNA, 1281 bp, Staphylococcus capitis
atggctctattcaagagaaaaataagtttaccaacgcaagttattattgctttggtactaggtgtcatcgtaggacttttattatttggacaagataatttagcaaattatataaagccttttggtgacatattcttaaatttaataaaaatgatcattattccgattgtattctgtgcacttgctttgtctatatcgaatttaggggattcgaaaaaggtaggcagttatggatggaaagcaatcctttactttgaaattataacgacagttgctattgggttaggtattataattggtaacctgttcaaaccaggtgccggattagattataataaactacctaaaggtgacatttctaaatatcaatcttctgcacattcagctgaacaagcttctacatacggtaatcatttaattgatactattgtaaatattgtgccaaccaatctatttgaatcattagctaaaggtgatttattaccaattatattctttgcagtattttttggtttaggtctcgcagcaataggagaaaaagctgaaccagttaaaggttttctaagtggcacattagaagcagtgttttggatgattaataaaatcttaaaacttgctccaataggagtatttgcatttatatgtacaactgttatgacatttggagtatcagctttagttccattattaaaacttctattagtagtagttggagcaatgattttctttgttgtagttgtattaggaattgttgctcgaatggttggagttagtatcttctcaatcatgaaaattttaaaaagcgagttgttactagcattttcaacttcaagttcagaagcagtattaccagttattatgaagaaaatggaaaattttggtgcgccaaaagatgtaacgtcattcgttattccaataggttattcattcaacttagacggatccgcattatatcaatcaattgcagcattatttgtagctcaaatgtatgatgtacatttatcgttaacagaacaaatagtgttaatggctacgttaatgattgcttctaaaggtatggctggggttccaggtgtttctattgtagttttattaacaacattaggctctatgcacttgccagcacaaggtcttgcattaattatcggaattgaccgattactagacatggttcgcacatgcgttaacgtaatgggtaacgctttatcaacgattgttgttgcgaaatgggagaaggtatacgataaagaaaaaggccaaaagtatcttaattcactataa

SEQ ID NO: 991 - DNA, 366 bp, Staphylococcus capitis
atgagtagaaaacaagtcattttaagaataattattatattaatcatttcacttattttagctatagtatttttctttggtctaaaaagttatcaaggtcataaaaatatcgaacttatggatagttatatcaaagaacatcatttacaagataaaattaaaaagcaagataacttatatagtgctaaaaaagggatgtattacaaagaaatcgttttcaaaggcgaatctaatgtcacttatgttatgcaaccaattagtacgaataaaggtatatttgtagaaggctttgatagtgaaacgaagaaaagcataaagaaagcgaaacatagtgattttgataaaaattataaaccatcaaaataa

SEQ ID NO: 992 - DNA, 630 bp, Staphylococcus capitis
atgacaagattaaatgatttcaatgaagtacttaacggaagaaaatcagtaaaggtattcgatagtgaatataaaattcctcatgaagaaatggatgaaatgattactaaagctacaaaggcgccttcatcagttaatatgcaaccatggagaattgctgttgtagagagtgacgaaggaaaagaaaaaatcaaagaagcttttggttttaattcaagacaacttactacttcttcggctatggtgattattttcggagatttacaaaattacgaaaaagctgaacaaatttataatgatgcagtagaccaagcccatatgacagaggaaattaaaactcaaatgttagaatggattcttccttattataaaagtttgtcaagagaaggtatgaaggacattgtaaatattgatagtagtttaatggctatgcaatttatgctaactgctaaagcttatggatatgacacaaatcctattggtggctttgataaagaaaatatcgctaagattattggttatgattcagatagatatgtcccagtattagcaattgctattggtaaaaaagctcaagaagctcatggttctgtaagattacctgttcatgaagtgagagaatatttataa

SEQ ID NO: 993 - DNA, 447 bp, Staphylococcus capitis
atgtatgtagagaatagttatttaagtaaacaattatgttttttattttatgtttcttcaaaagaaatcataaagaagtacacaaattacctcaaagagtatgaattaacatacacagggtatattgtactaatggcgatcgaaaatgatgagaaacttaatattaaaaaactaggtgagcgagtctttttagattcaggcacactgacaccactgctcaagaaattagaaaagaaagattacgttgttcgaagtcgtgaagagaaagatgaacgaaatcttcaaatttcactaacagaacgaggtaaagaaattaaaaaaccgttatctgaaatatcaatgaaagtctatagtgaattcgatattaatcaagatgaagctaaagaattaattgaaaacttgcaaaattttgtatctaaaaattttgacaatagtatagaaaagtga

SEQ ID NO: 994 - DNA, 417 bp, Staphylococcus capitis
atgaataataatgattttttcaataataatttcttcaaaaatgatcctagtgaattatttaaagacttagggaaacaagtatacaatcaattttcatcaagagcatttcctactaatatttatgataaaaatggtgcttatgtattagaagctgaacttcctggtttaagcaaagaagatatttcacttaaatttgaacaacatattttaactattaaagcatacaaaaaaatcaataatgaaaattataaatcacaacttaatgaacgttctaatggtgaattagaaagacgctttgaattcgatgaaattgataaagaaggtatagtagctaattacactgatggcgtattatatgtcacattacctaaacaaatcaatgaagatgacaaagctactacaatttcaattcaataa

SEQ ID NO: 995 - DNA, 1173 bp, Staphylococcus capitis
atgaaaaaaggagtttaccagcttacattacaaacgtttagtttgatagtaggttttatggcgtggagtattatatctccgttaatgccatttatcactcaagatattaaaatttctgctagtcaaatttctattattttagctatacctgttattttaggatcagttttaagagttccttttgggtatcttacaaatattataggtgccaaatgggtattctttagtagttttatagtattgctattcccaatatttttcttaggacaagcccaaagtacgacgatgcttataatttgtggcttctttcttggagtcggtggggcgatattctcagtaggagtaactgcgctacctaaatattttacaaaagataaagttggtttagctaacgggatttatggaatgggcaatataggaacagcaatttcatctttttgtgcacctgttttggcaggattaatagggtggcaaaataccgtaagaagttatttaatcattatcagcttgtttgcagtattaatgttcttattgggagataataaagaacctaaagtcaaagtaccgttaatatctcaagtcaaagtattggctaaaaattataaattatactatttgagtttttggtacttcataacatttggtgcgtttgtggcatttggattattcttaccaaattatttagtgcatcattttactatcgataaggtagatgcagggattcgatccggtatttttatagctcttgcaacatttttacgtccacttggtggcgttttaggggataaatttaatgctgtgaaagtactcattatagattttgtaataatgattattggaggtttaattttaactttattcgatggaatcatctattttactattggttgtttaactataagcgtttgtgcaggtataggtaatggcctcgtgtttaagttagtaccttcttatttctcgaaagaagcaggctctgcaaatggaattgtttctatgatgggaggtttgggtggtttcttcccacctttagtgattacatttgtcacaggactaacaggttcaagtcatcttgcatttggtttattagtactatttgcacttatcgctttaatcacaatggttcatttatataaaaaagaaactgaaataggtacaacactctatagtgactaa

SEQ ID NO: 996 - DNA, 657 bp, Staphylococcus capitis
gtgaagatcgttatagcagatgaccacgctgtagtaagaacaggattttcgatgatattaaactaccaagaagatatggaagttgtcgcaacagcagctgatggtgttgaagcatatcaaaaggttttagagtataaaccagatgttttaattttagatttgagcatgccacctggtgaatcagggttagtcgctacaagtaaaatttcagaaagttttccagaaactaagattcttattttaacgatgtatgatgatgaggaatacctatttcacgttttaaaaagtggagcgaaaggatatattttaaaaaatgcacctgatgagcaattaattttagctgtaagaacagtatataaaggagaaacatatgtagatatgaagatgaccacttctttagtaaatgagtttattaatcaatctcatcaggaagaagtgagttattcttcagatccctttaagatattatcaaaaagagaacttgaaattctaccgcttattgcaaaaggttatggtaataaagatatagctgaaaagttatttgtttcagtgaaaacagttgaagcacataaaacgcacattatgaataaactcaaccttaagagcaaacctgagcttgtagaatatgcattaaaaaagaaattactcgagttttaa

SEQ ID NO: 997 - DNA, 1032 bp, Staphylococcus capitis
atgctaaataaatttgaattaaatgtagaagacttgttgcataaatattatgatactacgactgaaaagattgtctttgtcgatcgtcttggcaaaattattgcaatgaacggagctgctagagatatattatctgaagaagataattataaagcaatgacgcatgccatttgcaatcgctgtgaaggatattccaatgaatatgatttacagtcatgtgaagaatgctttttagaagcgaatcatttgcagaaatcaaacttccaagtatttatgaagacaaaggacaataaaatagaaccttatacagctacttatcaaactattgatgatgaaagaggaattagtgcttttactttgcaaaatgtttctccacaaattgaaagacaggagaaaatgtatcaacagaaaatgcttcacaaatctatacaagcccaagagaatgaaagaaagcgcatttctcgtgagttacatgatagcgtgattcaagaaatgttaaatattgatgttgaactacgactattaaaatacaagtttcaagatgaaacagttgttgaaagtacgcaaatagaaggtttagtgtcgcaactcattgatgacattcgtaatctatcagtggaactacgtccttcgtcattagatgatttaggcatagaagccgcttttaattcctactttaagcaatttgaagaaaattatggtattcaaattaattaccattccaatattaaaggattacggtttgataatgaagttgaaactgttgtctatcgtgtgattcaagaagcggttctaaatgcgttaaagtacgcagaagtaaatgaaatagaggttcatattagtaaaagtgaacatcgcttgttagcggaagtagtagatagaggtaaaggttttaatttggatgacaagcccagaggatcaggactaggcttttacggtatgagagagcgtgcggaattagtaaatggaaatattaatattgaatcacacctcaataaaggaaccatagtcacactagacatacctatttaa

SEQ ID NO: 998 - DNA, 453 bp, Staphylococcus capitis
ttgagaccagaatccttattaaacaatcaaagtttacagaataatttagaccgattgagaatagatggtggttatgattttggggggattgcgatgtatgaacgatcgcttagatcatcgccaatcaaatggaaatatgtttcaggtaatacgaatgaacgatataaattaattatattaagaaaaggaagaggtttagctgggactgtaatgaaaactggaaaacgcatggtaattgctgatgtagatacagcactaactcaagcagagaaaattgcctttccaattattttgaatgaatcgttaacagctgttgtagcagttccactatggcttgaacatcaaatgtatggagtattattgttaggtcaaagaaatcatcatcctctgccacagtctttagaacaacttgatattcaaagtcaaatagggttttttacagaaacgaattag

SEQ ID NO: 999 - DNA, 678 bp, Staphylococcus capitis
atgcttaatcaatttacatgggtcatttatccttatttatgtttaagtatttttgttattggacatattgctcgttataaatatgatcaattttcttggacggctaaatcaagtgaattaattgaaaagaaacagttaaaatggggaagtttgatgtttcatcttggcgtgattccagtattctttggtcatgttgtaggtttgttgattccagcaaattggcttgaatctataggtgtcaatgatcacatctatcacataggagcagtatatattggtagtatttttggtataatgacattgttaggaatgatacttcttacttcaagaagattaactattaaaaatgttaggaaacttagttcaacttctgatattttcgttaatattttattagtgattatattaattatgggttgttattcaacaatttttaccaacgcggttcaacctgattttgattatcgtcaaactatagcgatatggtttagacatctgtttatgtttacacctaatgctgattttatgattcacgtcccttggtcttttaaattgcacattttactaggatttacaatatttgcttgttggccatttacaagattagtccacgtatggagtgtaccgatttcatatatgaacagaagatatattatttaccgcaagaataaagtttga

SEQ ID NO: 1000 - DNA, 576 bp, Staphylococcus capitis
gtgattaatcttcagaaattagctcaatatcaagaaagtttaggttacttgggccaacaaattaactttccagaaaagttaacctttcaccctaatgtgtttcaagaaacaattgaagcatctcacccagcatacgaagatttatgtgcatttagagaaattataatgaattattctttgtcagaaattaaagcaatttatacagatacatttgatttcagtaaaaactatcctctttacatgacatataatcgatttgatactcaaaaagaacgtgggcaaatgttagctaaacttaaagtgttatatgaaatgtttggtcttaaaatgatagacaatgaattatcggattacttaccattaatgcttcaatttttgcaagtagctcgctgggaaaatgatgttcgtgcagaagacaatttaaaattaatcatcatgattattgaggatggaacttatgagatggctaatcatcttgctaaaaataacaatccttatgcgtatgtcatcaaagcgttaagacaaactttaaaagcatgtattgtttctaataaagaggtgggaaatcatgcttaa

SEQ ID NO: 1001 - DNA, 1440 bp, Staphylococcus capitis
atgtggtttaataatgtagaaacaaagcctggtgttggctatcctaagcgttgggaggatcaaagccattataaaggtggttgggtgttaaataagaaaggtcaacttgaattaaaatctggaaatagatggtcaaaaattgctttaggtaaaatcttttacaatccagatatgcctttgattaaagattattatgaaccttggacatataattacgagcatttaactactgctaaggaggggaaacattctcctgttgctaaggcacactctctcatttctggtgacaagcttgacttagagtgggggcctaactgggaagatgatttagccggtggccacgttacaggtcctaaagatcctaacattcaacaaattgaagaagatatcaaatttcaatttgatgaaacgtttatgatgtatttaccacgtttgtgtgaacattgtcttaatccaagttgtgttgcttcttgtccctcaggcgcaatgtataaaagagatgaagatgggattgtattagttgaccaagacgcttgtcgaggttggcgttattgtatgacaggatgtccttataaaaaagtatattttaattggaaaacgaataaagcagaaaaatgtacgttttgttttcctagaatcgaagcgggcatgccaacagtgtgttctgaaacatgtacaggtagaatgagatacctaggtgtgatgttatatgatgcagatcgagtgcaagaagcggcttctgcaactaatgaagaggatttatatgaaaaacaactagacttatttttagacccatttgatgaagaggtgattgccgaagccgaaagagaaggtatcagtcatgaatggattactgcagctcaaaattctccagtgtataaattagcagtggaatataagatggcttttccattacatccagaatttagaacgatgccgatggtatggtactgtccaccgttaagtccaattatgagctattttgaagggcaaaatgctggaaataactcagatatgatattcccagcaatagaagagatgcgattacctattgaatatttagctaatttattaactgctggtgatgtagcaccaataaaattagggttacaaaaaatggcgatgatgcgaagctatatgagagcgaaagtgactcaacaaccattcgatgtgtctaagcttgaacgattgaatttaacagaaagtcaattaaatgacatgtatcgtttattaggaattgccaaatatgaagatcgttttgttgttccaacttcgcacaaagaaacatatttagatacctatagagcacaaggtagtcaaggttatggtggagaatactttggtgcaaattgtgaaggttgtggtgtagcagttggctcaggtaaatcaggacaagagatatacaatgataacttctatggagggattttccgtgattaa

SEQ ID NO: 1002 - DNA, 3684 bp, Staphylococcus capitis
atgggaaaatttggattaaatttctttaagcctactgaaaagtttaatggaaattggtcagttttagagcaaaagagtagagaatgggagaaaatgtatcgtgaaagatggagccatgataaggtagttagaacgactcacggcgtcaattgtactggttcatgctcgtggaaagtatttgttaaaaacggagtgattacttgggaaaatcaacaaactgactacccaagttgcggacctgatatgccggaatttgaacctcgtggatgtccaagaggcgcttcattttcatggtatgagtacagtcctctaagagtaaaatatccatacattagagggaaattattagatttatggactcaagcattagaggaaaataacggcaatcgaatcgcagcatgggcctctatagtagaagatgaaaataaagctaaagcatataaagaagctcgaggaaaaggtggtcatgttagagcaaactggagagacgtaacagatattattgcagcacaaattttatatacgattaaaaaagatggtcctgaccgaattgcaggattcactcctatacctgcaatgtctatgattagttatgcctcaggagcaagatttattaatctattgggcggagaaatgcttagcttctatgactggtacgctgacttacctcctgcttcacctcaaatatggggagaacaaacagacgtacctgaatcgagtgattggtataacgctgcttacattatcatgtggggatccaatgtaccattaacacgaacaccagacgcacattttatgactgaagtaagatataaagggactaaagtcatttcagttgcaccagattatgcagaaaacgtgaaatttgctgacaattggtttgcgcctcatccaggtacagatgctgcagtagcgcaagctatgacgcacgttattttacaggaattttatgaaaatgaacctaacgatatgtttatcaattatgcgaagcaatatactgatatgccgttcgtgattatgttagatcaagatgaaaatggttataaagcaggtcgatttttacgagcaagtgatttaggtattgatagtgagaatagtgaatggaagccagttatttttgattgtgaaagtcaacaattagtagtaccaaatggaacgatgggccagcgttgggaagaaggtaagaaatggaatttaaaattagagaatgaagatggaacaaaaattaatccggctttatctatggttgaagaagattatgaattacaaactatccagttcccatactttgatagtaagggtgacggcgtgtttaagagacctattccatctctcaagattagattgtctaatgatcaagaagtatatatatcaactgtttatgaccttatggcgagtcaatatggtattcaacgttttaaccatgaacttgaagctcaatcctatgatgacgttaaatccaaatatacaccagcatggcaagaatctattactggtatcaatagaggattagtcattcaagttgctaaagaattcgctcaaaatgcaattgatacagatggacggtctatgattattatgggcgcaggcattaatcactggtttaattcagatacgatttaccgttcgattttaaatttagtaatgctttgtggatgtcaaggagtcaatggaggcggttgggcacattatgtaggtcaagaaaagtgtcgacctattgaaggatggaatactgttgcctttgctaaggattggcaaggaccgccacgtttacaaaatggtacaagttggttctattttgcaacagatcaatggaaatatgaggaatcaaatgttgatcaatttaaatcaccattagctgagaatattaaacatcaacatccagcagattacaatgtgacagctgcccgattaagttggctaccttcatatcctcaatttaataaaaatagtctgttgttcggagaagaagccaaagaggaagggaacgactctaatgaggctattcttaaaaaagcaattgactcaataaaaaataaagagactcaatttgcaattgaagatccagatttaagaaagaaccatcctaaaacactatttgtttggagatcaaacttaatatccagttccgctaaaggacaagaatatttcatgaaacatttattaggcacacggtcaggtttaatggctgaacctaatgaagatgataaaccttcagaaattaaatggagagaagatactgttggtaaattagacttattagtgtcattagattttagaatgactgcgacgcctttatattccgatatcgttctaccagctgcaacttggtatgaaaaacacgatttatcttcaacagatatgcatccatttatacatccttttaatcctgcgatagatcctttatgggaatcacgctcagattgggatatttataaaactttaagtaaagcaatttcagaaatggcaaaggattatttaccaggaacattcaaagatgttgtaacaacacctctaggtcatgattctaaacaagaattaggttctgaatttggaattgttaaagattggtcgaaaggtgaaattgaaggtattccaggaaaaacaatgcccaactttgccattgtagaacgtgattacactaaaatttacgataaatttgtcacgcttggtcctttacttgaaaaagccaacgtaggtgctcatggagtaagtttcagcgtaaaagatgagtatgaagaactgaaaagcatgctcggtacatggaatgataatgataaaaattcggtaagaaatcatcgacctcgaattgacactgcacgtaaagtcgcagatgcaatattaaatatttcctctgcgactaatgggaaattatcacaactatcttatgaagatttagaacatcaaactggaatgccattgaaggatatctctcaagctcgtgcttcagagaagatttcatttttgaatataacatcacaaccacgagaagtaattccaacggcggtatttccaggttcaaataaaaatggtcgaagatactctcctttcacaactaatattgagagactcgtaccatttagaacattaacaggtagacaaagctattatatcgatcatgaaatatttcaacagtttggagaaagcttacccgtttataaaccaacattaccaccaatggtatttggaacacgagataagaaggttaaaggtgggcaagatgctttagtacttagatatttaaccccacatggtaaatggaatattcattcaacttatcaggacaatgaacgtatgctaacgctatttagaggtgggcctgtagtatggctatcaaacgaagatgcagaagaacatgacattaaagacaatgattggttagaagtgtacaaccgaaatggtgttgtaactgcgagagctgtaacatcacatcgtatgcctaaaggaacaatgtttatgtatcatgcacaagataaacatattgaaacacctggttcagaaattacagatactcgtggaggctctcataatgcacctactagaattcacctaaagcctacacaattagttggaggttacgctcaaattagttatcactttaattactatggtccgattggaaaccaaagagatgtatatgttgcggtaagaaaaatgaaagaggtgaattggcttgaagattaa

SEQ ID NO: 1003 - DNA, 939 bp, Staphylococcus capitis
atgtctttaaaatcaatgggaaaggtatatttaattggggcaggacctggtaaccctaatttattaactaaaaaagcagaacgtatcattagaaatgcagatgtcattctctatgatcgtttagtcaatcctcttattctacagtattcaagttttcaaactgaactgattgatgtagggaaaaaaccttactgcaaacacattcaacaagaggatatcaatcaaaaaatagttcaaatggctgaaaaataccaatgtgttgtacgcttaaaaggtggagatcctgctatatttggcagggttactgaagaaattaatactttaaaatcatatggcattgaacatgaaattataccaggcgtgacatcagcaagtgctgcagtggcctctctcaatataggattaactatgagaggaatagcgccgagtgtaactttttcaactggacattttaaagagtctactaataaagatattgatataagaaatttaatgaatggtggaactttggccatttacatgggaattaaacgactaggtgcaatcatcgaacaaattaaaaattatactagtgaagattatccaatagctatcgtttttaatgctacttgctataatcaaaaagtgattaccgggaatctaagtacgattgaacaactattaaatgaagataattcagagggacaaccgggaatttgtatattaggtccattggtgaatgaaatagataaaatggtattggatagcaccatggaagatatcaatcatattttgtacgtgattaatggagataaagaaactgctatgttaaaagctgaagcattgtatgaagaagggaagaattgtttacttaattttgataatagttaccatcatactcaacaagtattatacaaaaatataatggaccaacacgatattagttatattcaagtataa

SEQ ID NO: 1004 - DNA, 315 bp, Staphylococcus capitis
atgaaagcaatggaaaaggtgaaagttacaacattagatgcgttaacaccacttataggtaaaaaagtcattgtagataataaagaaattggaatatttcttactgaaaagggagatgtttacgctgtaagtaatatctgtccgcataaaaaaggtccattgtctgaagggactgtaagtggaaattatgtttactgtcctttacatgaccaaaaaatagatttgttatctggaaaagtacaagagccagattcaggttgtgtccaaacctatactgttgaggttatcgataatgaggtttatatatgtctttaa

SEQ ID NO: 1005 - DNA, 2406 bp, Staphylococcus capitis
atgtctaaacaaaaattagtaatgattggtaacggtatggcaggtatacgaactatagaagaactgattagtcgagatgcgaatcgctatgatatcacagtagtcggtaaagaaccttatccaaactataatcgaattatgttatccaatattttacaaaataaaatgactgtcgaagagacgattatgaacagttatgaatggtatgaagaaaatcatattacacttatcaataatgacccagttgaaaaggtaaatcgacaatctaaaaaaattattacacaaaaaggtatagaactagaatatgatatttgtattttcgcaacaggttctaaagcttttgtgttacccattgaggggtctaacttaccgagtgttatcgggtggagaacgatacaagatacagaacaaatcatcgatatcgctagtaaaaagaaaaaagctattgtcatcggtggtgggctacttggattagagtgcgcacgtggtttattagaccaaggtatggatgtcacagtacttcatcttgctgaatggttaatggagatgcaactggatagaaaagctggcgatatgttgagggcggatcttgaaaagcaaggcatgaaatttgaattgcaagccaactcaaaacgcattataggtgatgaggatgttgaagctgttgaattagcggacggacgtgtgattgagacagatttagtcgttatggctgtaggaattagaccttatacagaggtggctaaagatgctggattagatgttcaaagaggtattgtagtcaatgattttctacaaacgtccgattcaaatatctatgcaattggagaatgtgctgaacacaatggtaaagtttatggtttagttgcaccactttatgaacagggtaaagttcttgctgactatttaactggaaatgaaacagaaggttacaaagggtcaacaactttcacttctttaaaggtttctggttgtgatttatacagtgctggtcagattgttgaaaatgatgacatacacggtatcgagatttttaatagcattgacaatatttataaaaaggtatatttaaatcaaggacaagttgtaggagcagtactttatggagatacagatgatggatctcgattttataatatgatgaagaaacatgaatccctcgaagattatacgcttgtctcattattacacaaaggtgatgatacatgttcagtttcaattgctgatatggcagatgatgaaacaatttgtggttgtaatggtgtcaataaaggtacgatagtgaacgctattactaaagaaggtcttacatctgtcaatgaagtaacccaatctactaaagcaggtaattcatgtggtaaatgtaaaaaacaaataggagaaatacttcaatatacactcggggatgactttgtagctgcaaaaccttcaggaatatgcagttgtacagaacttactagagatcaaattgtgactcaaatcagagctaaaggtcttacaacatccaaggaagtaagacatgtgttgaattttaaagataaaaatggatgccctaaatgtcgtcctgcaattaattattatctaaatatggtatatccatttgagcatcaagatgaacaagactctcgatttgcaaatgagcgttatcatgccaatatacaaaatgatggtacattttctgtcatacctcaaatgagagggggcgtaacagatccagaccagcttattaaacttggagaagttgctaagaaatacaatgtgccactcgtaaaagtaacaggatcacaacgtattggattatatggcttaaacaaagaagaattacctaatgtatggaaggatttagggatgcgttcagcttccgcttatggtaaaaaaacgcgttctgtaaaaagttgtgtcggaaaagaattttgccgttttggtacacaatacacaactcgtctaggtattcgtctcgaaaaaactttcgaatatattgatacacctcataagtttaaaatgggcgtctccggttgccctagaagttgtgtagaatctggtgtgaaagacttcggtgtcatctcagttgaaaatggataccaaatatatattggtggcaatggaggtactgatgttacagtcggacaattactaacaacagtagaaactgaagatgaagtcattcaattatgcggtgctttaatgcaatattatagagaaactggtatttatgccgagagaactgcaccgtggattcgtcgattaggttttgaaaatgtgaaagaagttttattagataaagaaagacaagaagaattatttaatagaattatggaagcgaaaaaagctatagaaaatgaaccatggcaagccattgtagaaaataaaaatgcacaaaaaatctttgaagttgagaaggtgtaa

SEQ ID NO: 1006 - DNA, 738 bp, Staphylococcus capitis
atgaaaggattggtaatagtgataggtaatatcttagtggcacacggtatgaggaaaggtcaacaaaatgaggcactagaggagtttattactacacttttaaaagatgaagattatcattatgagcttgcatttttagaaagtgatacacaaaatcttgaattgactatggaaaaaatgattaagcaaggtgtgacacgatttagaattgtacccttacttatattcagagcgatgcattatataggcgacatacctgagattttaaaaagcatgaaagagaaatatcctcatattaatagtgaaatgagtgagccacttggtacgcatccttatatgaaggatttagttgaaagaagaatggcagatgtagacttaccagctaatgcgaatgtagcaacagtcatcattgcacatggtaacggtagtggtcgtttcacaaaagcccatgaagaattaaaagaatttgtgaaaagtattgattcaaataaaccagtatacgcgagagcactatatggtgtaatgacatttaaaaatgatttggatgaaatatctaaaaaatacgatgatttaatcatcgtaccgctatttttatttgatggccgtttagttaataaagttaagcgtttaatatcagaaatggatattcattgtaatcttcatattacaccatctattaattttgaccacattttaaaattaattattcgcgcacgtatagaacaattagctgtataa

SEQ ID NO: 1007 - DNA, 1476 bp, Staphylococcus capitis
atgaagaaaattttaatccttaccatattagtatcttttattttagcaagttgtggagggaaatcaaactctgataaaaatacattaaatgttgaaattcccttgaaaacaaaatcaatcgccccctatgaaaccgatattcctgttaaagtaggtgctttggaatcacttttcaaaatgtcaaaagacggtaaagttaaaccattactagttaaaagcacacatcaaaaatctgataacaccctcgaattgacattaaaagataatattaaattccaaaatggtcataaattgactgggaatgctgtgaaatcaagtttagaagagggaatgaaaaaaagtgatttattaaaggggtcattacctattaaatcaatttctgctaaaggtcaaaaagtgacgattactacagaagaaccttatccagaattaaaatcagaactagccagtccgtttgcggcaatttatgatactaaagccaaaagtaaagttaccgacaaaccagtcggaacaggtccataccaaatagataactataaacgcgcacagaagcttgaactcacaaagttcaaagattattggcaaggaaaaccaaaactcaataaagtaaatgtcacttatcatgaagatggtaatacacgcgttgataacttattatctggtaaatcggatttaaccacagatgttcctatcgatcgtataagtgatgtaaaaaattctaagaaagctaatatccaaaatacatcaggtttccgaacacatctactgttatacaatcatcaaagtaaaaagattaataaaaatgttcgagaagcattagacatggttattaatcgtaaagaaatcgctaaaaacatttctaaaaattatgctaagcctgcctcaactccatttaatgatcgattaaaaaatgtggaaaacgataaagttcaaccccaagatattgaaaaggctaaaaaattattagcacaagaaggatttagtaagtcacatccacttaaaattaacatggtcacatacgatggtcgtccagaattacctaaaattggccaagtgatccaatcagaagctaaaaaagctaatattgatattcagttacgtaatgtagatgatatagatggttaccttaaagatccaaaagcttgggatgtgtctatgtatagttatttaactatacctcgaggagatactggctatttcttcaatactgcatatttgcctaacggtgcactcaataaaggacattataataataaagaagtcactcaacttattaaaaaattaaacacctcttttggtgaaaaacaacgtgcatcagttaccaatgaaattttagaaaagtctaaaggagacattccaaatagttatattacgtacaatgatcaaattgatggcgtaagtagtaaagttaaaaatttcaatgtcactcctgaatcaatttaccttattgattacaaagtaagtaaaaaagaataa

SEQ ID NO: 1008 - DNA, 537 bp, Staphylococcus capitis
atgtcagagacaaatataagaattgccaacatgggagatgcagaggagctacatcaattaatgtatgatgctttcacaccattaagagagctaggaattgattggccttcagtcaatgcagatttagaaatggttaaaaataatttagaaaacaatacgacctttgttatggtaaagggcaatgaaattatttctacaattactgtacgttatccttggggcagtgtgagaagtatttctggatatccttttatatggtggtttgcgactaaaccatcttatgatggtcagggctatggtagtcaattgctacgttatgttgaagaggattttttaagagatacattaaaagcggcagctgtaactttaggtacctctgcaagactccatccttggttacttaaaatttatgaaaaaagaggctatgaagtatatgctgaacatgaaaatgatgatggtgatttaggagtcataatgcgtaaaattttaatccctgaacgttttgaagaacaaatattagggcaaccaccattttaa

SEQ ID NO: 1009 - DNA, 822 bp, Staphylococcus capitis
atgatacataataataaaaatgttcaagatacacatgcaacaaagacaattgttcaaaatattgccgggcaagtacaaatgaaagaggttatggctgataaaactccgagtcgatatgctttaaaatcaatgatggccggttttttactttcaattgttacagtgtttatgttagcaatcaaaacccaatttgcttcaacacatattgacggcttaatcaatttgatgggtgcaatttcatttagtttagggctagtgcttgttgtattaactcattctgaattacttacaagtaatttcatgtatttaaccgtcggctggtattataaagttataagtatgaagaaagtgacgtggatattcatcttttgtttcataggaaatattgtcggtggatttatactattcttcttacttaaattttctcatgtaatgacaccagagatgaccaatagtttaacgacactggtacataagaaaacagttgaatctacatggttgagtatattaattaaaggtatattttgtaatttctttatcaatattggcatcttcatttctctacaatttaaagagggcttagcaaaagcgtttttcatcgcttgtggtgtgattgtctttgtatttatgggttatgaacacgtagtatttaacgcaggtctttatgcaggaatgatattctttaatatcgaggcattgtcttggttagacgtgttaaagaatattgtttttgcatttattggtaactatatcggtggcggtatatgtgttggtttagtttacgcgtatcttaatgggaaacgtgatagtttaactgaataa

SEQ ID NO: 1010 - DNA, 273 bp, Staphylococcus capitis
atgacaagttatactgttactgaatatcaaaaagtagacaaacctaatcatattgaatatctagattactttgctaattctaaaggtgagaaagatacttcaatgcctggtatgcaaattttcatgaattttgaagagcaaaatggccaaacaacagttacctcaacatcagtatttccaactcaagaagcagctcaacaagcattagatatgggcgttgagcaagggatggactcaactttagatcaattagataagttacttaaatcttag

SEQ ID NO: 1011 - DNA, 960 bp, Staphylococcus capitis
atgaaaagactattgagtttattagtcattctccctttatttgccctcattttaacggcgtgtggaaatgataataataaaaaagaagatggtaagattactatcaatactacagtttatccacttaaatcttttgcagaacaaattggtggtaaacatgtaaacgttaaatcaatttatccagcaggtactgatttacatacctatgagccaacacaaaaggatatcttaaatgcgagtaaggcagatttatttatctatacaggtgatgatttagatccagttgctaaaaaagtagcaggaacaatcaaagataaagataagaaattatctttacaagataaattaagtaaaagtagtttacttcctgatcatcaccatcatggagaagagcatgaggaacacgaacatcatcatggtgaatatgacccgcacatttggctagacccaaaaatggatcaaacattcgctaaagaaatcaaagatgctttaattaagaaagatccaaaacataagaaagaatatgaaaagaattacaaaaaacttaacaaagaacttgctaatttagataaagaaatgaagaaagtaactaaagacaagaaagataatgttgtatttatctcacatgagtcaatcggttatctagctcatagatacggatttaagcaagaaggtgttcaaaatatgaatgcagaggatccatcgcaaaaagaattaactcaaattgttaaagagataagagctagtaaagcgaaatatattctttatgaggataatgtagcaaataaagttacagatacaattcgtaaagaaacagatgctaaaccgcttaagttttacaacatggaatctttaaataaagatcaacaagaagaaaaagacttgtcttatcaaaaattaatgagagaaaatattaaaaacttagaaaagtcattatcaagtaatgtgaaagaacaataa

SEQ ID NO: 1012 - DNA, 588 bp, Staphylococcus capitis
atgaaaaaattaattggaattatagccattttaaccatcatttttatatatgggtgttcaaaacaaccaagttctattaaagctaaacaagatggcaagccattaatagttatgtatggagattttaaatgtccatattgtaaaaaagtagaagataaagtgatgccaaagttgagaaataaatatattgataaaaataaagttaagtttcaatatgtgaaccttgcctttataggaaaggactcaattattggttcaagagcacaacaagcagtaaatcattatgcaccaaagtattcactccaatttcaaaagttaatgtttgaacatcaaaaagacgaagataagaaatggattacacatacattaatagataaacaaattgataaattaaacattagtaataaaactaaagataagattaaaacaaattataaaactaaaaattcaacatcatggaaagctgctgaaaaagataaaaaactaggtaaggaacatcatataaaacaaactcctacagtattcattgaaggtaaaaaagttaaagatccatatgattttagtagttatcaaaaacttttagaatag

SEQ ID NO: 1013 - DNA, 360 bp, Staphylococcus capitis
ttgaagaaattagcagttgctttatcagtagtagcacttatattggcgggatgtagtagtggtaaatatactgataaaattgataaagctgtaaaaatgcaagacaaaaaacaagaaaaaatagctaagcacgatacaggagatgaagtaaaacactttgataagaaagatgcgaatatttatgtatttaaaaaaggtaaatacgttattcttgcatataaacctttgagtgatgatgctgaagtgcattattacacatatgagtttaaaggcaaaaaagcgcattacaaagaaaactttaactccaaaggttattatgaagaacatgaacctgattacaaggaagaaaacatgaattaa

SEQ ID NO: 1014 - DNA, 1269 bp, Staphylococcus capitis
atgaaatttgttaacttatcttctgaagaattcgatcaatttacttcagaaaattgttcacattatacacaatcaagtatacattttgataaccgtaataaaatgaaaggcgatgttcatcttgtaggagttaaagatgaagatgacaaagtcattgctggttgccttttaacagaggcacgctcgcttaaattctttaaatatttctacacacatagaggtccagtaatggattataataatcaatcattagttcgtttcttctttaaatctcttacagattacttaaaaaaacgtaactgcttatacgttcttgttgatccttacctactagaaaacttgagaaacgctgatggtgagattatcgaatcattcgacaatcgaccattcatcaaaacaatggaagatttaggttataaacatcaaggttatacagtcggctatgatacaatgagccaaattcgttggctatcagtattagatcttaaagacaagactgaagatcaactattaaaagaaatggattaccaaacacgtcgtaatattaagaaaacttatgagatgggtgttcaagttaaaacacttcctatagaagaaacagacacattctttgaattgttccaaatggctgaggaaaaacatggtttcaaattccgtgaaaaaccttacttcgaagatatgcaaaaaacgtatgaagatcatgcaatgctgaaacttgcttatatagacttacaagactacctaaatacattacaagaaaaacatgataacttagaaaaacaactaaaagaagttgaaaaaacattagaagaaaatccaaattctaagaaaaataaaactaaacacacgcaagtaaaacagcaatatgatagtaatgaacgtaaaattaatcaaactaaagataagattgctaaagaaggacaagtacttaatctagccgctgcgttatatatttataatgaccatgaagtatattatctctctagtggttcaaaccctaaatataatgcttatatgggtgcttaccgtttacagtgggaaatgattaaatttgctaaagagcatgatattaatcgttataatttctatggtatcactggagactttagtgaagatgctgaagacgcaggtgtacaaaaattcaaagaaggtttcaatgctgacgtttatgaatatattggtgattttgttaaaccaataaaacctatattctacaaactaaaagaaatcttagaaaatcgcaaatcaattaaaaaggatcacatctaa

SEQ ID NO: 1015 - DNA, 345 bp, Staphylococcus capitis
atggaacactcgatgaagttaaatgtggagccattcgaagccattcgtaatcataggaaaacggtagaaattagactgaatgatgagaaaagacaaaaagttaaaattggtgacacgattgtctttacaaatatagacgactcggagaaaaaaatgagagtcaaagtaactgaaaagcgagtttttgatacatttcaaaagttatttaactactatgataatgctgaaataggttatgagacagacgcgaccttggcgcaaaaagtagcaagtatttattccatctataaccaaactgatgaattaaattatggtgtagttgctttaaaaatagagcttgtataa

SEQ ID NO: 1016 - DNA, 726 bp, Staphylococcus capitis
atgattgaattaaaaaatatccataagtcttttaatgagaccgaagtgattaaaggcattgatttaactgtagataaaggtgaagttgtaactttaatagggcgttcaggttctggtaagacaacgttacttcgtatgatgaatgctttagagattccaacagatggtacagtctatgttaatggtaaaacttatactgaaaaggataaaaaatctcaaatcgaagtgcgcaaacagtctggaatggtcttccaaaattataatttattcccacataaatctgctttagaaaatgtgatggaaggacttgttatggttaagaaaatgaaaaagtctgaagccgaacgtaaatcaatggaattattagaaaaagttggacttgatcacgtgaaagaccaacgtcctcatgctttatcaggtggacaacaacaacgtgttgccattgctcgagcattagcaatgaatcctaaggtcatgctatttgatgaacctacatcagcacttgatccagaattagttaatgatgttttgaaggtgattaaagaactcgctgatgaaggtatgacgatggtcattgtgacgcatgaaatgcgatttgctagggaagtctcaaatcatacagtttttattcatgaaggtaaaattgctgagcaaggctcgccagacgaaatgtttaatcaacctcaaactgaggaattaaaacgctttttaaatgtaattaaataa

SEQ ID NO: 1017 - DNA, 720 bp, Staphylococcus capitis
atgtttctaagtctaaataatgaacagcaacacgctttagatgcggctaagcaagcatttggtccaatgttagagggattggtgaaatattcaatccctattactatagttacatttattctaggccttgttattgctttgtttactgcattaatgcgtatttcaacaagtaaaattttaagaggcattgcacgcgtatatgtatcaattattcgtggaacaccgatgattgttcaattatttattatattttatggtattccagaattaggaagactcattacgaatgatgcggataatcaatggactttagcaccggttgtagctgctataataggtttatcattcaacgtgggagcgtatgcatctgaaattattcgtggtggtattatttcaattcctaaagggcaaactgaagcggcgtattcaatcggaatgaattatcgccaaacagttcaacgaattatattacctcaagcaatacgtgtttctataccagcattaggtaatacatttttaggattaattaaagatacttcactattaggtttcattcttgtggctgaaatgttcagaaaagcacaagaagttgcgtctacttcatacgaatatttaactatttatattttagtagcaattatgtactgggttgtatgctttatcatctcaattattcaaggatggtatgaatcacgcattgaaagagggtatcgctcatga

SEQ ID NO: 1018 - DNA, 792 bp, Staphylococcus capitis
atgaagagacttttattttgcattatcgctttagtatttgtattggcatcatgtggtaataacgattcatcaagtgataaagatagcaaatcaagtagtaaagatgataatacattacgagtaggtactgaaggtacttacgcaccattcactttccacaataaacaagataaattaactggttacgatattgatgttattaaagctgtagcgaaagcagaaaacctcaaattaaaattcaatgaaacatcatgggattctatgtttgcaggtttagatgcagggcgctttgatgtcattgcaaaccaagttggtatcaataaagatagagagaagaaatataaattctctaatccttacacttattcaagcgcagtattagttgtacgtgataatgagaaaaatattaaatcatttaatgatgttaaaggtaaaaaattagcacaaacattcacttctaactacggtaaattagcaaaagataaaggtgccgaaatcactaaagttgatggtttcaaccaatcaatggatttattactttctaaacgtgtggatgctacgtttaatgatagtttatcttatttagattataagaaacaaaaacctaatgctaagatcaaagctattaaaggtaacgctgaacaaaataaatcagctttcgcattttctaagaaagtagatgataaaacaattaaaaaattcaatgatggtcttaagaaaatcagagataatggtgaattagctaaaataggtaagaaatggtttggtcaagatgtttctaagtctaaataa

SEQ ID NO: 1019 - DNA, 1443 bp, Staphylococcus capitis
atgtctttaaaaacaaagttagtcatgattatcactatgttacttggtggattttttggtttgttaaatgagacattattaacaacagctttaccaagtataatgaaagattttcacattcagtattctcaagttcaatggttaacaacagcgtttttacttaccaatggagtggttattccattatcagcattagttatacaacgatttactacaagacaagttttcctaacaggaattttaatcttctttgtaggtacaattgttggaggttttagtcccaattttactacgttattatttgcaagaatcgttcaagctttaggttcaggtattatgatgcctttaatgatgacgtcgattctagatatctttgaacctcatgaacgcggtaaatatatgggattcttcggacttgtgattggtttagcacctgcgattggtccgacattatctggttatttagttgaatattttaattggagatctttattctatgttgttgctcctatagcagcaatcacatttattatcgccttattcactgttaagaatgtaggacaaaatattaaagttcctattgatgtaatctcaattatattatctatattaggattcggtggtttactttatggtacgagctccatttcacatgatggttgggacgatccaatagtcttgtctacgattatcggcggtattattttagtggtgttattcatttggagacaatcacgcttggatacgcctttactcaattttggtgtctttaaaaataaacaatttgcaattggtttacttattatggcagtaacaatgatttctatgatcggttcagaaacagtattaccaatgtttgttcaaaatttattaaataagcccgcattagactcaggactcattttattacctggcgcaatcgtgatggctatcatgtcaatgacttcaggagcaatgtatgaaaagtttggtgctaagcctttagctatcatcggaatgttaattgtaatcataacaacttcgtattttgtggtgatggatgaacatacctcaacagtaatgttagctacagtttacgcgattcgtatgattggtatagcattaggattaatgccagtaatgacacataccatgaaccaattaactcctgaaatgaatgcgcatggctcgtctatgactaacaccgtacaacaagtggcaggttcaattggaacagctggattaattactattttaagtcaagcgagtcaacatttttcacctaaaatgagtgattataaaggtatgaataaacaagaaatggtcagtcaaattaaaatagatacgatgttgcatggctatcatgcaggatttttatttgcagtgataattacggtgatcagtttcttatgcacatttatgcttaaaaaacgtactaaaaaagaaaaagaacaaacatcatga

SEQ ID NO: 1020 - DNA, 687 bp, Staphylococcus capitis
atgccaaaattaatattatgtcgtcacggacaaagtgaatggaatgctaaaaacttatttaccggttgggcagatgtgaagttgtctgaacaaggaattgaagaagctaaaactgcaggtgaaaaagtagcagataataaattagaaattgatgttgcctatacatcgttattaactagagctttagaaacaacacaatatattttagcaggttctaatcaacagtggattccagtgcataaaagttggcgattaaatgaacgtcactatggtggattacaaggtttaaataaagatgatgcacgtgaaaaatggggagaagaacaagttcatcaatggagacgttcttatgatgtgcaaccaccagcagaaagtgaagaacaacgtgaagaatatttaaacaatcgtagatatagacatttagataaaagaatgatgccatattctgaaagtttaaaggatacattagatcgcgttgtgcctatttggactgatcgaatttcacaacatctattagatggtgaaactgtacttgtgtctgcacatggtaactccattagagcattaattaaataccttgaaaatttatctagtgaagagattgttggttatgaaataaaaacaggtgcgccacttgtttatgaattaactgatgatttggaagtgaaagataaatactatttataa

SEQ ID NO: 1021 - DNA, 411 bp, Staphylococcus capitis
atgaaaaaatcaatactagcaattctagctacagtttcaataggcgctacaggtttagaagccggtaatgcacatgctgctgaaaatactaatcaaaattataattctacagctactcaaacatcatctagccatagctcaaatgcaagtagtgagtcaacaagcgaagtatatcaagaattcataaaagctggaggtacaaaagcactttgggaaaaaatcgtacttcctgaatcaggcggagacccaaatgcatctaatggacaatatcatggattaggtcaaactaatcaatcatggggatatggttcagtcgctactcaaactaaaggtatgattaattatgccaaagaacgttatggttctatagatgatgctatttctttccgcgaagctaacgggtattggtaa

SEQ ID NO: 1022 - DNA, 894 bp, Staphylococcus capitis
atgtctcaaagtgaaaatttgaagattgctcaacgtggtgcctatcttagtttagtcgtgtatattattctttcaatagccaaatatgttactggatatatataccaatctgcagcggttcgagcagatgcgttaaataatatgacagatattatcgtctcaattgcagttattgtcggactaaaaatttctattaaacctgcagataaaaatcatccatacggtcatttaaaatctgagaatatttcgacattacttgtatcttttattattatgttcgtcgggatacaggttgtaacggaaaatgcaccaagacttattacacaagatagacatgtacctaatgtaattacaattattgtcagtgtagtcagtggtgtgattatgttaggtgtattttatgttaatcacagactcgctaaaaaaactaatagcagttcgttacgatctgcagcaaaagataacttatccgatagtttagtcagtatcggtacagctataggtcttatattcacgcaaataggatttccaattgtagatattattttagcgacacttctaggtttattaattatttataccgggtttgggatttttaaagagtcaatctttactttaagtgacggatttaatgaaagagatctagaagactatcgtaatgatatattagaagtaaaagatgttatcgacgttaataatattaaagggcgttatcatggaagtagtatttttcttgatgtaactatcgtcgtgaaaccgaatctgtcattgtatgaagctcatcaaatttgtgatagagtagagcatcatttacatgaaaaaggtatttcttcagtatatgttcatcctgaaccttataatcaagaagataataataaaacgattaaagagtaa

SEQ ID NO: 1023 - DNA, 135 bp, Staphylococcus capitis
atgggaatgcaaacattacttttatacatatttgtgcagtggtttcatttcccttcagagatagccccatttgtaggattaattattacgataccggtaacatttattttgtctaagtggatcttacgagattaa

SEQ ID NO: 1024 - DNA, 1488 bp, Staphylococcus capitis
atgaaacaacttaaacaacacgaacaattatgttggtatataggtattatattattttatttcattatggctattctaacaccattatcttttgttgactggcattggtatttaaattcacacataagttcacttgggcaagatttaatgaaaacgaatggaagatatctcgggaattttttagagattctcgcgatgcatagcgctattttcaaatatttaagttatactgctttatcgtgtttaatgatttacttttgttcaatgatagtgaatgtaaataaaaagtttatatatattttgatatgttttacatttttaataatgattccaagtggagtttatagtgaaacttatggatggatagcaggattctacaattatattccttcatcaataatctcattattcatcttatatactatcatttatattctttatggagatgaagaggctagtattaatcatctttggctgtttctcacagcttgtttgtttgggcagttatttattgaaaatatcactatatacaatagtcttatcattttaattggtgctagtatatatggcatccaacataaaaagctaaactactatttaattgtgggctttatgctaagttgcattggcgcaatcattatgtttttaaatcctatttactttaaaatcatcgatggtaaaacaatctaccattctatttcagataaagtaggcattttacataaaataggaacgactttattaatggactttcctaagtatatatttcttaatcaatatttaatactcgtagttatttcggttatcattacaatacttttggttcgtaatacaatttttgtaaaccaacatgttgttattaaatttgcaattatgtatggtttgtacagtttaccgttttataaattactcatctatgatcaattccattttgaaatatatacaaaatcattttcaatagctttattaaacttcttgatttgtgcagttttctttgcggtcttgatatatagtacagtcatattaatatcagaaaaatatttaagagccatcgctttaggatgtttaatttcaatcgtgttatcgacgctaccattattggttgtggctccaataggaaatagaaacttttatttcatatacgtgctgtggttaatatttttacttagttttgtaaagcaatttgatggaaatatcaataaagtaacgactatcgttaaggcaattgcatgtgctcatagtttgatattagttataggatttagcttgatttatcaaagtagtgtcaatagaattgaaaatgttgaagaacaattaaaaaatggtaagcgtcatcaaagtattatattagagagattacctttcgaaaaatatacgcatttaacaacaccgtcaacgaagacggatttcaatgactttaaagcatattatgatttgccaaaagatctaaagtttaaagtagtaccatttggttatgatggagaataa

SEQ ID NO: 1025 - DNA, 1158 bp, Staphylococcus capitis
gtgtcacaatttaaaatagttattgccccagattcgtttaaagagagtatgacagcgaaagaggcagctactgcaattcaaaatggctttcaagaagtgtttaatgatcaagttacttacgaccttatacctatggcggatggtggcgaaggaacaactgaagctttgaaagaagctttaaaggcgacttcctataccgttcaagttaaagaccctctctttagaaatattgatgcaagttatgcaagaagtgatcaatatgaaacagctattatagaaatggctgaggcatctggccttcatttattaacccatgaggagagaaatccacttcaaacttcctcctatggaactggacaactcattaatgaagcacttaaacatggtgtaaagaaaatcattttagggataggaggaagcgcgaccaatgacggtggcgtgggtatgttgcaagcattaggagtttcttttaaagatgttgagcataatgaaattaaacctggtggagcagcgttacacacaattgataagattgacacctctcatctcaatcctttgctacaaaacgttgaaattaaagtagcttgtgacgttacaaacccattattgggtaaccaaggcgctactgtaatatatggacctcaaaaaggcgctactgaaaagatgataccaaagttggattccgcattaagtcactatcatgataaaattaaagaagaattacaaaagtctgtcaaagatataccgggtgcaggcgcagctggtggcatgggtactgctttactagcttttcttgatgctaatttgcaagcaggtatagatgtagttctagatgaaacacgttttcaagagagagtgaaagatgctcaaattgttattacaggggaaggtaaaatggatgagcaaacgatttatggtaaaacacccataggcgttgcgaaagttgcaaaggcatatgacatcccggttattgcaatttgtggtagcctcggtgatcagtatcaagaagtttaccgccacggcattgacactgtatttagcattactgagtatccttctgatttaaagaccacccttgaaaatggaccacaattcatgcaaagaactgcaacaaatatcgcccgtctcatcaaattgaatttgaaattaaaaccataa

SEQ ID NO: 1026 - DNA, 699 bp, Staphylococcus capitis
atgaaaagaacagataagtatagagattcatacaaatacgataatcaatatcaaaaccaccgacgtcgagctgaagaagacgaatttcgaaatcgagctcaatctccaaataaaatgaacggtcaacgttctaatcaacgagaatttgatgatgaaccagaacgttactataatggtcgtgattatcgtcgtgaacaacaacttgaagaggaaaatgaaaaatcaggtcgaactaaaaaatggcttattgctatcatagttattttacttattatagtagccatttttgttacccgtgccatcatgaatcacaatgatgataaagtaaataatgatcctaatgtgtctcaaaattataaaaaacaagttgaaagtcaaaatgatgatatcaacaaacaagttgactcggcgaaaagtgatattaaaaataataaaaatagtgaatctcaaattagcaaattacaaaatgaaattgataaattaaaacaaaaagaagaaaataatgctgattctaaattcacacaattttatcaaaaacaacttgataaactaaaaaatgctaataacgcacaacaaaacaatgaaaatcaaagtaaaattaatagtatgcttgaagatatcaacactaaatttgatagcattaaatcaaaattagaaagtatattaaacggttcaagctctgatggacaaagtaattaa

SEQ ID NO: 1027 - DNA, 1209 bp, Staphylococcus capitis
atgactcattcaagtgccaagcacttttcaatgatattattcattatcttaggtgtcatgacagcattcggtccacttacgatcgatacatatacaccttctttacctaaagtacaacatgattttggaactacaacttcagaaatccaattgacactatcctttgcaatgattggactcgcgcttgggcaattcttatttggacctatttcagatgtctttggtcgtaaacgaattgccacgatattaatgatgatatatttagtagccacttttttatctatatttaccggtcacttaacgttatttttaattctacgattgatacaaggtttaacaagtggcggtgctatcgtcatcgccaaagcgtctgttggagataaataccatggtaatgaattagctaaatttttagcctcattaatggtagttaacggtattatttccatattatcaccattgctaggcggttttgtattatctatatctaactggagaatgatatttgcatttttaacgcttatcgcttttatagttttaattggtattttcttaaaaatgccagcccatactcaaacaatgcaaacacgtcttcaatttaaagatatacttaaagatttcttgtatttacttaaaaaaccgacattcgttattcctatgttgctacaaggtttaacctatgtgatgttatttagttattcatcagcatctccttttattactcaaaaaatttatcacatgagtgcgcctcaattcagcgtgatgcttgctattaacggtgtaggattaatcatagttagccaaattgttgcactactagtagaaaaaattagtcgtcaaaaattattaatttatttaacgattgtgcaaattgtaggcgtaatattacttattgcgacgttagctttacatcttcctttatatgtattactcatcgcatttttcattaatatttcgccagttacttcaattgcgccattaggcttttcaatggcaatggaagagcgaacaggaggtagtggtaatgcctctagcttgctaggtttgttccagtttatattaggagggattatctcgccattagttggtttaaatggtgaacatgatatgactccctacttacttataattagtgttactgctatcttactagttttactacaattcatttattttaagctttattcaaaaaacactatatctcattaa

SEQ ID NO: 1028 - DNA, 468 bp, Staphylococcus capitis
atggactacagaatagaaaatattgagagcacaaaagtcataggcgcttatagacattataaaagcggaggacacgctcaaagtaatattccggatttctgggaagatgtgcatactatgaaattagatgaacgattattgcaaaaaagcgataaccaattgaacggtttgttaggtgtttgtctgcctaaagaagatagaacaatggattacgctataggtgtgacaagtacagaagatcctcatgatggtttagagacattcaacttagaaggtggaaagtatttagttgtcgaagctaaaggacctgtccctaaaagtgttcagcaaacaatgaatgatatacatcatgaacttattcctagagaaaatattgaaataaaacaagctccattctttgagctatacggaccaggtgatacacaaagtgaatcttacgtcactgagatatggatgccaattcaataa

SEQ ID NO: 1029 - DNA, 612 bp, Staphylococcus capitis
atgaagaaaaccattttaccagttaaacctataagtcaattatttccaatccctatggttatgggatgtgaaggcgtatcggcagcaatgttactacaatttaatcatcattcaattaaagcaacggaaattatgagcaaatggcctaaacatcctaacaatccatataaaggttacgtaggccacccactgttagtgaagttaggttaccaccaaaccatctttcctgctgcattcgttcctttcctcaagcaatatgacaatcgtgttaaagatggttcaggttctagcttaaaacaacttgaacgcataattgatcaaggacaacctgtcattatatatcatacaagtttaggtgctagacccttccaccgcgtgttccgtcttgataataaacctactagacttgtatcgaacattcatgtcacattattaataggttatgatgatacttattactattatattgatcctttgtggacacaactaactaaaggaattgtcataccttcaatcattccaaatcaaaaacagataatcagaattaaaaaacaaaaattagaatgtagttataacgcaccaggccaaatgtgtgtattcgttcaaccataa

SEQ ID NO: 1030 - DNA, 810 bp, Staphylococcus capitis
atgaaaataggtacaatttcagatttacatattgatcgccacccaaaactcaaaccggaaagctatctcaatattttggcagaggtagttaatgagaggaaattggatatattattgattgccggagatatttctaatgattataaaatgagttatcagtttattgtccatttaaaagccatgatacaaattccaacttattttatacctgggaatcacgacttgtggtccgatggctcggataaatcatcaactgagattttagaattttataaaacacaagaagaatgtttaataggacgtccattgattgttaatgatgagtgggccatcgttggtcatacaggttggtatgattatagttatgcagataagcgattttcattagacaaaattaaaaaaggcaaacattacggggcgacatggcaagataaagtaagaattgactgggctacgtcagaccaacagttgtcaaaagtggctgcccaaatggtagatgaagatatcaagaacgttgatgaccgtaatattattttaatgacacatgtggttacacatccacaatttgttgtacctacaccacatcgaatttttgatttttttaatgcatttattgggacgcaagattttgattatatttatgagaaatatcctattaaatatagtattatggggcatgttcattttcgaaaagaactaagagatagtgatacagtttatatgtgcccgtgtctaggttatcaaagacaatggagaacgtctgatttagctaaagaaatcaatcatgcgttaatagatttccatatttaa

SEQ ID NO: 1031 - DNA, 1404 bp, Staphylococcus capitis
atggctagacaattgcatagggagttaaataataggcatatccaattaattgctattggtggtgctattggaactggattatttctaggttctgggcaaactatttctttaactggaccgtcactattatttacttatatgattattgggattattttattcgcatttatgcgtgctttgggagaattgttattaagtaactctaaatttaattcatttgtagatatcgcaaatgaatatttaggaccttttggaggattcgtaataggttggacttattggatttgttgggtcgtttcgagtatgtcagatttaacagccatggggcaatatttcgcattttggtaccctcaggtccctcattggttaactgtgttatttattgtactgattttaatttcatttaatttattaggctcccgtttatttggagaacttgaattttggttctcaattattaaagttgtaactattgtagcgatggtaattgttgggttggttttaattttcctatcatttaaaacgcattatggtcatgcttcattcaccaatttagttaagcacggaggcatgttcccacatggtcctttcggattcttaatgtcatttcaaatagcagtctattcctttattggtattgagcttatcggtgtaacagctggtgaaacgaaagatcctgaaaagaccatccctaaggctattaataacgttcctattagaattttactcttctacatcggtggtttattagtcatcatgtcagtcattccatgggataacattgacccagatagtagtcctttcgtaaagctatttagtattattggcataccttttgcggctggtatagtgaactttgttgtcctaactgcagccgcttcagctacaaatagcggtatttactcaaatagtcgtatcttgtttggtttagctaaacaaggtttgggacctaaagtattaactaaaacaaattctaacggcgtgccctacctttcaatgttcgtgtcatcgattactttacttgtagcagcgttgttaaattttatcttcccagatgcaatcaaactatttatatatgttacgactttatcaactgtactctttttagtagtttgggcaatgattatcgtgtcatatatagtttatgttagaaaggaccctgaagcacatagaaatagtaaatttaaattattcggtggtcaaggcgtcgcgtttgtcgtattagctttcttcttctttgtatttatattattattctttagtgctgatacacgtgcagcaatctttatttcgccaatctggttcatattcttattcttctactataaaaaatataaatcaaatgccaaagcattagctgaaaaacaacatttaagcaatcaaaagcaaactaaaaacatataa

SEQ ID NO: 1032 - DNA, 2208 bp, Staphylococcus capitis
atggaattattagaagcttttttaatttttatatttgcagtcattgtaagttctgtcttacataatatgtttcctaaaattccaactgcatttattcagattggtttaggtgttgtcatctttactctacctattccaatgcatttcgaatttgattcagaagtatttatgatggccgttattgccccattattatttgttgaaggaacgcatgtgtctcgttctaaattattggaataccgtaaacccgtcattttaatggcaatggccttagtttttacaacggttattggcgtcggttactttatacattggatttggaccgatttaccaatgccagctgctttcgcgatagctgcgattttatgtcctactgatgctgtggccgtatcagccattacaaatgggaaagttttacctaaaggatcaatgtctattctagaaggggaatcattgctgaatgacgcagcaggtatcatctcatttaaaattgcggtcactgcgcttgtcactggtgcattttcagcaattaacgctatcgaacaatttattatttcgacaatcatcggaatattagtcggtgccatcttcggtattattgtcgtgagaatacgtatctaccttacagcgaacaaaggattaaaagataataacacattaacatttatccaattattgacacccttcgctatttactatatagctgaaacattgcatgcatcaggtattatagctgtagtagtagcaggtttaattcatggtttagaacgtgatagattaatccgtgcacaaacagaattacaaatgaactttacacaaatttggaatacgtttagttatgcactgaatggctttgtctttgttgtacttggattcatcgtacctgaggttgttatggaaattgttaaagatgaacctgaaaatattaaattcttaattatgattaccctactcattgcgcttgctatttatgtatttcgttttatttgggtatttgtatggtataaagacttttatttcccgaaaaatattcaatattacatggataactcagatgaagaagaaacacctcccaatcgagcacactatgcttttataatgacaatgtgtgggattcacggaacgatttcactatctatggcattgaccttgccgtatgtaattagtaatggacatcgttttgaatatcgcaacgatttattatttattgcatcattgatggtattaatcagcttaatattagctcaagtcattttaccgctcattacgccttctgaagaagtatctcatttcaaaggcatgagttaccaagaagcgaaaatatttatcgttcagaatgtgatagatcattttaaaaatgaatctaaaaacaatccttccatagattatagacaagtgatgaaccaatactttcaagaattaggatttctattaaatattgaacctgatagtaaaaatacaaaagagttgcgacgattagaagatattgcagaagatgtggaaacaaatacgttacaaaagcttatcgataatgggaaaattgatgctacaaatgttcgagactatcgtaatgtcatggatgctactcaagcttataatgagaaaacgtttgtagagaaatttactcgactctttaaaatgatttacttgcgttttaaagctagaaaaaatcgtaaaaaagaagaacgtttagttcataaacaagagcatgctagacttagagcatcacaccaatcaacaagtaacaataaagctagaattcgtgagcaacgtgaagcatacaaaaattcaagacaagaattaaaagaagaacgtaaattgagaaagcagcagttccatgatagttacaaacaagttcaaaaaatcttgcgcatcgttaaccaccatatcgtgttgagattacgagaggaacaagatagctcgaatgttttagaggtaagtttagtaatcaatcaatattattcattattacgtatgttacgtagtcgttcacgcaaagactttaaatccactaaatcccaaacacaaagtaaaaatgaccttgttccggaaaatttaagaaagttaaaattagaaggtttatataaacaaagaactattctggataagttaatccaacgtaataaaataacgaatgatgttgcaacacaaattcgtgaaaatattaattacaatgaaattgttttatctcacgaattaaaaaaataa

SEQ ID NO: 1033 - DNA, 1830 bp, Staphylococcus capitis
atgtttaatcaatttaaaagacttttaatcgggcgtccaaagaaaaatagagacttaaaggatgaaaaaattactaaatttaaaggtttagcaatcctgtcttccgatgctttatcatctgttgcctatggaccagagcaaatattgatcactttatcagtaattggtgctgttgcttcatggtatactttaccaatcgctggtgcagttcttatcttacttgcagctttaatcatgtcatacagacaagttatatacgcatatcctaaaggtgaaggtgcgtatatggtttctaaaacgaacctcggtgagaaatggggattgctcgcaggtggttcactattagtagactatattctaacagttgcagttagtatttcatcaggtgcagatgcgtttgtcgctgcttttccaagcttataccattttaaagtgttaattgcttgtttattagttttgttcattttaattatgaatttaagagggcttacagaatcagccactgtactttcttatccagtctatttattcataataggattaattgtattaattattgtaggaacatatcgtgttgctataggagacgtgcaaccacatatgcattcaactgttggcactgcagtaccgggggtaacattattcttactgttaaaggctttctcttctggagcttcttctttaacaggtgtggaagctatttctaatgctgtcaccaactttaaggatcctgctccgaaaaatgcagtcaaaacattagtaactatggggactattctagcagttttacttgtaggaatcgtggggctctcttacgtttatggtgtaatgcctcaaacagagactactgtgttatctcaactggcctcaaaaatatttggtaataacgttgcattctatttcgttcaagcaacaacagtaatgatattagtattagctgccaatactggatttactgcatttccaatgttggctgcatcaatgtctaaagataagtatatgccacgtatgttcatagttcgtggtgatcgtttaggatattcaaattcaattattgttttaggtgtcttggcgattatattaattattgtgtttaacggaatgactgaaaatctaattccattatatgctgtaggtgtgtttattccatttacattagcacaatttggtatggtcttgaagtgggtaaaagaacgtcctaaaggttggggtattaaactatcatttaacttagtgggtggaacaattacttttatcgtatttatgattcttctaatcactaaatttactcaagtatggccaatattattcttcttaccatttgtagtatctgtatttatgagaattaatacgcattataaaaatatagctcaacaattacgctccgatatcgatgtacatgacatccctgttgtagatcgtaatttagctattgtgccaatacctagtattacgacggcggttgataagtcaatttattatgctcaaatgttagctgataatgatgttatcgcagtccatgtcacttttggagatgaagatgataaagcattaatggagaaatggaaacgacacttcccagatgtaagattagttattttacattcagaatatagaagtatcattcgtccaatctcaagatttatcgacaaaattcgtaaaaaagcgaatgatcaaaactatttaatcacagtagttgtgccagaattcattcccaaaaaaccatggcacaatctacttcacaatcaaacaagcttcagattgaaaatgcatttgatctatcaaaaaaacgttatattatgtaccattccatttaaattaactaaataa

SEQ ID NO: 1034 - DNA, 1500 bp, Staphylococcus capitis
atgaaaaagaaacagtttatcatcactattgtagccatgatgattcttatattaagtggtatattaacaaaacattataccgctcatagtaaaacggagagtatgcttacccatcattcacagaaacaaatcgatcatatcgttcactcagcaatgaataatggtaagatacctggtgtctccgtgcttattgttaaagataataaagtctttttaaacaaaggttatggttatgccaatgtggatcaaaaaatgaaagtgacccctcaaacaaaatttgaaattgcttcaaatacgaaagcttttactggatatgggattcttcaacttgctgaagaaggtaaattaaatttaaatgataaagtatcaaagtacattccagacttttatatgacatataacgatgagaaaaaagatatcactattaaacaattgctaggacatacaagtggcataccgagtgatattactgaagaggatcattattcggaagattataatagtctgaaacatatcgttgaatatgctaaagggaaagaattgaataatgcgcctggtgacagcttcgaatattcaaatatgaattatgatatcctaggtttaattattcaaaacgtctcacatcaatcttatcaatcatatattaaagaacatatattagagccgttacacatgcgacatactagtttcaaaactacaagtaaaaaaggtaataacgaagctactggctatgaattagtaagtggtgaagctataaagactacacctgaatttaatattggtgataccccatcagcttttatgatgacgagcaccaaagacttagaaaattgggttaaacaacaattaaaaccttcatctaaaatgaattctataatcaaacactcacatcaaaagatttcagaaactgaaaatcaatcagacgatgatggttatgctgcaggttggtttattaattcgagcagccacattatttctcatccaggtactcttaataatttctcgtcagaaattttactcaatcctactaaatcttacggaattgtcgtgttaggaaatatgaattcatctcaagtggcaaatctagctgaaaacttaagttcacaaattttaaataatgatcactatacaactattgaacaaaaaattgatgagtctaaaagttttaatcatacgataactattataaccggtcttggggcatttgtgtttttacttctgaatttaatacgacttaatcacttaaaacaccaacgtgtaatctatgataaaaggaaagttccatttataacattcctcctgatcatcacattatttgtcatattgagtattgttatttatttacttcctttgtttatattaggaaatgtaagttggacatttgtattatcatggttacctgcacatgcgaagtggctgttaacgagtgtttaccttttcttgttaatgatgatgatatggttagccattaatgttttgacacgtcatcccaaaagttaa

SEQ ID NO: 1035 - DNA, 822 bp, Staphylococcus capitis
atgcacaaacgacttgctttaatattgttaagtttaataatatttttagccggctgtgattactcgaaaaaagagaatcaaacaggctttttctataatttatttgttaaaccaatggacagcttacttcactttttaggtagattatttaatgacaattatggtttagctataattgttattgttcttattgtacgatttatattactacctttaatggtaattcaagtgaaaaatatgcatatgatgcgtgagaaaacgaatgtggtaaaaccagaattagatgcgattagagagaaaatcaaaaaggctgacactcaagaagaacgtaatgcggctaatcaattattaatgaagaaatataaatcatatggaattaacccttttaaaaacatgattggatgctttccggtaattattcaaataccaatactaatggggttatacatgagtttgaaatatccaacaagtgatggaatcactaagtatcctcatttcttgtggtttaacttaactgaaccaaatttaattatgacaattatcgcagctagtatgtactttattcaaccattagtcaattcaattcattaccctaaagatcaaagaaaaacatattatgtaattatggtagtttcgccgatattcattacatatgcttctttaacttccgcttcagcacttggtctatactggagtatcagtgcagcattcctaatagttcaaatgcatcttgcacactcttattatgggaaacaagctaaaaaagaagcagccaaacttaaagatcaattagaactaaaccaagctaataaaacagagtaa

SEQ ID NO: 1036 - DNA, 852 bp, Staphylococcus capitis
atgactaaaatatttgtaacaggagcaacaggtttaattggcacgaaattagtaaaacgtcttaaagaagagggacatgaagtcgcaggttttactacattagaacatggtaaacagaaattggaaaatgcaggtgtgcaaccttatgtcggtgatattcttaaagccgacacaattgatgcagctatagaagcttttaaacctgaaatcattatcaatcaaattactgatttaaaaaatgtagatatgagtgcgaatactaaagtgagaattgatggttctaaaaatttaatggatgctgcaattaagcataacgttagaaaagtaatcgcgcagagcattgcttttacctatgaagctggtgaaggattagctacagaagaaacgcctttagactataattctaccggagatagaaaagtcacagtcgatggcgtagaaggtcttgaaaatgaaactaaacgtctaggagaatatgttgttttacgttttggttggttatatggaccaggaacttggtatggcaaagatggcatgatttataaccaatttatcgacggcgatgttacattaagcgatggtgttacatcatttgtgcatcttgatgatgctgtagaaacgtctattcaagcgattaattttgataatggtatttacaatgtagcagacgatgaacctgtaaaaggttctgattttgctgaatggtataagaatcaattacaggttaatccaaaaataacaatacaacccgcacaaccatttgaacgaggtgtgacgaatgacaaattcaaagcacaaggtggtaaactcatctattcaacgtggaaagatggtatgaatcctatagaataa

SEQ ID NO: 1037 - DNA, 477 bp, Staphylococcus capitis
atgatgtctagtacatgtaaaagaatcatggttacaggccttgttggaggcttcattggaggcgctattaaaatgggatgggaagcgttagtaccgccgagaactcctgaacgtgaagaagagccgccacctatgacattattaaatcaattaggcttacctgagaaggttaaacatgctacttataactacaatcaaaatgaaataccaatagctgtgatgggcattcattatggcttttcaattgcacatgcgttcgcatatgcgattcttgctgaaagatattccaaagtaactgttttaagagggagtttatttggcatagctataaatattgcatttcatgaatacttgttacctcgtgtaggtttaactcctgaaattgatgagttacctaaagaagaacgtatttctgaattactaggtcatattgtttggatgaatactattgattacgttagatcagctttaaaataa

SEQ ID NO: 1038 - DNA, 933 bp, Staphylococcus capitis
atgaaaatagcaattgcgggttctggcgcacttggaagtgggtttggagccaaactgtttcaaaatggttatgacgtatctcttatagatggttgggaaccccaagtcacatctattcaacaggaaggcttacatattgatattaatggtgagggatatcattttgacattcctatgcattgtctttcacaaattccgtcaaatgaactttacgatgttatatttttatttcttaaatctatgcaattagagtcagtgttagatgcaatcaaacctcatattcataaagaaaccattgtggtttgtacgatgaatgggttaaaacatgaacgactcattcgcaattatgtagaagatgtccgtattgttcgtggtgtcactacatggacagccggtatagacgttccgggtcatactcaccttatgggaagcggtcccgtagaagttggttgtcttgttccagaggggatcgataacgtaaaaattatcgtagatatcctcaatcaaagtgaattaaatggagtcgtaagcgaagatttacatcaatcaatttggaagaagatttgtgttaacggcacagcgaatgcattgtgcagtatcttggagtgtaacttagccactttaaatgaaagtagctatgccaaaaatttaatttataaattaacacaagaaattgttcatgttgcaacatctgatcatgttcaccttaatgttgatgaagtttttgaatatctaatagacttgaatgaaaaggtaggtccgcactatccttctatgtatcaagatttaatcaaagatcatcgtaaaactgaaattgactatattaatggtgcagttgcacgattaggcaaagaaaatcatatacccgctccagtgaatgaatttgtgacaaatctgattcattcaaaggaaagtcagttaaacgcacaataa

SEQ ID NO: 1039 - DNA, 1401 bp, Staphylococcus capitis
atgaatacttcaaaagaatttaggggagataaccgccttttactagggatcatattaggagttatcacgttttggttatttgcacagtcactggttaacttggttgtcccgttacaatcatcttataacagtgatatcggtacgataaatattgctgtgagtttatctgcattattttctggcttatttattgttggtgccggtgatatcgcggataaatttggacgcgttaaacttacatatattggattagcattaaatatcattggttcaattcttatcattattacaccattaccgagtctattaattattggtcgtgcagttcaaggactttctgctgcatgtataatgcccgcgacgttagcgattattaatgaatattacatcggcacagctagacaacgcgcgctcagttattggtctattggctcatggggtggtagtggcgtctgtacattatttggtggattaatggcgacaaattttggctggcgttctatttttattatctctattattttgacgatattagcaatgtttttaatgaaacatactcccgagacgaaagctgaacctatcggcaataaacctctggaacctaagaaatttgatgttattggattaatcattttagtgatttgtatgttaagtattaatgttattattactcaaacatctaattatggcttgatgtctccacttatattaggtttaattgccgttttcgttatctcactcatcgtattcgttatgtatgagaatagaatcaaacatcctcttgttgactttgatttatttaaaaataaaggctataccggtgcaacagtttcaaactttatgttaaatggtgttgcaggtggtacgttaattgtggttaacacttattatcaacagcaattagattttaattctcaacaaacaggctatatttcacttacatatttagtagcggtattaattatgattcgtgtaggtgaaaagattttacaagcattaggacctaaacgaccactacttatgggaagtggttttacagttataggtttaattctactttctttaacatttttacctgacgcatggtacatcgcagcgagtgttgtagggtatttattatttggtactggtttaggtatctatgcgacgccttcaacagatacagctgttgctcaagcaccagacgaaaaagtaggtgtagcttcaggtgtatacaaaatggcttcttctttagggaatgcctttggtgtcgctatttcaagtacagtttatagtgtgcttgctgcgcaattaaatttatcactcggtggttttatgggtgtgatatttaacgcaattgtagcactcctcgctctagtagctatcttgttcttagttccgaaaaaacaatcaaatttataa

SEQ ID NO: 1040 - DNA, 447 bp, Staphylococcus capitis
ttgtcaaactctaattcaaataaggaagataataaaaacccccaagagaaaacatataatgtttttcaacaagccttaacactggcagttattttattaatttctaaaataatcgaatcatttatcccgattcctatgccagcttcagttattggtttagtattattattcatcgctctatgcactggcatagtcaaattaggacaagttgaatctgtaggaactgctttaactaataatattagtttccttttcgttccagctggtatttcagttattaactcattaccaatcttaagtaagagtcctgttttaattattttattaattattatttcaactattttattacttattagcactggttttgcttcacaacttttagttacgaaatcacttttcccatctaaagaaaaaaatgaagaaactagtcaaatcggaggttaa

SEQ ID NO: 1041 - DNA, 702 bp, Staphylococcus capitis
atgcttgatcatttaggaattcacacaccatactttggaatattactttcattaattcctttcgtaattgctacatacctatataaaaaaacaaatggtttcttcttattggcaccattatttgtcagtatggttgtaggaatagtgtttttaaaggtaactggcattagctatcaaaattacaaaattggtggtaatatcattaacttctttttagaaccggctactattagttttgcgatacctttatataaaaaacgtgatgtattaaaaaaatactggattcaaatatttggtggaattgccataggtactgtcgtagcacttattttgatatacctagttgctagattattccaatttggttctcagattacagcatcaatgctacctcaagcagcaacaacagcaatcgctttacctgtatctgaaggtattggcggagtaaaagaattaacttccttggcggttattttaaatgcagtagttatttctgcactaggtgctaaaatagttaaaatgtttagaatttcaaacctcattgcgagaggattagctttaggtactagtggccacactctgggtgtagctgctgctaaagatttaggtgaaacagaagaatctatgggaagtatcgccgttgttattgtaggcgtaattgtcgtagctgttgtacctattctcgcaccaatcttattataa

SEQ ID NO: 1042 - DNA, 690 bp, Staphylococcus capitis
atgaaaggcaatttattgcattcaatcctagagtattattcactcaactgggccttccttttagaacttttctttaaacacttacttatgtctgtttatggagtgttattcgcttgtatcattggtatacccattgggatttttatagcgaaatataaacgcttatcatggccaatcattacgattgctaacattatccaaacagtacctgccattgcgatgctagcgattctaatgttagctatgagtctaggaccaactactgttgttgtgaccgtgttcttatattctttactaccaattattaaaaatacgtacacaggtatcgtagaagttgatgataacattaaagatgcgggtaaaggtatgggcatgacgggcaaccaaattttaagaatgattgagcttcctttatcattatctgtgattattggaggtataagaatcgcacttgtagtagcaattggtattgtagcgattggttcatttataggtgcgccaacacttggggatattatcattcgtggtacaaattctacagatggaacaacattcattttagctggtgccattcctattgcattaatcgctataattattgacattggattacgctttttagagaagcgtttagatccaactcgcaaaaataaaaaactcagtcacaagaagaccaagttcaaaaattag

SEQ ID NO: 1043 - DNA, 945 bp, Staphylococcus capitis
ttgaagaaacatatgaaatatacagtcattctcattgcattgtccctcttagtattatctgggtgtagtttgccaggccttggtgatggcaatgcaaaagatgatgtaaaaattacgacgactgaaacaagtgaaacaaaaattattggtaatatggaaaaattaatgattgagcatgaaacaaatggcaaaatcaaaccaactttaattggtaacttaggatcaagtattattcagcataatgcgttacaacgcggagatgtgaatatgtcgtcagttcgatacacaggtacggaactaacaagtgtacttgatgctaaaccgacgaaggaccctaaaaaggcgatgtcagaaacgcaacgcttatttaaaaagaaatatgatcaaaaatattatgattctctagggtttgctaacacatacgcttttatggttactaaagaaacagctaagaaatatcatttagaaaaagtatcagatcttaaaaagtataaagataaattgcgtttaggtatggatacgcaatggatgaatcgtgcaggagatggctatcctgcattcgttaaggattatggctttaaatttgatagtgctcgtccaatgcaaattggtttagtttatgatgcacttaaaaataaaaaattagatgtagcagtaggatattctacagatgggcgtattgcagcctatgatttaaagatcttaaaagatgatcgtaaattcttcccaccatatgatggcagtcctctagctacggagaaattaattaaagataatcctaaaattgataaagcattgaaaaaactacaaggtaaaattaatactaaagaaatgcaaaaattaaattatgaagcggatggtaaaggcaaagaacctgccgtgattgcggaagagtacttgaagaaacatcattattttgatgatgagaaaggagggcaaaaataa

SEQ ID NO: 1044 - DNA, 636 bp, Staphylococcus capitis
atgagagcattctttcaagaatacggcggtcaactcatatcgaaaacaattgagcatttctatatttcaattattgctttactaatagcaattgttgtagcggtgccactgggtattttactttctaaaacgactcgcacagctaatgttgtattaaccattgcaggtgtactccaaacaataccaacacttgcagtattagcaattatgattcctatctttggtgtaggtaagacaccggctattgtagctttatttatctatgttttactaccgattttgaataatacagtattaggtgtaaaaaatattgataaaaatgttattcaagcaggtcaaagtatggggatgacgaagatgcaattaatgaaagatgttgaattaccacttgcattacctcttatcattagtggtatccgactttcaagtgtgtatgttattagttgggcaactcttgcaagttatgtcggagctggcggattaggtgacttggtatttaacggtttaaatctttatcaaccacctatgattataagtgcagctattttagtaacacttttagcgttaattgttgacttcttactttcattagttgaaaagtgggcagtgcctaaaggtctcaaagtatctagataa

SEQ ID NO: 1045 - DNA, 1272 bp, Staphylococcus capitis
atgttaagtattaaaaacttaaccaaaatttattcagggaataaaaaagcagttgataatatttccttggatattgaatctggtgaatttatcgcctttattgggacaagtggtagtggtaaaacgaccgcattacgtatgattaatcgtatgattgaagcgactgacggtcagattacgatgaatggtaaggatgtacgtaatatgaatccagtagaattacgccgtagcataggttacgtcattcaacaaatcggtttaatgccacatatgaccattcgagagaacattgttttagtacctaaacttttaaaatggtctaaagagaagaaagatagtaaggcaaaagaattaattaaattagtcgatttacctgaagaatacttagatcgctatccagctgaattgtcaggtgggcaacaacaacgtattggagtagtgcgtgcacttgctgctgaacaggatatcattttaatggatgaaccatttggcgcacttgatcctataactcgagatacgttacaagacttagttaaagagttacaacaaaagcttggtaaaacatttattttcgttacacatgatatggatgaggcgattaagctggcagataaaatttgtatcatgtctaaagggcaagttgtgcagtatgatacaccagataatatattaagaaatcctgcgaatgacttcgttaaagactttatcggtcaaaatcgtttaatacaagatcgtccgaatatgaagacggtagaaggtgcgatgattaaacctgtaacagtacaggcggatgattcattaaatgatgcagttaatattatgagagaacgtcgagtggataccatctttgtcgtgaataatcataataaattattaggtttcttagatattgaagatatcaatcaaggtttaagagcaaaaaaagaattaattgatacgatgcaacgtgatatttataaggtacatattgattcaaaattacaagattcagtgcgtacgattcttaaacgtaatgtaagaaacgtaccggtagtgggtgatgataatgaattaattggtttaattactcgtgcaaacttagtggacattgtttacgattcaatttggggtgagagtgatgagggcttaaggaatgactcatctcatttaaataatcatcctacccacaaccgtgttcaagaggagcaagaggctaacgtagctcaagagtctgactcacataaaggagctaatgagcctgatgatactcagaaaacgggagttgatcaataa

SEQ ID NO: 1046 - DNA, 1053 bp, Staphylococcus capitis
atgaaagcagcagtctggtatggacaaaaagatgttcgtgtagaggaccgcgatccaaaagtattaaaagatgatgaagttcaagtgaaagtctcatggacaggtatttgtggtacagatttacatgaatatttagaaggacctattttcatttcaacagacaaacctgatccgttgttaggtcaaaaagcacctgtaacattgggtcatgagttttctggcgtagttgaaaacgttggtaaagatgtcacacgtttcaaaaaaggtgatcgagttgtcgtaaacccaactgtttctaaacgtgaaaaagaagaaaatgttgatttatatgatggttattcatttataggtttaggttcagatggagggtttgcagagtttactaacgcacctgaaacaaacgtgtatcatttacctgacaatgtatcagcacgtgaaggcgcacttgttgaacctacagctgtagctgttcaagctgttaaggaaggcgaattattattcggtgacacagttgcggtatttggagctggccctattggtttactaactgttatagcagctaaagcagctggtgcaagtaaaatctttgtcttcgatctatctgaagaacgcttagaaaaagcaagaagcgttggagcaactcatacctttaactctggaaatgtagacccagtaaaagctgtatatgataacactgaaaatggtgtagatgtttcattcgaagtagctggtgttggtattacattacaacaatctattgaagtgacacgtccacgtggtacttcagttatcgtagctattttcggtcacccagtagaatttaatcctcttcttcaaatgaatagaggggttaaattaactactacaattgcctatacaccaacaactttccaacaaacaatcgatttaatcgctaatggcagtttaaatgttaaagatgtagttaccgatgaaattgaattagaaaatatagtcgaaagtggtttcaatcaacttgttaatgataaatcgcaagctaaaattttagtccgtttaaatggtgatcaaaaataa

SEQ ID NO: 1047 - DNA, 522 bp, Staphylococcus capitis
ttgagaaagttaatttttgaagaaactgaacttgaagaaacatataaatggatgcacccatgttacacattaaataataagaatgtagtgcttattcatggttttaaacattatgtagcactactatttcataaaggggctatcttagaggataaatatcatacgttagtgcaacaaactgagaaagttcaagcagcccgtcaattgcgttttgaaagtttagacgaaattaaagaacgaaaagatgagattttattctatataaatgaagccattcaaactgaaaaagcaggtaagaaagttgaaatgaagaaaactaaagattatgaagtgcctgaagagttagaggaaaaattctcagaaaatccacaatttaaagaggcgtttgataatctgactccaggtcgtcagcatcagtacatatatcacatttcacaagcgaaacgtagtcaaactagaattaatcgcattgaaaagtattatgagcatattttaaatggaaaaggcatgcaagataagtga

SEQ ID NO: 1048 - DNA, 1680 bp, Staphylococcus capitis
atggaaaataaaaataaatcaaaaagtagtaagattaacctctcgcaactcgtcttactagggcttggttcattaatcggttctggttggttattcggagcatgggaggcatcttctatcgctggtccagccgccattatttcatggatcatcggtttcatagttattggaacgatagcttataactatattgaaattgggacaatgttcccacaatcaggtggcatgagtaattatgctcaatacacacatggttcactacttggattcatagcggcatgggctaactgggtttcactcgtaacaattattccaattgaagctgtttcagctgtacaatatatgagttcgtggccttgggaatgggctaaacctatgggagctttaatgaaagacggctcaatcagtacaattggtttattcgccgtttacgttattatcgcaatattctcccttttaaactactggtctgtcaaactattaacttctttcactagtttaatttcagtatttaaattaggagtacctttattaactattattatgttaatgatttctggatttgatacaaataactatggtcactcagcaagtgcatttatgccatatggtagtgcaccaatcttcgctgcaacgactacatcaggtatcattttctcatttaacgcattccaaactatcattaatatgggatctgagattaaaaatcccgagaaaaatatcgctcgaggtattgcgatttcacttacattaagtgcaatcttatacattgtacttcaaagtacgttcattacatcaatgccaagttcaatgattcatgaacatggttggaatggaattaatttcaattcacctttcgcagatatggcaattttattaggtatcaattggttagcaattttactttatgttgaggctgttgtttcaccatttggtacaggtgtatcattcgtagctgttactggccgtgtgttacgcgctatggaaaagaatggtcatattcctaaattcttaggtaaaatgaatgaacaatataatattccacgtgtagcaattgcatttaacgcaatcatcagtatgattatggttacacttttccgtgactggggtacattagcagcggttatttctacagcaacattagtagcatatttaacaggcccaacaacagttatttcattacgtaaaatggcaccaaaaatgacacgtccatttaaagcaaatatcttaaaatttatggcgccattatcattcgtacttgcgtcactagcaatttattgggctatgtggcctacgactgcagaagttattttcattatcattttaggtttaccaatttatttcttctatgaatataagatgaattggaaaaacactaaaaaacaaatcggcggtagtttatggattattatttacttagtcgtactcgcattcttatcattcatcggaagtaaagaattcaagggtatgaactggattcattacccatgggatttcttagttatcgcaattgtagctttaatcttctatcaattaggtacaacaagttacttcgaaagtatttacttcaaacgtgccaataaattaaacaagaagatgggcgataaattaagaaaacgtcgcagaaaagcaagacgtaaagactggaaagaaagagatcgtcaagaacaaaataactaa

SEQ ID NO: 1049 - DNA, 1353 bp, Staphylococcus capitis
atggttaaagtaaatatcaatgaaggaacagttcttggaacaagtgacggtgatatcgatacatttctaggtataccttatgcccaatcatttaattctaagacacgttttcaacattcacagttatacaacattgtcgatgagatgattgatgccaagaaagctaaacctatccctccccaaccctataattcacttgaagatttcttctcaaatggcgttcagacgtttgaaacttttaaacaagatgagaattgtctttatcttaatatttggcgagcaagtaatacccaaaatttaaaacccgtggttatttatttctatggaggaggatttactcaagggcacggaacagcagatttatacaatccctatcatctcgtagaacaagaagatactattgttattaccttcaattatcgtttaggtgctttaggttatttagactggtcttatttcaataatcattatgattacaataatggtatgtctgatcaaatcaaccttttaaaatgggtacaccatcatattgcctactttggtggtaatcctcaaaacataacgttgataggtcaatctgcgggaagtatgagcataatggcactcatgcaaataccagaattagaccagtattatcacaaagtgatgttgctcagtggcacattacatagtgattctcctctaactgcaaataagaaggcgcaacaatttgaatctttagttcacaagcattatcctgataaatcaattgaatcattaactagtaatgaaattttagatttaatgagattacataaagtagaacgagggccatcgagaagtcttgatttgatttatcaacctatccaaagccctgaaatgacacgatctgtaactgcattttcaaaaccagtattcgttggtttcacgaattctgagggagatatttatatagagaatgattcacggaaactgtcaccattgcgctttaaagaaatcatgcgcttattcgatattcccattttagaagaagttcaaagtgcacaacaacaaagagaagtaataacgacatcttattttaaaaatatggcattgaactttctacaatctacacattctcaacataaatggttagcacgtttcgactggtgtaaacctaaaagcattcattttaaatctgcttaccatattctcgatatgatattttggtttggcaacttaaatattttatcagcaaataactatcattatacgcaatcagatattcaattaagtcatgacatgatggcagatttaggtcactttgtaagatacaatagaatgccttggtctaaataccatgaagatactgaatactttcatatatataaataa

SEQ ID NO: 1050 - DNA, 1176 bp, Staphylococcus capitis
atgtctatcgtgcgtattgccacttttatattgagtgtgtttatcgtgggaatggtagagatgatggtagctggtattatgaatttaatgagccatgatcttaatgtttccgaagcgattataggtcagctggttacaatgtacgcattaacatttgcaatttgtggtccgattttagttaaattaacgaatcgatttgctgtacgaccagttttattatggacgttattcacctttatcattggtaacggaatcatcgcaattgcaccgaatttcactattttagttataggacgtatactatcgtcagctgcagcatcattaatcattgttaaggtcttagccctaactgcaatgttaacgaaaccgaagaatagaggtaagatgataggtgttgtgtatacaggatttagtggtgctaacgtatttggtgtccctattggaacaatgataggtgattgggttggttggcgctttacatttctatttattatggcagttagtgttctagtaggtatattgatgattatctatcttcctaaagaaagcgaattagcacatgccaatcgttctaatcattcatcggacaatgattccgaaataccttcacgtatcttacgtcctatggaaatcgtaaaatatttaattattactttcttagttttagtagcaaactcagtcacttttgtgtatattaacccattaattttatctaagggacacgagttatcttttgtatctctagcattgttaatcaacggtgttgctggagtaatcggaacatcacttgggggagtctttgcagataaaattacaagtaagcgttggttgatgatatcagtatcaatcttcattatcatgatgcttgtgttaaaccaattacttgcaggaacagttattctactcattggattgtttgtatggaatattatgcagtggagtacgaaccctgcgattcaaagtgggattattgaacacgttgaaggtgatacaagccaagtaatgagttggaatatgtcatgtctgaacgccggtattggttttggtggcattgttggagggttagtgatatctcatattaatattcaagccataacctatacaagtgctataattggcttactcggacttattgttgttttaactttaaagaacattcattacgctaaaaattaa

SEQ ID NO: 1051 - DNA, 777 bp, Staphylococcus capitis
atgagtaatacagcattatgtttaacagcactactattattgattccaatctttatttcatataaagaaggtttacatatcattaaagatttagtagttgcaacgatacgagcagcaatacaattacttattttaggattcttgctacattacatttttaaaattaatgaaaaatggctactcatgctatgtgtgctagtgattattattaatgcatcatggaatactataagtcgtgcttcaccagtgatgcatcatgtattctggatttcattcgtagctatatttatcggtacagcattaccattagcaggcactttagctaccggagcgataaaatttactgcgaatgaagttattccaattggcgggatgttggcgaataatggcttgattgccattaacttagcttatcaaaacttagatcggtcatttgttcaagacatttcaggtattgaatctaaattaacgctatcggcaactccgaagatggcatcaaagtcttctattagagagagtatccgtttggccattgtaccaactattgactctgtgaaaacgtatggacttgtatctattcctgggatgatgactggcttaattattggtggggtacctccattacaagccattaaattccaactattagtagtctttattcatacgacagcaacgattatgtcagcattaattgcaacttacatgagttatggccaattcttcaacgctagacatcagttggtagcgcgaaactcagatgtagcaggggatgaataa

SEQ ID NO: 1052 - DNA, 663 bp, Staphylococcus capitis
ttgctattaaaagttgagaatcttacatatgaagcggataaacgtacaatattaaacaacatcaatttaaatattgaaaaaggggataccatagcagttatagggccatctggaagtggaaagagcaccttatttaagcaacttaataatttaattagtcctactgaaggtgagctatatctagatggcaaaaattacaatgactattcgccagaagaattaagatcacgtgtaagttatcttatgcaacaaagtggcttaataggttcaacgattgaacataatatgaaattcccttgtgaggcaagaggggataagtttgataaggaaaaagcaaaacaacttattaaacaagtcggactgggagattatgacttagatgctgaaattgaacatatgtctggtggggaacgtcaaagaattacgattgcacgtcaattaatgtatgagccagaagtgttactattggatgaatcgacaagtgcactagatactaagaacaaagaaaatattgaaaatattatctttgattttgctaaaaaaggcgtagccattctttggattactcatagtgatgatcagagtatgagacattttaaaagaagaatcaccattactgacggtaaaatcactaaggacgaggagttgaatagtgatgagtaa

SEQ ID NO: 1053 - DNA, 792 bp, Staphylococcus capitis
atgagcaacgaatcacatgaaatacatcaacaaacaaatacaccagttatgaacgaatttgattcgaagaaaatagtgaagagagacttctggttaattccaatttatatattaaacttaacagcgatacctattatatgtggaattattggtgcctacattggttatgcaatagtaggtaacatgtcaaagaaaatatttgaagattattatatgaatgctgcaaccattggaagtgtaattggagcattcattttactaattgtgttttatctcatgcataaaaacaacattaaacctatagctatatcacgattcaaagcacttaagaaacatattatattaattataggatctatcatcatgatttatgtatttgaatctttttatcagattttaatgcagtttttaccggaaaagtttcaatttaatgatactgaaaataataaagatatagcgaaaatgtttacacatggatggttagtaccatttctttttctagatattgttatactcacaccttttgttgaagagttaatatttagacatttgattattcatgaattaggtaaaaaattaacttacgggctcatgtatatagtctcgatacttatatttgctagcttacattgtgtgggtgctaaatcaccatttgaaataggaccctatattatcatcgcgtccatgatcgtttttgtttatcacaaaactggtagaaatttagcagctaccattacgatgcatactataaacaatgctgtttcatttctaataatggtaatgggtttataa

SEQ ID NO: 1054 - DNA, 783 bp, Staphylococcus capitis
atgaatagagagacacaatcaatagagagaaaacgacatattcctttatggaacagtaaaaaggttgttaaaaaagacattctacttataccagcatatatattttgtcaaagtataatacctatcatcgtagtctttggaacactaggtattactgcaatgattacacagcatgcaccacctgactggttttacaacctttcattaagtataagctttgttctggcacaaggtttagtgctcatgctgttttttaccttacataagttttatattgccagtgtcgcaaggagacagtttaaaaacgctaaaaagtatgtacgtcaaatacttattgtagttataattacatttgtgctaatgttacttattgagtggcttgttcagtggctacctgcctcattaagatttggtgtaacacaatatgaacggcgagtggaaggattatttctacacccaatcgccttatgctttacgtttatatcaatggtaattttacgccctatgattgaacaacttatctatagacacatcattattcatgagttaggtaagaaatggaacaagaaaataatgattgtgatatcaattgttatcgaatctatagtacatacgtatgacatggcttctattttcgaaataattccgtatttacttattgcgagtggtgcaacttatttatacattagaacaggtcaaaatttagcagtagcctatctttaccaagtaggtgtgcaatgcttcatatttttagagatattgagtaaagtgtatatcttttaa

SEQ ID NO: 1055 - DNA, 1578 bp, Staphylococcus capitis
atgtctatattgacaacgatgcaatttatagtcaatatcatcataatgattgtgctattaggtattgttatcatgagtttaatttggctatttaaagataaaggtcaagatcaacatagtgtacttagaaattttccagttttaggacgtatccgttatatctctgaaaaaataggccccgaacttcgtcagtacttcttcgctgatgataatgaaggtaaaccattttcaagaaatgattataaacatattgttcttgcaggtaaatataactctcgcatgacgagttacggtactcaaagagaatataaagatgggttttacatacaaaacacaatgtttccattacaagcctcagaattacatgtcgataattcagatttaatctcaacatttttatatcaaattgaaaacgaacgattatttagtcgtgatgaacatagaaaaagatctcaaatcgatcctttcttcttatcagatgaacatgcagttgtcctaggacctgaacttaaacatccatataaagtaaaacgtttagtaggacaatcaggtatgagttatggtgcactcggtagaaatgctataactgctttatcaaaagggttatctaaagcaggcacttggatgaatacaggtgaaggtgggctatcagattaccatcttaagggtgatggtgatatcattttccaaattggcccaggactttttggcgtgagagataaagaaggacactttaataaagacatgtttttacaattggctgatcgtgaaaatattcgcgcatttgaattaaagttagctcaaggcgctaaaacacgtggtggtcatatggaaggcaataaagttacagaagaaattgctaaaattcgtaatgttaaaccccatgaaacaattaattcaccaaaccgttttgactttattaaaaatccagaagacttactcaaatttgttgatcaaattaagaatctaggtcaaaaacctgtaggatttaaaatcgtagtaagtaaagttgatgaaatcgaaaaactagtaaaaacaatggttcaactcgatacttatccaagttttatcactgtcgatggcggtgaaggtggcacgggggctactttccaagaacttgaagatggcgtcggattacctttacttaccgcactacccatcgtctcaggtatgttagaaaaatatggtgtcagagataaaattaaaatatttgcatctggtaaactcatcactcccgataaaattgccattgcgttaggtttaggtgctgatttagtaaatattgctagaggtatgatgattagtgttggttgcatcatgagtcaacaatgtcacttaaatacatgtccagttggtgtcgctacaactgatcctaaaaaagaaaaagcgctcatcgttgatgagaaacaataccgtgtgacaaattatgtaactagtttacatgaaggtctatttaatatcgcagcggctgttggtgttaatagtccgactgaaatcacatcagaacatattatttatagagagcttgatggagctactcaaaaaattaaagattataaacttaaattaatttcataa

SEQ ID NO: 1056 - DNA, 465 bp, Staphylococcus capitis
atgaaaaaagtgatttctcttatagcagtgttagttctaagtgtggctgcactttctgcgtgtagtaaggaacaaacgaagacatatgagggagacgttaatggtaagaatgtcattacgtcattaacatataaggatgacgaagtacttaagcaatctaccattggaacggttaaatatgatgatttaggaattgatcaatcacaagctaaagaaatgttaaaaaaagatgagaaagcttttaaaggcgttaaaggtgtaacgtataaagtcgattacaaagatcaaaaagctgtcgagcatatagatgtcgattataaagaagtagacgtagataaattgaaaaagaatttaggtttcgagtctgctaaagctaagaaaaaagattatgtaagtatgaaggaattagttaaacaattgaaacgtaatggtttgaaagagaaaagcaaaatgaatgatgaataa

SEQ ID NO: 1057 - DNA, 1077 bp, Staphylococcus capitis
atgtctgactcaaaggaactacttaaatcattaacagacgttaacggcattgctggacatgaaaaaaatgttaaatcactaatgaaagattacttaactcctgtaagtgacgagatcgttgaagataatttgggaggcattttcgggaaaaagcgtgcccaaaatggttcaaaatcattaatgatttcaggtcatcttgatgaaatcggatttatcgtgactcaaatcgataaagacggctatatttatttcacacctatcgggggctggtggaaccaagtgatgttatctcagaaagtaacaatcactactgaaaatggtaaagaaattagaggtattatcggttcaaaacctcctcatgcgctctcacaggaagaacgtaagaaaccagttgaaattaaacatatgtatattgatataggtgtagcaaacaaagaagaagctgaagctgcgggagtagagcttggaaatatgattacaccatatagtgaatttgaaacacttgcaaatgataaatatttaactgcgaaggcgtttgataatcggtatggttgcgcattagctattgatgtcctcaaccgtttaaaagatgacagtattgatatcaacttattcgctggtgccacagttcaagaagaagtcggtttacgtggtgctaaagtcgcagctaatcttatcaaaccagatcttgcaatagcagtagatgtcggcgtggcatatgatgttccaggtatgagtagtgagaagaatcaaggcaacttaggtgatggccctcttgttatcatgatggatgcaacaagtattgcacatgatggtttccgtaaacatattaaagaggttgcagaagctcatcatattcctgttcaatgggctacaactcctggaggcggtactgatgctggtagcattcatgtagccaatgaaggaattccgacaatcactattggtgtagcattaagatatatgcattctaatgtttcagtcatgcacacagatgattatgaaaattctgttcaactgattactgagatcgtacgctcgttaaatgacgacagctatcaatcattaatgtggtaa

SEQ ID NO: 1058 - DNA, 192 bp, Staphylococcus capitis
atgttttctaaaaatgatgataaaaagacaactatttttggagcaatgaaatgttctaattgtggcaaagaaatcaataaagatgaaaatcttacaatacaagttaaagcgaaagacttaaaaggttatacccatctagcaaattgggctgattcgcaatataaattatgtgaaaactgcgcccaacaatag

SEQ ID NO: 1059 - DNA, 819 bp, Staphylococcus capitis
atgaaacgtttagaaaacaaaattgtagtagtaaccggcgcaagtacaggtataggccaaggttctgcaaaggtcttagccaatgaaggtgcacatgtcttagcattagacatttctgataagttagatgacacagtgaaggaaattaatgaggctggtggtcaagctacagcctataaagtagatatttccgatgaacatcaagtagaacaatttgccgagaaagctaaagataaatatggtcgtatcgacgtgatatttaataatgcaggtgtagatcatggtgcgggtcgtattcatgaatatccagtagaggtcttcgataaaattatggctgtagatatgagaggaactttcttagtaactaagttcttattacctttaatgatggatcatggtggctctatcattaatacggcatcattctcaggtcaagcagctgacttgtatcgttctggttacaacgctgctaaaggtggcgtgattaactttacaaaatctattgccattgaatatggtcgtgaaaatattcgcgcaaacgcgatagcacctggtacaatcgaaacaccattagttgataatttagcaggtacctctgaagatgaagcgggtaaaacattccgtgaaaatcaaaaatgggttacacctttaggtcgtttgggtacgcctgatgaagtaggtaaactagtgacattccttgcttctgatgatagttcatttattacaggtgaaacgattcgtatcgatggtggtgtgatggcatatacatggcctggtgaaatgttaagtgacgatagttggaagaattcaacgaaataa

SEQ ID NO: 1060 - DNA, 1536 bp, Staphylococcus capitis
atgggggcaaatgcaaaggagaaaaagtctttcgtaagtaaatttttaaatggagtcgaatttgtggggaataaattaccagatcctgcggtactcttcttctttatgtgtgtaggactcgcaatcattacttggtttgtatcattattcaacgtatccgtaaaacatcctggtgatgggaaagtcatacatattaagagcatattaagccatgacggcttcgcttatatcatgaataacgcgattaagaacttttcagaatttcccgcactaggtttagtattaggcgtgatgattggaattggcgctgctgaaaagtctggctacttcgacaaattaatgatttcagtcgtgaacaaagcaccaaaaaagttaattgttccaacgattatattaattggcatattaggaagtactgctggagacgcggcaacaattatcttaccaccacttgcagcaatgttatttattaagattggctaccatcctatcgctggtttagccatggcctacgcttcagcagttggaggttttgctgcaaatttagtagtaggtatgcaagatgcactcgtctattctttcacagacccagcagcacgtattgtttctaaagacattaagacaaacgtggctatgaactggtactttatcgcagcaagtgttgttgtcttattaccaacaatccatttggttacgacaaaactcattattcctagattaggacgttatgatgaaagtcaggcccatgaagacacagaagaaacatcttctcatatcacaccacaagagaataaagcactcttttgggcaaacataagctttgtagtactcatcgttttactcattatatgcgcaataccagaacatagtttcttaagaaatgcgaagactggaagtctactcgacgatgcaccgttaattaatggtgtcggattaattattttagttgtgttcttagtaccaggcacaatttatggaatattaagtggagaaattaaaaatactaaagacttaggcagtatgatcgcagaatcattaggttctatggggtcatttattgtcatcgtattcttcgcatcacaattacttgcctttttagaatggagtaacttaggtgtcattgcagccgttaaaggtgctaaattattacaacatcaaaatggaatagttttaattataggaattattttactaagtgctttagtcaatatgttggtcggtagcgcttctgccaaatggggtattctagcacctatctttgtaccaatgctcatcttagttggattccatccagcatttacacaagcaatttatcgtgtaggtgattcaattacaaaccctatcacaccgatgatgccatatctaccgttattactttcatatgcacaaaagtatgataaaaatatgaaactcggtacactactatcaagtttgatgccttactctatcgccctcactattgtatggatagcctttacattaatatggttcctacttggtataccagtaggccccggaggaccaattaaggtgtaa

SEQ ID NO: 1061 - DNA, 1533 bp, Staphylococcus capitis
atggaagaaagaataggtttaatagacattggctcaaatacgattcgactcgttatttttggtttcactacagaaacaggactaaatgaaatcctcaacattaagacacctgcacgtcttagtcaatatttaacagaagacacaaaaatgaacgatgaaggtattgaagtgttaaaagaagcgcttcgtagtttcaagaaagttgctgacaagtttgatgttcaagaattacatcctattgcgacagcagcaatacgtcaatcgcaaaatagagatgacatcattaagcaaatcaaaaaagatttgaatattaaaattcaaattgtgcctgaagaagatgaagctttctatggatactatgccatttcacatacgacagatattgaaaatggtatttctgtagatattggtggcggatctacagaagtgacgctcttcaaagacaagaaacttaaagaggcacatagttttccatttggagtagtaacattaaaacgtcaattctttggcgacaaagaccataacgataaaccagccattaaaagtatggaaaagtttttatccgaacagtttaatcaacttgattggttaaaagatcaagaaattgcactcgttggtgtaggtggctctgcacgtaacgttgcgcgaatacatcaatcagaacattcctaccctattggtggcgttcataactataccatgtcacttaaagacatcgatgaagtatatgatatcatccgtaaaagctcacgagatgatttaactaaccttgatggcctaagtcgagatcgcgtagatattatcctacctgccgtctcagtgtttaaaacacttttcaagaaaattgatgctacacaattcactttctcaagaaacggtattcgtgaaggctatgttatgaacttgatacgtcaacatcaccctaatgaatttaaaagagataacgtacgtcaagatgcattaagacatcttgcgaatgagtataacattgaagaagatagtgcgaatcgtcgattaaaattagctcaatctttactggatcaactattaaaacacggtaatttgaaagtttcagctcaagaaaaagctttattcgtcgaaggtgcttacatttattaccttggtagctttatagattcagattcaagttcaccacatacttattacttaattgcgaattctatgattaatggattttctcataaagaccgtgtgaagctagcattacttgcaagttttaaaaataaatcattacttaagttctatgttaaagaaacagaatggtttagtggtaaggaagttgataccattcaggctttaggtggcatcattaaatttgtgaatgcgttaaatatttcacataccagctttgtagaagaagttaaacttaaagagaaaaaggacgataaatatgaactctatgtttactacaaaggagagcctattgcagaagagtatcaagccaatagacagaagaaacatatcgaaaagattttaaaggggaaagtttcaatcatctttacaaaatcttaa

SEQ ID NO: 1062 - DNA, 2166 bp, Staphylococcus capitis
atgcaaactcaattgggagaaaaggatattaatttaccacagtactataataacagggagttaagttggttagattttaactatagagtcttacaggaagcttatgataagaataatccattactcgaaatgcttaattttgtatctattttcagttcaaatttagatgaatttttcatggttcgtgtcgctggtttaaaagaccaagtgaaaatgggttatgacaaacctgaaaataaagctcaaatgacgcctcaagaacaacttgatgcgattaagataaagaatacagagtatgtacatatgcaatatcaacgctacaacgaacttattgaagagttacgtaattatgatattgaaatggttaaacctgattgtttatcagaaacgctcatagagaaacttgaaaaagaattcaaaatgcgtattctacctactctgacgccattaggtattgacgcgtatcacccatttccaaaattaaataacaaaagtttaaatatttttgtagatatcgatactgaagatgctattaattctgcaattgtacaaattccatctttaattcctcgctttttaacacttaacgaaggtaataaacaatatgttgtaatggttgaagatgtcattacatactttatcaactacctatttacaggatatgaggttttaaatacatttacttttagaattaccagaaatgctgatttaacgattcatgaagacggtgctgaagacttactgattgaaattgaacgctttttaaaagaacgtaaaagtggttcagccgtgcgtttagaagtcgatggacgtacagctcaaagagagaatatcgaatggcttaatgaacaattagaagtagaagaaaatgacgtatacttcttaaatggtcccttagatttaacatttttattcggcttagttgaccatctttcaaataaacttaaatatcttacttatgagaaatacacgccacaagtacctagatcattagggaacaataatatttataaattagctttagaaagagatattttcttccatcatccttatgaatcatttgagcctatcgtcgattttattcgtgaagcagctgacgatccaaataccattgcgattaaacagacgctttaccgtgtgagtaaagactcgccaatcatcaatagtctgaaagaagccgctgaaaatggtaagcaagttacagtgcttgtggaactaaaagctcgtttcgatgaagagaataacgttcattgggcacgtatgcttgaagatgcaggttgtcacgtgatttatggtatgacacaccttaagacacacagtaaaatcgcgctagtagttaaacgtattggtggcgaattaacatcatttgtacaccttggtacaggtaactataatgacaaaacagccaaactttatacagatatgggaatcatcactacaaatcaagaaattgcagaggatgcgattaacttctttaattatttaagtggttactctatcaaacctgaatataataaactgattgtagcgccatttgatattcgtgatgtctttatcgatcgcatagataaagaaatcagtaatcacttagaatatggaaacggtaagattatgatgaagatgaattctcttaccgataaagctattattgaaaagctctttgaagcctctcaagctggtgttaaaattcagcttattataagaggtatctgttgtctcaaacctggtgttcctggaattagcgaaaatattgaagtagtaagtattgttggacgtttacttgaacactctcgtatttactacttccataataatggcgacgaacgtatttacttatcttcagcagatgttatgacacgtaacatgattaaacgtgttgaaatcttgttccctgttgaaaataaaaccattggtaagcgtttagtcgattacatgaacttacaactttcagataatgaaaaaggacgttaccaagatgaaaatggtgtatatcactatgttaaaaacaacttgtcaccattaaattcacaagtatacttaatgcaaaaagcaatcaaatatggacaagagctcaagaaacaaactgcacaaccaacaggtcaacccgttcgttcaaaacgcggtggtagttggatgagtagattgaaagaatcgtttagaagataa

SEQ ID NO: 1063 - DNA, 1233 bp, Staphylococcus capitis
atgaatcaacgtcaattcgagattttaaacatgcttgttgaatttaacacggagagtcctccaggaagaaatacagacccattacaaaatgaaattgaattattattaagagatttaggtttctctattcagcgagaacacctttatgacaatgatagtatcattgtggccactttaaagggggaagaccctgaagcacccaagttaatattaaatggccatgttgatgtcgcgtctgtagatgatgatcaatattggcaatatcctccattcaagttaacagaagtggacggatggttatacggccgaggtgtcagtgatatgaaaggtggcatgtcatccttattttatgttttggaaaggttaaatcaagaaggacatcgtcctaaaggtgacattatcgtacaatcagttgtaggtgaagaagttggagaagcaggtacaaaacgtgcatgtgagataggtcctagaggggatttagccttagtattagatacgagtgaaaatcaagctttaggacaaggtggcgttatcacaggttggattattgttaaaagtaaaaatacgatacatgatggcgcccgtagccagatgattcatgcgggcggtggtttatttggtgcaagtgcgattgaaaagatgacaaaggtcattcaagcattaaatgaacttgaatctcattgggcagtgatgaaaaagagtccaggcatgccaccaggtgcgaataccattaatccagcagtgatagaaggcggtcgtcatccagcttttattgcaaatgaatgccgattatggattaccgtacattatttacctaatgagcgatatgaagatgttgttgaagaaattgaagattacttaaatcgcgtggctgaagcggatgtttggatgagagagaatccacttgagtttgagtggggtggagcatctatgattgaagacaagggagaaatcttcccaagttttacagtgccaatagaacatcctggatttaaacaactagaagatgcgcatcaacatgtgcatggcagtgcgttaagacatggcatgagtacgaccgtaacagatggtggttggattgcgcatttcgatattccaactatattatatggtccaggtagtctggaagaggcacatagtgttgatgaaaaggttgagaaacgtgaattagagcagtatagcgaagtgttatatgagtttctgaaacattggtatgagcaccctgagaagtaa

SEQ ID NO: 1064 - DNA, 693 bp, Staphylococcus capitis
atgtcagagttaaagaataaagtagcagtaattacaggagcaggtagtgggattggagaagctatagccaaagcgctaagccaacacggggttaacattgcgcttgctggaagaaatgaagaaaaactacaaaccgtggcacaacaacttgaaactgagacaaaagtcatccctacagatgtcactcaaaaagacagtgttgaccaaatgctacaagtcgttaaaggacactatggtaaagtcgacatcgttgttaatagtgctggacaaagtttatcatctaaaatcacagattatgacgttgaacaatgggacacaatgattgatgtgaatttaaaagggacgctttatgtattacaagcagcattaccacatttattaaatcaatcatgtgggcatattataaatattgcttctatttctggatttgaagttacgaagacaaatgctgtatacagcgccactaaaacagcaatccatactattacacaagcccttgaaaaagaactcgcacgtaccggtgtaaaagtgacaagtgtatcaccaggcatggttgaaacaccaatgactgaaggtaatgactttggcggacgtaaaaagttagatacacgcgacatcgccgatgcagttgtatatgcgttaacgcaaccaagccatgtaaatgttaatgaagtgacagtcagacctgtatag

SEQ ID NO: 1065 - DNA, 303 bp, Staphylococcus capitis
atgtcttatcatgatcgcgttctaaagttaagagaagaaaagcaccgtactgcatttgaatttcctttcgaagatttatttactaaagaagaatggttaaatatgtctataaaagaacgtcaaaaagaggaaaaagcttttagacatgaagttgagaagatggaagacgtgagattaccatttgccagtagagatgcagcaaagaataagttatttaatatcacttatgaatataatggtattaaaaagaactttaaacaaaatgataaaaaagaaaacccaagaggtcgtattactcaatag

SEQ ID NO: 1066 - DNA, 192 bp, Staphylococcus capitis
atgagaaatgtaattgagaatttaattaactctgatgtaagtagttacgaaatttatgtacacactggcgtaaatcaaggtcttataggtgatcttaaagatggatatttaacaattgactcaatcccttatattgatgccgagagattatattattatagtctagaacgtaaatcccttgttacaagttaa

SEQ ID NO: 1067 - DNA, 1908 bp, Staphylococcus capitis
ttgggggagtttaaaattagtaagttaatttcaattgttgttcctgtttataataaggaaccttttattgagagatgtgtacaatctttagtggatttagaaatggaccattcattaattgaagctatatttgtagatgatgtttcttcggatagatcttatgaaattcttcagtactatgatgataagtacgattttataaaatgtattcaattagaacaaaactctggaagtccagctgaacctcgtaatgtaggtatcgaggtggcaaatggtgaatacattgctttattggatgctgacgattggttagataaaaagggctttccgaaattagtatttcaaatgtctgaacatcattcagatattggctttggacaaagctttaggcataaagataaaaatgtttctaaaatggctcgtttcgcttcatataaggaagccaatggtttaattccatatgaaatcaatgaaatttttcgtgctgtgggtccaccaggtaaaatctttaagcgttcaacagtaatagataatcaaataaaatttcaacatatgaaatttggtgaagataaattattctttgcggaattaattagtaagtgtagaagtgcatcaatgacaactgaagctacctatcacgttaatcgctttacagataatgtctcattagttaaatctactgatgttattgaaaaatcaaaaatcaatttagaagttttacgtcaaattgttaatttagatattcctaaaatagctatggaaagtattttgagtcgtatagtagaagtggattacatgcaacgcttcttagtgactaaaacatttttaaaatctgataataaagaattctttttcaatcaattttctaaagtagaatccattattaaagaaactggatacaatgtggaagacttacttactatagatgagtataaaaatgtttatagtctttttcactcagataaagaagctatgcaagaatacatttattacaaaatttttgattctaacaaacaaaagtttattaaaaatacaagtgtttatttaaaatatcctgataaatataaccatttaatacctctacaagaagcgtgtatgcctgtgtataaaggtacagagatgatagatgatacattttatgaggtaattgaattatttactaaaccaagtgtagaaatcaataacgtagaattaattaaaattcgagacgaaagattttctaaatctgtgaattatgaacataaagataacttcatatatattaaaactgatgatttaatctttgatgaatttgattttaatattgctattaaatttaatctttacaaaacagcacttgtattcgctacttatcctaatttcaatgatgatgttagtctaaaccgtcaaaactttaagttagaatttataaataaacaatttaaaattgaggatgtcccaacaaataaactaaatgatactaagtatttaagcgaaaaacccaattttataattactaaaaaaactattaaaagttatattgatgcagattttaaagaagaatttaatactattaaaaaaggtagtttaattcccatatcagatatgagtcaatcatctaagggaacaatgagattaattactaaagataagcgattcattactgctaatgtaaattttgttaaacctactgaattgaaaaagaaagatggctacgtttctactattcctaaaagaattagagtattgaagaagtgtaaactttacactgacgttactttcaaaaacgaaccaattcaaacgatgcaacctaaagatgaattaaatattatcgatatcgattatacaaataattttactccaagattaaaaaccgttgatggttattacattactgctaatgttaagtttgtagaggtattacattaa

SEQ ID NO: 1068 - DNA, 870 bp, Staphylococcus capitis
ttgagacaaattaagaaagcaattatacctgcagctggcttaggtacgagattcttaccagctacaaaagctatgcctaaagaaatgttaccaatattggataaaccaacgatacaatacatagtagaagaagcctcacgcgcaggcatcgaagatattattatcgttactggaaaacacaaacgagcaattgaagatcatttcgataatcaaaaagaacttgaaatggtgttagaagataaaggtaaaactgaattattagaaaaagttcaatattctactgaattagctaatattttctatgtacgacaaaaagagcaaaaaggtttaggacatgcaatttattctgctcgtcaatttataggtgatgaaccgtttgctgtgcttctaggtgatgatattgttgaatcagatacaccagctattaaacaattaatggaagtatatgaagaaactggtaattcagttataggtgttcaagaggtgccagagtcagaaacgcatcgctacggtattattgatcctttatctaaaaaagaacgtcgttacgaagttcaaaagtttgttgagaaacctgaacaaggtacagcaccttctaatttagcaattatgggacgttatgtcctaactccagagatctttgattatttaaaaacacagaaaaaaggtgcaggtaatgaaattcaactcactgatgctatcgaacgaatgaatagtgaacatcaagtatttgcatatgactttatcggtaaccgctacgatgttggtgaaaagttagggttcgtaaaaactactatcgaatacgcactaaaagacgaaagtatgaaagatgaacttaagcaattcatcaaaaaacttaatattgattaa

SEQ ID NO: 1069 - DNA, 1359 bp, Staphylococcus capitis
atgtttggagaaatttggccactcataagtgttgtactcgggattgttatcttacttactttaattatattcttgaaattaaatacatttatttcattaatcattacttcaatcattacggcactattactaggaatgcctttaaataaaattatggaaacgattgaaaatggaatgggtagtaccttaggtcatattgcgctcatcttcggattaggagcaattttaggtaaactactagctgatggtggaggtgctactcgaattgcagatacgctcatcgctaaatttggtcagaaacatgttcagtgggctatgctcatcgctgctttcatcgtaggtattgcattattctttgaagttggtttagtactattaataccactagtatttacagtagctaagcgtgcaaatgtttcaatcttaaaattaggactaccaatggttacagcattatcagtaactcatggtttcttaccaccacatccggggcctgtcgtgatagcaaaagagcttaaagctaatattggtgaagtattattatacggtatcatcattgcaattccagtgacacttatcgcaggcccattctttaatcatatggctcaaaaaataattcctagtgcttatagacgcgaaggggatattacttcattaggtactcaaaaagaattcaaagaggaagaaatgccaagttttggtattagcttacttacagcaacattaccggttattttaatgttaatttctacaattgtgcaattagtgacaggtcatgaagatccaacaaactggtttgaacaaatcatttatcttataggaacagctggtacagcaatgttaattgcggttatctttgcgattttctccatgggtgtaatgaggcaacgtaagatggagaatattatggaatccgttacaaatgcaatttatcctataggtatgatgttactcatcattggcggtggcggtacatttaaacaagtgttaattgatggaggcgttggagacaccatcgctaaaatgtttgaaggttccaacatgtcacctatattgctcgcatggattgtcgcagctgtattacgtatcgcgcttggatcagctacagttgctgcggtctcaacaacaggaattgtaatacctttattacatcattcagatacgaacgtagcattagttgtgctcgcaattggtgcaggaagtgttatcctatcccacgtcaatgatgcaggtttctggatgttcagagaatactttggtctcacgattaaagaaacattcttaacgtggtcattactagagacaatcatctctgtttctggaattattttcatactatttatcagtttatttgtttaa

SEQ ID NO: 1070 - DNA, 1542 bp, Staphylococcus capitis
atgaaatatatgattggcgttgatatcggaactacaagtactaaatctgtactttacgatgaaaatggtcaatttataatgaaacataatattggttatgacttacatacacccaatgtagacgtatcagaagaaaatccagatgaattatttgatgcagtgttaatgacggtgaagtacatcgttcgagaatctggtatttcgaagaaagatattaagttaatttcatttagtgctcaaatgcacagcttagtggcaatggacgctcaaaataaacgtttaactgagaatattacttgggctgacaatcgctcaagtcgctatgctgatttaattgaaaatgaatataatggctttgaaatttatcagcgaacaggtacaccgttacatccaatgtcaccactatctaagattttctggatgaaacatgaacaacctgccatatataatcaaacagctaaatttgctgatattaagacttacattttctatcaattatttggtaagtatgtcatcgattattcaatggcgtcagcaactgggatgttcaacttaggacaattagactgggatgaaaaagcgctaaaactactaggtattagtagagaccaattaccagagcttgtaccaacaacccatatcttaactggcatgaagaaacgttttgccgagctcatggatattgatgaaaatactccagtggttgtgggagcaagtgatggtgtactttcgaatttaggtgttaatagctataaaaaaggtgaagttgcagtgactatcggtacatccggtgccattagaacagttataaataaaccacgtacagattataaaggtcgtatattttgttatgttttagatgatgaacactacgtcattggtggtccagtgaataatggtggagtgattctacgatggttacgtgatgagattcttgcaagcgaagtagaaactgctaagcgtttaggtgttgatccctacgatgtgttaacgcaaattgctagtcgagtaaaaccaggtgcagaaggtcttatctttcatccatatcttgctggtgaacgtgccccactatggaatgcagacgctagaggttcattctttggtttaacgctctctcataaaaaggaacatatgatacgtgcagcattagaaggtgtactttacaatttatacactgtatatcttgcgttaatagaagttatgaatgagacaccaaatacaattaaagcgacaggtggtttcgctaaaagtgagatttggagacaaatgatggcagatatttttgatactaatcttatcgtgccagaaagttatgagagttcatgcttaggtgcatgtgtactaggactgaaagcaataggggaaattgatgacttctctattattgaaaaaatggtaggaacaacgaacgctcatcaaccaaatgaagatactgtagcaatttatcaagagcttgttaaaatctttattaatataagtcgctctataactgaaagctatagtgaaatagcaaacttccaacgtaaacatataagcaattaa

SEQ ID NO: 1071 - DNA, 681 bp, Staphylococcus capitis
atgacttatggctatcctaaaaagtggatggaaggtttaacaaccggagagtctattgcagctgaaatacgtttaggaatcgtaagcggagaaatcttagctgacacattattaacagagaatcaaatagccaagcaatttaatgttagtcgctctccagttagagatgctttcaaattgttacaaactgaccaattaatacatcttgaacgtatgggagctcaagttttatcttttggagatcaaaagaaaagagaaatgtatgatttacgtctcatgcttgaatctttcgcattttcaagattaaaaggtcatgacacacaagcgatagctaaagaaatgaagaaacaattagaaatgatgaaagtggcggttcagtttgaggatgcagaggcatttacaaaacatgatttcgaatttcatgaagtcatcatttatgctgcgaatcatcaatatcttaaaacattttggaatcacttgaagccagtaatggagtcgctcatattactatctatgagacatcgaatggctacagacaaacaagattttgaaagaattcatcgcaaccaccaagtatttatagaagcaattgaacattatgatgctgagaaattaagagaagcgtttcacttaaactttgatgacgttggaaaaaatatagaaagtttttggttacggtaa

SEQ ID NO: 1072 - DNA, 873 bp, Staphylococcus capitis
atgattaagcagaattttacaactaaggtttatccactgaaacgatttaaagatgaatatagcgaagtcgcatacgcaggagatatgaattctaataatgtaattgtctttatccacggagcattattaacttataaaataatgacaatgttcgaaccctattttagagaatataaaatgatctttgtgaattgtcctagtagaggaaagagttctgatttagacagggatacacacacgcttgatgattactctgaacgtatttatgatgtcttaacgcaagtggttgaggaacaacaaattcacgaattaagtatcgtcggttattcaatgggaggtatgattgcaacgcgtctacttaaatacaatactctccccattactcatcttatttatttacatagcgcagctaaaattaccccagatgctagtatgctcgcgcgtctatttacaaataatagtaagagggatattttgaaggacgaagtgaaagcagttaaaaatcttcctcaatacatcttgaacaaaaccatttatgctcataaagagaatgcgttagatttaatacaatttgtcgctccaataaaaaccatcattaccgacatactctatactattaagacagattacttacccgatatagatgaaataaagcagttccctaaaatcatgttcatgtctggtaaagaagatcaaattattccatacacagattcacaagccacacttgaaaagtttaaacaactgggtggtgaaacaaaagaaatattatatccaggaataggtcatatcgattttcctagtgtgttggaaacaacttctaaagatcaaataggcgtagtagaccatattaaaaattggatttcgaattaa

SEQ ID NO: 1073 - DNA, 117 bp, Staphylococcus capitis
atggttttaattatgttaaattcaataaccactttattttggctatatttatataaaaattatttatatgttattattattttaattgatatattagaaatacgaggttatttatga

SEQ ID NO: 1074 - DNA, 696 bp, Staphylococcus capitis
atgtacgtagaaagaaagccttcattatatgtcgaagacttaagaaatgaattcaaaaatagtttaaataactttcaggatagtgaggcagcatttgatacactattaggctttgttgaactagaccatgtgtattcttccgcacttaaagaaattagtacgaagttaagtattttagatgaaaattttaattatcaatttaaacataatcccatacatcatatggaaagacgagttaaagaaatgcacagcttagttaagaaactaagtcgtaacgggcttgaagtgagtgcacaaagcgccaaagagaatatcatggatattgcaggtattcgagtggtttgtaattatttagatgatatttatgtgattgaacaaatgctactcaaacaagaagacgttaaattgttgaagcgaaaagattatattgaacatcccaaagaaaatggctatcgtagtttgcatattgtggtatccattcctgtctttttagctgatgctgtagaagtgacgccagtagaaattcaaattcgtacaattggtatggatatgtgggcaagtttagaacataagattcgatataagaatgacgcagacactgaaaagtataaaggattacttgaacaatgtgcgactgatattacaaatgttgaaagtaagatgcaacaaatccattcagagatatcgagtaattaa

SEQ ID NO: 1075 - DNA, 414 bp, Staphylococcus capitis
atgccttggacaatggacgattacccacaaagttggaaaaatttcgatgaacttgaacgtaagaaggcaatagacatcggaaatgctatgctaaaagatggctataaagaaggcgacgtgattcctattgctacacaacaagctgaaaaatggtataaagatgcgtctaaggaagcattagatgaattaaagaataaacatatcacacaacaccagaaagatcagtcagctaatccaaaattaaatgacgaaaatatacatgtttattacgaagacaatgaatggaaagttaaaactgaagatgctaaacaagcttcagatacattcgatcaaaagcaagacgccgtgaaacgtgcgaacgagattgctgacaataaaggaactaaagtcatcgaacataaaaaagatgaatag

SEQ ID NO: 1076 - DNA, 1956 bp, Staphylococcus capitis
gtgaatcacgtacttaattcactgacccgtgttgataaatctaaaattgattattataaagggttaagacaaggattattacttattatacctgctttaataggctatttttttggatttttcaattttggcttattaatatcaacaggtacacttgcacatgtctatgtgtttaaaggctcaacgcaatctatgttaagaacagttattatctgctcactgtcgttctcactttgtatgatgttaggtacgttaacgattatacagccgatagtatttggtcttatcttacttgttgtcgttgcggtaccgtattatatttttaatgcactcaaagtagctggaccgtcttctaccttcttcttagtaacatattgtttgcctattaatttacctcatgcgccagaagaagcattactacgtggcttaggcattcttattggtggtatattagcgacaataactgtaatgttaaccatcttatttaccaaagttaaagcagaagatagagcgattaacgcggattttgctacaattcataacttgttacatcattataatgaccctgaagcgtttaaaacatacgcgagaaatgctgtaactgaatttagaacatcggaaaagctccttatcacttctacatcaggtggtaatggaaagttaagttcacgtttccgaaagttaatactcctacatactgcagcacaaggtatctattcagagttactcgaattaaatgagaaaaatgttcgtcctattccacaagatcttattgaaatgatggatcatatttataatgaaatacaacaacctcgaacttcaagaccatggacaaagcctgtggacgtaccttcagaatttgaaaatttattgaatcatatattgaaaatcgatgaaatggtacatgcgaacgacaatcaaattgaacatgaagccgatattcgcaaaccactctatagtaaacgtatttatcaaaatttaacttttgattcaatcgtcttcagaaatgcgctacaatatacggttattatggctatagcaatatttattgcgctaggatttaatattcaaaaggcttattgggtaccactttcagcacatactgtattactctcaaatatgacgacaatccgttcacttgaccgtgcattagcaagaggaataggtacaattattggcgcccttattttgtcaggcatattagccttaaacattaatccgttaattgcaatattaatcatgggtgtttcagcagtgatgactgaagcgtttgttgcggcaaactatgcatttgctgttattttcattactactcaagtaattatgctgaatggtctagcttcgcataacttaagtatagaaattgcttatacacgtattatcgacgttatattaggtattgtcataactgttatagggatattcttagttgccagaaatacggcctcctcaatgttaccaggagcgattgcagaactagttcgtaaagaagccacgctatttcattatttattttctaaaaataaatacgaaacgaatgaagtagataagggagaacgtttaaatttaaacgtaaaaatcagcaacgtcactcaaatgtataattctgccaacggagaattgttcagtaataaagaggttgtgcgatattattatccaagtatctttgcgttagaggaaattagttttatgttagaaagagcgatgaataacaaacatcgtataactatcgatgatgagcaaatgggcgagtatctcttagcgtttgaaaatattgccaagcatttccaactacaaggcagtttagaggaaagagagttaagtcatttacctcaatataattatattcgatcagcattaattaatattcagcgtaacagtgttcacgcacgtaaagatatcacagaaaatgaggaagaacatcatacttcaaatgactctcaatcaaaaggttag

SEQ ID NO: 1077 - DNA, 291 bp, Staphylococcus capitis
atgattatcattaatgctaagattaaagttgatgaaaataaacgcgaagattacttacaattaatggctgacttagtggaacattctagacaagaaaaaggaaatttattctatcatcactatgaagatgtaagcgaagcgaatacatttgtggtggttgaaaattataaagatgaaaatgctgttgaagaacacaatcaatctgaacacttccaaacatttagccaaaatattagtaaatttattactgaggaacctaagatagatgtaagtcgaacagtagaaaaataa

SEQ ID NO: 1078 - DNA, 1272 bp, Staphylococcus capitis
atgaatgaaaaacgcagtaatgtacgctggtattttgcaattgggttctttctcatcggcgtaattgcatatatggataggtctaatatttcatatattgcagctccaatgatgaaagatttaggtatgacaaaaacacaatttggtttattagcctcatttttctcactaggttatgcatttatgcaagtgccttctggaatgttagctgagaaatttggtcctcgtaaaatgattactatagctctcgtatggtggagtgcattcacaattttgacaggtatgattaaacatcacggtttattatattttgtaagatttttattcggtgtcggcgaagccccaatgtacccatcgaatgccgtatttaactcattttggtttgctaaaaacgaaaaaggaagagcttcgagtgctcttctagctgggtcttattttggaccagtactagcaccgattatcacaattgcaattgttaatgcctttaactggcaagcagtattttatatctttggtgcagttggtattgttatggctatcttatgggcaatcattgctaaagatttacctgagcatcacaaaatggtaagtgaagcggagaagaaatatatcactgagcatcgtgatattgttgcaactgaaaagtctttaccaccctggaaacgtttcttaagtcactttagtttctatgcaattgcactacaatattttgtagtacaattcgttatcgcattattcttaatttggttaccaacatatttggctgagcaatatcatgtggatttcaaagatatggcaatcagttcattaccatggttgtttatgttcttcctaatactctcagctggagcaatctcagacaaaattttaaattctgggcagtcacgatttgtagcgcgtggtgcgattgctatcgctggatttgtagtgttctctgtatcaatctttttagcagttcatactgataacttatacatgacaattgtttggttatccttatgtttaggtggcgtaggtatttcaatgggtatgagctgggcagcagcgactgaccttggtcgtaacttctcaggcacagtgtctggttggatgaacttatgggggaacaccggcgcattaattagcccattacttgccggtatagtagtagatcaactaggttggtcaatgacattacaattattaattgttcctgcagttattgctgctattctatggttcttcgttaaaccagatcaaccacttgttgtagatgaagaacaatcaaattaa

SEQ ID NO: 1079 - DNA, 591 bp, Staphylococcus capitis
atgcacatatttatcgcaataacttacgataagacacttacaacacaagacttagaacacttcttaaatatcgaggaaggcattgatgccctattatttcgaacgtctatgctaaaaattgaattaaagaagattttgattcaactcattaaccaaggttttcctaaggataaaatgattattcatagtgacacggcattattagaagaattaaaccttagtcgtattcattttaaagaaaatgttaaaacagcttttgcatataaaaaattacatccagaaatccaagtgggtatgtccacacatagcatagatactatttatacatgtatagatgaaggacttgattatgttttttacggtcatattttccctactccctcacatccgcatgacacgccacgttcacatgatgaaatcgtagaagcattaaatctacctatacctatttatgctatcggaggaatttctgaacatacgatttcaaagttggaatatggatttgatggtatttgtgctatttcatttttcatgaatgcgtctttaaatgaaattaaggaattaagaaggaagtggtcacaacatgcatga

SEQ ID NO: 1080 - DNA, 1119 bp, Staphylococcus capitis
atgcatgatgtacttattattggctctggtgtcataggtatgtcaattgctagacagttaagcgcaacaaattatgacatcgcgatcattgaccgagatgttccaggtaaacatgcttcatataaagctggaggcatgttaggagcacaaaatgaatttactgaagataacgatttatataaattagccattgaatcgcgtgggatgtttcctaaattaagcgaatctttattaaatgagactggaatcgacatacagttcaaagattcaggacttattaagattgctaaccaagaagatgacctcgaatcactcacacgtcaatatgagttccatagacaaatggattctagtgtcaagctactatccaatgatgaacttatacagcttaccaatgcgaatgttgaaccagcttatggcgcaattcatatacctagtgatggtcaaatcaatgctaataaatacacgaaagctttgtttaaatctctacaacaacattacatcacacgatattatcaccaagaggttcaatcgattgatagaagaaatggctactacgctgtgtgtactgaccaaatgtcacctattgaagcacataaagtgatcgttgcaagtggtgcttggtcctctcaactattaaaaaactactctcttcctagagaagtcattggagttaaaggcgaagttctattactggaacatgatgaactagatcttaaagagacattatttatgactaatggatgttatatcgttccaaaacaacccaatcgtttcttaataggagcaacaagtgaatttaacaattactctgtaggcacatcagaaggcggtttaaattggcttttagatcatgcaagcgctcgtgttccagaacttaagaatagtcgtgtacttaaagaatggtcaggtgttcgtccttacacgaataatgaaatgccaatgatggatcaaattgatgatggcttgttcgttattacaggacactatcgtaatgggattttattatctcccgtaattggacgcgatatagcaaattggttaatttctggcattaaaccacctcgttactcaagctttagtgtgaaaaggaggagcaattatgaagtgtattattaa

SEQ ID NO: 1081 - DNA, 201 bp, Staphylococcus capitis
atgaagtgtattattaacggagactcattcagctttgaccaagaacaatcaatttatgatgttttaacagcactagaattagatcctaagcgcgttatcgttgaattcaataaagaattaattaaacaagataagtatcatgaacatactgttagagaatatgatcgattagaattattagaaattgttggaggcggataa

SEQ ID NO: 1082 - DNA, 768 bp, Staphylococcus capitis
atgtttaaaattggaaatttagaattacaatctcgtttattattaggtactggtaaatttgacaatgaagatattcaatcacaagcgattgcagcttcagaaaccaatgttttaacctttgctgttcgtcgtatgaatttatatgatcgtgatttacctaatcctttagctaacgttaacttaaaagactttattactttcccgaatacagcaggtgctaaaacagctgaagaagcaattagaattgctgaaattgctaaccatgcaggtgtatgtgacatgataaaggttgaagttattggcgatgacgaaacgttacttcctgatccatttgaaacatatgaagcttgtaaagtacttttagaaaaaggatatatcgtatgtccatatatctcaaatgacctcgtcttggcgaaacgtttggaagaactaggtgtacatgcagtcatgccacttgcgtcccctattggaactggtcgtggtattaataatccgcttaatttaagttatattattgaaaatgctaatgtaccggttattgttgatgcaggtatcggttcaccgaaagatgcatgtcatgcaatggagctaggcgctgacggtatattactcaacacagcgatttctgcagctaaagatcctgtgaaaatggctgaagcaatgaagcttggaattaatgcgggtagactttcatacgaagctggacgaataccagtaaaatatactgcacaagcatcaagccctactgaaggtttaggttttctataa

SEQ ID NO: 1083 - DNA, 999 bp, Staphylococcus capitis
atgtcacgctacgatagacaaacgagatttcacccttttggcgaagacggacaacatcaactctctacatcacaaatacttgtctttggtgctggagctttagggagccatatcatagaccagcttgctcgcatgggtgctaatcatcttacagttatagacatggacatcgttgaaacatcaaatttacatcgtcagacgctttatgacgaagaagatgcctatcatcttgtttctaaagttgaagctgtaaaaaataaggtgagtcaaatcaactcagaagtcactcttactgcttataatgttgaagtcacttcttcaaatattgaggatatagtaagtgagattaatccagacatcattattgatggaatggataattttaaagtgagatttctcataaatgaagtgtgtcataagtatgaaataccgtgggtctatggagcagctgttggtagtaaaggaactgtttacggcattgattaccaaggtccttgtttaaaatgtctcatgcaaaccatacctgagactggagaaagttgtgctattaatggtgttctcccacctattgtctcaattgtagcaagttatgaagtggctgaagtgattcgctacttaagtggaaaaggattttcaaagcaaatgattaccatcgatgcgtttgatcttagttataaagcgatgaacgtagatatattgaaaaataatgaatgcccagtgtgtgaaaaccatcaatatgacttattagaaacaaaacaagaaaatactattgagcaaatgtgtggtcatacgtacctatttagaatgcctaaacatgcatttgattactcaaatcatttccctggaaatattgtaaaagctacttcattcgctacacttatcaaatatgaaaattatgaatttactctatttaaagatggacgcatgaatgcttacggggttcatagtgatgaagaagctagtggtttatatcatactttaatcaaatctattcgataa

SEQ ID NO: 1084 - DNA, 615 bp, Staphylococcus capitis
atggaacagattattacagagtttattagtaagtggggctataccgctatatttattttaatcttattagagaacgtcttacctgtagttccttcagagattattcttacctttgctggtttactatcagtgaaatcccacttatctatatggacactattaattattgctactatagcttcgtttattggtctactcattttgtactatatttgtagacttatatctgaggaaaaattatatcgatttgtggaccgtcatggtaaatggatgaaattaaaaagcaaagatttaaaacgcgccaatgattggtttaaaaaatatggcgcatgggctgtcttcttatgtcgtttcgtaccagtattacgtgtgctgattactataccagctggcattaaccgtatgaatgtagttcaatttactatcctttccttattaggaacaacaatttggaatttcgcacttattttacttggacgcttattaagtgatagtttcggtgctcttatgaatggcattcatacatactcacgtatcatgtatgtcatcatcattatcgctattatttacttcgttatccgttacttcatgaaaagacgcaaaaatgttaaataa

SEQ ID NO: 1085 - DNA, 1965 bp, Staphylococcus capitis
atgactcctattactgaaagtgaaatgaaacaaaaatatttagatttactctctcaaaaatttgatagtgctgagaaattagcaacagagatcattaatttagaatctatcttagaattacctaaaggcacagaacactttgtgagtgatttacatggtgaatatgaatctttccaacacgttttacgtaatggttcaggaaacgttcgcgcaaaaatcaatgatatattcgaaaataaattatctcaacaagagattgatgacttagcagccttagtgtattatccagaagaaaaattaaaattagtaaaaaataattttgattccataggtaaactcaacgtatggtatatcactactatcgaacgtctgatagaacttattacatattgttcatcaaaatatacaagatctaaactacgtaaagctttgcctgaacaatttgtttatattattgaagagttactatataaaagtaatgaatttcataataagaagccctattatgaaactttagttaatcaaattattgaattagagcaatctgatgatcttattatcggtttatcatataccgtccaacgtcttgtagtcgatcatcttcacgtagttggtgatatttatgaccgtggaccgaaaccagacaagattatggatacgctcattaactatcattcagttgatattcaatggggtaaccatgatgtgttgtggataggcgcttatgcaggctctaaagtatgtttagctaacttacttcgtatctgtgcacgctatgataacttagatattattgaagatgcttatggcattaacttacgtcctttacttactttagctgaaaagtattacgacgctgagaaccctgctttcaagcctaagaaacgtcctgataaagatgcaagtttaaccaaacgtgaagaaagccaaatcactaaaatacatcaagcgattgctatgattcaatttaaactcgaaatgcctattattaagcgtcgcccttctttcgaaatggaagaacgtttagtattagaaaaaattgattatgacaacaatgaaattacagtttatggcaaaacttatccccttaaagatacttgtttccaaactgtagaccgaaacgatccggcgaaattactgcctgaagaagaggaagttgtagataaattacttctttcattccaacaatctgagaaattacgtcgtcatatgtcattcttgatgcgcgaaggtaaactttatcttccatacaacggcaatcttctgattcatggatgtatcccagttgatgaaaatggagaaatggaatctttcgaaatcgagggcgagcagttaagtggacgtgaattattagatgtctttgaatatcatgtacgcaaagctttcgaccataaagaaatcactgatgatatatctactgacttagtatggtatttatggactggtaagtattcatctctatttggtaagcgtgcaatgacaacatttgaacgctactttatagaggacaaagcttctcataaagaggagaagaatccatattatcacttacgtgaagatgttgatatgattcgcaaaatgttgaaagactttggactaaatccagatgaaggtcgtattattaatggtcacacacctgttaaagaaatcgacggtgaagatccaatcaaagctgatggtaagatgctcgttatcgatggcggcttctctaaagcctatcaatccacgacgggtattgctggatatacactgctttataactcattcggtatgcaattggtggctcatcaagagttcaatactaaagaaaaggtattatcagatggttctgatgagctatcagtgaagcgtgttgtagatgaagaattgcaacgtaaaaaaataaaagataccaatgttggtaaagagttacaagaccaaattgatatcttaaaaattctaatgcatgatagatatttaaaataa

SEQ ID NO: 1086 - DNA, 189 bp, Staphylococcus capitis
gtgaaaaataatattttgtactatcgtaaaaagatgaaaatatctcaagaaacattaagtaagaatcttggggtttctagacaaactatcaatgctattgaaaataacaaatatgacccatcattagtattagcgtttaaattagctaaacagttctcagttacagttgatgagttgtttacttattaa

SEQ ID NO: 1087 - DNA, 1785 bp, Staphylococcus capitis
atgtcattggacttacccattatgctgatgatagttctatttctagcattagggatttttagtcaatggttagcagatagaattaaatggccatctatagtagttatggcgattgttggtttactcgttggcccgatattaggtatcactaatcctaaagaagcgttaggatctgaagtgtttagtccaatcgtttccttagctgttgcaattattttatttgaaggtagcagtaatttagattttagggaacttaaaggaatttctaaagcggttattcgaatcataacagtcggcgcagttattgcatggattttaggtgcgatagccttacatacaatcctaaactttccaatctccgtatcctttgtcatgggaggactctttttaattacaggtccaactgtgattcaaccattattaaaacaagcgaaagtaaagaggaatgttgactctatattaagatgggaaagtattattctcgacccaattggtccgatgcttgcattgacagcattttatatcttccaaattattgaacaaggtataagtttcattgttattctcatattcgtactgaaaatattagccgttgtcgtaatcggctttggtgcgtcatatttatttaattggttcatacgccaagatatgattccacaaaatttaatgccacctatccaattcgtttttattctcttaacatttagtgtttgtgatgcaatattatcggaatctggattattagcggtgacaatttttggtttaataatggcacgtaaaaaacgtcatgatttaatctttaaagaatcagatcatttcatcgataatgcatcttctatattagtaagtacagtctttattttaatcacgtcatcacttacgaaagatgtattacttaatgtagtatcatggcaactctttattttctgtattgtcatgattgtcttagttcgacctatttcagtgcttttctcaacatttaaaactgaaatttctaagaaagaacgagcgattgtcgctatgatggcgccaagagggatagtcgtattaacagtggcccaattcttctcaggattatttatggatgacaaagtagctatggcgaaatatatcacgcccgtgacattcggcttagtatttattaccgtggtcatttatggctttagctttacaccattaagtaaattattcggtgtcgctagtaatgaaccaccaggtgtaattatagtaggtgagagtgagttctcattccacctaggcgtgaatttacgagatcatgggattccagttatgatgttcaatttatttgaaaatacatctgagaaagcacatgaagcgggatttgaagtcttcaaaggtaatttattatcaagtaatgatcgtatttattccgacttacttcgatataataaatgtatcttaatgacacagtcatttattttcaatagtctggcatttaatgaattagtaccagaattcggtttaaataatgttgatatgatgcctgtttctttcaatgatgaacaggcgagaaataacttgagtggtccgattcgtaatcatattttatttgatgaaaatcacagtccacgctggtttaataattacattacacaacacaatatagtagaagtgccagcagaagagtaccatgaacttacagataaagacatgttgatttactacattagtgaagataaagaagtcacattcaaacgtagtaatagagaattaccagaaaatgacacaggggtttatggtattttaagagatgcccatgcatga

SEQ ID NO: 1088 - DNA, 1050 bp, Staphylococcus capitis
atgaatactgttaaagaatccatcatcgttgccttcgctttcgttggcgtggtcgttggcgctggatttgcgacaggtcaggaaatatttcaatttttcacaagtaatggtatctatagtatcgctggaattatcattactggtcttatcgttactttaggtggaatatttgttttaaacactggcttccgtcttaaatctcaaaatcattctgaatcaatcaatttctatttacatcctttgattgcaaaagttttcgatatcatactgactatatttttattttcacttgctattattatgacggcaggtggtgcatcaacaattaacgagagctttggcatacctttttggctaagttctttaatcttagtagtgctaatattactcacgttgtttttacagtttgatcgattaattgctgtacttggtggggttacacctttcctagtcgctgtagtagtaatgattgctgtgtattattttgttactggtcacattgattttactgccgcgaatcaatattctaataacaataaatcaatttctccaggttggtggttcgatgcaatcaactacgccagtctacaaattgcagctgctttcagttttctaacagttatgggtggtaagttgaagtttcagaaatcgactgtttatggtggcttaattggtggtctcatcattactttcctattgctaatgattaatctaggattaattactgagttcgataaaataaaacatgtggcattaccatcgctactcttagcaaaacagatttcaccttctatcggcacaattatgtctgtgatcatggtgttagtaatatataatactgttgtaggtctaatgtatgcatttgctacacgttttagccaaccctttacaaaacgttattttagtttaattattatgatggctatcattactttcatttgtacatttattggatttatctcactgattggtaaggtattcccaattatgggactatttggttttattttgcttatccctgtcatatataaaggttttcttagacactaa

SEQ ID NO: 1089 - DNA, 1425 bp, Staphylococcus capitis
atgacaaatcaactatttattaataatgaatttatcgagagtcaatcgaatgaaacgatggatgtgattaatcctgctacaggggaaaaattcgatacaattacatttgcgactaaagaagaagtcaataacgcaattgaaaaatctaaacatgctcaacgtgaatgggaacgcgttcctcaacctacacgtgccgaacatgtaaaattactcattccattattagaacaaaatcgcgatgaaatagcacaattatatgtgaaagagcaaggaaaaacgttagctgaagcttatggtgaaattgataagtctatcgcatttattgattatatgactagtttaagtatgagtaataagggcgaagtacttcaaaatagcgtagaaaacgaaattatccaaattacgaagaaacctattggtgtcacagcgggcatcgtcccttggaatgcccctattatggttttaatgcgaaaagttattcccgctgttgttacgggatgctcagtcgttattaaaccaagtgaagaaacgacacttttaacattaaaattagctgaactattccgtgcttcaacaataccagctggattaattcaaattgttccaggcactggcgaaacggttggaacacaacttgcaacgcatgaagatattcaactcatctcacttacaggtagtatgcgtgctggtaaatcagtatatgaacatgcagcacaaacagttaagaaggtaaaccttgagttaggtggtaacgcacctgttatcgttacacctcatgcggatatcgacaaagctgtagactatattgtcacagctcgtattaataacgctggtcaagtgtgcacatgccctgaacgtatctttgttcacgaagatgttcatgacgaatttattgaaaaggtttctaacaaaatgagtcaattaactgtaggagacccactcgatgagaattcagattacggagctattattaaccaaactcaactcgatagtattcatgaaaaagtcgaaactgcagtgacaaacggtgccaaattagtattgggcggacaaaaattacaacgtgatggtttcttctacgaaccaactgtattagatcatgtaaatcctgaagatagtgtatttaaagaagaaatattcggaccagtcctagcggttacaacgtataacgacttcgatcaagtgattgatgacgctaatgatacaaatgctggtttatcttcatatattttctctgaaaactttaaagaagtaatgaccgcttcagaacgtttaaaatttggtgaagtttacgccaattgtgaagcagaagaagtagtgaacggttatcacgcaggatggcgcgaatctggtttaggaggcgctgatggtattcacggctttgaagagtactataacactacagtaagttatttaagatattag

SEQ ID NO: 1090 - DNA, 954 bp, Staphylococcus capitis
ttgaaaagaaaggcaattatctttattacgttatcattaattttaatattaagtggatgtagtaagagtataaattctagcaaaaaagacaatgtcaatagtcacaaaaaaatgaaaatatatacaaccgtctttgcatttcaaagttttatagaacaaattggcggtaaatacgtagatgtagaatctatttatcctccaggtgctgatttacattcttatgagcctacgcaaaaagatatgattaatattgcgaaaagtgatttattcatctattctagcgatggcttagacccagtttcagctaaaataactcaatcaatggaaaataaaaatatgaaattagcccttgcaagcgatttaaatcaaaaagaattaatccattccgatgatcacgatgaagatgaaggtcataatcatgctgaaactgaaaacgacccacatgtttggctagacccagtattagatcgcattttcgctgagaaaatcaaagataagcttattcaaaaagatcctaaacataagtcatactatgaaaaaaactataaaaagttagataaagatgtcgcaaatatcgataaaaagatgcaaaaaatcactaaaagccctaaacgtgaaaaaattattatttctcacgattctctaggctatcttactcatcgttatcattttaaacaagaaggcgttaatggaatgaatgatgaagaaccaagtcagaagaagatattgagtatcgtgaagaacatcaaaaattccaagtctccttatgtattatatgaacaaaatattacttctaaaattacagatgtgataaaaaaagaaacagatacccaacctttaagtttccataatttagcagtacttactaaaaaagaaaaagacaatcagtcaatcacttatcaatcactaatgaaaaaagatattgaatcgttagacaaagctttaaatcaataa

SEQ ID NO: 1091 - DNA, 282 bp, Staphylococcus capitis
atggctgaagaaattaaacaaggcgatcataaattttatgtgggagaagatgagaataatccacaagcagtaattactttcaaagaagtagataacaatgaaatcgatattgaccatactggtgtatctgatgaactaggtggtcaaggtttagggaaaaaattagtgaatagcgttgttgaatatgcgcgtaataataatttaaaaatcattgcttcttgcccatttgctaaagatgttttagaaaaagacgaccacgcgcaagatgtatatttaggctaa

SEQ ID NO: 1092 - DNA, 810 bp, Staphylococcus capitis
ttgcatacctttcactcatcagaagcaacgcaagttacaaatatcactctgaacgttaaagatttaaatacaatgactgacttttactctaatgttttaggttttacaatcaataaacaaactgagcaacaaaccattttttatatcggtaaacatggacatacattaactttgaatagattgattgatggtcgtcaacctggatttagagaagctggattattccatatcgcctaccttctcccttcgcgtgttgacttagcaaacttcctttatcatactagccaactcaatatcgcggttggtggtggcgatcatcttgtaagtgaggctttatattttaatgatccagaaggtaacggcattgaggtctatcaagaccgtcctgatgaaggatggcaatggagtgatggatttgtcaaaatggatacactacaagttgatgccaatgatttaattgctcaacgttctaaagaaggatggcaaggttggccagaagatgggataattgggcatttacatcttaaaacacatgatctaggacaagcacgcgcattttatattgatgatctagggttagaacaaatttctaatttcccccaagcactcttcatgtccacgcagaaatatcatcaccacattgcggtgaatacttggcagtcaaatatagcaagaacacataatcaactatcatatggattaactcatgtagatatatatcaacctaatgcagagattaaacatttaacatcaccagaaggctttgacattaagattcatggtgataaaaatttagtgttaaacacataa

SEQ ID NO: 1093 - DNA, 1494 bp, Staphylococcus capitis
atggcaaatattaacgtaagagattatatcgacgaaagttatggcttatttatcaataacgaattccaatcaagtggtagtggagaaacattaacagtaactaacccagctaatggcgaagacttagctaaagttgcaagagctggcaaagaagatgtcgataaagcagtgcaagctgcacatgatgcttttgatagctggagtaaaatttcaaaagctgaacgcgctgattacttattagaaattagtcgtcgcattcatgaaaaggctgaacatttagctacagttgaatcattacaaaatggtaaaccatatcgtgaaacttctacaattgatgtacctcaagcagcaaatcagtttaaatatttcgcaagtgttttaactactgatgaaggtacagtcaatgaaattgacgaaaacactatgagtttagttgtcaatgaacctgtaggtgttgtaggtgcagtggttgcatggaacttcccaattttattagcttcatggaaattaggaccagcattagctgcaggtaacacagtggttattcaaccatcttcttcaacgcctttatcattaattgaacttgctaaaattttccaagaagttttacctaaaggtgtagtgaacgttttaactggtaaaggttctgaatcaggtgacgctatctttaaccatgaaggtgtagataagttatcattcactggttcaacagatgtaggttacggcgtagcaaaagcaggagctgaacgcattgtacctacaacattagaacttggtggtaagagtgccaacatcatctttgatgacgcgaatttagaacaagttgttgaaggcgttcagttaggaattctatttaaccaaggtgaggtttgtagtgcaggttcaagattgctaatacaatcttcaatttatgacgaattattacctaaactaaaagaagcttttgaaaatatcacagttggtgatccatttgatgaaaatgtaaaaatgagtgcgcaaactggtccagatcaattagaaaaaattcaaagttacgtaaaaattgcagaagatgatgataaagctaatatcttaactggtggtcatcgtattacagacaatggattagataaaggttattatttcgagccgactattattgagttaaaagataataaacacaaattagctcaagaggaaatctttggtccagttttagtagttgaaaaatttgatgatgaacaacaagcgattgatatcgcgaatgactcagaatatggtttagctggtggtattttcacaactaatatcaaccgtgcattaaatgtttctaaagcaatgagaactggtcgtatttggattaatacgtataaccaaattccagcaggcgcaccattcggcggctataagaaatctggtattggtcgtgaagtttataaagacgcaattaaaaactatcaacaagttaaaaatatctttattgatacaagtaaccaaccaaatggtatgtattaa

SEQ ID NO: 1094 - DNA, 651 bp, Staphylococcus capitis
atgaatcaaacaatcattgatgcgtttaaatttagacacgctacaaaacaatttgatccgtctaaaaaagtgagtgatgaagattttgaaacaattttagaggcagggagattatctccgagttctctaggtttggaaccgtggcattttgttgtagtccaaagtgaaacattaagagataaacttaaaccatacagttggggtgctcagaagcagttagatacagcgagtcactttgtattgatatttgcacgtaaaaatgtaacttctcaatctgaatacgtccaaaacttaattcgtggtgttaaacagtacgaagaaagcacaattccagcagttaatgaaaagtttgataatttccaaaccaatttccacattaatgataatgaacgtacattgtatgattgggctagcaaacaaacttatattgcattaggtaatatgatgacgactgcagcactcttaggcgttgattcatgcccaatggaaggatttgacttagataaagtgactgagatattagctgatgaaggtatcctagatactgaacatttcggtatttcagtaatggttggtttcggttatagagctgaagaacctgctcatggtaaagttcgtcaaaacaaagatgacgttattagctgggtataa

SEQ ID NO: 1095 - DNA, 993 bp, Staphylococcus capitis
atgacaagaattatgtttttcggtacacgcgaatatgagaaagaaatggcattaaactggggtaaaaagaataacattgaagtaactacttctactgaacttttaagtaaagatactgtcgaccaacttaggatttatgatggtgtaactaccatgcaattcggtaaattagaagttgaagtttaccctaaactcgaagcatacggcatcaaacaaatcgctcaacgtactgcgggattcgatatgtacgatttagatcttgctaaaaaacatggtattgttatttctaacattcctagttattcacctgagactatcgcagaatattctgtttctatcgcattacaacttgtacgtagattccctgcaatcgaaagacgcgtacaagatcacaactttacttgggcggcaccgattatgtcacgtccagttaagaatatgacagtcgctatcattggtacaggacgtattggagctgccactgctaaaatttacgcaggatttggcgcaaaggttgttggttacgatgcttatcctaatcattctttagacttcttagagtataaggattctgttgaagaagctattaaagatgcagacatcatttcattacacgtacctgcaaacaaagaaagcttccacttatttgataaagaaatgtttgcgaaagttaagaaaggtgctattttagttaacgctgctcgtggggctgttattaacacacctgatcttattgatgcagttaacgatggcacattatatggtgctgcaatcgatacttatgaaaatgaagccgactactttacatttgattggactaacaaaacaatcgaagatcaaacgcttttagagcttattagacacgaaaagattttagtcacacctcacattgctttcttctcagatgaagcagtacaaaacttagttgaaggcggcttaaatgcagcgttatcagttattcaaactggaacttgtgaaacacgtctaaactaa

SEQ ID NO: 1096 - DNA, 804 bp, Staphylococcus capitis
atgatacgcgcaattgcagtagatatggatggcacttttttagattcaaataagcaatttgatgaggcacggtttgaaacaatttttaaaaaattaaagaagcataacatacaatttatagctgcaagtggaaatcaatatgcgaaattgaagtctatctttggcgttagagatatgttctttatttctgaaaatggggcagtcatatataatgggaataagttgtacaactaccgaagtttcaatagacaagattttcaagacgttgttgattatttaagcagtgaccacaagatggatgaactcatcatatgtggtgtgaaaagtgcgtatattttaaaaagtacccaagcaacttttaaagaggacgcgcatttttattatcatcaattagaagaaattgattcacttcaacatttacctgaagacgattatgttaaaattgctttcaatatcaatcgagatactcatcctcacttggatgatgagttagagagagcttttaaagatacaattaagctagtctcaagtgggcacgatagtatagatgtcattatgcctaatatgacaaagggtcaagcattaagacgattacttactgaatgggggatgtcgtctactgaattaatggcatttggagatgctaataatgataaagatatgctagaactcgcacaatttagttatgttatggaaaatagtaacgacgcatcattatttgaattagcgagtggtgtagcaccatctaatgataaacaaggtgtattaactactattgaagaagtagttctaagtaacatatga

SEQ ID NO: 1097 - DNA, 612 bp, Staphylococcus capitis
atgaaaaaatggacgagtcgattaacgacgttcattggtgtcttattaatattattagcaatatatttatttgcaaagccacatattgataattatcttcatgaaaaagataacgacaataagattgagaaatatgacaacgatgaaaaaaaggatacctcgacgaaacaaaagacacctacaattccaaaggataaatccaaaatggctggttatattgaagtaccagatgctgaaattaaggagccggtttatccaggacctgcgacactagagcaacttaatagaggtgtgagtttcgctgaaggtgatgaatcattagatcaacaaaatatttctatcgctggtcacacatttactgaccgtccgcactatcaatttactaacctaaaagcagctaaaaaaggaagtaaagtatattttaaagtaggtaatcaaacacgtaagtataaaatgacaaaaattcatgacgttaatccatcagatgttgaagttttagatgaacaaaaaggtaaaaaaaatcaattaacgttgattacttgtgatgattataatgagaaaacaggtgtctgggagaaacgaaaaatattcatcgcaacacaagtgaattaa

SEQ ID NO: 1098 - DNA, 492 bp, Staphylococcus capitis
atgattagacatgctagaaaagaagacctgccagatattcttaaaatttataatgacgccataattaatactactgcagtatatacatatgatcccaaggaattagaagaacgactacagtggtttgaaacaaaatcaatagccgaagaacctatatgggtatatgttaaagaccatcatgttataggttatgcaacatatggctcttttagagattggccagcctatctttattctattgaacattcgatttatgttgatcccgactatcgtggtcaaggtatagcttcaaagttattagaaatactcattcaagacgcaaaggccaaaaattatcgaacaattgtagcggggatagatgcttctaatgtaggaagtattgagctacataaaaaatttaatttcactcacgctggaacaattaaaaatgtaggatataaatttgaaagatggctcgatttagcattttatcagcttgatttacatcaataa

SEQ ID NO: 1099 - DNA, 177 bp, Staphylococcus capitis
atgctaagattattccttatctttctagcattcatcattaacacaacgataacttatttatggactacagaggggacatgggtcaacttattatttaaatcattatcattaagtatgattctcgtttttatgttctactatattcgttttgttattgaaaataaaaacaaagaatga

SEQ ID NO: 1100 - DNA, 900 bp, Staphylococcus capitis
atgtttgattcaattagagagacaatagattattctgttgaacatgacatttccttcgctgatatcttgatcaacgaagaaatggaaagagaaggtatatcacgcgacgaagtacgtgaacgcatgaaacaaaatcttgaagtgatgcgtgatgcagtagaaaaaggtactactggagacggtgtagaaagtgttacaggttatacaggccatgatgcggcaaaacttcgtgattacaacgaaaacaatcatgctttatcagggaaagaaatgattgaagccgttaaaggtgcagttgcaacaaacgaagtgaatgcagcaatgggtatcatctgtgctacacctacagctggttcctcgggaactatacccggagttcttttcaaattagagaaaacgcatgatttaactgaagatcaaatgatagatttcctatttacttcagcattatttggacgtgtagttgcaaacaacgcaagtgttgctggtgctacaggcggttgccaagcagaagttggttctgcgtcagcaatggctgcggcagcttctgtagctatctttaacggtacgccagagcaatctggtcatgcgatggcacttgcgataagtaacttattaggtttagtttgtgatcctgtagcaggactcgttgaaattccttgtgtaatgagaaatgctattggttcaggtaacgcattaatttcagcagaccttgcattagctggcgttgaaagtcgtattccagttgatgaagttatcggtgcgatggacagagttggtcgtaatttacctgcatctcttcgtgaaacaggtttaggtggtctagctggtacaccaactggtgaagaaattaaacgtaaaattttcggtgaagctgaaaatatggtaaataataaataa

SEQ ID NO: 1101 - DNA, 681 bp, Staphylococcus capitis
atggctaaaagctatgattaccaaagtgcttttgacattattggaccagttatgatgggaccatcaagttctcatactgctggtgcagttaaaataggtaactcagcacgtgctgttttaggagacatgcctaaaactttagagattcattattatgaatcttttgctaagacgcaccaaggacatggtacagacgtagctgtagttggtggtgctatgggctatagcaccttcgatagccgaattaaatcagcattagatatagctaaggatgaaaatattgatgttgatatcatcgaagaagatggagaaagtatcggtcaacatcctaactgtgcttatattaaggcgaactctgaaagtggacgtcacattgaagtcattggtatttcaattggtggcggtacaattaaacttaaaggcattaacgtcaatggcttagaagttgaaattaacaatggacttccaatgttagaaatagacggcgaaatggataaagctcaggtgaatcacttaatcaacgacatgacagatatggaaattgattttggtgatgaaactgtcaagacgagcgacaataatggtctagttgtattacctttaaataaagcaatctcagaatcaacattaaacaaaattagagaaaaatacagtgacttaaacgtttcctatatcaattag

SEQ ID NO: 1102 - DNA, 1044 bp, Staphylococcus capitis
atgaatataatcttaggagtagggacactagtaattgtacttatcatcatgacgctgttcttaaactttgcgccatatggtaaacaaggtttacaagctttatcaggggcagcttgtgccacatacttaccacaagcattcttaagttatgctatcggtggcgtgttccacattaaattttttcaagaaattggtgacttagcagggagtttaagcggaattgcagttggtattttaacatgtttaaacttgggtgtatctccagtttttgctgttatcgttggtttagttttacatgattcaaaattattgccagcatttatagcagcatatattattgcttttgggattaaattgatagagaaaaaagttccagaaggactagatttaattgttgtaattttattggctccagcaattacatttggtttagcaaatttaatttcaccaggggttatcgctgtacttaaacaaattggttcagctatctcatctgtaggtaatgataatccttatgctttagcagttatattaggactagttatacctgtaacaggcatgacgcctttaagttcaatggtcttaacaagcttattagggcttacaggtataccaatggcaatcggtgcattaacatgtactggtgcttcattcgttaacgcagtactattcagtagactgcatattggtaagaaaaccaatgcgttcgcagtatttatcgaaccattgacacaaatagatttaattgcaaaatatccactacaactttatggtacgaatgccatcatcggtgttgtaaatgcttgtatcgttacattcagtggactagtaatcaatgtaaaaggtatggctacaccgatcgcaggtgcgattgtattatttggatttaataatgcagtgacttctatcataactatcatcacagtgggtatagtaagtgtagtactagcattcgttatgagttcaattatcaagaagtttaacttaatgaatattagtttcaaattaccagggaaaaagaatcgagttaaggagagtgtttaa

SEQ ID NO: 1103 - DNA, 798 bp, Staphylococcus capitis
atgttaattttgaaacaagaattgtgtgagtttctaagccgtatgtcgccacgaacgtttgcgtatatgaatgaactcgactatcctaatttattacttgaacttgaacaccaagatattacactacccactacataccaacttcaaaggtcaattcaattccctcaatatcaaccaccttcgcatcaagtaaataatcagtttatcaatctaagagatgaagctgaaagtgatattaatgatgaaaagttacgttttttacaattctatcctgtcaaccagcacagtgaaatgttgagtgcatactctagaatgacccaattaaaaatcaaaacaactgttaaaccacttaaattatcattcccattagatccagatacattaactgataaactcaaccttccacctgctcatgaaaatcgcgacattcctttactcctatatatgcttcaaaaactactttcagaactcaaaaaatgcaatttaaaattctctattcaagataatattatagaaatcatctatcccagtcatattgttaaagtcttcattaatttatataaaaacaatcaaagcatctatcctctacaaatatttgttagtgcttactgtagatacgcaccatttattgagcaaatgaaatcaatatctatgtctacatctaaagaagtgttaacaaatgtagacaaacttttcttacttatacttgaattaccagaaagacttacaagacaagaattttcattgagtcaaaagaattatgacttagccgaaaaattatttttcattaaagggtaa

SEQ ID NO: 1104 - DNA, 1488 bp, Staphylococcus capitis
atggaagaagttgttttaggtattgatttaggaacgagcgcaattaaaattatcgcagtcaatcgccaaggcgaagtattggagactgtaagtgaaccattgaaattatttcaagagcaacctggatatagtgaacaagaccctaatgaatggtttcaagctactaagcgtggcgttaagcgcattatctcttcaaatgctttaaagaataaagctgtgaaaggtctttcgttctcaggacagatgcacggtctagtcgtcttaaataaagaaggacagcccttacgcaatgcaatactctggaatgatactagaaattcggaacagtgtcgtcaaattaaagaagtgtatggtgagagactcaactataacccaatattagaaggatttacattacctaaaatgttatgggttcaacaacatgagcctgaaatttgggaacaagtgaatgtatttatgttacctaaagattatttacgatattgtttaacgaatcaaattaatatggaatacagtgatgcggctagcacattattattaaatcctaaaacaaatttgtggacaaaagatgtgggctcaattttcaatatccctgatatttatccatcattagtcaattcacatgaatgtgttgggtacgttagcgaattactggcagatgaactaggtttaaagcatcaggttgctgtatttgccggaggtggggataatgcctgtggagctataggagctggcgtgattaatgataaagaggcattatgtagtataggaacatctggcgttgtattaaatgttgaacataatcatgttacagagtatgatcagaatttacatttcttcaatcacagtattcctaatacgtattatgcgatgggagttacattagctgcaggttatagtttgaattggttgaagaccacattctttgaaaatgactccttcgcccaaattttagattctgctgaaagtgccaaactaggagcaaatggcttattatttgctccttacttagctggtgaacgcacgccacatggggatgcctacattagaggtagttttatttgtattagtggacaacacaaaaaagcagattttgcacgtgcagttatagaaggtattacttattctttatatgattcaatcaaaataatgcgagaagcaggacacgaaatcaattcaattacctcaattggtggaggggctaaaagtaagttctggcttcaacttcaagcagatgtttttaatatgaaagtgaaaaaattaaaacatgaagaaggtccaagtatgggagcagctatgcttgcagcatacggactaggttggtttgaaagtgtagctgattgtgttgagacatttattaaagttgaagaagtttttaaacctaatgccgaaaatcataaacgatacgaacaattccataatgtttatcaacgagtctataagcaaacgaaagaactaacaaaggaactgctagcgattacaaagtaa

SEQ ID NO: 1105 - DNA, 924 bp, Staphylococcus capitis
atgagtagaaacaaggtagttatagtaggttcaaccaatgttgataaatttattaacgtgacgcgttttcctaaaccaggagagacattacacattgatcaagcgcaacgagaatttggtggaggaaagggtgctaatcaagcgattgcagctggtcgtctagaagctgaaacaacttttgttactaaagtaggtaaagaagggaatgccgattttatcattgaagatttcaaagaggcgtctattaatacggaatatattttaaccgctgataatgaagaaacaggacaagctttcataacagtatcagaagacggtcagaatacaattttagtatatggtggagcaaatatgactttaagtgctaaagatgtcatggcagcagaacaaccaattactgaagcggactttgttgtggcacaattagaaataccaattgaagctatagaacaagcctttaaaattgctaaagcaaatggtgtaacaactgtactcaatcctgcccctgcgattgatttacctaaatctttattagcattaacagatattattattcctaatgaaactgaagctgaactactatcaggtatctctatcactaatcaagataacatgaaagaaaccgtagaatatttcttcaaattaggaatttcaacaatacttattacgcttggggaacaaggtacatattatgccactgagaatgaatccaacattgttccagcttataaagtagaagctattgatactactgctgcaggtgatacatttattggagcttttgtgagccaattaaacaaagatttgagtaatttggaacaagctatccaattcgctaatcaagcatcatctttaactgttcaacgacaaggagctcaagcagctattcctactagagatgaagtaatcaatgtctataaataa

SEQ ID NO: 1106 - DNA, 405 bp, Staphylococcus capitis
atgaaaaagacagcagtattaaatagtcatgtttcacaagctatctcaactttaggacattatgatttaattaccatcaacgacgcaggaatgcctatacctaatgatgaaagacgtattgatttagcagtaactaaaggcttaccaagttttatagatgtacttgaaaatgttttaacagaagtggagattcaaaaaatttacttagcagaagagataaaaacaaataattcaactcagcttaaagcaattaaacacttaatcgaggaacatgtagagattgaatttatttctcatagtaaaatgaaagagatgcttcaatcaccacataataaagggaacattagaacaggagagaccacaccattctctaatatcgtattagaatctaatgtcactttttga

SEQ ID NO: 1107 - DNA, 882 bp, Staphylococcus capitis
atggatattatagctttattaataggattaggaccgttattaggttggggattgttcccaacgattgcatctaaatttggtggacgacctgtgaaccaaatctttggtgcaacagtcgggacattaatctttgcaattatattagccgtggtaaaaggtattggaatacccggaggtatggcactcatattttcaattatttcaggtgccggatgggcatttggtcaaattattacatttaaagcgtttgggttagtaggatcatctagagctatgcctattacaacagcttttcaattattaggtgcttcgttatggggcgtattcgctttaggtaactggcctggtatagcaaacaaaatgattggattcgtagcactcatagtaattttagttggcgcacgcatgacagtttggtcagagaaaagtgaacaagagtatagtcaaaatcttagaaaagcagtggttttattacttattggtgaaattggatattgggtttattcagctgcaccacaagctacagatataggtggattaaaagcatttttaccacatgctattggtatggtaattgtagcagtcatctatgctctaatgaatatgaacaaagggaatgcctttaaagaagcagtcagttggaaacaaattatttctggtttcttcttcgcctttgccgcgttaacatatttaatttcagcccaacccaatatgaatggactagctactggtttcgttctttcccaaacttcagtcgttttagcaactttaacaggtattttctttttaaatcagaagaaaacaccaaaagaattaatgattactattgtcggattggttttaattcttattgctgcttccgtaactgtatttattaaataa

SEQ ID NO: 1108 - DNA, 1605 bp, Staphylococcus capitis
atgaatatatataataaagtgaccttgagtgtcattttagttataacaattgtgatttcgttcctcttttatttcttaacaacagagaagaaagtggacaaagacacgttatatgaaaataagatagcgaaccataaacaatctggtaaccaaaaaaattatggtgttgcctctaataatacaattgcaactaaagtaggtaataaaataattgaagatggcggtaatgcaacagatgcagctgaaggtgttgcttatgctctagctgtaactgaacctcattcgtctggtttaggcggtgggggcgcaacgctaacctataatggtaaagatggagaagtccctaaaatgtatgaatataagacaatgtcttcatacaattataaacaaggcgacaaaatcggtgtacctggcttcgttagaggtatgcatgatatgcatgaaaaagaaggtaaaatggatgagaagaaaatctttaactacgtcattcctttagcagaagatggcttcgaagtagattcagaacttgaacgtagtttgaaaatttacggctctaagattgaccgtaattcacctttcttcaaaggaagtaaaacagtacgtgaaggtgacgttgttaagcaaagtaaacttgctgacacgttaaagaaaatccgtgataaaggcccagattacttctacaaagacgtaggcaaaagcatatctaaacagttaaaaaataaattgactgaaaaggacttcacaaccttcaaaactgaatcaaaagaaccagtaagcacaacttataaaaataacaaaatttattcagcttctaacccattaggtggtacgctaactttacaaggtttaaaagttgatgaacaagaaaaccaaaataatgctgaccgtactagctttattactgcgatgattaaatcacgtgatttaatgtaccaaaaccgtgatatcgttaatggttcagaagcaagtaacgaccaacaattatcggatgattacttacttggtcaattaaataaagttaatgttggaagcaacacagaaaatggtagtgactttaaccaaataagaactgataatacaagtacaacgcactttgtagttattgataaagatggtaaattagcaagcacgactaatacactttcaagttactttggatctggtgatttcatgaaagaaggattctatatgaacaactcattaggagacttctctaaagaatcaacgagtcctaactatggggaacctcataaagcaccaagatcattcatttcaccatcagtagtggtaggtcctaacttctacatgggtattggtactcctggaggtaacaaaattcctactatcttagatgaggttatcgtagattatttaaatggtaacggtacgttgcaagaatctgttgataaaccacgtttttataatgatggtggtacagtttattatgaaaatgctacaagcgatgaagatattaacatcttcaaaagtttaggttatggcgttcaagaaaaacgtaatgaccctaacttcggtagtgttcaaggtgccgtgtatgataaaaataaaaaatcagtagacgtcggttcagatgttggtaaccgttaa

SEQ ID NO: 1109 - DNA, 162 bp, Staphylococcus capitis
ttgaatattaaaaaacattggttgccaatcgtcgttgtcatcttagttattgtcattttcttattagtgacatttgccaaagcaaatgaaggtttagatcattatgaacaaaatgaattgaaaaatggagaacagcaatatctttcaaaaggggcaagctaa

SEQ ID NO: 1110 - DNA, 1074 bp, Staphylococcus capitis
atgaaaaagaaaaaacgattatcgcccagtgagtggttacttaaacagtctaaaagacataaaagaagaaacacgctttacacggcgattgtccttttattagctttaattctattagtatttgcgatcagagcaatacatgtcgatcctgtcaaaagtgatgctaaaagtggaaatagccttcgatttacatacttaggcaacattactttaaataaacacattcgccaaaataatttgaatgatgtatttgcaggaattcaagacacattaaagaatagtgatttttcttcggcttctttattggttaatgaattttcaaaaaatcaaaaagatgatcttaataaaaacatagaaaatatcatgttcttacgtaaacaaaatattaaaagtgtaaatctcatcaacaagtctattgataatattcaagcgacagagttaatgagaaaagttgaatctcaagcaggttataactttttaacaggaaatggttcaaatcctataaatagtaaaactgttcaacaagaaattaaaggtaagaaaatcgcaaatgtatcatttacagatgttgaatcaaattatactaaacctttaaaaaatacgacttcaatcagtttagatccgaagattttttatccactcattaagaagttaaaagaaaacaatgattacgtagtagttaatgttgactggggtattcctaaagaaagaaatgtaactgatagacaaaaagaatatgcgcacgcattatcagatgctggtgctgacattattgttggtcataattcagttgtacagaaaatagaaaaatataaaaatacacctattttctatagtttaggtaatacaacttcagatgacttcttatcgaaaaaccaaaaaggcatggtcgtacaacaagattggaacggaaaacataataaattccatatcacaccaattcagtcaaaagacggtaaaatctctaaagatgatatgaataaattggatcatgtaagattccataacaatatcaaagataaaacagttaatttaaaatcagataatagtggaggttatacttttgaatattaa

SEQ ID NO: 1111 - DNA, 453 bp, Staphylococcus capitis
atgataggttcagagttatatttctccttattcgtaggtgttattctcagtttaatatttgctgagaaattcgggatcaacccggcaggacttgttgttcctggttacttagctttaatttttgatcaacccataatgttattatcagtattgattattagttgtttaacttactttattgttaataacggtattagtaattgggtgattttatatggtagaagaaaattcgctgctatgattttaactggtatggtactcaagtttatatttgacttaatttatcctctcacgccatttgagatggttgaagtttcaggtattggtgttgtcattccaggaatcattgcaaatacggttcaaaagcaaggtgtcgtaattacattatcaactacaatgttattaacttgtattacttatgtcatcttgttcttatatagctttatcaactaa

SEQ ID NO: 1112 - DNA, 1131 bp, Staphylococcus capitis
ttgattctatggctaggaattaaagaaaaaagacgtcatgcgaatcgactaaagaaaatccctttacgaattaatatcaatgggattcgtgggaaatctacaatcactcgaatggcttacagtgtgcttcgagaagaccattacagagtaatcggtaaaacgactggaacagatgcaagaatgatgtactggttcacacagaaagaatacgatgtaattagaaaacctcaaggtgcaaatattggtgaacagcgtgatattattcgtaaggttgtaaagcaaaaagcaaacgcacttgttaatgagtgtatggctgttaaccctgactaccaaattacattccaaaaagatttagtaaaggcaaacattggcgttattgtaaacgtgatggaagatcacatggatgtattgggtccaactcttaaagatgtagctcaagcctttacagcaactattccatataatggtaaattagttgtaatgaaagatgaatatactgatttcttcgcgaaagaagctaaaaagcgaaattcggaaatcatcgttgtagataaagacgaaatacctgaatcatacttaagaaaatttgactacttagtcttcccggataatgttgccattgtcttaggtatagcagaggctgttggtgtagattatgaaacagcacttcaaggtatgttaaatgccccagccgatccaggtgcggtgcgtattaaatatttccatgcaaataacacgcaaaatgtctttgttaatgcttttgctgcaaatgaaccaaaatctacaaaggcaattttgaataaagttgaatcatataattatccatacaaaaagaaaattatcattttaaattgtcgttcagatagaattgatagaacacaattattcgttgaaaatttcttagaagatgttgattatgatgttttaatttgtactggtaagagtacgcaaatggtttcaaacctaatgcaaaaaatgccagataagaaatatttaaattacgaagggcaagaattctctgaaattgaaaaaggaattatgcatgagtcagaaaatgcacttgtcttttgtgtaggaaacatccacggcccgggtggaagaatagcggaattcatagaagggatagaataa

SEQ ID NO: 1113 - DNA, 321 bp, Staphylococcus capitis
atggataaaccagtaaaactcgctgttggcgtctatcttgcaatcatactagttgtttgtagttgttatcttgcttttatacttatcggtagtttacaaggtaaagatatgagtaattcagttttagatagtgatcattctcgtatcaacaacacatctagaaatagtgatgaggacgtaagttcaacatcaagtcattcagattcatctcattcacattctttcacaacttctaactacaaaaatgtaaattcgaataacactcaaaataattatcatcaaacaccaaaaaatgcgaattccagttatcaggtatattga

SEQ ID NO: 1114 - DNA, 873 bp, Staphylococcus capitis
atggcaataaatatccgattgaaagataatttagaagaaattattcattatccagattccttatggcaacatatcatgttacatactcaacttgaccaaacgattctaggttatatccctttgcattggcacaatgatttacagctaatggtggtcacttgtgggactattcaaattgaaattgctaatcaaaccgttgtattaaaaaagtatcaagctttgtttattaatacaaatgtagttcataaaatagaagggcttgaagcggatacttccttttactgttggaatattggtttacctgatgcgacagactatgtaaattataaatatgtaaatcaaattattaatacgcttgataagcatccttatatgaaaataaatggtgtcaatgtagaagaaaagatattaattgaaaagataaaaaatgtaggagaattatttgaagcaaaagataagcattatcaacttaatatattaagtgagtattatatttgtttgaaatatctcgtcatgctgattgatcaaactcatcattccaaacaatattattactttgatcaaagaataaaagagtgcataaactttattcagaggaattacacatataaaataaaaatgcatgacttatgtaagatatcctgcattagcagttcagaaacgattaagctctttaaaaggtatgtaggtatgacgccttttcaatatttattgcattatcgattggaaaagggcgcaaagcaacttaaattaactcataataatgtaacggaagtagctatggattgcggtttttctacaacgagttatttcatacaggtgtttaaagataaatacaaagttacacctaaacaatttcaattatcacattaa

SEQ ID NO: 1115 - DNA, 921 bp, Staphylococcus capitis
ttgaaaggttataaacaatcgagattaaaaggtatcttattcgctattataggggcaagcttatggggattagggggaactgtttcagattttctatttaagcatgcaggaatcaatgtagactggtatgtaactacaagattaataattagcggtttatttttattagtcatgtttaaaataatgaattctagacaatccatatttgtcatttttactcgtgtatctcacgtgattactttgataatttatagtctctttggcatgttaatcgttcaatatgcttacatggcatcaattaatgaaggtaatgcagcagtcgctactttattacaatatattgcgcctgtatatatcattctatggtttgcattcagaggtaaagaaaagctaagggcatttgatatagttgttgtactcttgacacttgtcggtacatttctgctcttaacaaacggttcactttctaaattaattgttgccccttcaagcttattttggggaatcttggccggattagctctagcattttacactatctatgcggaaaaattattgaataaatatgcctccattttagtcgttggttgggcaatgattatttccggtataattatgactttacgtcatcctatttggaacgtcagtatgactcaatggcatgtgtccacgtttctttatttaatatttggaattattggaggcactgctctagcatattatctatttattgatagcttgaaatatctatcagctaaagaaacaacgttatttggtacgatagaacctgtagttgcagttgtagcaagtggtttatttctaggtgtatcatttaaggcttttcaaatattaggaattattatcatagtcgttcttattttagttctttctttgaaaaagcaacccaatatcgacaactaa

SEQ ID NO: 1116 - DNA, 972 bp, Staphylococcus capitis
atgttgagaaaattagcaaccattataggatccactattgtcggcacaattttatatgcaagagtcaaagaaaagagaagttataagagctttttacaagaaaaaatgattcgcatgtctggaatgaaaaaaacgtttgaaaatgtacaagatgcagaaaaagctctagaggaaacgaaatacgaaacagcgggtaaatatagtggaacagattatgaatttagtcatggagttcaaattaaagactacgatggttccttagtttatatcgtcaatgatgaaggacaacgcgatcaacgtactattttgtatatacacggtggagcatggtttcaggacccattagattatcattttgaatacatggatttattggctgattcgctaaatgcgaaggttgttatgccaatttatccaaaaattccacatagggattatcgtactacatttgaattactgacaaagctgtatcatcatttgctaaataaaatagatgattcaaaacaaatgataataatgggggattctgctggtggacaaattgcattagcgtttgctcaacagcttaaaaaagatagtgaaccacaaccaagccatattgtattaatttcacctgttttagatgcaacatttagtaatccagaagctcgaaaatatgaaaaagaagatccaatgttgggtattgaaggtagtaaatatttagtcaatttatgggctggcgatgcacctttagatcattacaaattatcaccaatgtatggagatttagaggatttggggcatattactataacaacgggtacgaaagaaacattgtatccagatgctgttaaattctcaactatgttgaatgaaaagggtattaatcacgaatttataccaggttatagcttgttccatatttatcctatttttcctattccagaacgagaacgcttcttagaacaattaaagcgtattatcctaaaataa

SEQ ID NO: 1117 - DNA, 849 bp, Staphylococcus capitis
atggagaaaaaacgtcgtcaagaacactttaaaaacgttattttttgtttactagggacgttaattattgcgttaggagtcaattgctttgttattcctggtaatttaggtgaaggtggagcaattggtctatcgcttattttgaactatacattaggtatttcaccggcgctaagttcatttattattaacgctattttaattgttgtaggatggaaatttttaagccgaacgactgctatatacactgcaataacgattacagcaagttctattttcctagatttaacagagcattttggattaggtattcatgaaaactttatcaattctgttttcgctggtttactcatcggtattggcacaggacttgttattgctgctcaaagtacattaggcgggacatcagttattgctagaattataagcaaatattcagaagtaaaaacctctcaagcattattaattttagatgctttagtcgtgctatccttccttcttgtcttaccggtttcaaatgtactttatacaattgttatgctattcatagtggagaaagcaatggcttttgtagtagaaggttttaatcctaagaaggctgtgacagtgatttctgaatacaatagacaaataagctctgacatatatcaagcaactggcagagggtcaacattattaagtggtaaaggcgcttatcagcaaaacaatacagatgtattatacgctgttgtttcacaaagtcagattggtactgtgaagaagattgttaattcttatgacgaaagtgccttcctcgtcatacacgatgtgcgtgatgtcttaggtaatggttttattaatactaaataa

SEQ ID NO: 1118 - DNA, 129 bp, Staphylococcus capitis
atggaacaacttttgtttcatttctttttttatttaaacttcattgattgggtagacaaaaacttagtgttattattagagacgtgtgactttttcaagaataagaaaaatcaaacatataaaaaatga

SEQ ID NO: 1119 - DNA, 327 bp, Staphylococcus capitis
atgactcaaacattacaaagtatttatgcatttaaccagtttattcaatctaatgaactagcagttatccatgttatgagagatcattgtagcgtttgtcatgctgtccttccacaacttcaagacttattacaagaatatccttttgcaaaattaggtgtcgtcaatcaatctcatgtagaggagattgctggagaattatcaatttttacagtaccggtagatttaattttcttaaatggtaaggaaatgcatagacaaggacgttttatcgatatgcaatcgtttgaacatcaacttaagttaatgcatgattctcttaaataa

SEQ ID NO: 1120 - DNA, 408 bp, Staphylococcus capitis
atgaatcatgaaggtaaattagtagctgagaaagagatagaagtgaataattacgatattgatgctataggtattgttagtaatattgtttatgtcagatggtttgaagacttacgaacagtatttattaatcaatatatgaattactcagagatgattaagaatcacatttcgccgatccttatgaaaactgaaattgaatataaagtgcctataacgattcacgatcgcccagtgggtagatgttggcttgttcaagctagtaaattgaaatgggtttttaaatttgaaatctcgtcaggtgataaagtgcattgcgtagggtctcaaatgggtggattttatgatttagatagagaaaaaatcacaaaaatgccacaagtatttcaagatattcttaaaaattaa

SEQ ID NO: 1121 - DNA, 1056 bp, Staphylococcus capitis
atgaaagcatacaactatgttaaacccggagtggctgaactcattgataaagaaaaaccagaaattactgaaagtactgatgctattataagaatggttaaaacaacaatttgtggaactgatttacatattattaaaggagatactcctgaagttactgaaaatacaactttaggtcatgaaggtattggtattgtagaatctgttggtagcaacgttaataactttaaagtcggtgataaagttatcgtatctgctgtttcttcatgtggtaagtgttactactgtacaaaaggtatatacgctcattgtgaaaatgatggcggatggattcttgggcacttaatcaatggtactcaagctgagtatgttaaagttcctttcgcagataactctttatatcatgcacccgcttctttacctgatgaagcacttgtaatgctatcagacattttaccaacaggttatgaaattggtgtattaaaaggaaaggtcaaaccaggaagcactgttgcaatagtaggtgctggtccagttggtttagctacactgttaactgcacaattcttctctccttctaaaataatcatgattgatttagacaataaccgattacaaacagcccgctctcttggtgcaacgcatttaattaattctaaaaatgtcgaagaggctatacaaaaagtgaaagaattaaatcctcgcggtgtagatgtagccattgaggcagtaggtatcccacaaacttttgacttatgtcaaaaactcattggtgtcgatggtacgattgcgaacgtcggcgttcatggtctacctgttcaatttgatatagacaaactttggattaaaaatatcaatgtaaccacaggattagtttctggtaatacaactgaagaattgttagaagcattaaaaagtaaaattattcaacctgaacaattagttacacattatagtaaattaagtgatattgaaaatgcctacgaattatttagaaatgcaactgaccataaagcaattaagttacttatagagaatgatattactccagtataa

SEQ ID NO: 1122 - DNA, 759 bp, Staphylococcus capitis
atgtgtgattctaaaataaacaagaattctagagttagacatcaagggaacaagataatcaatgttctcatctacttaataatgatagtcgtaatacaagttcctgtgggtttatcacttgttgcacttccattatctttaagactgaatgattggtatacaatagcgatgagtatgtttattctaggaattacacttttaatcatttgggggataagatcctattatttatatcgtacttatgaatatcaagattttaagatgagtattaaagatatctttatcaatattggttttttctttctcgtaattctctgtagtattagtgcgaatgctttaatgtttatttttacaggtaattcaaacacacaaaatcaggaaacaatagatgacagtttaagttcacttatggataaaagccatttacctcatcccactattgtattagtaaccgtattgtgtctttgtatcataggaccatatttagaagaattggtatttagaggaatctttaaggaaactttatttatgaaatgccgcttttggctacccttaattttctcatcattgatattcagctctcaacatctatcatcaaatatattttcttatgcaatttattttttaatgggaattattctctatattgcttatgatagaaggcgaaacttgaaggacagtatgatggtacatatatttaacaattctttaacaacgctaccttttttaattatttacttatatttctattttaaataa

SEQ ID NO: 1123 - DNA, 2076 bp, Staphylococcus capitis
atgtttaatatgtttaaaaagctatttgggcagttacaacgtattggtaaagcattaatgctaccagtagcaatattacctgctgccggaatcttgcttgcatttggtaatgcaatgcataatgaacaacttgttcaccttgcaccgtggttaaaccatcctgtgtttgtagcaatttcttcagttatggaagcttcaggacaagtggtttttgacaatttaccgttattatttgcaatcggaacagcacttggtttagcaggaggagacggtgtagcagcacttgcagcactagtaggttaccttattatgaatgcgacaatgggtaaagttctacatatcactattgatgatatattctcatactcaaatggtgctaaggaattaagccaagcagctaaagatcctgctcatgcattaattcttggaattccgacacttcaaacaggggtattcggtggtattatcatgggggccttagctgcatggtgttataacaaattttataacattacattaccagcattcttaggtttctttgcagggaagcgttttgtacctatcgtgacatcagttgtcgcaattgcgacaggtatcatattaagttttgtttggccgcctattcaagatggtttaaatgggctttcaaacttcttattgaataagaacttaactttaactacgtttatttttgggattattgagcgatcacttattccattcggtctgcatcacattttctatgcaccattttggtttgaatttggccattatacaaatcacgctggagatttagtacgtggagaccaaagaatttggatggcacaattgaaagatggcgtgccatttacagctggcgcattcactacaggtaaatatccattcatgatgtttggtttaccagcggcagcattcgccatttataaaaatgctcgcccagaacgtaagaaagttgttggaggtttaatgttatcagcagctttaacttctttcttaacaggtattactgaaccattagagttctcattcttatttgtggcacccattttatatgtgattcatgtatttttagcaggtacttctttcttggtcatgcacttgttaggtgtaaaaataggtatgactttctccggagggtttattgattatattttatacggtttacttaactggcatcgcacaaacgcgctttgggttattccagtaggtattgtgtatgcgattgtgtattacttcttatttgactttgcaattagaaaattcaaattaaaaacacctggtcgtgaagataaagaacaagagatacgcaattcaagtgttgctaaattaccatttgatgtattagatgctatgggcggtaaagaaaatattaaacatctagatgcttgtattacacgtcttagagttgaagtcgcagataaatcgaaggtagacgttcaaggattgaaagcgttaggtgcctctggagttctagaagtaggaaataacatgcaagctatatttggcccaaaatcagatcaaattaagcatgacatggcaaagattatgagtggagaaattactaaacctagtgagacaacagtaactgaagagatttctgatgaaccagttcatgtagaagacgtcattgaaactgaaatttattcacctggacatggtcaaatgattccattaacggatgttccggataaagttttctctgaaaaaatgatgggcgatggcgtaggtttcattcctgaaaaaggcgaaattgtagcaccatttgatggtacagttaaaaccatcttcccaacgaaacatgcgattggtttagaatcagatacaggtgtagaagtcttaattcacattggtatcgatacagttaaattgaatggacagggctttgaaagctttgttcaagctgatgaaactgtaacacaaggtcaacctttaatgaaaattgatttagcttatctaaaagataacgcaccaagtattgttacgccggtaattatcacaaatttaggtgataaaacattaacaattgaagatgttaaatctgtagatccaggaaaagttataatgaaaattaaataa

SEQ ID NO: 1124 - DNA, 1740 bp, Staphylococcus capitis
atggcaaaaattaaagcaaatgaagcattagttaaagcattacaagcttgggatattgaccacttatatggtattccaggtgactcaattgacgcagtagtagatagcttacgtacagtaagagatcaatttaaattctaccacgttcgtcacgaagaagtagcaagtttagctgctggtagttacacaaaaatgacaggtaaaattggtgttgcattaagtatcggtggacctggtttagttcacttattaaacggtatgtatgatgctaaaatggacaacgttcctcaattaattttatcaggtcaaactaatagtactttattaggtactaaagcattccaagaaactaatctttctaaattatgtgaagacgttgctgtatacaaccaccaaatccaaaaaggtgacaacgtatttgaaatcgttaatgaagcaatccgtacagcttatgagaaaaaaggtgtagcggtagttatttgtcctaacgacttattaactcaaaaaattaaagatactacaaaccgtgcagtagatactactaaacctaaaccagtatctcctaaattcaagagcattaaaaaagctgctaaattaattgataaagctaaaaaaccagtaatgattattggtatgggtactcaacacgctaaagaagaattacgtgaatttatcgaagctgctaaaatcccagtaattcacacattaccagctaaaacaatcttacctgatgatcatccatacagcattggtaacttaggtaaaattggtactaaaacatcttatcaaacaatccaagatgctgatttattaatcatggctggtacaaactatccttacgtagactatctacctaagaaaaacattaaagctatccaaattgatacaaacgaagctaacttaggtcatcgtttcaacatcaatgttggtattttaggcgatagtaaagttgctttccatcaactaactgaaaatattaaacacgttgctaaacgtcaattcttagataaaacattagaacgtaaagctgtttgggataaatggatggaacaagataaaaataataataaatcaccattacgtccagaacgcttaatgaaagcaatcaatgctaacttaaaagatgatgctattatctcagcagacgttggtactgctacagtttggtcaactcgttacctaaacttatcagttaataacaaattcatcatctcaagttggttaggtactatgggttgcggtcttccaggtgctatggcagctaaaattgcttaccctaaccgtcaagctgttgctatcgctggtgacggtgcattccaaatggtaatgcaagacttcgcaactgcagttcaatatgatttaccaatgactgtattcgtattaaacaataaacaattatcattcattaaatatgaacaacaagctgctggtgaattagaatatgcgattgatttctctgatatggatcacgctaaattcgctgaagctgctggtggtaaaggttatgttgttagagatgctagtcgtttagacgatatcgttgaagaagctatggctcaagacgttccaactatcgtagacgtacacgttgatccaaacgctgcaccattaccaggtaaaatcgttaacgaagaagcattaggttatagtagatgggcttacagatcaatcactgaagataaaaacttagactttgatcaaatcccaccaatctctgtagcagctaaacgtttcttataa

SEQ ID NO: 1125 - DNA, 690 bp, Staphylococcus capitis
atgaatgattatttacaagccgttctcatgatattattaacagtcattttgtactatggttctaagcgactccaagataaatataaaaatccattattaaaccctgcgctgatagcatcaattgggataataattatactattagttttcggagtgagttacaaagggtatatgaaaggtggtacatggattaaccatgtattaaatgcaacagtcgtctgtcttgcttatccactatatgaaaacagacacaaaataaagaaatatctgtctatcatttttgcaagcgtactgactggtgtacttcttaattttgtgttagtatttacaacgttgaaaatctttggttattctaaagacacgattgtcaccctgttaccaagatcaatcactgcagcagttggtattgaactttcccaagaattgggaggcacagatacaatgactgtactctttattataactacaggtttaatcggcagtattttaggttcaatgttattgcgtatgggaggtttcaaatcctctattgctaaaggattaacttatggaaatgcttcacacgccttcggtactgcaaaagcattggaattagatatagaatcaggagcatttagttctattggtatgattcttacggctgtcataagttcagtcttaataccaatactgattttagtgttttactaa

SEQ ID NO: 1126 - DNA, 315 bp, Staphylococcus capitis
gtgcagaaattattacacatcccactagcaggtagtatagttggtttaattttgttcttcttacttttacagtttaagattattccagaaagttggattgatgtaggggctaatttcttactcaagacaatggtatttttctttatcccatcagtggtaggtattatggatgtagcttctgatattacgttaaattatgtattattctttatcgtaattattataggtacatgtgtagttgctttatcttcaggctttatagctgaaaaaatggtaggaaaagacaaaataactaaagggacagatcagtcatga

SEQ ID NO: 1127 - DNA, 888 bp, Staphylococcus capitis
gtggacattaaacacatgaaatatttcgtcgaagtcgtaaaacaaggtggaatgacaaacgcatctaaatctttatacatcgctcagcctacaataagtaaagcaattaaagatatcgaagcagaaatggctgtccccttattcgatagaagtaaaagaaatttagtacttacagatgctgggaaaattttcttcaataaatgtaaagaaattatttctttatatgataacttgcctacagaaattaatagtctgtatgggttagaaacagggcatattaacattagtatgtctgcagttatgagtatgcgtaaatttatagggattttgggtgattttcatcaattatatccaaatatcacttacaatcttatcgaaagtggagggaaaaccacagagaacctcatcttaaatgatgaagtggatatcggtgtaacgactttaccggtcgatcatcatttatttgaatctatttcactcaataaagaagatttaagagtagtattacatagggaacatccattagcttataaaactaaaattaagatggaggaactcgctgaagagaattttatactatttaatgaagatttttatttgaatgataaaattatcgaaaatgctaaaaacgctgggttcgttcctaatatggcttctcaaatttcacaatggaacgttatcgagaatctcatcatcaataagttaggaattacaatattacctgcaactatctcagagttattaaatgatgatgtgaaaatgattcaactcgaaaatgctaatacagaatgggaacttggcgtagtgtggaaaaaagataagcgtttaagtcatgcgacaaataaatggatagagttcttaaaagaaaaattgactgaacaaaagtag

SEQ ID NO: 1128 - DNA, 219 bp, Staphylococcus capitis
ttgagcttttacgaatttatgcaaagtttccatggtgatgacacaccgttaggtgaattggttgattggattaatcaagatatcaattttcttaaagaagtgaagagccatagtgaaatattgacatattttcgaaataatccatgtcctgaaaacatacctgtgacagtgatcaaacgcgcacttgctgttttcaaccaattcacccaaaatgtataa

SEQ ID NO: 1129 - DNA, 435 bp, Staphylococcus capitis
atgaaacttaaaaaattattatcacgtattattatcgctactggaatcatgttcactggaactttaacatatcaaactatagaacatacgcacgtatcatacgctgcttcatataattattacagcaaacatcaatgtacttggtgggcctataaacgtcgagttcaattagggaagcctgtttctaatagatggggaaacgctaggaactggtactacaacgcacgccgttcaggttactcaacgggacacaaaccaaaaaaatacgctgttatgcaatctactgcaggttattatgggcacgtggcaattgtagagaaagtatacaatagtggaagcattaaaatctcagagtataattataatgttcctttaggttacggaacacgtattattagtaaatcatcagcacgtcattataattatatttattaa

SEQ ID NO: 1130 - DNA, 1278 bp, Staphylococcus capitis
atgaaaagtttagaaaaaggatttagacatttatctcgagaggataaattaaagcaattagtcgagtatggatggctcaatactgataattatgattcattacttagtcatcctcttattaatgaagaagtggcaaatagtttgattgagaatgtaattggtcaaggcactctaccagttggactattacctaaaattattgttgatgataaagaatatgtggtgccaatgatggttgaagagccttcagtagtggctgccgcaagttatggagcgaaacttgttaaccaaagtggtggctttaaaacaatctcaagtcaaagattaatgatcggtcaaattgtgtttgacgatattgaagatacagaacaattatctaaagatatccaagcacttgaaccacaaatacatcaaattgctgatgaggcttatccatctattaaagaacgtgggggcggttaccaacgtattgaaatagatacgttccctgagcaacatttactatcattgaaagtatatgttgatactaaagatgcgatgggcgctaatatgttaaatacaattcttgaagcaatcactgctcatcttaaaaacgaattccctgaaaaagatgttttaatgagtattttatctaatcacgcgacggcttcagtagttaaagtgcaaggcgaaatagatgttaacgatttaaatagaggtgagagaagtggcgaagaggtagcacaccgtatggaacgtgcctcagtattagctcaagttgatattcatcgtgcagctactcacaacaaaggtgtaatgaatggtattcacgcagtagttcttgctacaggtaacgatacaagaggtgctgaagcgagtgcacacgcatatgctagtcgtgatggtcaatatagaggaattgcggcatggaaatatgataaagaacgtggaaaattaatcggtacaattgaagtacctatgaccttggcgattgtgggtggtggcacgaaggtattacctattgcaaaagcctcgctcgatttactcaatgtagcgtcagcccaagagttaggtcatgttgtagctgcagtcggtttagctcaaaacttttcagcttgtcgtgcgcttgtatcagaaggtatacagcaaggacatatgagcttacaatataaatcattagcaattgttgttggagcacaaggtgaagaaattgctaaagttgcggaagcattgaaacatgaaacacgcgctaatacagctaaagctaaagaaattttagaagaattacgtcaatcataa

SEQ ID NO: 1131 - DNA, 1167 bp, Staphylococcus capitis
atgaacataggtatcgataaaataaacttttatgtaccaaaatattatgtagacatggcaaagcttgcagaagcacgccaagttgatccaaataaattcttaataggaatcggacaaactgaaatggcagtaagtcctgtcaaccaagatatcgtatcgatgggtgctaatgctgctaaagatattataacagacgaagataaaaagaatattggaatggtaattgtagcaactgaatctgctattgataatgccaaagctgcagcagttcaaatccataatttattaggtattcaacccttcgcacgttgctttgaaatgaaagaagcatgttatgctgcaactcctgcaatccaacttgctaaagactatcttgcacaacgtcccaacgagaaagttctagttatcgcaagtgatactgcacgttatggtattaactcaggcggagaacctactcaaggggctggtgctgtagcaatgatgatttctcatgagcctagcatattaacattaaacgatgatgcagttgcttataccgaagatgtttacgacttctggcgtcctacaggtcacaaatacccactcgttgcaggtgcactatctaaagacgcttacattaaatcattccaagaaagctggaatgaatatgcacgtcgtcaaggtaaaacactatctgatttcgaatcactttgcttccatgtacctttcaccaaaatgggtaaaaaagctttagattctatcattgataatgctgatgaaactacacaagaacgcttaaaatcaggatatgaagatgcagtatattataaccgttatgttggtaacatctatactggttcattatacttaagtttaatatcattacttgaaacacgtgacctcaaaggtggtcaaacaattggtttatttagttatggctcaggttctgttggcgaattcttcagtgcaacacttgtagacggtttcgaaaaacatctagacattgaaggacacaaagcattgttaaacaatcgtacagaagtttctgtcgaagaatacgaatcattctttaaacgttttgatgatttagaattcaatcacgacattgaacaatcagataaagacaatgatctcttctacttgaaagacattaatgacgatattcgtgaatatcatattgcagaataa

SEQ ID NO: 1132 - DNA, 519 bp, Staphylococcus capitis
atgcaatatcaaacgaaatttcaatccccactaggtaaactgcaattaattagtgatggttctgcacttacgcatcttttatatccgaaccaacatatagaaaatgttaaaacaaaaggggacttaccactatttcaaaaagtgactcagtggctagaacaatattttgaaggtaatcatccagttatagattttacattagcaccacatggaagcgactttcagcgtgaggtctgggatgagttaataacaatagcatatggagacttagaaacatatggaaacattgcaaaaagtgttggtcaaaagttaggtaagccaaaaatgtctgctcaagctgtaggaggggcagtaggtcgtaatccgatttctatcatcataccttgtcatcgtgtggtaggtaaggatggaagtttaacaggttacggtggcacgatagataataaaattaaattgctagaaattgaaaatgttgatatgtctcagctttatagaccgaaatatagtacaaagccataa

SEQ ID NO: 1133 - DNA, 318 bp, Staphylococcus capitis
atgattcagcataaaaacgatgtggatcttcattttaataaaaataacttaagtcctaaaagtcaaaaccatgccaatgaaattactattttttacaaagcactgtatcaaattaatgatatcgtgttaggtttaatatttctggttggaagctttctcttctttagcgataaaacaatgatagccggcacagtcctctttgttatcggtagtcttcaaatgacagcacgaccaattatctcatttatacatgatctcaaattatctaattattatagacgcctatataaagatgaattaaaaaatcaatctgaatga

SEQ ID NO: 1134 - DNA, 465 bp, Staphylococcus capitis
atgaaaggtagcaagaaactagatagcttactagaggataataagaagaaattaaaaaagttatttaaatatgataaaaaagaagctttggctttcacaaaagaagatcgtgagaaagtcaaagataagtatggggtttatgttatttttgatcaaaagaaaccagtttacgtaggacaaactggtgggtactcaacgacttataaacctataaataaagacttatacactaaattaggacaatataactctcattcagatagtggtacaacaaagtttagaaaagggtttgcccaaagtaaaaacttagatcaatctgatttaaaaagtatcactgctcaagaacatagtttaactttccaatatattaaagttaaagatgaacctgcctttataaatattttagaacttgtcgctttagagtatgcgaaagataaaggttatgaactatataattttgaataa

SEQ ID NO: 1135 - DNA, 1995 bp, Staphylococcus capitis
atgaatgaaagttattgcattttaggtaaccctaatgtaggtaaaacatctctattcaatgcattgacaggatcttatgagtacgttgggaattggagcggtgtgacggtcgagaaaaaagtaggtaaattaaaagaaaatctaggacaattaatagatttacctggtgtatacgatctttcaccaatcactaaagatgaaacagttgttacagaatttctgatggaaacatcatttactggaatgattaatatcattgatactagtcaaattaaaagaaatctgcaattaactgttcaattgctagaactcaatgttcctataatcattggtttaaacatgatggatgtagctattcaacatggtttaaagattaattatgacactctaatgagaaagttaaaagtacctatttttcctatagtagcaagaaaagctaaaggtacaaacactttattgcatgaacttcaattcttgaaatctgatcaaagacaacacttcaaaattgattatggcaatgagattgaagaagctatcgaacgacttagctcaattatcaagaaagaaacgtcgtatccaaatgaacgaatacgttttatagcaattcaatatttgcttgataatgtcaaaattaacgaagaattaggggctgagttgattaatcttctagagcccataaaaacaaacttagataaacactctaatatgtgcgtacgcgaacgtatagaagttataagagaagcatttatagataatatcttaaaaaatgttgttgaatatccggaagaagaaaaacaatttttcacagctaaattagataaaattcttatgaataaatatttaggaattccaatattcttaggtattatatggctaatatttcaaaccactttcacatgggtggggacgcctttatctgataaaatggacgatttcatcggtggtcaattaaccgattggataaaactactgatgcaacaattgcatctattaccgtttcttcaagacttaattactgatggtattattgctggagtaggttcagtattagtatttattcctcaaatcgtagttttattcttctttatttcattgctcgaagattcaggttatatggctaggattgccgtattgatggataagactatggaatccattggtttaagtggaaagtcgtttatccctatgattattggctttggatgtaatgttccaagtattatggctgcgcgtagtattgaaaatgaaaaagaaagacttattactattttaatcgcgccatttatgtcgtgttcagcacggttacccgtctatgctttgttcgtaggtgtattctttaaagaataccaatcacttatcgtacttagtttatatttaattggcattctgattgctcttttagtgagtacttttatgaataaatttattttgaaaaatgaagactcggtttttatcgtggaattaccaacatatcgtgtaccttcaattagaacgttatggcgtagtacatgggaaaaggcaaaaggttttgtgaaaaaagcaggtacatttattttcggtggttcagtagtgatttgggctttaacttatatgggccctaatggatttgatgtgaaaattaaccaaagttttatgcatatactgggagaagtttttgctcctatcattgctcctttaggttttggaacttggcaggcaggagcaacattgataccaggctttttagcaaaagaggttattattagttcaatggctatactttattcttccaatgagaatggtttagtcaatgtgattcaacaccaattcactccaatttcagcatatgcgtttatgatatttatactattatatgtaccttgtatctctacggttgccactattagaaaagaaacatgttcttggaaatggacacttattgctgtgatctatccagtattaacagcgtacattttaacattaatgttttatcaagttagccatttatttacgtaa

SEQ ID NO: 1136 - DNA, 228 bp, Staphylococcus capitis
atgttgaatttaatgactgggatgaaaaataaacaatataaagttaaaagtatcaatctgaataataaaagcatgttatatcgtttgggagcacttggtttaaagaagggcagtctagtgagtattaagcgtaaatgcttatttaatggaccaagtgtaattgaaatcaatggtcaatatcttagtattagacaatcagatgctcgtcaaattgcattagaggagtag

SEQ ID NO: 1137 - DNA, 552 bp, Staphylococcus capitis
atgaatgaacaagacttaagagtagtgaaaactaaaaaggcgttatcatcgagtctttatcaattgttagagaaaagaagtttcgaatctctttctgttaatgaaatttgcgaatctggaatggttcaccggacgactttttataaacatttctatgacaaatatgatttgttagtttatctattcaagttactcactaaagattacttttcaaccgacttaaaagatcggttaaataatcctttccaaacaattgaagctacatttacaaataaagaagaattggaaaaaatcgaaaaagtacaaaaagatgatgtatcattcggtaaaatatttaaagaagtttgtgtagatattatgaaggcagatattaaagaaaatattcatcgtatctctgttgataaaacaatcccagaagatttagtattttatatctatggttctacattagatggatttatggagtggattaaacaagaaaacattcaatggcccgcttcagaaattgataaagttttccataaagcaatcaacattagtatttctgaatag

SEQ ID NO: 1138 - DNA, 1545 bp, Staphylococcus capitis
atggtagtacctttcaaaaatgaacctgggattgatttttcagtacaagaaaatgtagaccgcttcaacgaagtattaaagaaggtaaaaggggaacttggtcaaaatattccgctattcatcaatggtgaaaaaatagataagagtgacaagtttgaatctctaaaccctgcagatacagctcaattaattgctaaagtttctaaagctacaaaagacgatgtagaaaatgcgtttcaagcagcgaacgaagcttataaatcatggaagaaatggtctcataaagatcgtgctgaattgatgttacgcgttgcagcaattattcgtcgtcgtaaagaagaaatttctgctgttatggtatatgaagctggaaaaccatgggatgaagcagtaggcgatgctgcagaaggtatcgattttatcgaatattatgcacgttcaatgatggatttagcagaaggtaaacctgtgttagatcgagaaggtgaacataatagatatttctataaacccataggtactggcgttacaattccgccatggaacttcccatttgcaattatggcgggtacaacactagctccagtggtggctggtaatacagttctattaaaacctgcagaagacactgtacttacagcatataaattaattgaaattttagaggaagctggtttacctaaaggtgttgttaactttgtacctggtgatcctaaagaaataggagattatttagttgatcataaagatacacactttgtaacatttacaggttctcgtgcaacaggtacacgtatctatgaacgtagtgctgtagttcaagaaggacaaaacttcttgaaacgtgttatcgctgaaatgggtggtaaagatgctattgtcgtagatgaaaacgttgatacggatttagcagcagaggcaattgtaacgtctgcgttcggattctcaggacaaaaatgctcagcatgttcacgagcaattatccataaagacgtgcatgatgaaattttagagaaagcagtcaaactaactaaagatttaaatttaggtaacacggaaaacaatacatttatgggaccagtaattaatcagaaacaattcgataaaattaaaaattatatcgaaattggtaaagaggaaggtaaattagaacaaggtggaggcacggatgactcaacaggttacttcatcgaaccaaccatcttctcaggtcttaagtcagctgaccgtattatgcaagaagaaatttttggaccagttgtcggatttattaaagttaatagctttgatgaagcaattgatgttgcaaacgatactgattatggtttgacaggtgcagtcatcacaaataaccgtgaacactggattaaagcagtaaatgaatatgatgtaggtaacctttacctcaaccgtggttgtactgctgccgtagttggatatcatccatttggtggtttcaaaatgtcaggtacagacgctaaaacaggtagtccggactacttacttaatttcttagaacaaaaagttgtttcagaaatgttctga

SEQ ID NO: 1139 - DNA, 885 bp, Staphylococcus capitis
atgaaaacttatacatcagtaattttttggatgcgcgccatcgcgtgtttaagtatagtaatcattcactctattactaccactttttcaaaaatgcattccgtccctcatagtacatcacttcgtctattccaattattattaatgtttagtacgccaatgttcgtttttatatcagaatttttactagcaaaaaattatggctcaaaattaaaaaagggcttcttcaaaaataaattgatttatttgggcataccctacattattattaatttaagtatttcttatttttactttagtccaaataatttacatgaatatttattccatgttaaagaaacaatgtttcatggaggggctgttacatattttatagttattatttttcaattttatatactacattggctattttctaaatatctaattggtttgaatccaattgggatgattgttatatcaatttttatcaccacaatgtattgggctatgagatcctttgtatcgcctcctgataatcctataatagcagctatttgggatcgagagggatggatgattttcataggttggttaagctattttttactcagtttctatataggcacttactatgaagtatttatggaaagaataaaaaattactctattcatataattattggagcatttctatcaattcttttcatgttttcaaattatttacttggtattagcacatgggtagaatctaaaagaatagatacacctatttatgtaacaatgattattttattatttttcctcttttcttcctatattaagtatgtacctaagtttattgtatttataagtaattactcctattgtatctacttagttcattattttttgtgcatgatttag

SEQ ID NO: 1140 - DNA, 222 bp, Staphylococcus capitis
ttgtatctacttagttcattattttttgtgcatgatttaggattattaagccataacccaattaaaaatgtaatattcaatactatagttacattatctctagctattacagttggatacgtttttaatttatttaaatttggaaaatatattgtaggtggtataggaaaagttaactacactgccgtttataaaagttacaaaaataatcttatggattaa

SEQ ID NO: 1141 - DNA, 561 bp, Staphylococcus capitis
atgactgaaaaggaaaaaatgttagcacatcagtggtacgatgctaattttgatgatgagttgaaagaggataggttacaagcaaaagagttatgctttgaatataaccacacacgccctagtaatgttaaaaaacgcaacgcaataatggagaaattattcggctataaacttgagaatgtggggatttcaatcccgtttgatacagattatggatggaatattaagttcggaaaaaatgtatttattaataccaattgttatttaatggacggcggtggcatcacgtttggagataatgtatttataggtcctaactgtggattttacactgctacacatccacttaattttgaggaacgtaataaagggctagaactagcagaacccattgtagtaggaagtaacacttggtttgggggacatgtgtctgtgttgcctggggtgacgataggtgaaggaaccgttattggtgcaggaagtgtagtaaccaaagatataccccctcattgcttagcagtaggtaatccttgtaaagtgattagaaagattgagcagtaa

SEQ ID NO: 1142 - DNA, 870 bp, Staphylococcus capitis
gtgagtttattagattttcataaagaaataaaaggctacactcaagatagacagcctggtatagaagcggacatgaatcctaagccagtagctgaattagatgaatataaagcagcaggtaaattaaaaggcaaagttgctttaattactggtggcgactctggtattggtcgttccgtagcaatactatatgctaaagagggagcaaatgttgctataggttattatgatgaacatcaagatgctgaagacactgttaaacgtttaaaagaattaggcgtagatgcaaaagcatatgcacatgatttaaaagacgagcaacaatctaaaaaactcattgatgatgttgttaaagattttggtagtttaaatattttagtaaataatggtggtgttcaattcccacgagataattttgaggatattacgcctgatcaagtcaaagagacgtttatgacgaacatttttggaatgatgttcttatcgcaagcagctgttccacatctttcaaaaggtgacgcaattattaacactactagtgtaacggcttatagaggttcaggtcatcttattgattactctgcgacaaaaggtgcgatagtgtcatttactcgctctcttgcgacaacattaatggaaaaaagtattcgagttaacgctgtagcaccaggacctatatatactccattaatcccatctacatttgatgaggaaaaggttgaaaatcaaggtggagatacgccaatgggtcgccgaggccaaccagcagagctagctccttcatatgtgttcttagcaactcaagcagatagttcatatattacaggacaagtcattcatgttaatggtggagattatattacgacataa

SEQ ID NO: 1143 - DNA, 207 bp, Staphylococcus capitis
atgaaaacattactaaaaggagttatctcagtacttatcatcttaggaatagttaaaacttttcaagaccacgatatccttaacgaagccagctattattatgaacaagctaaaagtggtgagctagttcaagacatctcaaatttagatttcaataattttaaaaatttagatctagaaaacttgaacccatcagactttttctaa

SEQ ID NO: 1144 - DNA, 2424 bp, Staphylococcus capitis
ttgaaattaagaaaaacgcagaaagaaggtatacctttgtctaataaaactaccacattggatattaccggaatgacatgtgctgcgtgctctaaccgaatagagaagaaattaaatcgattagacgatgttacagctcaagtgaatctaacaactgaaaaggcaacaattgaatataatgccgatgaatatcaaccagaagcatttgtagaacaaatcaagaaattaggttatgatgttgcaactgaaaaacaagaattagatattactgggatgacatgtgcagcctgctcgaatcgtatagagaaagttcttaacaaaatggacggcgttcaaaatgcaacagtcaatttgacaactgaacaagcattaattgaattttaccctagtacaacgaatacggatcaacttattcaaagaattcataaattaggttacgatgctaaaccaatcacaaataataatttagaaaagtcatctcgaaaagaacaagaattaaaattaaaacgaactaaattaatgatttcagcaatcttatctgcaccacttttacttgtaatgctcattcatgtatttcctgttcatttactagaaactataatgaatccatggatacaactcattctagctacacctgtacaatttattataggttggcaattttatgtaggtgcctataagaacctacgcaatggttctgccaacatggatgttttggtgtctctcggcacaagcgcggcatacttttacagtatttatgaaatgatccgatggttactaaataaagtgaatgaacctcacttatattttgaaacaagtgctattttgattacgctcattctatttgggaagtatttagaggcacgtgctaaatctcagactaccaatgcattgggcgaattattaagtttacaagctaaagaagctcgagtattaaaagataatcaagagatgatggttcctcttaatgaagttatagtgggagatactttagtaattaaacctggtgaaaaggttcctgtagacggtgagattatcaaaggaagcacctccatcgatgaatccatgttaactggtgaatctattccagttgaaaagacaatcggagatgcagtaattggctctacactaaataaaaatggttctttgatcataaaagctactaaagtgggcagtgacactgcattagcaaatattattaaagtcgttgaggaagcacaaagttctaaagcaccaattcaaagattagcggacatcatttcaggttatttcgtacctgtggttgttggtatttcattgattacatttattatttggattattttcattcattttggtcaatttgaacctgcgttgcttgctgcgatatcagtactagtcattgcatgtccttgtgcacttggtttagcaacgcctacatctattatggtaggtactggtcgcgcggctgaaaatggtattttattcaaaggcggcgaatttgtagaacgagctcaccatatagacactattgtattagataaaacaggtaccatcactaatggtaaaccaaaagttacagattatgttggcgatcaagatacacttcagctgttagctagtgctgaaaatgcatctgaacatcctttagctgaagccatcgtcaattatgctaaagatcaaaacttaacacttttaggcaacgaaactttcaaagctgtacctggcctgggtattgaagcgacaataaatggtcatcgtattttagttggaaacagaaagttaatgcataactatgacatcaatataactcaagaactcaataacaaattaattcaatatgaacaacatggtcaaactgcaatggtaattgcaattgaacatgaactgaaaggtattattgctgttgctgatactgttaaagatactgcaaaacaagccattaatcatttacaaaatatgaatattgaagtagtcatgctcactggagacaacaaacaaacggcacaagcaattgctaaagaagtaggtatagaccgtgttatctctgatgtgttacctgaagaaaaagctgaacaaatagctctattacaaaaagaaggacgaaatgttgctatggttggcgacggtgtcaatgatgcacctgctttagttaaagctgacattggaattgcaataggtacaggtactgaagtagctattgaggctgcagatattacaattcttggtggtgatttactactactccctaaagctataaaagctagtaaagcaacaattcgcaatatacgtcaaaacttattttgggcatttggatacaatgtcgcaggtattcctatagccgctttaggtttacttgcgccttggatagccggagcagccatggcattgagttcagttagcgtagtgacaaacgcactgcgtcttaaaaagataaaattataa

SEQ ID NO: 1145 - DNA, 207 bp, Staphylococcus capitis
atgactcaagaaataattcaagtagaaggtatgagctgtcaacattgcaaaaattcagttgaatcagcattatcaaacttaaacggtgtacaatctgccgaagttaatttagaagaaaataacgttcgtgtagaatttgatgattcaaaagtgaacatcacacaaatgaaagatgctattgaagatcaaggctatgatgcaaaatag

SEQ ID NO: 1146 - DNA, 2280 bp, Staphylococcus capitis
atgcaaatcactatacttggttttaacatatttgccaaagggggaacttctagaagtaatatcaatttaattaaagcttttttgaaaaatgaacatacagttaactattttaattataaaaaattcgatcaagcacagaaagatttactaatccaagaggaagacttagcgaacaattcagttgatattttttatttaaacaacttaaagcaattagcaaaaactcaattattaattattactagagaagcattttttaaatattcgagattaattaaaaaatataaccccaaaataaaaattgttggagaaatacatggaccactaaagtatattactgaagatatagatctttcgttagatacaattgactgtgtgagagtaagtactaaaagtataaaatcggattttattaaaaggtttaattataaaaatgtttttaaccaatacgtgaatactgaacacattcccattgataaaattaccaaaaatacacataaacattttttaattaaatcacgatttgaggatgaagttaaagatatttcgtacgcgataaaattatttaattacataataaaaaataaaaatacgataaatatcagactcaatattattggttatggcccatcagaaacattatataaaaacttggttaactactataatctgaataaatacgtctacattaatgggtaccaacctcagaattatatttatatttctacatccccttatgaaacgcttggttattctattattgaatcgatttttaaaggtaacagagcattgatatatggtggagatgatggacttctaaaagaaatttatcaatcatatcattgtactgaatttttaactaaagacattgaaaaagattgtgagattttattagcatttgcacaaaaaaattataatgataaagaaagaatagaagactgtgaaatgctacaagaaaaatttaattacaaaaattatgccgaaacttacttaaaaaatatagatattgctattaattctaaggaagttaggtttaatagtaattacaaactcgcagtagcaagaaaaagtaagttgaaaaaggataaaaatgaagttactttaaaagaaagagctagacaatgttatcaatgtataagaaaagtatttcatgttatacatagaccattttatcttagaaaattaaataaaattaaacctagtaaaaaatatgtatttatagaatgttttcatggtaaatcatttagtgatgatccgaaatatattgcacatgcaattcgtcgtctgtatcctgaaaaagagattttcgtaagttctgtcaatgcattagtcgacatggaaataagagagaatgggtttatcccaacaagactctcaagtgacgattatgttaataaatttcgtagaagtaaatatatatttataaatggtaatgctattgataaagtgtataaacatcgaaatcaggtttttgtagaaacttggcacggtctacctatgaagaaaatggttaatgatcttaataacaagaaagaacgtatgattcagttgaaaaattttcttcctagaatgaaaaagtgggactatttattagtttcttcagatttaaataagaaattatttgagtctgctttccaaacctctaaaaatcctaagttaaacatccttaattatggtgcgcctagaaatacgtatttattaaaaaataatacacttgaagaacaaaatagaattaaacttaaatacctatttaagttatctgataaaaagaaatatatcttatactgtccaacatggagaagaaacgaaagggaaacaattactaatatagatatcgagaaattaatagattatttgcctacagagtatgatattattattaaacttcacccaaatgaaggggctctacgtaaatgctacagtcatattaatgaacgcgtgcattgtttctttaatgaattagttgatatccaagagttatatttaatcagtgaatgtattataaccgattattcgtcaaccatttttgattatgcgcatttaaataaaccaattatattattgcaagaagatgaagagctatatcaaaaagaaactggctactactttaatatattcgattatggtagttttactataggcagtaagaacgaagagctgttagctcaacaaatcgtggaacatgaaagtgttgactattccagattgattaacttattaatgactaacgattcaacggatagttgcgaaaagatattaaaagagatttttgaaatataa

SEQ ID NO: 1147 - DNA, 999 bp, Staphylococcus capitis
atgactaaaattaaaattatgagtgttagagatgaggatttaccttatattgaagaatggtctaagcgtaataatatagaagttgatttatcaagagagcaactaacagaagataatgtcgagacagtttcaggtagtgacggtctctcattatctcaaactttacctatctctgaagaaatttataagaagttagaatcatttgggataaaacaaatcgctcaaagaagtgctggatttgatgattatgatttagacttagcgactaaatataatctaattatttccaatgtgccgtcatattcaccacgtagtattgctgaatttgcggttactcaagctgttaatgtcgtacgttattcaaatcgcattcaaaataagatgcaagagtacgattttagatgggaaccatcgattttatcgcagtctgtgagtgatttaaaagttgctgtaattggtactggacgtataggtagtattgtagctcaaatatttgccgaaggatatcgtagtgaagtagtagcatatgatccatttccgaatgaaaatgtggctaagtatgtaacttacaaagatactttgcaagaagcgattgaagaagcggatattgtgactgtgcatattccagctacaaaatataatcatcatttgtttaatgaggctttatttagttacttcaaaaagggctcggtattcgtaaattgtgcaagaggttctttagttgatactcaagcactgatatcggcgttagaccaagggcgattaaagggagttgccttagatacttatgaacttgaagtaggtgtatttacaacagaccgacgtggagaagatttgaacgatgaattattaaactcattaatacaaagggaagatattattataacaccgcatattgctttctatactgaagcagcagtggagaatcttattgttgatgccttagatgctgctatggatgtcataaatactggagatactcgtctgagagtgaattag

SEQ ID NO: 1148 - DNA, 1161 bp, Staphylococcus capitis
atggtaatttcaaatagacttgctacaatccctgatagttatttcggaaagacaatggggcgtaaagttgaacatggatctcttccgcttattaatatggcggtaggaattcccgatggagaaacacctaaaggtattattgaccatttttctgaagcgttacgtattcctgagaatcaaaagtatggtgcttttcacgggaaagagtcttttaaagaagccattgtaaatttttatgaacgacaatatggtgtcacacttcataaagacgaagaagtttgcattttatatggcactaaaaatggtttagttgcattaccaacgtgtgtagtcaatcctggcgaaacggtgcttttaccagatccaggatatactgattatttagctggcgtcatgttagcagatgctaaccctgtacccctagaactagagccaccagattatctacctgattggaataaaattgatccacaagttttaaaagacactaaattaatttatttaacgtaccctaataatcctactggttctacagctacacaatccgtatttgatgaagcagtacaacgatttaaagatacagatactaaaattgtacatgactttgcatatagtgcctttgggtttgatgataaaaacccaagtattcttgcatcggaacatggtaaagatgtcgctatcgaaatcttttccttatccaaaggatataatatgtcaggatttagagtcggatttgctgtaggaaataaagacatgattcaagctttgaaaaagtatcaaacacatactaatgctggcatgtttggagcattacaagatgccgccacgtatgctttaaataattatgatgattttttgatacaacaaaatgaaacatttagacgaagacgtgacacatttgaagcaaaacttaaagaagcaaaattaccatttgttcattctaaaggtggtatctattcttggttgcgtacgccacaagggtataatagtgaacaatttgaaacgtttttattgcaagagaaatctattttagtagcaccaggtataccttttgggaaaaacggcaagcattatgtgcgtatttctcttgcattagacgataagcaactagaagaagctacagagagattaacagaccttgccaacatgtataatggctaa

SEQ ID NO: 1149 - DNA, 1506 bp, Staphylococcus capitis
atgaatattgctgtaataggagcaggcgtcactggattagcagcggcagcaagacttgcttcgcaaggtaataatgtaacaatttttgaaaaaaatgggtatccaggtggtcgaatgagtcaattcactaaagatggctttacctttgataaaggtccttctatcgtgatgattcccgaggtatacaaggcagtatttgaagaaagcggtaagaaatttgaagactacgtagatatggaacaattgcgctatatttatgatgtttactttgggaaaaatgacaaagtaagagtacctactgatttagccgaacttcaagaaacgcttgaaagtattgaaccaggtacgacacatgggtttatgtcatttttaactgatgtttacaagcgatatgaaattgcgcgctatcattttttagagaaaacatatagaaaggttacggatttctataatgtagattcgcttattaaaggtttgaaattaaaaacattaaacaatgctgataatttaatagaaaattatattgataatgaacgaatacaaaaattattagcatttcaaatgttatatataggaattgatccaaaacgcggcccctctttatactcaattattcctatggtagaaatgatgtttggtgttcactttattaaggggagcatgtatggattaacacgtggacttgttaaattaaataaagatttagatgtgaatattcaattaaattctaatatagaagaaatcatcatcgaccctaaatataagcgtgctgatggcgtaagggttaatggtcttgtgcaacgattcgataaagtattatgtacagcagattttccttatgcagcggaaaaattgatgccttcacattcacccgtaaaaaaatataaacctagtaaaattgaaaaattagattattcttgttctgcatttttaatgtatattggtattgataaagatgtgactagcgagatgttgctacataatgtcattttttcccaacaattccgacaaaacatagatgaaatatttaacggttcattatctgaagatccatctatttacgtttatgtgccagcagttggagatcggagtatggcacctgaaggtcaaaccggtatctatgttttaatgcctacgccagaattaaaaacaggtcatattaattggaaagatgaaaatgtgattaggaaagttaaagatattatctatcgtcaattagagacaattgacgtattagaggatgtaaaatcaaatgttatatctgaaactgtttatacaccaatcgattttgaaaatgattataatgcgaagtttggtacagcatttggtttaatgtcgacattagcccaaagtaactactacagacctccaaatgtttcgagagattacaaagatttatattttgctggagcgagtacacatcctggtgccggagtacctattgtattaactagcgctaaaattactgtaaatgaaatgttgaaagatatagacaataatatttag

SEQ ID NO: 1150 - DNA, 864 bp, Staphylococcus capitis
atgacatcgaatgaaaaaaactttaaatactgccatcaaattatgaaagaacattctaaaagtttttcttatgcttttgattatttacctgaaaatgaacgcaaagcagtatgggcgatttatgcagtatgtcgaattatagatgacagtattgacgtacatgaaaatcctcaaatacttaaaaatatacacgaagatattataactatcgagaaaaatcatgacgttgaaaactacgaatttaaaagcaatcaaatgattatggaagctttgtatacagtttctcaaaatttcacaattgaatatcaatctttttataatctcattcaaactgtatatgaagaccaggattttgagatgtttgaaactgatgatgaattattaaactattgctatggcgtagcaggtacagtgggagaagtattaactcctgtactagcagagcaaccaaatgaagaaacgtatcgaatcgcgcgtaaactaggagaagcacttcaaataaccaatattttaagagacgtaggagaagattttgagaatgacagaatttacttcagtaagtcgagtttgtctcgatttgatgtctctattgaaaataattttaacaatggagtgtcacagcaatatattgatttatgggagcatcatgcgaaactagctcaagaagactatgatattgcactatcaaatcttggtgttttcaataaagaagcgcaaccaattattgaattagcttcaattatttaccgcggcatattagatgaagtgagaaaagcttcctatacattacatcgtcgtgtctacgtttctaaattagataaggtaaaaatgtataaaacaataaaaaagaaatatcatttatag

SEQ ID NO: 1151 - DNA, 1113 bp, Staphylococcus capitis
ttgaaacttatacaactccttttatcattagcatctgttatttcattaatttgtggaaaatttatatataatagaagacatacattatctcgctcgaaacatagtactattcatagcaatgaattaacagttattataccagctagagatgaagcgcaaaggttgccacacttgttaagatctttgactaagcaacatggcatctatgaaattatagttatggacgatgcgtctcaagatgggacgagtgaggttgccaaagcttatggagcaactgtttatgaaactaaagaagatagccaatggtatggtaaatctcatgcgtgctatcaaggagcccaacatgttcaaacgccattaatgatgtttgttgatgcagatgtcatctttaatagtcatgctattgaggcgatattaaattcatttgctaagcaagggaatcaaggactattaagtattcaaccttaccatgagacttttaaattttatgagagtctttcggctatctttaatttaatgacgattgtcggaatgaatcgattttcaagtttagcgggtaaatttaataattatacggcttttggtcctgtcacaataatgaataaagaggattactttaaaacaggtggtcataaaaacgcacgcaacactattatagaaggctttgcattaggagaggcatttagtcaatctaacttgcctgttacagtatacgaaggtagtgaatatgttaagtttcgcatgtatgaagaaggacttcgctcacttatacaaggatggacaaagcatttttcagtaggagccaatcaaactgaacctaaagtaatgttggcgattgtaatgtggttaatgggctcactcacatctacaatggctttactacttggatggattgctaaaccgatatcgttaatattttccggaattgtttatattttatatacatgggaatttgtaagtttacatagaagagtgggtgctttttcgataatattgctcattcttcatccaattttgtttgtgttctttattattatctttataaactcatggcgacacgctcatttttcaaaaaaggtaaaatggaagggtcgtacatttgatataagttga

SEQ ID NO: 1152 - DNA, 1491 bp, Staphylococcus capitis
atgactcaatccatcttagttattggtggtggtttaggagggatatccgctgctattcgaatggctcaaagtgggtataaaataacattatttgagcaaaataatcatattggtggaaaggtgaatcgtctagagaaacagggttttagctttgacttaggtccatctattttaaccatgccatacatatttgagcgtctttttaactatagcgggaaaaatatggctgattatatcgaaattgaaagattgccgttacaatggcggagtttctttcctgatggtgaaatcattgatctatatgaaaatactgaagcaactttacttaataatttgcagttaggtcaagaagataagaaggaactcgacaattatttaaaatatactaagcgtatacatcgttttactgaaaagggatatttcaattttggcttagatacgttacgagaaattataaaatatcatggaccttttaaagcattgcgaggttttgattacttttcaacaatgcaacaagcaattcaccgttatatttcgaatccaaaattaagagatatgctaggttactttattaagtatgtaggttcttcttcctatgatgcacctgcagttctctcaatgttatttcatatgcaacaagaacaaggattatggtatgtcaaaggtggaattcataaattggcactagcgctaaaacaattggctattgaagaaggcgtggacatacaaatgggggttgctgttgaaaatattaaaacgtatcatcaacgcgttacgggcgtacgtttaagtagtgggaagtatgttgaagcggattatataatttccaatatggaggtcatccctacctatagagagttattgcattttaatcaacaaaaaattgaccaactcgaaagaagatatgaacctgcaagctcaggttatgtattacatttagggatagacaaatcctattctcaacttgctcatcataatttctttttctcaaaggactctaagaaaaactatgatgaagtattccatcaaaaggtattacctcaagatccgacaatctatttagtaaatgttaataaaacggatgaacaacaagcgccacaaggatatgaaaatattaaagtcttaccacatataccctatattcaagataaaccatttaaaaaagaagaatatgcagcgtttaaagaacgtgtactaacgaaattagaacgaatgggactgactgatttgagagcgcatattatatatgaagatatttggacgcctgaggatatccaacataattatcgctcaaatagaggggccatatatggtgtagtcgcagataagaagaaaaataaagggtttaaatttcctaagcaaagtgagtactttgacaatctcttctttgtgggaggctctgtaaatccaggtggaggtatgccaatggtaacgttaagtggcatgcaagttgcagacaaaattaatgctattgaagcgggaaggagttag

SEQ ID NO: 1153 - DNA, 486 bp, Staphylococcus capitis
atgaaagctattaaatctataactcgccttattattttgcacagtctattttggtttgtcgttcaaatgtctattgcacatttaggtacacgtatccctaaatcattttttgaaaaatattcatgtttatttcgatcttttcaatgggaagaaaatggtgaactttgggatcatactttaaaggtaagtaagtggaaaagattgatacctgaaggtgctcaaattaataaggatatctatgataaaagcaagttatcagtaaatattgaacagacgcgtcgcttattattggaaatgagacgtgcagaattgatacattggatttccattttacctgtgtggctatttgttaaagctccacggtacatcaaaatgattaacattgcgtacgtaacgtttagccatcttccagtgattgtagcacaacgatataatcgtccaagaatcgaacgtttaatacgtataattgaaaagcgaggtaagtaa

SEQ ID NO: 1154 - DNA, 702 bp, Staphylococcus capitis
atgaaaaagacagttatcgcttcatcattagcagtatctttaggaattgcaggttatgcattaacaggtaacgaagctcacgcttctgaaactactaacgtagatcaagctcacttagctgatttagctcaacacaacccagaacaattaaactctaaaccagttcaagctggtgcttacgatatccacttcgtaaacaatggtttccaatacaacttcacttctaatggtactaactggtcatggaactatgctcaagttggttcaactactcaatcatcagctaattacactaattcatacagccaagaaagttcaaaccaatcagtaagttcaaaccaacaatcaagcaatacaagtgttaaagctgtttcagctccaactacttcaactcataattacagcacttcaacaacttcatactcagcaccatcaagctcagcttcaactggtggttctactaaagctcaattcttagctgctggtggtactgaagaattatggaacgctattgtaatgcctgaatcaggtggtaacgttaacgcttctaacggtcaataccatggtttaggtcaaactaaccaatcttggggttacggttcagtatctaaccaaactaaaggtatgattaactacgctaaagaacgttatggttcaatcggtaacgcaatttctttccgtcaatctaacggttggtggtaa

SEQ ID NO: 1155 - DNA, 1407 bp, Staphylococcus capitis
atgtcgcatcacatcgacacattacaattaaaagtggcacagttgagtagaaagacccatgagttaggtatacctgtcatgatcatttttgaagggatacccgcgtctggtaagacacgtttatcaaatgatttattacttcaattagacgcgaagtatacaaactttatcgctacgaaatctccagaaacatacgatttaagatatcaatttttacaaaaatattggaatactctgccacaaaaaggtgacatcaacatttattttagaagctggtattcacattatcttgattataaggaaaataatatcaaacatcatcaatatgttaattatgattcattacttaaacaaattagtaatttcgaatcaatgttgaagaaagataattatgaaataattaagttctttatagaaataaatgaagagaaacgccaagctcatattcaacaaactaaaagtaacccgttgatgagatggaaggttcaagaatatgaggaggtaataccccaagatgtttatttaaatgaaatgagacgtatcatacacaattgtaatgattggcaaatcattgattatacggttagagaacaagcaataacaaacatgtatctaaatataatagaaagattagaatatgcgcttgaaaaataccaaaaacatgaagaatatatagatggagaatttaatagtcatttctcaacgtcgttatttaatattgaagaatctaaaattaagaaaaaagattaccaacatcaaatagtagaattacaaacccgtatgagagaaattcaatttgcgttgtacaaacgtaaaatccctttagttttagtattcgaaggtatggatgctgcaggtaagggtgggaatattaaacgtatcagagaaaagttagatccgactggttatgaagttaatggaatcagtgcgcctacagatgttgaaaagaatcatcattatttatggagattcgctaaaaaaatgcctaaatcaggacacatcgaaatttttgatcgcagttggtatggaagaatattggtggaacgagtcgaaggatttgcagagcatcatgaatggaaacgcgcatatgatgaaattaatcagtttgagagaatgtggacggatgaaggtaccataattatcaaattctttttatgcttagataaagaagaacaattgcaacgttttaaagatagagaacaaaatccaaataagcaatggaaaattacagacgaagattggcgtaatagagaaaaatgggatatgtatttagaagccagtcaagatatgattaagtatacgaatacgaagttagcgccatggcatgtgataaaagcagatcataaaaaaacaagtcgtctcgaagttctcaaaacgattattaaaagatgcgaagacgttttatag

SEQ ID NO: 1156 - DNA, 1059 bp, Staphylococcus capitis
atgtcagctattagaaatatcgacggaccaaaggattttatttttagagttttatcaggggtagcaattggaattgtcgcaggactcgttccaaatgcgattttgggagagatttttaaatatttaatgcaatatcagcctatttttaaaactttactaggagtcgtgcaagccatccaatttactgtaccggcccttatcggtgcacttattgctatgaaatttaatttaacaccattggcaattgccgtagttgctagtgcttcttatgttggaagtggtgaagctcaatttaaaaatggtgtatggatcgtcgcaggtataggggaccttattaatacgatgattacagctgcaattgcagtattattcatattattaattgaagaacgtgtaggaagtatggccctgatagtctttccgacaattgtaggcggcctatcagcaacgataggtatttttacattaccttatgtgagattaattactacaggtattggaaatatgttgaatagctttactgaattacagcctgtccttatgagtatgttgatatctatggtatttagctttattattatatcgccattatcaaccgtcgcaattgcaatggcaattggcctatcaggtattgcagctggttcggcatcaataggtattgctgctacagaagctgtccttcttattggtacgagccaagtgaatcgcttaggcattcctttatcaattttctttggtggcgtaaaaatgatgatgcctaatatggtcaaatatcctgtgattatggtaccaatatttatcacagcagcattatcaggtatcgcatcaggtatcattggtattggtggaacaaaggaatcagcgggcttcggatttataggtatggtaggacctattaatgcttttaaatttatgcatgttgattcagtatggttaagtctgttactgattatagttgcgttttttgtagtgccgtttttaattgcttggattttagatttattattacggaaagtaattcatctatatcgtaatgatatatttaaatttatgggatag

SEQ ID NO: 1157 - DNA, 1011 bp, Staphylococcus capitis
atgtggaagaaaattgtatgttctgttggggccacaacaggtgctgctattgtgggctcttacttatatactaaattaattgaaaaacgtagttataagagctttttaaaagaaaaatttaatcatgtttcacgtggcaaacaatactttattaagccgaagaagattgatcaaatgcttaaaatggctcaaatcgaaaatagcaaacctttcaaagctacaaaatatagatttaatcatagagtggatatacgagaatattatggtacacatacgtactatgttaatcatcaaaatgatccacatcagttaaagattttatatatgcatggtggttcttgggtcgcaggtccattcaaagagcattatcaaatgatggatcaacttgctactgattacaacgcagaagttattgcacctatataccctaaagtgcctcaaagtggcaaacgcgcaacatttgatttaatgactcatatttatcgtaatcttttagattctgtgtcttcatccgaccatattatcattatgggagattctgcaggcggtaacatcacattaagctacgcgcagtatcttaatgaaattaatttacctcaaccaggtcatattatcactatatcaccagtggttgatgccacatttactaatccagaaatacctcattacgaaaaggtagatagtatgattggtaaagaaggacttaaaacatttgctaaaatatgggctgaaagtgatgagttagacaattataaagtatctccaattaatggagactttaacaatctcggtcacatcactctttcagtaggaacacatgaattactttatcctgacgtaattaagttatctcgtaaattaaactctgaaggaattagccataatttacttattggaagtcatatgcttcatgactatgcgattcagaatattccagaagcaaaacaatttagagaaaacttaagatatatcatcaatgacaatcgaaaaattaaagataatattatttaa

SEQ ID NO: 1158 - DNA, 1398 bp, Staphylococcus capitis
atggcagataaactgcaaagagaattaagcaataggcatatccaattaattgcaattggtggtgctattggtacaggattattcctgggcgcaggtgcttctattcatttagcaggaccatccatattacttacttatattatagtaggttttatattatttatgtttatgagagcgatgggagaattgctcttatcgaacttaggtttcaagtcatttggtgacattgcccatcatcacataggttcaatggcaggatttatggttggttggacttattggttaacttggattatttcaggtatggcggaagttaccgctgtagccaaatacgtcgacttctggtatccagacatgcctaactggattactgcagcagctacaatattagtattagtagcattgaatttatttagtgccaaattatttggtgaacttgaattttggttatctattattaaagttattacaattttagctttaattattgttggtattgtaatggtaatctttgctatgaagacggattacggtccagcgacggtaactaatatttggaaagaaggcggcttcttcccaaatggtgcctcaggattctttatgtcattccaaatggcaatattctcatttattggtattgaattgataggtattacagcaggggaaactaaaaatcctcatgaaacaatacctcaagcaattaataacgtaccattccgaattttaatcttttacataggttcattagcagtcattatgtcagtagttccttgggacaaattagatcctgcagaaagtccttatgttaaattattcggattaataggaattccttttgctgctggtattattaactttgttgtactaacagcagcggcttcatcatgtaacagtggtatatttgcgaatagccgtacaatgtttggcttagctggaagaaatcaaggtccaccgtttttacataaaacaaacaaaaatggcgttccttacaatgcaattttagttacttgtggattattaggcattgcagtaatattaaatgcgatttttaaagatgctactaaagtattcgttcaaatcactactttctctactgtgttgaatatttcaatttgggcagttattatggtagcttatattggatacttaaagcacaatcctgagcaacataaagaaagtaattatagaatgcctggtggtaaatacacggcttatggtattttagtattctttgctttcatttttgttattttacttattaatagtagtacgcgattagcagttctatttattccagtttgggttctagtattattcttgatgtatcaaaaatacaaaaaagaatctcgtaaagctgaaattccaacagaagatgatgcagaaactacagaagaataa

SEQ ID NO: 1159 - DNA, 375 bp, Staphylococcus capitis
atgcattcaatgtggtttaatctaaatgtaaaagatttagatcgtagcgaacagttctttaagtctctaggatttgaaattaataaaaatccagaaatgctagataaaatgttaggtattacaattggacaaacgattgtgatattgatagaaaataatcacttcgagtctgtatcacatcaagatgtcgattcaagccctaatgaagtgatggtttcgttaggtgttaaagaaaataaagacgttgatgaattattagcgaaagtggaacctgctggtggaacaattattgaaaaaccaggtgtaagacaagggtattatggagcaatgtttaaagatcctgatgggcataagtttaattttcttgtttgttaa

SEQ ID NO: 1160 - DNA, 819 bp, Staphylococcus capitis
atgagtaaaagtatattagtcattggttcaactggtaaacaaggaaatgctgttgttaaacaattattggaagatggttggcatgtgcgtgcgtttactagaaataaaaataatgaaaaattaacatcaattcataatgatcgattagagatttttgagggcgatttgagtgatagagaaagcttgactcaagcgatggctgaccaatatggagtatatagcgttcagcctattattccagaccatgttgaagaggaattaaagcaaggtaaacatattatcgaaactgctgaagaacaaggagttaagtatgtcgtttatagcacagcgggtggtgttaatcgtgatagaacaggtcctcactttgaagcattagcacaattagaaaataagataaaagcatctcgtttagattttacaattattaaaccatcgttttttatggataacttcttaagaatcactaaagtttcagatggagaaattaaaatcccagaatttattaatcctgaagtgaaattttcaatgatttcttctatcgatattgctaaaattgcgtcagcacttttcaaagatcctaaaacatataatcatcaagatatagaaattgcttctgatgagctgactctaaatgaagtagtcaaaacttttgcaaccgtaacaggtaaaccaactgaaattgaaggcgaatttacgagtggcactgctgaaagaagttggcttgaaaataaaggttatgttatagattttgtacaaatggaacgtcttaatcccacgcgcttaacacttgatgaatggattgctcaagcggcattttaa

SEQ ID NO: 1161 - DNA, 165 bp, Staphylococcus capitis
atgaatgctcctagcggttcctttggtaatcagttacaaagatttatccatcgcgtttgggatgttcgtgacattataaattcaaatattaaagaaaatggtcaaacacctgaagaatatacttatttaaaaggcgaaaaagaagattattggttcttacaatag

SEQ ID NO: 1162 - DNA, 132 bp, Staphylococcus capitis
atgtcactaaataaagagcaaagacgtatcactgctatagaattacgagaacatttccataattcaactttaaatattgaagacatagcaaataaaatgagtatttcggttgaagaagtggaaaaggtataa

SEQ ID NO: 1163 - DNA, 543 bp, Staphylococcus capitis
ttgcgtaaagatgctcttctaaaccgtcaacgtatcgagaataaagcgatcgaactatttaaacaatacggcgttgagacaatcagtatgaatagaatttctaaagaacttggtatcggtatgggaacactttatcggcattttaaggataaaagcgatttgtgttatcacattatcgagcatgatttcgatgaaattattcaaaaaatgaatgatgtagctgcttcatctaattctaaagaagagaagatagaacactccctagatgtttttttgacatttaaatatgaaaatagtgatttattaaactgtattgaggaaagtaatagtaagtctcaatttcatcaaagccaatttttctctgatttatttaatttttactatgatttatttaaagatggcgaggatgattcttgggccatattcaaaactgatatgttattaaaatcactttctactaaagcttatgaaattcaaaaaaataaaagacaactttcaaataatgaaataagagataacttaataaaactatatttaaattaa

SEQ ID NO: 1164 - DNA, 705 bp, Staphylococcus capitis
atggaaaaagttacgttaattactggtggaaataaaggtttaggttatgagacagctaaagaattaaaagcgaaaggctacaaggtttatataggatctagaaatgaagaacgtggtcaacaagcttcaaaagaattaggcgtcgactatgttcaactagatgtaagtgatgataaatcagttcaacaagcctttgaaactatttcaaataaagaaggccgtgttgatgtacttataaacaatgccggtatttcaggaggattcgctaaagtcgctgattttactgctaaagacgtcgaaaaggtatataacacaaatgtttttggtatcgtacgcatgatgaatacctttattccattattagagaaatcagagcagcctgtagttgtaaatgtgagtagcggattgggttcatttggaatggttacaaacccagatactgctgaatcgcaagttaattcacttgcgtattgttcttctaaatcagcggtcacaatgatgactgtacagtatgctaaaggcttaccacacattcaaattaatgcagcagatccaggttctactaatactgatttagttggtgatttcagtaacaactctaaacctgcttcagaaggtgtaaaacctatcataaaacttgctactattgataaaaatggtcctacaggaacatttattgatggtaatggcacaatgccgtggtaa

SEQ ID NO: 1165 - DNA, 1002 bp, Staphylococcus capitis
atgaaaagtataaactttgaagaacattatgttgttgaggatatacaaaaagaaacaatgaaacatatgacatctgatcctaaaggtgtacctatgcaaacgatgttaaaaggccttgaagaaaaatctggttttactgatgcagatgaaatcaaacatcacgatgcacgtattcaattcatggataaacatgacgttgaaatgcaagtattatcttatggaaatggcgccccttccaatcttgaaggcgaacgcgcaattgaattatgtaaacaagcaaatgatacgttagcacaatatatcaatgaacacccagatcgatttgtaggatttgctacattaccaattaatgaacctaaagcagcagaagaagaatttaaacgatgtgtaaaagaattaggttttaaaggcgcattaattatgggacatcctaagagtggcttcctagatcaagatgaatatgatggcatctttgctgtagctgaagagttaaatgttcctatttatttacacccttctccagttcaaagcgatgtttaccaagcttattacaaaggtaactactcagacgtaacagcagctacatttgcttgcttcggttatggttggcacgtagatgtaggtattcatgccattcaccttgtgctatcaggtgtatttgaccgtcaccctaacctcaacatgatcatcggtcactggggcgaatttgttccattcttcttagaacgtatggatgatattttatttgctgaccatctagaacatcctattagttattatttcaaaaataacttctatattacgccaagtggaatgttaactaaaccacaatttgatctagtaaaagcagaagttggcgtcgacagaattttatattcagcagattacccttatgttgaacctgaaaaattgggtacattcttagacgaattagatttaactgaagaggaaaaagaaaaaatcagctataaaaacggagctaaattattaggtcttgagtaa

SEQ ID NO: 1166 - DNA, 840 bp, Staphylococcus capitis
atgatggaaacattagaattgcaaggcgcaaaattacgttatcataaagttggcaatggaccacttcttattttaatccctggtgcgaatggaactggtgatatctacatgccactagctaaacaattacaagaaaaatttacagttgtagctgtagatcgtcgaggatatggacaaagtgaattaactgaatcattaccagaggaagtatctaacccagagagtcgttatcgcgtgaaacgtgatgcacaagatattgctgaattagctaagtcattaagtgacgaacccgtatatgttttaggctcaagttcaggtgctatcgttgcaatgcatgtcctaaaagaacatcctgatgttgtgaagcaaattgcatttcatgaaccaccgattaatacattcttaccgaatgctaaatattggcaagataagaatgctgaaattattgatattgctgtgaatgaaggcatgcctcaagctatgaaacttttcggtgaaacattaaatattagttctattgatgcacaatcaatgtctaaacctgctcaagcagaagatgatgcagagagtaaaaaacgttttgaagaaatgttaggttggtttaaatatgaaattcgccaatacacagaatctgatatctctttagaagatttaaatcatcataaagatatcatcacattacttaatgggactgattccaaaggttctttccctcaagaagttaacttctatattaaagatgaaacgggaattaatattgtagatatccctggtggtcacttaggttatatacaaaagcctgaaggattcgcagaagtattactcaaaatttggaactaa

SEQ ID NO: 1167 - DNA, 639 bp, Staphylococcus capitis
atgttatttgaaagaaataaaccttatactcaagaaactttgttagataaagaaaatattttagagttaattcaattcgaacgtttttgtcgcgataatgccttatgggatagcatgagaacttgtttcgctaaagactcacatgtgaacatttcttggtttaatggtactggagaagaatttgtatcctcctctgaagcaatgaatcgatacgcgccacatcaaatttataatacacaaatgtggattaataaccatcgtgctgtagcaattatgcaagcaacaatccagtttcgagtagatattaaaaacgtagaaatgcaattggattcagacactaaaattatctactgtcttgataaagacaatgatgacgtttggtatatttctaatttaagttgtatttatgaaaaagataaattaactcctgtcattccaacgactattaatttacctaactcagaatttagtgaataccgagaaagttatgcttgtttatcatatgcgctcaatgaactagggtatgatgttaaccatgacttaccaggtatagatagacctgatgaagttaataaatactatcgccaattagataaatggttaactgagaaagatgatgatgaagaagagaaacattag

SEQ ID NO: 1168 - DNA, 945 bp, Staphylococcus capitis
atgaagaagatagatttacatgcacattacatttcacctggttatagccaatttcttgatgactattttaatggtgaaggtgacggcgttaagacgcccccattttcagtagaatcatatttagaattaatgaagaagcaagatattgaatatggcgtattatcgatttcaagcccgcacattagcgttgcacctgatgacgagatgttaaaacttgctgaagaagtgaacgactatgcttcaaatatcgtgcaggaacatagcgaacgtattggtttcttcgcaacattacccttgcccttagtcaatcagagtgttcaatttatagataaagcattagatgaacagcatgcgttagggttcacgttaccaacgaatgcacgtggcgtatatttaggtgatgagcgtttagcaccgatatttgaaagattaaatgaacgtcaagcaactgtagccattcatcctaatgaacctaagccagctattaaagcgatgagcgaagaagtacctccgccacttatggaatttatctttgatacaactcgtacaattatttatatgagtcaaaagaatgtatttagtaagtatccgaatattaagtggattgtacctcattgtggtgctttactccctataatcgcacaacgcgtagcgatgggcaacaagatgtttggatcagagaagcaacctgatgatttagaacaagtaatgaaagaactttacttcgatttggccggtaaggttttaccatatcaattacctactctattagaaatggttgataaaaataaaattgtatatggttctgatgcaccatacacaacggaccaagtagtctcaatgttagcgaatgaatttgaatctacagatttaattacaattgattcaaaaattcatatgctttatgacaatggcaaatcattattagataaaatggaactttaa

SEQ ID NO: 1169 - DNA, 858 bp, Staphylococcus capitis
atgaaagcagaatggaaagagaaactccccatagacggagtaaaagatatctcaccagtaagtggtggtgatgttaatgaagcattcaaagttacaactactgaggatgatatctcctttttacttgttcagcgtaatcgtccagaatcattctatgcggctgaaatagctggcttaaatgaatttgagaatgcaggtatcacagcaccacgtgtgattgctagtggtgaaattaacggagatgcttatcttattttgagctatttagaagaaggtggaagtggaagtcaaagagagctcggtcagcttgtagctaagatgcatagtcaacaacaaaaagagggtaaatttggtttcagtttaccacatgaaggcggagatatttcatttgataattcatggactaatagctggaaagaacttttcatagaaagaagaatggatcatttaagagatgaattgatgcgtaaagagttgtggaatgaagaagataataaagtctatgaagaagtaagaactgtgatggtaaatgaacttgatagtcatgaaagtaagtcatctttattacatggtgatttatggggcggtaactatatgtttttaactgatggtagccctgcactatttgatcctgcaccattatatggtgacagagaattcgatttaggtattacgacggtttttggtggatttactcaagatttttatgaggaatatgaaaagcattttcctttagccaaaggtgcacaaaaaagattagaattttatcgattatacttattgatggttcatttagttaaattcggtaatatgtacgcaggtagtgttaatcgctcaatggatacaattttaaaataa

SEQ ID NO: 1170 - DNA, 1065 bp, Staphylococcus capitis
atgtataaattagttaaacctttattatttaaattagatcctgaaaaagcacatggtcttaccattgatgcattgaaaatggtacaaagagttccgaaaatttatcctatcatggacaaaatttttaattacaatcacccatcactctctcaaaccattcatggcatcaaatttaataatcccattggtctcgctgcaggattcgataaatcttgtgaagtacctaaagcattagagcatgttggttttggagccatagaattaggtggtattacccctaaaccgcaaccagggaatcctaaaccacgtatgtatcgcttaattgaagatgacgcgttaattaatcgtatgggcttcaataatatagggatgaataaagcacttagtcatttacgccgtcttgcctatacgatcccagtaggtttaaatgtgggtgttaataagaagacgtcttacgaagaccgttatcaagattatataaaagttatcgatacatttaagaatgacgtgacattcttcacagttaatatcagctcacctaacactgagaatttacagaatttccatgataaagatgaattcacgatgctttgcgaagcgctcactacttttaaatctgaaaatgatatcaacgtacctatattcttgaaattaacttcagatatggaacttgaaggattcaaaaacatcttaccttccataactaagacttttgatggcgttatactagctaacacgactcgtcaacgtgacggtttaatttctaagaataaaactgaagaaggcggattaagtggtaaacctttattcgaacgtaatttaaaactcgttaaatacgcgtatcaacaaactaaaggtaaattcttaattatcggaactggtggaatctttagctctgaagacgcaattaaaatgttaagaaatggtgcttctttattacaaatttattcttctttagtcattgaaggtccaggtttaactaagtcaatgaataaagacattgctaaatatttatctgaaaatggatatcaaaacgtaagcgatattattggtttagacgcataa

SEQ ID NO: 1171 - DNA, 273 bp, Staphylococcus capitis
atgagtgatgagaagaaagagacaacatctcaaactaaccaacaaacgatttctgaaaagcccaatcatcaatctaatgatgacagaataggtttgaatggttaccgtaaaacagacctcgatttagatattgaacgtgaactgcgtgaaatgatggaatcaggagaatcagaaacaaagacggaaagtagaaagtttaagatattctcacttatctcgatgattgcaatagcaggcttagcgatttttagatttatacacagaatgatatag

SEQ ID NO: 1172 - DNA, 717 bp, Staphylococcus capitis
atgattgaagcggataaaattttggcaaaaatgaaaaaccagaagattaattacgatagagtactaagaaaaatgatatctcagtggcaacgtgatggggaacgcccacgtatcttattacatagttgttgtgcaccatgtagcacatatactctagaatttttaactcaatatgctgatattgcaatttactttgcgaacccaaatattcatcctaagaatgaatatctaagacgtgctaaagttcaagaacaatttgttaaagatttcaatagtaaaacaaatagcaatgtcgaatacattgaagcagaatataaaccacatgaatttatgaagatggctaaagagaaagggctaactgatgagccagagggtggattgagatgttcagcatgctttgaaatgcgattagaaattgtagctcaagcagctgttgaatatggttacgactattttggaagtgccataacactctctccaaagaaaaacgcacaacttattaatgaactaggaatggatgttcaaaatatttataatgttaaatatttgcctagtgattttaaaaagaataaagggtacgaacgttcaattgaaatgtgcaaagactatcatatttttaggcaatgctattgtggttgcgtctttgctgcaatgagacagggtattgattttaaacaaattaataaagaagcaaaggcatttttacaacaattttaa

SEQ ID NO: 1173 - DNA, 501 bp, Staphylococcus capitis
atgagtaattttaatgatttgatgcttaattggatcacaagtacctctacaaaaaaggatgaaagagaaaagtcagaacttaaccaaaaactagcaaacatgtttgctattaactatttggttacagttctaacaattgtattctttacaattattgatatgtatcatcatacaattacaatgcatacgatagtgttatttgccgtattctttatatttaatattatacttatcattaactttggtaagaataaacattttgaggaagtcgcatattcacccaaagaatataagaaattaataagaagatatggtatcttgagtgttgtatttatggtttattttggtgtttgcatgactctcatcggtgtgataatagattatttatggaatgatcctattgattggagcggccatttactgaatggacttatttcaggagtaatatttggtggctttatgttttgcgtctatttagttaagcttaaaaaggaatactag

SEQ ID NO: 1174 - DNA, 288 bp, Staphylococcus capitis
atgcatgcagaatttgagattttaggtgttaaaatcttatgttctgattcttttggacgtgtagataatataaataatggtatttctttattaattgattttgatactaatgataaaacagatactgaacgtgttgagaatttctacaataaaattaaagatcacgaatctatcaacattgaaatgccattagaagagcaattctggggcggtaaaatgggaacttttaccgataaatatggtgtgcgttggatgcttaacggccaagattattctcaaatgaattaa

SEQ ID NO: 1175 - DNA, 594 bp, Staphylococcus capitis
atgtctcatgatagaagagtaagaaaaacacaaactgcaattaaagatgccctcattacattattagaaaagaagcgttttgaagaaattacaattcaagaaacatctgatttagcagacgtaaatagaagtacattttatactcactttatagataaatatgacttattagataagatggaaaatgagaaaattgatgaaattagaagttttctcgagagtagtaagaatgatgacgaactgaaaatttcagaaagccagttaagagagacaatggattttgtgattaatagtataggagaacatctagatttctataaacttatgtttaacttaggtaaagagtccaatttacatgaaaaattatacgaactattaactgggcacttgaatcatgtagttaacgataatgataaaatcggagatattccatttccgtattttatgagttatgtctcaggcgctggtttatctttaatacgtcattgggttgaggatgaaaatagaatttcaaaagaggaattgattcaacatttttatgaaatcgttaataatggtccagcaacacttataagacgagaaaagggaatttaa

SEQ ID NO: 1176 - DNA, 1683 bp, Staphylococcus capitis
atgaatcatttattaggtaatccagaattaaatgtaactgatgttaatgatgttcataaagggctcaattatatcgttgtagatagcgtccaatatggtaatcaagagatgataatggaaaaagatgtagaagttatcatgaaagacggtgaaactctatatttaaatatttttagacctaataaggaaggtcgttttccagttgtcatgtcagcagacacatatggtaaagataacaaacctaaaatcactaacatgggggcaaaatggcctaccttaggtaatatagcaacatctagttttacacctgaggaatcccctgatcctggattttgggtaccaaatgagtatgtagtagtcaaagtagcactgagaggtagttcaggttcaaatggcattctatcaccttggtcaaaacgtgaagctaaagattattatgaagtcattgaatgggcgtcacaacaagaatggtccaacggtaatgttggaacgaatggagtctcttatttagcagtgactcaatggtgggtagcctccctcaatcctcctcacttaaaagctatgattccttgggaaggattaaatgatatgtatagagaggtcgcttttcatggcggaattcctgatacaggatttttccgtttttggattaaaggcattttcgctagatggccaaataatccaaatattgaaggtttaattcaagctcaaaaagatcacacactttttgatagctattggaaagcacatcaagtacctcttcctcaaattcgaattccgttatttacttgtgccagttggtctacacaaggtttacacaatcgtggtacatttgaaggctttaaacaagcaagctcagttaataaatggttatatgttcatggtcgaaaagagtgggaaagctattatgcgcgtgaaaatttagagaagcaaaagttattctttgattattaccttaaaaaagaggacaacgattggaaagataccccaactgtgacttatgaagtccgtgagaagttctatcaaggacattatcgtgaagcatctgatttccctatacctaatacacaatatacagctctatatctagacggagagaatcattccctcaatttagataaaccaaaacaaactcatgtttcacactatcactctgaaaaagataatgagtcactacgtttcacatatacattttctgaagatacagagttaactggaaatatgaatttaaaactatgggtttcttctaacgaagcagatgatatggagatattcgcaggtattaaaaaattagatagacaaggtaatgaagttaatttccctgacttcaaccatattgaacaaggacaagttgctacaggttggttaagagtatctcaccgtaaattagatgatgaaaaatctactattatacaaccatggcataaacacgaacaagaattaaaattgaaaaaaggcgagattgtaccaattgaaatagaaattttaccttcaagtacttactttaaacaaggtgaaacgctcgttgtagttataaaaggaaatgaaattattaaaggcactagctctcctggtttaagtacacgttatgaacatcatgaaacagttaataaaggacatcactatattcatactggtgctaactatgattctcaattaattatcccaattatacctcaataa

SEQ ID NO: 1177 - DNA, 1455 bp, Staphylococcus capitis
ttgagattttgtaaatattgtggaaacccattaaatcccaatcataaagtatgtacacgttgtggtaaacctacaggatactctgaacagtctatgtctagaaatgatgtacgtctaccttatcccccagggcgttatagtgatgcttatcaatttaagaaaccgaataaaccattaattattatttcaattttagtagcagtcatcgccattactttaataagtgtgttcatatttttaaagcatcaactgtctccagaacaaagtgtggatcaaatttcagatgcacttaagaaagaagaccatcgtcaactttctaaattactcacttctgatggaaagaagcttaatgataatcaagcacatgcatatcttcgatttttaaaaaatgaaggaaaattaaatgaactttctcaagatttaaaagatagtctgaaaaatttgaagacgtctaaagctaagacgcatacaataagtatcaatcaattagcaattattaaaatagagaaaaatggtaaacgttttggagtgtttgaccattacacgtttaatattcctaaatattctatagcaatgtattcacatgatgatgggaaaattaattatgattacaatggtcaaactcatgctatcaatttaaaaaaggatgaatccgttgaagtaggcacatttccacttggtaattatcaactcgatgccaaaaaacaagttggtaatcaaacattcaagggtaatataactattttaatgacaccagcacgttctatcgttaaggagaattttaaagaaaaacgctttatgattaagcctaatcatacttataaagtaaatgatattaagttgtttattaataataaagttgatgaacgtttcgatgaaaataaagtatatggaccatacaattcaaatgataatattatggttcatttagagggaaaaattggaaaacatacagttaagacaaatagtgaacgtgtaggattgccggaaggaactgaagagtataagacaatcgaactatcttttaatagtgaagaaatcaataaatacgaagatgaatctaatgagtctgatgactctagtggctctgataaagatgacaaagaaaagaaagatagggacgatggcgacaaaggtacatctgaagatcataaaagtaaagaagatgaggataaagaagataaagaagataatactgagaaaagagtgaaggctgacttaacgcaaacagaagcgataaatatcattaagaagtatgaaaatgataaatttgaaagtaaagattattcttttgagctgcaaccctaccaaagtagcggtgaaaatatcgtaaaggtaaagaataataaagggaaacttgtttatacataccgtattaacactccaattaaatttatatataaaatagactctgacaacaactacatttcatcaggagtctatgaaggaatttaa

SEQ ID NO: 1178 - DNA, 894 bp, Staphylococcus capitis
atgaattgtcctaaatgtggccagaatattcaaccagaagacgtcttttgcggtaactgtggtactaagcttcaatctgttactacagaaactactgggataacatcatcagaaactacaaataaagagacattagataaacgaactaaagaaactaaggagcatgtacaatcaacacttacggatgttaatcatcatcaaaatattaatcaatctgtagtcaatcaaaatgatacacatcatcctgttaatcaaacatttgaacaggcacgtacaaatgagaaagattttcttaatgaattaaaagaattttttattaatgcttttaaacgaccagatcaagttattaaagataatcaaacatttagttttagaatactgattactcttattgttgcaggactactgttgataagtttatttactactatgcttattccgagtcaagtaggtttatttgaaatacaaaaagaagatatcttacttagatttgttttaagtttagctattatcttagcaattcatattggaattacatatgcggtggtaagattaacagttattcctgaaatcaagttcaataaattattatcagattatgtaatcatcaatacgtttacagtagctttattaattttctcaggaataatttttgcattaaattcatataaatttgcggcacttatttttattgttatgtatctattttttacaatatcacccgcgtatatcctcgggaaatatagttcattgtatgaaactagaatttcaggtgtttacggcgtgattattttgatatttgctttagccatcatagctttaatctttggggaaaacgtgattgaaagtgtagtaatgcaagacttaagtagattgttcggaagagtgatttaa

SEQ ID NO: 1179 - DNA, 384 bp, Staphylococcus capitis
atgataagaacgatgatgaattctaagattcatagagcgagggtcacggagtcaaacttaaattatgtaggtagtattacgatagattcgaatatcttagatgcggtggatattttacctaatgaaaaggtcgctattgtgaataataataatggtgccagatttgaaacatatgttattgctggagaacgtggaagcggtaaaatttgtctaaatggtgcagcttctcgtttagtagaagtgggtgatatcgtcattataatgacttatgcacaattaaatgaaaaagaagttaaaaatcattcacccaaagtagcagttatgaatgagtacaatgaaattatagaaatgatacatgagaaagagaactcgattgttccataa

SEQ ID NO: 1180 - DNA, 855 bp, Staphylococcus capitis
atgactaaaatcgttacaactattaatgatatgcaagagattgtgaagtcataccgttctcaagggaagacaataggctttatacctacaatgggagcattacatgatggtcacttgaaaatgatgcgtatgtcagttgagaacaatgatgtaacagtcattagtatatttgttaatcctttacaatttggaccgaacgaagattttgatgcatatccacgtcaaattgaccaggatgttaaagctgtagaaagtattaatgttgattacgtcttttatcctagtgtggaggaaatgtaccctgatcagttagatattacgcttaaggtaggacgtttagctgaagtgcttgaaggtgcacaacgaccagggcacttcgaaggagtagtcacagtagtaaataaactatttaatatcgttagtcctgattatgcttattttgggaaaaaggatgcgcaacagttagcaataattgaaaaaatggttaaagattttaatcatcctattcaaattgttggtgtcgatattgtacgtgaagaggatgggttagctaagagttctagaaatgtatacttaactcaagaagaacgaaaagaagctattcatttaaataaaagtttgcaaattgcacgtgatttatatgaaaaaggtgagagacaaagttgtgtcatcattcaaagtattacttcttatttaaacaacaatactagtggacacgttgatgaagtagctatctacagttatccagaattagttgaacagaaatggatgagcggacaagtttttatttcattagcagttaaattttcaaaagcacgtttgatagataatatgattattggagagggcaaataa

SEQ ID NO: 1181 - DNA, 819 bp, Staphylococcus capitis
ttgaaaacattaagtcaattgataaagatgaaagacgagcaaactaaaatttctatggtaacagcttatgattttccgagtgcaaagcaagcagaacaagctaggattgacatgatcttagttggagattcacttggaatgaccgtattaggatacgaaagtacagttcaagtgaccgttaaagatatgattcatcatggaaaggctgtgagaaggggcgcacctaacacatttgtagttgttgatatgcctatagggactgtaggtgtatgtgatgaagatgatttgaaatatgcacttaaactttatcaagcaacacaggcgaatgctttaaaagtagaaggtgcacatcttgtttcatttattcaaaaagcaacacgtatgggtattcccattgtttctcatttaggacttacaccacaaagtgttggtgtgatgggatataaattacaagggggaacgaaggaagcggcagtacaactgattgaagatgcaaaagctatgcaagaagcaggcgcagtgcttctagtattagaagcaattccaagtgatttagctcaagtcattagccaacaattaacgataccagtgattggcattggcgctgggaaagagactgacggtcaggtattggtttaccatgatctgttgaattatggtatagatcgacaggccaaatttgtaaaacaatatgctgacttttcagttggtgtggatggtttaaaacaatatgataatgaagtgaagtcaggtgaattcccttcagaaactcacacttataggaaaaagattatgagcgaggtcgacatcaatgactaa

SEQ ID NO: 1182 - DNA, 876 bp, Staphylococcus capitis
atgacaattgccgttattggtccaggggctgttggaacaacgattgctgctgaattaaaagctgtcttacctgatacacaactcattggtcgccataataaaacaatgacctatttcccggaaaatacttctcaagcacaaaacattgatgttgtttcatacgataacacgcatcattcattcgatgtcataatcatcgctgttaaaacacatcaacttcaaaacgtcattaagcaattaccaactatagcccataaagattcacttataatcttagcccaaaatggttatggtcaatcacaacatattcctcaccaacatgtttatcaagctgttgtctatattagtggtcaaaaaagaaacgataaaatcactcactttcgtgattatcgcttacatctacaagactcatcagatactcgtaagttaaaacagcagctttcttcttctaagattgaacttattttagaaagtgatatccaaaacaaaatttggtataaacttcttgttaacttgggaattaattcaattactgctatagggcatcaacccgctaaaatattacaatcaacacacatgaaagaaatatgtcgttctattcttaacgatgggttacaagttgctcaatcagaggggattcattttccagatcagacaatcgatgacattatgaagatttatcaaggttatcctgatgaaatgggaacaagtatgtattatgatgttttaaatcagcaacccttagaggttgaagctattcaggggtatatctatcaaaaggctagatttcataaacttaacacgccttatctagatacagtttatactttcttaaaggcttatcatcttaaatttatagaaaccaaagatttataa

SEQ ID NO: 1183 - DNA, 705 bp, Staphylococcus capitis
atgactaatgtattgtaccaacacggaacgctaggaactttgatggcaggtttattagaaggaactgcttcagttaatgagttactagaacatggggatttaggtattgggacacttacaggttcaaatggtgaggtcatttttatagatggtaaagcttaccatgcaaatgaacataaagaatttattgaattaactggcgatgaaatgacaccatatgctacagtcactcagtttaaggcagacaaaaatttcagtatttcagataaaaatcaagacgatgtttttgatgaagttaaaaaagagatgacaagcgaaaatatgttttctgctgtgaaaatttcaggtacatttaaaaaaatgcatgtacgtatgatgcctggtcaagaaccaccttatacacgtcttattgattcagcacgtagacaacctgaagaaacacgtgaaaatatcaaaggttctattgttggattcttcacaccagaattgttccatggggtgggttcagcaggattccacattcactttgctaatgatgatcgcgactttggtggtcacatattagattttgaagtagataatgttaatgtagagattcaaaactttgaaacgtttgaacaacacttcccagtagatgcgaaatcatttactgacgctgaaattgactatcaagatattgaagatgaaattagagaagctgaataa

SEQ ID NO: 1184 - DNA, 1665 bp, Staphylococcus capitis
atggctgacaaacaatattcagcagcagatatggtaattgacactttaaaaaataatggaattgaatatgtatttggtattccgggagcaaaaattgactacttattcaatgcattagaagatgatggtccagaattaattgttacacgtcatgagcaaaatgctgcaatgatggcacaaggaatcggacgcttaactggtaaaccaggcgttgcacttgtaacgagtggtccaggagttagtaatttaacaactggattacttactgctacatctgaaggtgatccagtattagcaatcggtggtcaagttaaacgcaatgacttattacgtttaacacatcaaagtattgataacgcagcactattaaaatcatctacaaaatatagtgctgaagtacaagacccagaatctttatcagaagtgatgactaatgccatgcgtacagcaacgtcaggtaaaaatggtgcaagttttattagtattccacaagacgttatctcttcaccagttgaagctaaagcaatttcactttgtcaacaacctcaacttggtgtaccagctgaaaaagatgttcaagcagtcattgatgctatcaaaaatgcaaaattcccagttttattagctggtatgagaagttcaagccaagctgaaacagaagctattcgtcagttagttgaaaaaacaagtctccctgtcgttgaaacattccaaggtgcaggtgtgattagtcgtgaattagaaaatcacttcttcggtcgtgtaggtctctttagaaaccaagttggtgatgaattattaagaaaaagtgatttagtagtcacaattggttatgatccaatcgaatatgaagcaagtaactggaataaagaattagacactaaaattattaatatcgatgaagttcaagcagaaatcacaaactacatgcaaccagtcaaagaattaattggtaatatcgctggtacaattgaacttatttcagaacatgttgatgaaccatttattaatcaagatcatttagatgaacttgaaaaattaagagtagagattattgaggctactggtattaaagcgacgcataaagatgatgtgatgcacccagttgaaatcattgaatctatgcaaaaagttttaactgatgatactacagtaactgtagatgttggaagtcactacatttggatggcacgtaaatttagaagttataatccaagacatttattatttagtaacggtatgcaaacacttggagtggcacttccttgggcaatttcagctgcacttgtccgtcctaacacacaagttgtctctgtagctggtgatggtggtttcctattctcagctcaagatttagaaacagctgtacgtaaaaacttaaacattattcaattgatttggaatgatgggcgctataatatggttgaattccaagaagaaatgaaatatcaacgttcttcaggtgtagactttggtgccgttgattttgttaaatatgcagaatcttttggagcaaaaggtttacgtgtatctaaccaagaagagttagaagcagctataaaagaaggttatgaaacagatggtcctgtattaatcgatatcccagttaactacgaagataatgttaaattatctacaaacatgttaccgaatgctttaaattaa

SEQ ID NO: 1185 - DNA, 951 bp, Staphylococcus capitis
atgaaaaaatttagtaaaaaagttgtattaattggtgatggatcagtaggttctagctatgcatttgctatggttactcaagggattgcagatgaatttgtcatcattgacattgcgaaagataaagtagaagcagacgtgaaagatttaaatcacggcgcactctacagtgcatcaccagtcgtagtaaaagctggggaatacagcgattgtaaagatgcagacttagttgtcattacagcaggtgcaccacaaaaaccaggagaaacacgcttacaacttgtagagaaaaacactaaaattatgaaaagtattgtatcaagtgtaatggatagtggtttcgatggtttcttcctaatcgcagctaaccctgttgatattttaactcgctatgttaaagaagtcacaggcttaccagctgaacgcgttattggttcaggtactgttcttgatagtgcgagatttagatatttaattagccaagagctaaatgttgtgccatcaagtgtacatgcaagcattatcggtgaacatggtgactctgaacttgcagtttggtctcaagcaaatgttgcaggtatctcagtatttgatactttaaaagaacaaacaggcagtgaagctaaagctgaagaaatatatgtgaacactagagatgctgcttacgatatcatccaagctaaaggttctacttattatggtatagctttagcgcttttacgaatttctaaagcattattaaataacgaaaatagtgttttaactgtatcaagtcaacttaatggggaatatggacataaagaagtttacttaggtgtcccaacattaattaaccaaaatggtgcagttaaaatatatgaaacacctttaagcgataaagagaaacaattatttaagcaatcagttcaaacacttgaagaaacatacgactcaattaaacatttagtataa

SEQ ID NO: 1186 - DNA, 885 bp, Staphylococcus capitis
atggaaattaaacagataaaatatttcgtagaagtcgttcgccaagggggaatgacacaagcgtcagaacatttatatattgctcaatcaacgattagtaaagctataaaaaatatcgagaatgaatatgatattactttattcgatcgttctcagaaacaaattaaattgacagatattggccaaacattttatgacaatagtctagaatttttggctctatttgagaaactatcattagaaatgaacgatgtagtcaatgttcaaaagggccatattaagataggactttcacccatgatgaatgttcaaatgtttacaaatgcgcttaatcaatttcacaagttataccctaatgtgacatacgaagtcattgaaggtggagggaaaatagtagagaacttaactgctaatgacgatgtagatataggtataacaacgttgcctgtggaccattcattattccattctgtttccttatacaatgaagagttattactagtagtcagtaacgatcatcatctctcggatatggaaaaggtagacctagcagaattaaaaaatgaagaatttgtattgttccacgatgattattatcttaaagatcaaattatagaaaactgtaaacgtataggtttctatcctaagacagtcgctaacatctcacaaattagctttattgctaacatgattcaacaaggtataggtattagtattgtacctgaaagtttagtacgtttaatgggagataatgtaacgtccattcaattagaaaatgtagaactctcatggcatttaggtgccatatggagaaaagatgcttatttaaattatgtaacacgccagtggatagactttatttcaacactccaaccagttaaataa

SEQ ID NO: 1187 - DNA, 696 bp, Staphylococcus capitis
gtggtagctatttcattagacaaatatctcacacaaaatatttatcaatttaaagagatggctattgcattgacatttgttggtggatatatagatgcttatacctttttagaacgtggaggcactttagcagcgggtcaaactggtaacctcatctttctagcttctgaagtctctcatcataaccttgatggtggattgttaaagattatttcagttatctcatttatgataggtgtcatgtttgtttcattaatacatgcgaaaatagctacaagatattggcgtcttatcgctttactaccaatcacaatgagtagcatcacagtgggttttatacctgcatcaataccgaacatctatattattccacctttagcatttagtatggccatgcttactactgcgtttggtaaaatagaaggtgaaggatatgctaacacattttcaacaggtaatttaaaaaaagctgtgattgcgctaagtgaatttattataaataaagacaaagtacaattgagtaaatcattgctttacattagaatagtaataagttttgttgtgggggctattatatctgcgttacttcaaaaatatatgggaatctatacaattttaatagctgcattcattttaattagcgttttaatattttatagctttctgatttatcgcagagaacgtaatattcagtaa

SEQ ID NO: 1188 - DNA, 1449 bp, Staphylococcus capitis
atgtctagtttttttaaccggattactcgtaaagagaatccaacaatttatcaaaataaagatggacaccttaaacgcacattacgtgttcgtgactttcttgcgttaggtgtcggtacaattgtttctacatccattttcactctaccaggagttgttgctgcagagcacgccggtccagcagtagctttatcgttcctattagcagctatagtggctggtcttgtagcttttacatatgctgaaatggcatcgactatgcctttcgcaggatcagcatattcatggattaatgtattatttggagaattcttcggatgggttgctggatgggcattacttgctgagtactttattgcggtagcctttgttgcttccggattttcagctaacttaagaggtcttatcgccccgattggtatcacattacctaacgcgttgtcgaatactttcggcaataaaggcggtgtaatagacatcatcgctgctgtcgtaattatattaactgcgttattactttctcgtggtgtgactgaagccgctcgcatggaaaatatcctagttatacttaaagttttggcaattatcttatttgtcattgttggtttaacagcaatcaactttagtaacttcgtaccatttgtgcctgagcataaagttacaaaatcaggtgattttggtggatggcaaggtatatatgctggtgtatcaatgattttcttagcatatattggatttgattcaattgctgcaaactctgcagaagctattaaccctcaaaaaacaatgcctagagggattttaggttctcttgcagtagccattgtactatttgtagccgtggcattagtcttagttggtatgttccattactcacaatatgcagacaatgctgaaccagtaggttgggctctacgtaaaagtggccatggaattatagcggcagtggttcaagcgatttcagttatcggtatgttcactgctttaatcggtatgatgttagccggatcacgattattgtattcatttggtcgcgacggattactaccttcatggttaagtcaattaaatcataagcacttaccaaacagagctttacttattttaacaattattggtgtggtaataggttcaatgttcccattcaactttttagcacaattaatttctgcaggtacactcgtagcatttatgtttgtatcactggcaatgtatcgcttaagaaaacgtgaaggtaaggatttaccaaaaccagatttcaaattaccattatatccagtattaccagctattacatttgtactcgtattacttgtattctggggactaagctttgaagctaaattatatactttaatatggttcgttgtaggtattgttatttacttactttatggactgaaacactctaagaaaaatgatgaagaagaatatcacgcaccgaaataa

SEQ ID NO: 1189 - DNA, 1338 bp, Staphylococcus capitis
atgagtaaagcaaaaaatttaattaatgaagatgaaaagtatttcgctaagtcaggacgtattaaatattatcctttagctattgattatggctatggtgcgacgctagtagatgtagatggaaaggaatatatagatttattatcaagtgcaagttcgcaaaatgtggggcatgcacctaagaaagtcacagatgctattaaaaaacaagcagaaaaatttgttcattatacgccagcatatatgtatcatgaaccacttgtacgtttatcaaagaagatttgtgaaatagctcctggagattttgaaaaaagagtaacgtttggtttaactggatctgatgctaatgacggtattattaagtttgctcgtgcctataccggacgtccctatatgattagtttcacaaacgcataccacggttcaacgtttggcgctttatcgatgtcagctattagcttaaatatgcgaaaacactatggaccattacttaatggtttttatcatattccatttccagacaaatatagagggatgtttgaacaatcaacatctaatacagtggaagaatatcttgcgcctctcaaagaaatgtttgcgaaatacgttccagcagaagaggtcgcatgcattgtagtagagacaatacaaggtgatggaggcttacttgaacctgtatcaggttattttgaagccctacaagatttatgtcaccagcatggtattttaattgcagttgacgatattcaacaaggattaggacgtacaggtagatggagttctgtggatcattttaactttactcctgatttaattacttttggaaagtctctagctggaggtttaccaatgtcagctttggtaggtcgtaaagaaattatggaaagccttgaagcgccagcgcatttatttactacaggtgccaaccctgttagttgtgaagcggcattagctacattagaaatgatagaagaggaagatttattaaccgctgccactgaaaaggggaactacgtacgccagcgaatgaatcaatggatgacacagtttgagagtgtaggagatgtacgaggtgttggattatcaataggtatagatattgtgtctgataaggaaattaagacacgagattcagaagcagcattgaaaatttgtaattattgctttgagcatggagttgtaatcattgcagtcgcaggaaatgtattgagatttcaaccaccactagtaattacttatgaacaacttgatacagcactcgataccattgagaatgcacttaaagcattggaaaaaggtaacttagatcagtatgaaattaccggtcaaggatggtaa

SEQ ID NO: 1190 - DNA, 429 bp, Staphylococcus capitis
atgtggcttagatatggttatcatttattaagtgcaattgtcatcagcgctatattattaatcactactattgtgatggacgttctatttcaaaagacgcatttaacccagctattacttaatattgatttcttaattgacccgaagaaagtgcctacaattgttgaagggttgattcatttaagtataggtatcgtaatctatatcgtttttttaattatttatcattactccaagcccctatattacttagcatttgttcctttaacgattatttttatagtcatgtacccatttttaattgcgattgcccaacgttcattgtttaaattcagttggaatgcatatgcattgtggatggaagctcatatcttattcatgattctcatggctatcagtatacctacgattgctaagaaacacttataa

SEQ ID NO: 1191 - DNA, 897 bp, Staphylococcus capitis
atgaaaaaaatggtgagtgcatgtctagtgacatctttattattagcaagttgtagtacggggcaaagtaatgacaataaaggaagttcaaatctttcagacgataaatctcagtcatctaaaagtaataaaaattctaaaaataataattcaaatcatgcatcaagtcaaagttctaatgacaagagtcaagaggacgctaatcaggagaatacgcattcaaatacttattatgcgaaagtatggttaacggcattagaaagctataggggaaacagtgatataaaatttgacgatttagatattaaacatggggatgtttcaggtaaattaattgatccttatttacctgatgtttctgtaaaatttccagaaggaactgaaattttgactgcaagcgttcatgctgctgggtcagtctattataaaaataatggagacggtacgataacgatttatcccgtgccatcacaatttaacggtccgatttacggtgatgaatatggcaagaaagaatcacaacgtgtactagacaaagcttcaactgtaaaattatatgacgcaagtgatagtgaaattaataaaataagtgcattaatgtcatcagaacctgcaagttatggagatccaatcgatactcaatcaagttcagattcagatgatgataatagttcagatagtactacagtgacacgaagtaatgtaatcgatttggtggaagattatgaaggacacaaattagatactgacacatatacttacaaagagcctgaagaagacagtgatggcaattggggattctcatttacagataaagatggggaactcgcaggctcttacattatagatcaagatggcattgttactaagtatgataaacatggtgatgaggaataa

SEQ ID NO: 1192 - DNA, 588 bp, Staphylococcus capitis
gtgaacaaggtttctcttattgcaacaactgtaataactggggcagtattatttacgactgcaaatgtttctgaagcaaaagcggatgaagtaactgcaaataatgcaaaagacgtagcacaacaagctatgaaaaacagcggtggcaatcccaacttacagaatttcaatgccgtaaaagataaaggggactactacgaaatcggtattaataataaatctggtgcaggtgtgggtacttataaagtttataaagatggtgaggttcaatataaaagtggaaactttggtaattatagcactttgaatagcgaagattgttatactggccaagatatcacaacaaaaccttataaagaacctaaacacgtggccaaaaaagaagtagccgttgattctactagagaacttaattcattctatgtaggagacgtaaaatcttctgatttaccaaagcattctaaatcttcacttcctgaaacaggtcataatgacacacatgtagggatggatttaatcgctggtacgtcacttctagcaggcggattattaattggcggacgcaaacgtagagaaaaaacttcataa

SEQ ID NO: 1193 - DNA, 1362 bp, Staphylococcus capitis
atgaaatatgtagtcgttggtacatcacatgctggttatgaagtgattgaaacacttttaaaagaagattcaaatgctgaaattcatgtatttgaaagtggagataaaccttcattcttatcttgtggtattcaaagctatttagaagatgtttcaccgtcattagattcattacactatgcttctaaagcttcttataaagaacaaggagttaacatccatgtaaacagtactgttactgacttaaatacagataaaaaaatgataactgtagaacaaaatggacaatctaatgaagtaacgtatgacaaattgttcttaagtcctggcggtaaaccagttactcctccaattgacggcattgatcagtataataacgtactatttatgcgtggtcgtgaatgggcagatcaaattaagcaacgcatgcctcaagctaaaaaagcggttgtcgtaggtggtggctatattggtatcgaagctgccgaagccttcgctaaagcaggtattgaaacaacgatagttgacattgcagatagaattttaaatacgtatttagatcaagaattcactgacattttacaacaaaattcagaaaaacatggtctttacttcaaaggcggtgaaaccgttcaatcattaactggtgatgacaatggaaacgtaacaaaagttgtaaccgataaaaatgaatatgaagcagatactgttttattcgcagtcggtgttacacctgcaactgaatggttagatggcaaaattgaattaggcgaaaaaggtattatcaatattgaccatcaacaacaaacttctgctaaagatgtatatgccggtggcgacgcaacacttgtaccattcgctccagttgaagaagatcgttacattgctttagcgacaaactctcgtcgtcaaggtgtcgtagcagcaaaaaatatgactggtaaaaatatgactatgccaagagtatccggaacatctggattgcaattatttgattataaatttggacaaactggtgtacacggtacagaagctgatagttatgatggcaatttaggtcaaaaatatgttgaagaactgatccatccaaaattcatgcaagacgaaactacaattcacatgaaaatcatttacgatgaagatagtcatcaaattttaggtggacaagtcatgtctacagaagatgttacagcttctatcaatacaatttctatggcgatatcagcaggatatacactagaacaattagccgtacaagatttcttcttccaacctgactacgatcgtccatggaattacctcaacgtgcttgctcaacaagcgcttggtgatacgttcggtagtgacaaaatgctattctaa

SEQ ID NO: 1194 - DNA, 891 bp, Staphylococcus capitis
atgaataaagaacaattagaaaaaatgactaatggcaaaggatttatcgcagcattagaccaaagtggcggtagtactcctaaagcgcttaaagaatatggcattaatgaagaccaatatagcaatgaagatgagatgttccaacttgtacatgatatgcgtactcgcgtagtaacttcaccatcattttcacctgataaaatcttaggtgcaattctattcgaacaaacaatggatcgtgaagtagaaggtaaatatactggtgattacttagctgacaaaggtattgtacctttcttaaaagtcgataaaggtttagctgaacaacaaaatggtgttcaattaatgaaacctatcaatgacttagacgaaacattagaccgtgcaaatgaacgtcatatctttggtactaaaatgcgttctaatatcttagaattaaatgaacaaggtatcaaagacgttgttgaacaacaattcgaatttgctaaaaaaatcattgctaaagggttagtaccaatcatcgaaccagaagtaaacattaatgcaaaagacaaagctgaaattgaaaaagtattaaaagctgaaatcaaaaaaggcttagacgcattaaatgatgatcaattagtaatgttaaaattaactattcctactgaagctaacttatacaaagaattagctgaccatcctaacgttgtacgtgtcgttgtattatctggcggttatagcagagacgaagctaacaaattattaaaagacaacgatgaattaatcgcaagcttctcacgtgcattagcaagcgacttacgcgctagccaagctcaagaagaattcgataaagcgttaggcgacgcagtagattcaatctatgacgcatcagtaaataaaaattaa

SEQ ID NO: 1195 - DNA, 1185 bp, Staphylococcus capitis
atgaatataaaagatgttaaaagcgtaggtattattggaggaggacctggtggattaatgctaggacttcttttgcaacaacaaggatttgaagtgtcaatttttgagaaagctgggttagatgtaaatcgagaccgtggaggttccttagatattcatgaggagagtggccagttaccattaaaagaaacaggtattattgatcgatttagagagcttgctcgttttgagggtgaagatactcgcgttttagataaaaatggtaaggtttattatgaagaaacagccgatcctgaagttgagggaggacgtccagaaattgatcgtggtgaactatgtgatatcatcagtgaacaattaagtgaaggcacagtaatatatggtaaagcgttcgaatcacttcgtcgcttagacaatggacaagttgaagtctcatttgttgagggagatacagctgagtttgactttgtagttggggctgatggagcattttcaaaagtgagaccttatttagcaaatgtggacgtagaatataatggtatttcaatggttgaactaaatgtagaagatgcatacaatcaatatcctgatttagcagcgtttaataaaaatgggaaaatgatggcatttggtgaccataaagcaattcttggtcaagtgaatggcaatggaagaattaaagtatatatgtcttatcaaatggattatgaggaatttgaaaaatttaaaggaatgagtaagtcagaaattaaagaacagttgttacaagatttctcggactgggacgaagatttaaaaaaatatattgaatatgctggtgatgatgtactcttacgtcgaatttacaaattgcctatagggtttaagtgggagaatcaatctaatctcactttaatcggagatgcagcgcatttaatgagtccatttgcaggcgagggtgttaatatggcattctacgatgcatatttattagcgaaagcacttaaagagaataataatttacaagatgcgttgaaagaatatgaagcatctatgtatgaagcttcagaacagagtgcaagtgagtctcaagctaatttagaagaaatgtttggtgatgacgctgctcaaaaatttggcgatttctttaatcacattggtgaattgtttgaagagcatcaagcacaaaaattagataataaataa

SEQ ID NO: 1196 - DNA, 555 bp, Staphylococcus capitis
atgttcagaagaagacctgaaatgataagacaaagaatggagcgatttgaaggatttgattttggcagaggatttggtggtccgagaggcggcggtcgtgaccgctttttcaagaaaggcaatttacaatttgtcattcttaaaatgttgaaggaagaatcacgtcatggatatcaaattattaaagatttagaagaacgttttaaaggcttctattcacctagtcctggatctgtttatcctatcttacaaatgttagaagatagagaatttgtatcaatctctaaagatggtaaaaagaaagtgtactcaatcactgaagaaggtgagaagttcttagaggagaatattaataatgatgaatttacacaacgaatggaacagtttcaaaatatagactttgagcaattaaaagcatcaagagaacaattacatgaggtgttccaaggatttatgaaagcgagtcagcaagcactacaagatgaagaattgaaaaaagagtttgaccaatttgtagaagaaacaaaagcacgtttggaacaattttctaaataa

SEQ ID NO: 1197 - DNA, 861 bp, Staphylococcus capitis
atgacaaatgaaaatatctttgatcaacagttttggaaagaggcttgggacaatgatcctaatacacaagataaaagaatgaaacgtgcaggtttaggtcaacctgatgctccaggctttgaaaaatgggctgaaaattttaataaaaattcttttactgaagagagtcaaaaaagagtaaaacgaattatgtcatggattcagaatcaaacaggaggatttgaaaacctaagtatactggatgttggtgctgcttcaggagtgtttagtataccgttctcaaaagaaagcgctaaagttactagtcttgaaccctcatccatattgcacggtatgttaaaagataatgcgcaacattatggtgtagagattgaaacaattaatgaatcatttgaaaatattgaaacgacagagattaaaaaattcgatttagtctttgcatcaatgtgtcctgcagtaacaacatgggaagccgtggaaaaagctatagatatagctcatcaatatgtttatgtcagcttaatagcaggacctaaagaaaactcaatcgtggatgaggtcgttgcttttcttgaattagaaccttcgccgatgactgctgatttatattatttattgcagctactttattgcaataactatacgtatgaaaccttaattgagcgtcatacacaacatgctgaaaaaagtgtagatgaagtcatgcgtcaattacgttcttggttaaaagaagtggaaattgaaatgaatgcgcaacaaaaagagagtattgaacaatatttacgagataaatatggcgatcatgtacccgtagttacaggtggtaagtttgggaaagtacttatcacattacaagactaa

SEQ ID NO: 1198 - DNA, 1506 bp, Staphylococcus capitis
atggcaaagtctgagaaaaaagacgttgtattaattggtgccggtgtacttagtacaacattcggttcaatgttaaaaagcatcgaacctgaatgggatatccatttatatgaacgtctagatcgtcccggtattgaaagttcaaatgaacgaaacaatgcgggtacaggacacgctgcgttatgtgaattgaactatacagttcaacaaccagatggttcaattgatatcgaaaaagcaaaagaaatcaacgaacaatttgagatttctaaacaattctggggtcacttagtaaaaagtggacaaattgaaaatcctagagagtttattcatccattaccacacattagtttcgtacgtggtaaaaataacgtgaaattcttaaaagatcgttatgaagcaatgaaaaacttcccaatgttcgataatatcgaatatacagaagactttgaagaaatgaaaaaatggattccgttaatgatggaaggtcgtgaaaataacggtggcgttatggcggctagtaaaattgatgaaggtacagacgttaactacggtgctcttactcgtaaaatggctaaaaaccttcatgactcttcaaacgttgaagtacaatacaatcatgaagttgtagactttgaacgtttatctaatggtaaatggttagttaaaattaaaaaccgtaatactggtgatgtatttgaacatcaaacagattatgtatttattggtgccggcggtggagcgattccacttctacaaaaaactggcattccagaaagtaaacacttaggtggattcccaattagtggtcagtttattgcttgtactaaccctcaagttattgaacaacacgatgccaaagtatacggtaaagaaccacctggcacaccacctatgacagttcctcacttagatacgcgttatatcgatggtgaaagaacattattatttggaccattcgcgaatattggaccaaaattccttaaatttggttctaaccttgatttattcagatctgttaagccatataacatctcaacattattagctgcagcaattaagaatgtgccattaattaaatattcaattgatcaagtgattatgactaaagaaggttgcatgaatcacttacgtacattctatcctgaagcacgtgatgaagattggcaattatacacagcaggtaagcgtgtacaagttattaaagatactgaagagaatggtaaaggcttcattcaattcggtactgaagttgtgaactctgaagatcattcagttatcgctttattaggtgaatcaccaggagcttctacttcagtttcagttgcattagaagtattagaacgtaatttccctgaatatacttctgattggaaaccgaaaattaaagaaatgattccttcttatggagaatcattaattaatgatgaacaattaatgagaaaaatccgtaaacaaacttcaaaagacctagaactaggttattatgataaagctaaaaaatag

SEQ ID NO: 1199 - DNA, 822 bp, Staphylococcus capitis
gtggaagagaagaacgatcaagttttaaagttatttattgtttcggattcaattggggaaacggcacaacgtatgattcatgctacattaacccaattcccagatttgacccaagttgagattaagaaatttccgtacattaaagatgaacaagaatttcttaatgtgcttcaacttgctcgagaacaaaatgcaattgtagcgacaacattagtgagcgaatcatttaatgctttaggtcatcagtttgcgaaagaacatgatattccatacgtcgattatatgtcagagttaattcgaataattgaaacgcatacagatgctaaacctttaatggaaagtggcgcattacgtaaacttaatgatgaatatttcaaacgtattgaagctattgaatactcagtcaaatatgatgatggtaaacattttacagatattggtgaagcggatgcgttaattgtaggagtttcacgtacgtctaaaacaccattaagcatgtatttagccaacaaaggttataaaatagcaaacatccctttagtaccggaagttgccattccagacaatgtatttcaacaaaagggactaaaagtgtttggcttaactgcaagtccgaactatattgcaaacattcgtcgcaatcgtgctgaaacgttagggttatctgctgagtctacatataatagtttggaacgaattaagaaagaactctcttatgcagaagaagttttcaaaaaattgaatgctacagtcatcaatactgagtataaatctattgaagaatctgcattttatatagaaaagtttttaatgcaacgttaa

SEQ ID NO: 1200 - DNA, 2628 bp, Staphylococcus capitis
atgacacaatatatttatgcatttgacgaaggacgcatttcaatgaaagatttattaggtgggaaaggtgctaacctgtctgagatgaaacgtttaggtttaccggtacctgatggatttacaattacaaccgaggcatgtattgattacttaaaacaaaatgaacaattgccaacagaagttaaaacacaattgatacatcacttaacgtccttttcagaaagaacaggaaaatcattctcctctgacgaagatttattattagtttcagtgcgtagtggcgcaaaaatttctatgcctggaatgatggatactatccttaatttaggtttgaacgatgacaacgtgaagaaacttgctgataaaacaaatgatgcacgcttcgcctatgactgttatcgacgtttattacaaatgtttggtgaagtcgtttatggtatccctatgatggcatttgatacatattttgatgatttcaaaaataaacataattacaagaacgatgcggatatacctgctgacggcttgcaaacgatatgtgaaaggtttaaagagatttaccgagaagaggtatataagccatttcctcaagaaccattaaagcaattagaggaagcgattgaagcggtattcaaatcttgggataacgatcgagcgcgtgtatatagagaattaaatgatattccgcatgatattggaactgcagtcaatgtgcaagaaatggtatttggtaatagtggagaacagagtggtacaggtgttgcgtttaccagaaacccagttactggtgataaccaattatttggagagtacttacttaatgcgcaaggtgaagacgttgtagcaggaattagaacaccacaagatattgatacattaaaggcgcaaatgccagaggttcatcaagaatttgttgaagtgacaaagcaacttgaaacacactataaagacatgcaagatatcgaatttacgattgaaaacggcaagctttatttacttcaaacacgtaatgggaaacgtacggcaagagctgccattgaaattgctgtggatatggttaatgaaggtttaatcactcgcaaagaggcagtagcgaatgtggatgtaaaatcaatcgatcaattattgcatcctaattttaaggaagaagccttagagcaagcaactgttatttcgaaattagggttacctgcaagtccaggtgcagcaacaggccaagtcgtcttctcagctgaagatgcgaaagaacaagctgaaaaaggtcatcgtgtagttctgatgcgtccggaaacgtccccagaagatattgaaggtatgattgctagtgaagctatcgttacaactcatggaggtatgacatctcatgcagcagttgtggcaagagggatgggtaaatgttgtgttacaggttgttcagatgttgaaatcgatactctaaataaaacggtttattattcagatggcgaattgaatgaaggtgatgtggtttcggtagatggttccacaggagatttatatgtaggtgagattgaaacggtcaatgcagaacacagtgaagcatttgaacaatttatggaatggtctgaagaaactgcgcgcttacaagtcagaatgaatgccgaaacacctcaagatattaaagcaggatataattttggtgctaaagggattggacttgtaagaacagagcatatgttctttggagctgagcgtttaatagagatgcgccgatttattttagcttcagaccatgaagcacgtattggtgcattagagaagattagaacgtatcaagtagaggattttgaagctatatttagactttctcaagaccgacctacaattgtgcgcttattagatccaccattacatgaatttttgccaagctcagatgaagacatcgcaagcgttgccgaacaacttgatattcctaaagatgtattacgtaagcgtatcgctgaactcaacgaagttaatcctatgttaggtcaccgtggttgtcgcttagctataacttatcctgagttatacgaaatgcaagtagaggcgattattgaaagtgtattgaaacttaagaaagagggcatagagtgtcatcctgaaattatgattccacttgtttcaactgttgaagagtttattactctaaaaggccgtttagcagaaacaattactcaattggaaaatgacgcaaaaacaaatgtgaattatcttattggtacaatgatcgaaacaccgagagcatgtttaattgcgcaacaactcgcacaacattgtgatttctttagtttcggtacaaatgatttaacacaattaacttatggtttttcaagagatgatgcagggaaatttataaacgtgtatactgaaagtaacattttacagattgatccattccaaacattagataaagatggtgtgggacaattgattcaatacgcggttgaacaagctaagcaaataaaaccagagatcaagataggcgtatgtggtgaacttggtggtgatgctaaatcaattcatcaatttaatcaatggtctattgactatgtatcatgttcgccattcagagtacctggtgcgatattagctactgctcaaagtcaggcggaggaaagcgagcgataa

SEQ ID NO: 1201 - DNA, 1587 bp, Staphylococcus capitis
atgaacaaatcagatttacttgctccagagaaatataatattatttctgaaattgaaaaatacgcttcagattcatctaaaaaagcgattatttataaagataacgaacatgataatatttcagtaagttatgaagagctattgcaaaatgcaaataaagtagggaatgtctttttaaaacatggtcttaaaaaaggtgacaaagtattaatcatgatgccacgcgctatcgccacatacgaattatacatcgctgcgttaaaattgggtatcgcaattataccaagctcagaaatgttacgtacaaaagatttacaatatcgaattacacatggtgaaattgatgcagtgattgcatttcacacattaactaaagaatttgaaggcgttaaagaatacgaggaacttactaaattcattattgctggtcatcaagatggttggatttctattgaagatgaaaaagctaacgaaagtaatgaacttgaaagtgctgaaacgacacgtgatgatttagcaattctttcatatacttcgggaactactggtaatcctaaagctgttacacattctcacggctggggatatgcgcacttacaaatggcaccgaaacattggctatgtatcaaagaagatgatcttgtgtgggcaacggctgctccaggttggcaaaagtgggtatggagtccgttcttatcaatactaggaactggcgcaacagcctttgtatataatggacgtttccaaccagaaacgtatcttgaattattacaagattatcaaattaatgtattatgttgtacgccgactgaatatcgtatgatggcaaaattaagtaatctaaatgactatcatttagaacatctacacagtgcggtttcagcaggcgagccacttaatcgtgaagttgtagagcaatttaagaacaactttaatcttacagtaagagatggttatggtcagactgaaagtacattgcttatcggttttcttaaagatacagaaccacgtacggggtctatgggtaaaggcattccaggtagttttgtcacaattattgatgatgatggtaatgaagttccacctcaaactaaaggtaatatcgctgtgccattagatttgcctgcattatttaaaggatattataaagatgaggaacgtacgaaagcggcttcagcaggtgattattatgtcacaggagatttagcgcataaagatgaagatggctatttctggtttgaaggacgtcgtgatgatattattatcagctctggctatacaatcggtccatttgaagtagaggacgcattgacgaatcatcctgctgttaaggaatgtgcagtggttgctagtcctcacgagattcgtggtaatattgttaaagcctttatcattttacaaaataactatgaaggcaatgatgaactagttaaagaacttcagacattctgtaaaaatgaagtggccccttacaaatatcctagagcaatagaatttgtcgatgatttaccaaaaacaaattctggtaaaattcgccgtgtcgaactgcgtgatgcggaaattgcaaaatacaataaccaagattaa

SEQ ID NO: 1202 - DNA, 471 bp, Staphylococcus capitis
atgttaatcaatgatgcatacaaggcatatattatagaagaaactgatcattcttttatgatagagaaaaataatgataaacaatattacgaagtgctagaatctataaatacactatcgaacgacgcattttgcgtgttaaatcatctttttgttaatgaaggaaacgaagaagcttttgaacaaaagtttttacaaagaaacaaacacttagaaaatgtaccaggatttagagcgttgagatttttaagacctaaaactgtaggtcgacattatataatcgtaactttatgggaagatcgacaagcattttatgattggcagaattctgctgagtacgcagaaacacataagaaacgtggaacatcaaaaggtgtggatcatcgcattgttaatctcgatttatcatataatgttagaattgaacttgaaaaacttcatcatcatatagattttgaaagcgtcatatag

SEQ ID NO: 1203 - DNA, 165 bp, Staphylococcus capitis
ttgggagagttagcggcgtggattaaccaagatgctcattttccaattgaagagactgtagctgataatatactcaattatttcaatgaacttaaagatttcgatcatgaactcatagaaattgttaaacgctcattatccctttatgaacaaagtaggatgtaa

SEQ ID NO: 1204 - DNA, 1383 bp, Staphylococcus capitis
atgaatcagcaacatgaatacatagggactcgtaaacttttaataggaatcgtattagcagtcatcacattttggttatttgctaattctttaatcaatgtaattcctaatttacaaacgtcatttggcagttatttaagtacaataagcattgcggtaagtctaacagctctattttgtggcatgtttgtagttggagcgggcagtttggcagattattttggacgtgtacgtttaacgataattggactatggttaaatatttttggctcattacttattatcgtttctgactacattccgttattattgatgggacgtgcaattcaaggtctttctgctgcattgattatgcctgcgacactatcattaattaaagcatactatcatggtgacaaacgtcagcgtgcgctcagcttctggtctataggctcctggggaggttctggtttcgcatctttatttggagggatgatagctacattcttaagttggagatggatatttgtcttttcaattatcgtctccctcattgcagtacttttaattaaaggtacgccagaatctaagaatcaacatgcatcatcaagacagtttgatattgtgggtcttattttactagttgtaatgatgctcagtctaaatattatgattacacaagctgcacatttaggtttattttccgtagcgattgtgtcattatttgttgcatttgtgttatctacaatattatttatcatccttgaaaatagaaaacgctatccactcatcgattttgctttatttcgtaatcgattctatacgagtgcgacatttgctaattttttaattaatacagttgctggtacgcttctcataacgaatacgtttgtccaacaaggtataggtttaagttcatttgaaacaggtttgttgtcactcacgtatttgattgcagtattaacaatgattcgagtaggagagaaaatcttacaagagtttggtcctagaaaacctatgctaattggtacgatgtcgacaacagtgggaatattcttaatgtcgattacgtttttacctattccagtgtatatcactttatgcgtgataggatttttattatttggattaggtttaggtttatttgcaacgccttcgactgatacagccatttctcattctccagaggaaaaggtaggcgtcgcctcaggtatttataaaatggcttcttcaataggtggcgcttttggtgtggccatttcaggttcaatttatagcatattttcaacattatttgatccaaaattaggagcaatgatggggctatggtttaatacaatgattgctttcactgcatactttattgtatggctcacacttcctaatactaaaaagacctcataa

SEQ ID NO: 1205 - DNA, 1176 bp, Staphylococcus capitis
atgaatcaagaattaattaaacgtttacgtgagaaagaaagtaaaatgattgaaatcagacgatatcttcacgaacatcctgaactttcttttcatgaaactgaaacgcctcaatacattgccgatttttataaagagaaagattgtgacgttgaaacgaatgtaggacccaatggtgttaaagtaacaattgatagtgggaaatcaggtaagacgattgcgattcgtgcagattttgacgcattacctattgaagaacaaactggactgtcatttgcttcaaaaaataaaggcgttatgcatgcgtgtggccatgatgcgcatacagcatatatgcttattctcggagaaacattgatagaaatgaaagaacaattcaaaggtaaagtcgttatcattcatcaacctgcagaagaaatgccgccaggtggggcccaaggtatgattaaagatggtgtgcttgatggtgtggatcatgtattaggtgcgcatgttatgagtacgatggaagcaggtaaagtcttttacaaagaaggctatgttcaaacaggtcgtgcttattttaaactagttgtacaaggtaaaggtggtcatggttcatcacctcacatggctaatgatgcaattgtggctggttccaactttgtcactactgctcaaacagtagtatcaagacgtctgaacccatttgaaacgggtgtagtcactataggttcgtttgatggtaaaggtcaattcaatgtgattaaagatcaaattgaaatagaaggagacgttcgtgctctaactgaccagactagagatacaattcaacaagaattaactagaattgttaaaggtatagaggaaacatttggagtaacatgtgaattcgagttcaaaaaggattatcctgcgttatataatgatccagaattcacttcatatgtcgcagaaacaatcaaaaatgcacaaattgatgatattaaaggtgttgagatatgtgaacctcagccaccatcagaagattttgcattttatgctactgaattaccaagtacatttatttattcaggtgctgcacctgaagatggtgatatttaccctcaccaccatcctaaatttaatattaatgaatcatcaatgcttgttgctgctgaagcagtgggcactgttgttttagattatttaacttaa

SEQ ID NO: 1206 - DNA, 1719 bp, Staphylococcus capitis
atgagtagaaaacatgattcatatgattacatcattattggtggcggaagcgcaggttcagtactaggtgcccgtctatctgaagataaagataaaaatgtattagtattggaagctggacgtagtgactatttctgggatttatttattcaaatgcccgcagcattaatgttcccatctggtaacccattctatgactggagatatcaaactgaagaagaacctcatatgggacgtaaagttgaccatgctagaggtaaagtgcttggtggatcaagctcaattaacggtatgatttatcaaagaggtaacccaatggactatgaaggctgggcagagccagaaggtatggatacatgggacttcgctcactgcttaccatattttaaaaagttagaaacaacttatggtgcgtcaccttatgataaagtacgtggacataacggaccggttaaattaaaacgtggacctgctacaaatccattatttaaatcattctttaatgcaggtgttgaagcgggatatcataaaacaccagatgtaaatggctttagacaagaaggatttggtccattcgatagtcaagttcatcatggtcgccgtatgtcagcatctagagcgtatttacgcccagcaatgagacgtagaaatctagacgtagagacacgtgcattcgttacgaaacttaatttcgatgataacaatagtaaaaaggtaacaggcgtcacttataagaaaaatggtaaagaacaaacggttaaagctaacgaagtcatcttatcaggcggtgcgttcaacacacctcaattattacaattatctggtataggtgattcagagttcttaaaatctaaaggcatagagccacgtatgcacttaccaggtgtgggtgaaaactttgaggatcacttagaagtatacattcaacataaatgtaaacaacctgtatcattacaaccaagtcttgatgtaaaacgtatgccgtttatcggtttacaatggatctttgcacgtaaaggtgccgcagcatctaaccacttcgaaggtggcgcatttgtaagatcaaatgatgaagtggattatcctaacttaatgttccacttcttacctatagctgtacgttatgatggccaaaaagcacctgttgcgcatggttatcaagttcacgtaggtccaatgtattcaaattcaagaggtagcttgaaaattaaatctaaagatccatttgaaaaaccaagtatcgtgtttaactacttatcaactaaagaagatgaacgcgagtgggtagaagcaattcgtgttgcacgtaatattcttaaacaaaaagctatggatccatttaatggtggagaaatatcaccaggaccagaagtacaaactgatgaagaaattctagattgggtacgtaaggatggcgaaacagcattacacccatcttgtagtgctaaaatgggcccttcttcagaccctatggctgttgtagatccattaactatgaaagttcatggcatggaaaacttacgtgtcgtagatgcatcagcaatgccacgtacaacaaatggtaatattcatgctccagttttaatgttagctgaaaaagcagcagacattattcgtggtagacaaccattagaacctcaatatgtagattactataaacatggtgttcatgatgagaaagctggcgcaatggaagacgatccattttatcaatattaa

SEQ ID NO: 1207 - DNA, 1491 bp, Staphylococcus capitis
atggaacttgtagataaattatcaaaccgtcagtatatcgatggtgaatgggttgaaagttcaaataaaaatacaagagatattataaatccttataatcaagaagttatctttacagtagctgaggggactaaagaagatacggaaagagcaattttagctgcaagaagatcatttgaagagggcgaatggtcacttgaaacaagtgaagttagaggtaaaaaagtaagagccatcgcagataaaattaaagaaaatagagaagaattagctaaacttgaaacattagatactggtaagacattagaagaatcttatgcagatatggatgatattcataatgtattcatgtatttcgcaggattagctgataaagatggtggcgaaatcattaatacgccaatcccaaattctgaaagtaaagttatcaaagaacctatcggtgtagttacacaaatcacaccttggaattatcctttacttcaagcatcatggaagattgcacctgcattagctacaggttgttctttagttatgaaacctagtgaaattacaccattaacaacaattcgtgtatttgaattaatggaagaggttggtttccctaaaggtacaatcaacttaattctaggtgcaggttcagaagttggcgacgttatgtctggccatgaagaagttgacttagtatcattcacaggcggtattgaaacaggtaaacacatcatgaaacaagctgctgacaatgtaactgaagttgctttagaacttggtggtaagaatccaaacatcatttttgacgatgcagactttgaattagcagtggatcaagcgctaaatggtggttatttccacgcaggtcaagtttgctctgcaggttctagaattttagttcataacgatattaaagataagtttgaaaaggcactgatcgaccgtgtaagtaaaattaaaattggtaatggtttcgatcaagacactgaaatgggaccagttatttcaactgcacatcgtgagaaaattgaaaattacatggaagttgctaaacaagatggcgctacaattgctatcggtggtaaacgtcctgaacgtgaagatttacaagcaggtttattctttgaacctactgttatcacagattgtgatacatcaatgcgtattgttcaggaagaggtctttggaccagtcgtaactgttgaaggtttctcagatgaagaagaagcaattcgtttagctaacgattcaatctatggattagctggtgcggtattcactaaagatattggtaaagcacaacgtgtagctaacaaattaaaattaggtaccgtttggattaatgatttccatccttatttcgctcaagcgccatggggaggttataaacaatcaggtatcggtagagaacttggtaaagaaggacttgaagaatacttgattactaaacacatcttaacaaacacgaatccagaaccagtgaattggtttagtaaataa

SEQ ID NO: 1208 - DNA, 129 bp, Staphylococcus capitis
atgccaaactattataaaacctttttacaaaaattaaaattaatttatcaaattaaagttgtaagtaaggagaataatgttaagtttggatatttacttgtgtattacaaatgtattttaagaaattga

SEQ ID NO: 1209 - DNA, 555 bp, Staphylococcus capitis
atgacacgtacgaataatgacgcgcaccaagtcgaacaagcgaaagatttagtgataaactctattggagaaacgatggatttgtatggtattaatcgtagcgtcggcaatttatatggcatcatggtttttgaagacagcatgacactagatgagatgcgtcaacaactacaaatgagtaaaccaagtatgagttcaggtgtaaagaaacttcaagaatacgacattgttaaacaacaatttacacgcggaagtcgtaagcaacattttatcgcagagaaagacttctttaatttctttagaaacttctttacaagaaaatgggaacgagaaatcgatactaacatggaagcaattaaagatgccgaaaagatcatcaacccactattaaacaaagaaaatttagatgaagaagcaaaagaaaatgcgttaaatgttaaagctcaattagatcattcaaaaatatattatgaatggttagaacaattaagcgagtcattggaatctggagaaatattcaaatacttccctattcctgaacatgaaaatgaataa

SEQ ID NO: 1210 - DNA, 1623 bp, Staphylococcus capitis
ttgaaaaaggaaaaagttatggactggacgaccttcataggcgtagtcatagtattactttttgccgttatacctatgatggtttttccgaaagcaagtgaaacaatcatcacagacatcaatagtgccatttctaattcaattggttctgtgtatttatttatgggactggcaatcttttgtttcgttctttacatagcgtttggtaaatacggcaatgtcacattagggaaagcaagtgacaagccagaatttaataatttcacatgggctgcgatgctattttgtgcgggtatcggctcagatatcttgtattggggtgtgattgagtgggcgttttactaccaagtcccacctaatggcgcaaaaccaatgtcagatgaagcacttcaatatgcgacacagtatggtatgttccactggggccctattgcatgggctatctatgtattaccagcactaccaatcggttatcttgtgttcgttaagaaacaaccgatttataaaattagtcaagcttgtcgacctattttaaaaggtcaaactgataaatttatcggtaaagttgtagatatattatttatatttggtttacttggaggtgccgctacgtcattagcacttggtgtgccaatgatttcagctggtgttgagaagttaactggtttagatggaactaatatggtgttacgttcaatcatcttattaaccattacagttatattcgcaattagttcttatactggattgaaaaaaggtatccaaaaattaagtgacgtcaacgtgtggttatcattcatattactagcgttcgtgtttatcgttggtccaacagtgtttattatggaaacaacggtaactgggttcggtaacatgttaagagatttcttccacatggcgacttggatggaaccatttggcggtattcatggtcgtaaggaaactcatttccctcaagattggacaattttctattggtcttggtggttagtatatgcaccgttcatcggtttatttatcgcccgcatttctaaaggtcgtacacttaaagaagtagtattaggtacaatgtgttacggtacattaggatgtgtattattcttcggtatttttggtaactatgcagtttacctacaaattactggacaatttaatgttattaattatttaaatagtcatggtactgaagcaacaattattgaagtaatgcatcagttaccattcccaacaattacaattattttattcttaatctcagcattcttattcttagcaacaacatttgactctggttcttatatcctagcagctgcatcacagaaaaaagttatcggggaacctttaagagccaatcgtttattctgggcattcgcattatgtttacttccattctcactcatgttagtgggtggcgagagagcacttcaagtattgaaaacagcatcaatattggccagtgtacctttactcgtcattttcacctttatgatgatttccttcctcatcatactgggtcgagatcgaataaaacttgaaacacgtgcagataaattgaaagaagttgaacgacgatcacttcgaatcgttcaagtcaaagaagaaccagaagacgataatttataa

SEQ ID NO: 1211 - DNA, 1299 bp, Staphylococcus capitis
atggttttatttatcatagaaatcataataatgattcttgcgatattattaggtcttagaacagctggcgcacttggatgtggtatctttgcgattgtggctcagttaataatgatatttatctttcgattacctccaggttcagctcctgttacagcagttttaattatcttatctattggtatcgcaggcggaactcttcaagcaacaggtggtattgattatctcgtttatattgcttcgcgtgtgattgaacgctttccaaaatcgattatatttattgctccgatgattgttttccttttcgtctttggtataggtacggctaatatagctttatccttagaacctattattgcaaaaacggcgcagaaggcacatatacaacctaagagagccttaactgcatcagttttaactgcaaatttagcactgctttgtagccctgcagcttcagctaccgcatatatcatttcagttttagcaggatatcatatatcgatgggtaagtatttaagtatcgttttaccaactgctcttattagtatgttgctacttagtattttttgtacttttgtagggcgtaaagagaaagtacatgattcatctgagcgtttagttcaaatgccggaggacgagcttgaaaatcaattttcaggaaaagtaaaaataggcgtgctaagctttctattatgtgtgttaggcatcttaacatttggtatattcccacatcttatgcctacattcgatgttaatggaaagacagtcaaagtagaaatgactgagatagtacaattctttatgtatttaagttcagcaattaatttactattagtcaaaattaacacatcagatattttaacttctcatattacgcaatcagcaacgggagctttatttgctgtgcttggaccgggttggttaggtgcaacaatctttaatgcgccacaaaatttaaaaatattaaaaaatgatatcggacaaacgattagccaagttccatggttagtcattatattggtttccattgtagcgatgattgtaatatctcaaactgccactgcatcgattatggtgccgatcgttatgagtttaggcattccacctatttatttcgtagccatggtacaaacattgaacgttaacttcgtgataccagctcaacctacattactatttgctgtggagttagatgaaacaggcagaacgagaccaaccagcttcgccgtcccaggattctttgtgattactgtatctatcatcattgggttcactattaaagcactattaggttattaa

SEQ ID NO: 1212 - DNA, 531 bp, Staphylococcus capitis
atgagcatgttagacattaaaacaggacaaaatcacattgctaaaattgaaagtcatagctttgtggatggcgagggtgtacgttgtagtgtatatgtatcaggatgtccttttcaatgtaaaaagtgctataacgaaaaagcacagatttttaaatatggtgaaacattttctgaagatatcttgcaagaaatacttgaaaattgtgccccctcatatatttctggaatcagtattttgggtggagagcctttttgcaatttgaatatatctttaaagattgcacgagcgtttagagagagatttggttacagtaaaacgatttggatatggactggctttctattcgaatatttgaaacatcaaacggatgaacgacgagaattacttgaacttactgatattttggttgatggactatttatgtatcagctatataaacccaatttaccttataaaggctctcttaaccaacgcgtgatagacgttcaagattctttgcgtagccatgggattattgaatatgtgtaa

SEQ ID NO: 1213 - DNA, 1851 bp, Staphylococcus capitis
atgactgctttagaacaatcattaacacgattgataacaaaagacccgacaatattaaatgaaaatgcaaataaagatagtaatactttctctacaatgagagatttaacagctggaactgtatctaaatcatatgcactagaaaatctacttccaaaacacgtagctaaagcacatttatctggagatatacatttccatgatttagactaccatccttttcaaccattaacgaattgttgtctaattgatgctaaagatatgttagaaaatggctttgaaataggtaatgcacatgtgacctcccctaaatcaatacaaaccgcatctgcacaacttgttcaaattatcgcaaacgtatcaagcagccaatatggtggttgtacagttgaccgcgtagatgaattattaagtacatatgctaaattaaatgcagaacatcatcgtgaaatggcacaacaatatgtccaaccggataaaatagaatcttacgtagagcaacaagtgactaaagatatcggcgatgccatcgaaagtttggaatacgaaattaatacactttatacctccaacggtcaaacgccatttgtaacattaggatttggtttaggtacagatgaacttagtcgcaaaatacaacaagctattttacgtacgcgtattaaaggactgggtaaagaccgtatgacagctattttcccgaaacttgtcttctcaattaaaaagggtactaactttagcccagatgatcccaattacgatattaaacaactcgcgcttgagtgttcaacgaaacgtatgtatcctgacatcttaaattatgacaaaatcgttgagcttttgggtgattttaaagcgccaatgggttgccgttcattcttacctagttggaaagatgcaacaggaaactttgaaaataatggccgctgtaacttaggcgttgtcacattgaatatcccaagaattgcaatagaatctaatggtgatatggccaagttttgggagttatttgatcaaaaaatgcaattgatgcatgatgcattagtttatagaattaaacgcttaaaagatgcaatacctaataacgcgccaattctttataaaagtggtgcttttaaatacaaattaaacgcttctgaaaatgtagaagaactgtttaaacaccaacgtgcgacgatttcaatgggttacattggcttatatgaagccgcaacaatgttttacggtcctgattgggaggataatattgaagctaaaacatttacattagatattctaagagaaatgaaatattatcagaatgcatggactaaccaatatgatatttggtttagtatttatagtacgccaagcgaatctttgaccgaccgattttgtcgcttagataaagagcgctttggtgaaatacctgatattaccgataaaggatactatcagaattccttccattatgatgtgcgtaaagatgtaacacctttcgagaagttagattttgaaaaggattacccttactatgcaagtggtggtttcattcattattgtgaatatcctaaacttaatcacaacattaaagcgttagaggcagtgtgggattattcttatgataaagttggctatttaggaacgaatattcctattgatcattgttacaagtgtgattatgatggtgattttgaaactactgaaaatggttataaatgtccgaactgtggaaatagcgatcctaagaccgtcgatgtcgtgaaaagaacatgtggttatttaggaaatccagtacaacgaccagtaatagaaggacgtcaaaaagaaatttgtgcaagagttaaacatatgaaggaaccacgttcatga

SEQ ID NO: 1214 - DNA, 288 bp, Staphylococcus capitis
atggaatttaacatttggatgtggattattttagcagttattatcattgtcactatagctgttattcttatattaacagttggttcagtttatgaagaacgtgcttacgataaacgttcaaaagaagaaaaacgtaaaaacacagaaaagaaccttcaaatggcaaaaggtcacacagatgaagaaagtgaaaagagtgaagcaccacaccatcaaactgaagataaagcacatcattcagtagataatgaaaaagttgaagaacggtttaaagacaaagatagataa

SEQ ID NO: 1215 - DNA, 765 bp, Staphylococcus capitis
atgaaaaaaatcgctacagctacaatcgctacagcaggtattgcaacatttggaatcatgcaacacgatgcagatgcagcggaaaataacaataatggatataaccctaacgatccttattcttacagctacacttatacaatcgatcaacaaggtaactatcattacgattggaaaggtaactggagtccacaacaagctcaacaaggaaacaactctaactactcaaatgctaaccaaagtacacaaagctacaattcatacaataactacaataattatagaacaaataaccaaactcaaagctacaactcaaataatggtggaggtttaggtgcaaattattcaacttctgatagaaacgttaaagtaacaactcaatcagcaccaactcaaaaatcttcaagcaatgcatcagctgcattcgcaggtcaaacatcttcaggttcaaacctatacacttcaggtcaatgtacttactatgtttatgacaaagttggcggcaaaatcagctcaacttggggcaacgctaacaactgggctaacgcagcagcatcatcaggttacactgtaaacaatacacctaaacaaggtgcaatcatgcaaacttcacaaggtgcattcggtcacgttgcatacgttgagaacgtaaataatgacggttcagtaaaagtatctgaaatgaactataacggtggacctggagttgtatctactcgtacaatctcagcaagccaagctggcgcttataactacatttcataa

SEQ ID NO: 1216 - DNA, 1371 bp, Staphylococcus capitis
atgcatggagataatatatggttaacgatgattgggttagcgatcattgtttcaattgtaggtttactcatagcgaagaaaattagcccggttgttggcatgacattgataccatgtatcggtgcaatgatattggggtacagtgtgggagatttagtaaaattctttgataagggcttatcacaagttatgaacgttgtcataatgtttatatttgccatcatcttttttggcattatgactgatagtggattatttaagcctttagtgaagcgattgatattaatgacgagaggtaatgtgattattgtttgtgttatgactgcgttaattggttcatttgcacaattagatggcgctggggcagtgactttcctactttcaataccagcattgcttccattatataaagcgctaaatatgaataaatacctactaatattattacttgcattaagtgcagcaattatgaacatggttccgtggggtggacctatggcacgtgtggcaacagtattgaaagtgaaaagtgtgaatgaattatggtatggtctgattccaattcaaattattggattcgtcctcgtaatcatcttcgcagtatacttaggatttcgtgaaaagaaacttattaagaaggcgatagaaaaaggcgaagtagaagaaacgcaagatgtagatatacatagattagttaatatttatgaacgtgaacaagatattaagtttccagttaaaggccgtgctaggaataatccttatattatatggataaatgtagtattaacgattttagttatcgtcatcatgttagcaaatctagcgccaccagagtttgctttcatgataggcacttcactcgcactaattatcaactataaaagtgttgatgaacaaatggatcgattaaaggctcatgctcctaatgccttaatgatggcggcagtcattattgcagctggaatgttcttaggtgttcttaatgaaacgggtatgcttaaagcgattgctactgattttattaagattattccagatgcagtaggtccatatttgcatatcattgttggaatattcggtgtgccgttagatttattaacaagtacggatgcatattactttgctgttttacctattgttgaacaaactgctagtcaatttcatgtttcagctgtttctacagcatatgcaatggtgataggtaatattattggtacattcgtaagtccgttttcaccagcattatggttagccattggacttgctgaagcgaatatgggtacttacattaagtatgcattcttttggatttggggatttgctattgtgctactactcatcgcagtacttatgggcgtcgttactgtttag

SEQ ID NO: 1217 - DNA, 600 bp, Staphylococcus capitis
atgagtgaatctaacaatattacttggcatgattcagaagtgacgaaagaagaaagacaaaatcgtaatggtcataaaagtgcagttatttggtttacggggttatctggttcaggtaaatcgaccgtttctgtcgctttagaaaaagcgctattcaatgaaggaaagcaaacatatcgtttagatggggataatgtgcgtcatggtcttaataaaaatttaggatttagtcctgaagatcgtactgaaaacatacgccgtataggtgaagttgccaaactcatggttgatgcaggttcaatcactgtgacagctttcatttcaccgtataaacaagatcgcgataatgtacgcgcgattctcaaagatgatgaatttatagaagtatatacgaaatgtagtgttgaagaatgtgagaaccgcgatcctaaaggattgtataagaaagcacgctctggagaaattcctgagtttacaggtattagcgccccttatgaagctccagatcatccagaaatcattttagatactgaacatgaatcaattgatcaatcagttgatcgtgtgattcaataccttaagcaacatcaatatatttaa

SEQ ID NO: 1218 - DNA, 1179 bp, Staphylococcus capitis
atgtctaaaaatgaagaagtaattaactatacaattcaaccacatggtggtgaattaattaaccgagttgttgaaggtgaggaaagagaacgtttaattaaggaagcatcatcatataaatcaattactttaaatccttggggtatttcagatttagaattaattggtattggtggttttagtccgttaacaggatttatgaataaagcagactataccaaagttgttgaagacactcatttagaaaatggattagtatggagtattcccattactttaccagtatctgaagaagaagcgaatcaattagaaattggtgatgacattgctttatacggtgaagatggtgaattatatggaacattaaaattagaagagaagtacacgtacgataaagaaaaagaagcaaaattagtctatggaactactgaagaacaacatccaggtgtcaagaaagtgtatgaaaaaggtaatgtgtacttagctggacctattcaattaatcaatcgccctaaacatgatgaattttctgattatcatctagatccatctgaaacaagacaattattccatgatttaggttggaaaacggttgtcggattccaaactagaaatccagttcatcgtgcacatgaatatatccagaaatcagctttagaaattgtagatggattacttctcaatcctttagttggagaaactaaatcagatgatatacctgctgatgttcgtatggaaagttatcaagctatcctcaagaattatttccctgaaaatagagcacgactagtgatttatcctgcagcaatgcgttatgccggccctcgtgaagcaatattgcacgcaacagtgcgtaagaattatggttgtacacactttatagtgggacgtgatcatgcgggtgtgggtgattactatggcacatatgaagcgcaagagcttatcactcaatttgaagatgaactagatattcaaatcttaaaatttgaacatgctttttattgtgaagcatgcggtaatatggcgacggctaagacatgccctcatgatgcctctcaacatttacatttaagtggtacaaaagttagagaaaaattacgtaacggagaatccttgccgactcaattttcaagaccagaagtcgctgaagtactaattagaggtttacgagaaaaataa

SEQ ID NO: 1219 - DNA, 900 bp, Staphylococcus capitis
atgcgcaaagtattaatattcgcaatagcgggatttttagcacaacttgtagatgggtcactcggcatgggatttggtgcatcatcatcatccattttactcacttatggtattgcgccagcagtagtttctgcaacagttcatttctcagaaattgctaccactgcagcttctggtacatctcattggaaatttgaaaatgttcataagccaacgatgttaaagcttgcgatacctggttctatttcagccttcataggtgcaggcgttttaacgtttattcacggtaattacattaaaccattcattgcactctttttattaagcatgggattctatattttatatcaattcttatttaaaagaacacatgaacaccatacgcatgttggtgatttgagtagtttcaaagtgattccacaaggtgcgattgcaggtttcttagatgctatcggtggtggaggctggggtccagtgaatacaccgctcttactttcaagcaagaaaattcaaccacgttatgcgattggtacggtttcagctagtgaattctttgttacatcttctgcagcaattagttttattatatttttaggattaactcagattaactggtttgctgtcattgcactaagtgttggtggcatgcttgctgctccaatttcagcatatttagttaaaattttacctataaatattttagcaatatgtgtgggtgggttaattattttcacaaatagtaatgcattattaagttatttcattaaagatacaacaatctcaaatacagttagatgtattattttagcagcaatttttgttttactcatcgttcaggtgattcgaaacaagaaattgtctttttcttacaagaaaagccgagtaaacaaatataattaa

SEQ ID NO: 1220 - DNA, 609 bp, Staphylococcus capitis
gtgaatatgccattaatgttagatttaacaaacaaaaaagttgttgttgtcggtggtgggaaaattgctacacgacgtattaaaacattgttaaattacacagaacatattcacgttgtaagcccggttatcactaatcaaatagcacaatgggttgaaactcagcgcatcacttatttggaaaaacgtttcgaacctactgatattgaagaggcagatatggtaattgctgctaccaatcattcagaggtcaatgaagaggtaaggttatcagtacctgaacatgtgttatttaatcatgcagaacaagctgaattaggtaatgttacgtttcctaatgtttttcgaagggatcgcttaacgattagtgtatccactgaaggtgcgagtccaaagttaggacaacgtattattaatcatttagaggatacatataatgaggagtatgtaacttatgttcaatttctatatgaaagtagacaatacattaaagcactcagcatagagccatctgataaacatgcgttacttgaacaaattttatcagacacatatttagatgagaataagcaacatgaattcatccgatggcttcaatcacaggtttaa

SEQ ID NO: 1221 - DNA, 780 bp, Staphylococcus capitis
atgggcaaggtatttctagttggtgcaggtcctggtgatcctgatttattaacaattaaaggtttaaaagcaattaaaaaagcagatgtgattctttacgatcgtttgattaataaagaaattttagaattcgcctctccttccactaaattcttttattgtggtaaagatcctaataagcattcattaccacaagaagaaacgaataaaatgatggtcactttagctaagaaagggcatactgttacacgattaaaaggtggcgatcctttcgtctttggtagaggtggcgaagaagcggaagtactagcaaatcacaatattccgtttgaaattgtacctggtattacatcgggtattgctgcaccagcatacgcaggtattcctgtcactcacagagattttagttcatctgtcgcattcgtaaccgcagtcaataaaccaggtatggataaagaacaatattgggaacatttagcgaatggaccagaaacgttatgcgtttatatgggagttaaacgacttccagaaatttgtgatttattaacgaaacatggtcgttcatcagaaacgccagtcgcactcgttcacatgggtacatcaatacgacaaaaaacgattactggtacacttggtaatattgtagataaggcacatcaaataacgaacccagctatgatcatcattggtgatgtagtccatatgcgagagaagatcaattggtttgtggagcaagctgatgtaaacaaattgtcaattcctaaagtgacatctaattag

SEQ ID NO: 1222 - DNA, 1719 bp, Staphylococcus capitis
atggctagaacaaataaacaaatttcagaagaacttgataagaatcttgatgaaatggaatttttaaaagccgacagtgactttctacgtggaacaatcgaacaagggcttgccgatccaattacgggctcgatttcacaagatgacgctaagctattaaagttccacggaagttacatgcaagacgatagagatttaagagatgaacgtcgtaaacaaaaattagaaccagcatatagttttatgatacgtgttcgtgtaccaggggggaaagcgacaccagatcaatggattgctatggatgacatctctaataatcatgctaatcaaacgattaaattgaccacaagacaggcatttcaatttcacggaattttaaagcgtaacttaaaacagtctatgaaggagatcaacgactctgtcttagattcaatagctgcttgtggcgatgtaaatcgtaatacgatgtgtaacccaaatccctatcaatcaaaagttcacaaagaagtgaacacatatgctactgacattagtaatcatttacttccaagaactggcgcatatcatgaaatttggctagatggcgagaaagtattagattccagtgaggaaaaggagccgatatacggtaatacgtatctaccacgtaaatttaaaatcggtattgctgtaccaccctctaacgatatcgatgtctattcacaagatatcggacttattgctattgtagataacgatgaattactaggatttaatgtcacgattggtggaggtatgggtatgactcacggtaatactcaaacgtatccacaactagggcgtttaataggattcataccaaaagaaaaagctgtagatgtttgtgaaaagcttttaacaattcaaagagattacggtaatcgtgaaaatcgtaaaaatgcacgctttaaatatacagtcgatcgtcttggtgaagcttgggtcaaagaagaattgaaccgtcgattaggatgggatattgaagatgcacgtgactttgaatttgaacataatggtgatcgtttaggttggattgagggtaatggcaattggaattttacgttgtttattcaaaatggacgagtcaaagatactgaagattataaattgaaaacagcacttagagaaattgctgaaatgcatacaggtgacttcagattatcaccgaatcaaaatttagtaatcgctaacgttacacctgagaaaaaagatgaaatccaagctatcattgataagtatggtcttacagatggtaagaactatactggattacgtagaaactctatggcatgtgtagcctttccaacttgtggattagcgatggcagaatcggaaagatacttaccatctttaatctctaaaattgaagatttattagatgaagctggagttcaggaagaagaaattacaattcgtatgacaggatgtccaaatggttgtgcaagacctgcacttgctgaagtcgcatttatcggaaaagcacctggcaaatataacatgtatttaggtggtggcttcaaaggtgagcgtctcaataaattgtataaagaaaatatcggtgaaaatgaaatattagaaagtttacgtccattgttgatgagttacggtaaagaacgacttgaaggcgagcactttggtgatttcgtcatacgttcaggtgtggtagcaaaagtccatgatggtcgcgacttccatagctaa

SEQ ID NO: 1223 - DNA, 1866 bp, Staphylococcus capitis
ttgaacttaagtgtcactaatagcccctttactgaagggcaagcagcacagattaatgaattactccaaactttaacaccagaacaacaaacttggttaagtggctacctcatggcaaaccaatcatcgaatgctacgagtgagggagcttctgacaatatagcatcatcttcaacgtcttcagtaagtcaagaaactgaagccatgttacatcgaaaagagcctgaagtaacgccagaacaacgctcgattactattctttatggttctgaaacaggtaatgcacaagggttagcagaaatctttgaagaacgtttatctaacattggaaatgatgtcacacttaaatctatggacgacttcaagcctaaaaatcttaagaaagttgaagatttatttattgtgactgcaacgcatggggaaggtgaccctccagataatgctgtagaattgcatgaatatatccatggtcgtaaagcgcctaaattagatggtgtaagattctcagttttagcattaggagaccaaacttatgaattcttctgtcaaactggtaaagactttgataaccgccttgcagaattaggtgctgagagaatttatgaccgtgtcgattgcgatgttgattatgatgaagatgctgaaaagtggatggcgaatgtcatcaatgcgatagattcaacaccagcaggcactgacagtgaacaagtggtaagtgagtctattaaatccgcaaaggagaagaaatattcaaagtctaatccttatgaagccgaagtcttaacgaatattaatttaaatggtagaggttcaaataaagaaacaagacacattgaattattacttgataatttcggtgaagaatatgaacctggcgattgtattgttgtcttacctcaaaatgatccagccctcgtcgacttgctcgtcagtacattaggatggagtccggacacgcaagtgttaattaatgaagatggcgatacacttaatcttgaagatgcattaacttctcattttgaaataacgaagttaacaaaacctttagttgagaatgcggcaacgttctttaacaatgatgaacttagcgagaaagttcaagacaaggaatggattcaaaattatattgaaggtcgcgacctcattgatttattaaatgattttgcaacaactgaacttcagccagaaaatatgtatcaattactcagaaagttaccaccgagagagtactcaatttcaagtagttataaagcaacgcctgatgaggtgcatattacggtgggcgctgtaagatataacgcgcatggtcgtgatcgtacaggtgtatgctcagtacagtttgcggagagaattcaagaaggtgatacggttccaatttacttgaaacgtaatccaaattttaaattccctcaaaacgaagagaccccagtgattatgataggtccaggaactggtgttgcgccattcagatcgtatatgcaagaacgtgaagagctaggatttgaaggtcacacatggctattctttggtgaacaacacttcactactgatttcttataccaaactgaatggcaagaatggctcgatgatggcaccctctctaagttagacgtggccttttcaagagatacggatcaaaaagtgtatgtacagcataaaattgctgaaaatagtgagcaatttaaccaatggattgaaaatggtgcagcgatttatgtgtgcggtgatgagagtaagatggctaaggatgttcatcaagctattcgtaatgtattagtgaaagaacaaaatctttctgaagaagatgcagaagaatacttgaagcaattgaaacgagataagagatatcaacgagacgtgtattaa

SEQ ID NO: 1224 - DNA, 732 bp, Staphylococcus capitis
atgtcagtagataagattacgtatgatagttttacgggtgatccttttatcgacactatcgatgctgacgaccaaaccaaaggtgcctaccaaatattagaatgggcttaccaaatctatggtgacgatatcgtctattcatgtagttttgggactgaaagcatggtgcttatcaatttaatttatcaaattaaaccagatgcacagatcgtctttttagatacagacttacatttccaagaaacttacgatttaattgatagagtgaaagagaaatatccacgacttcgaattaaaatgaaaaaaccagaacttacattagaagaacaggctgataaatataatcccgctctatggaagaataatcctaatcaatgttgttatattcgcaagattaaaccacttgaggaagttttatctggcgcggtagcatgggtttcaggattaagacgtgcccaatcaccaacacgtgcaaacacggactttattaataaagatgaacgatttaaatcagttaaagtatgtccgcttatttattggactgaagacgaggtttgggactatatcaagagtaatgatttaccttacaatgaattgcatgatcaacattatcctagtatcggttgtatcccttgcactgcaccagtatttgactcaaatgattcccgtgctggcagatggtctaatttcgaaaaaactgaatgtggcttacatgttgcagacaaaccataa

SEQ ID NO: 1225 - DNA, 486 bp, Staphylococcus capitis
atgagtaagcgtgtttatgatataaaagtagaaaggtgtggcggttctacttactttttagaagaatataaaggaaaggttcttattatcgtaaatacagcaactaattgcgcattaaacgatcaatttgaaggattggaaacgttatatcaaaaatataaaaatgatggattagttgttttaagttttccttgtaataactttgacaatcaagaacctgggtcgatggatgaaatctacaatacttaccgtcgacggtttggtattacatttcctatccactcgaaaacaattgtaaatggtgacaatgaacatcctttatatacgcttttaaaacgcgagaaacctggattatttggttcgcaaattaagtggaactttacaaagtttgttattgatagagagggtaaagtagtaggcaagtatcttccttatgactctccagaagagatggaggaattcattaaagaattattaaatgaataa

SEQ ID NO: 1226 - DNA, 123 bp, Staphylococcus capitis
atgtttaaaaaggagtcgaagtcgatatcatttgccgtatcacgcggtaaacaaatgatttctgagtataataataaaactgaagcggaaatatctattatcttagataatcacaagcaatga

SEQ ID NO: 1227 - DNA, 726 bp, Staphylococcus capitis
atgtactgttcaaattgtggacatcaattaaaagagggccaatcattttgtaatcaatgtggagcacatattaggcaatcatatcaaaatcacccacctcattataaccaaaaccattctaactacaacttacaacgtgcatctcgtagtaagaagccaacaggtttaattattttattatcactcatctttataggattcattgctgctatgctttacggagcatattatgcttatgaacattatgtcaaagatgatgataagacatcagaatctgttcaatcaagtccatctaatacaaatgattcaaaaagtgagaaagattcaacttctaaaggtccgcatattgatgtctttagtacagcatttgataaagggtatatgaaatctgcgtcaacgagtggttatcaaggtatatatacaggtatgacacgtaaagaagttgaagaaaaatttggtaaatccgatggaaatgttgatagttcaaattatacttacgaaaagtatgggaacttagcagttgcgtatgagaatgatgaagttgttcatgtaggggtggcccctaatgatatttcagaagatcaatttatccaaaaatataacgaacctgatgacagaaagccaaatcaattaatctatgatagcaataaagataatgatttctctgtattagttaatgttaaaaatgggaaaatatctgttatcgaaaatgttgatcaattatag

SEQ ID NO: 1228 - DNA, 1125 bp, Staphylococcus capitis
atggcagatttggagaaaagaacggttggactagttgtagcgccaggggttacagaacgtctagcagaaagtttgatggaagagttgccagatatgttgtctgaacaatacaacaacgaaaaagaatggacatttgatttggttacagatccattaactggcttcgcagaatctgtagatgaaatatttaagaaagttgcagattatcatgataagcgtcaatgggattacgtcatttcaattactgacttgccgatgtttgctgatcatcaagtgatggcattagatatcaacatgtataacggcgcagcaatcttctcatatccagcatttggctggcgcccagtaaaaaatagatttaaacaagcaattcttagtatcattcaagaactccatgaagcagaacacgaaagtcgtaattacgatgataataacaatatagagacatccgttaaaaaacaatttcctctctctaaaatagataaaactcaagtgtatttagaagaaactgagtcatatcatttaagatatttatcaagttctcgttctagaggtatgtttagacttgtcagtggtatgacatttgctaataacccattaaatatgatggcaagtttaagtaatatagttgccattgcctttacgacaggcgctttcgggcttgtctttacaacgatgtggaaaatggccaataacttttcaatgtggcgtctatttggtatatccattatcgcgattattggcatgttaatatggattatgatgtctcacgatctttgggaatctgttaaatcaagtaaaaataaaaggataacttggttatataatgctacgacaattatgacgttaattattgccattatcatttactatattattttatatactctgttcttgattgcagagttagtgttgctaccagcagactttttaggacaacaagtaagtcttaaaggtccagcaggtccagatctttatttaagtattccttggtttgcagcatctgtttctacagttgcaggtgctataggtgcaggtttattaaatgatcagttaattaaagaaagtacgtatggctatcgacaacgtattcgttacgaagatacccatgataaaactcaataa

SEQ ID NO: 1229 - DNA, 1185 bp, Staphylococcus capitis
atgcatacagtcggcatcataccttcaccaggtgttgcacatcatcatgcgaagagaatcataccaaaagtaaaaaaattgcttactgaacgtatcgaaggtgatagccattggaacttcgatattaaagtagatttaatgataggttcagctgaagatgtacatgaaagtgcggacaaggccgctcaattaaaggacgaccatcactgggattatgtcatctgtttaactgatttaccgtgtatttctgataataaagtcgtgattagtgactataataatgataagcaagtagctatgttatctctaccttcacttggctttatgggtttgaacagtaaattagttaagactgtgacatctttgattgaacagttatactatgaagatccgaaaagtaaaaatgcgccacatccatttgtacgcatgaaatcagttgaacctaatgaagatgaatctgaaaaaagacgttacattaatacattatttatcattagttggattcaacttattggtggtttaacacgagccaatcagccatggaagaatatctttaattttaaaaagattatctccgttgcatttgctacaggtacgtatatttcaattttctctatgccttgggaactcagtgtcatttattcacctttcagacttatactgcttatgattattgcgatattaggtatggcaggttggttactatacgcacatcaattattagaaagaaagactgcgaaatcccaacgcgtttatcgttatatctataactcaacgacactagttacattgagtgtgattactttaatgaattattttattctatacattttactcattatcagtattacgctatttgtaccagttgatttatttaatagttggacaagtgcaaaggctcaatttacctttactaattatttaagattgatttggtttgtcgcgtcattaggtctattagcaggcgctatgggttctacagttgaagatgaagaaaaaatacgacgcattacgtattcatatagacaatatcatcgctataaagaggcagaagaagaacaaaaagaacaacaacaatctcaagacgtatcacatcagaaagttgaacaacaagcttcaagtaatgatcagcaagatgaacaatatgaaggtaaaaaacaaggtcacagagaggaggatgagtaa

SEQ ID NO: 1230 - DNA, 1593 bp, Staphylococcus capitis
atgaattggatatcgatactcttattcattctggtagtaggtggtatttcattatacgcttatctacaatcgaaaaaagttaaaacagatagttcagatggttactttatgggaggtaacagtctgacaggattcacagttgcttcgacgattattatgactaatttatctacggagcaaatcgtgggacagaatggacaaagttattcacaaggtatggaagttatggcatgggaggttactgcagctgtagcggttgtactattagcttgggtcttcttacctaaatatttacaatatggtgttacgactatatctgaattcttagaattaagatatgatacttttactaagcgatttgtatctatcttatttattttcacatacgtcgtttcattcttacccgttgtactttactctggttcactcgtgttcaacaaaatgtttaacattgataaatatttaggagtaagcagtataactgccgttatcattatttccttggtcataggcgttgtaggaatcatctatttatttgtcggtggtttatctcttagcgcattcagtgactctatttatggtatggcgcttattatcggtggacttgcgattacaattctaggtctcggacatctaggtgacggtaattttatccatggtttcgataaaatggttcaaaaaacgccagagaaattgaatggcttcggtaaaatcgattctgatattgtgccatggcctacgttattcttcggtatgttcttcaacaatttattcttctggtgcgcaaaccaaatgattgttcaaaaagcgcttgctgctaagaacttaaaggaatcacaaaaaggtgctatatacttaagtttattcaaggtgttcgggcctttatttacagtgcttccaggagtagttgcatacaactactttaatggcagtattaaaactccagacaatgcgtatccagcgcttgtaagttcagtactacctgattgggctttcggtttatttggtgccgtgattttcggagcaatcttaagctcatttgtaggttcattaaacagtacaacgacattacttacgcttgatttttataaacccatctttggaaagaataaatctgataaacatattgcacgtgtaggtcacattgcgacaatcgttattggcgcaattgtagtagggcttgcgccagtcatttcattattcccaagtggtttatacgctgttgtacaacaattcaatggtgtttatagtatgccagtactcgtacttgtgtttgtcgcattctattctaagaagacatctaagttaggtgctaaagttgcacttgctacacacattataatatatgcgattgtgagtctcgtatttacagaaattaactatctatatacattcagcgtattattctttgtagatttaattattgtattaattttcaataagattaaaccttctagtgaatatgacttaaaatcacgtcaagcacaggtcgatatgacaccatggaaatatcgctatgttgctggaataattatcttggcattagtggtaataagttatatcatcttttcaccactcgtacttgcgaaataa

SEQ ID NO: 1231 - DNA, 873 bp, Staphylococcus capitis
atgataaaacgtactgttgaaaaagttctatcttggataggaaatatactccatcttttatacttaggttttattgctttaatggtttcaatgatgggtaataaagattttaaacatgaaatgattcataatactcaagattcaaatcaaggtgtatcatctgaccaacttaatcagtcatatggaatgttatcaagtatgggtacatggtacatcattggttttatagtattattaattcttgcaattattgctacattattaatcagtaaaaaatctaaaattgcaggtatcatcttattaatcgtaggtgttattgcgttacttacttcaagtttcttagcaggtattttatggataattgcaggtatcatgctattagcacgtaaacctaaaaatgatccaaatcatcaatacaatgataatcacaatgcctatgcaaataatgagcaccatagaaataacaaccacaatgaatatgacagaaacaataattacaataacaatcataatgaatatgatagaaatcatagtcacgacgacaatcatcataatcatgatcaccataatgctcatgataatacacattctcatgacaattatcaaaataatgagcactatgaaaatggtaacagacaagttaatgagaagaataactcatttattttatctggtgatgacaaaaagcaagaacaacaagaaattaaagatcaatattcacacaatagtgacagagagtctcgtgatttaaacaatcattcaaaagataatcatcatgattttaattctaatgacactaaacgtgatgattttattaaagaagaagagcgtcatcgtaaaaacgaaaaagaagacaatccatttaaatattaa

SEQ ID NO: 1232 - DNA, 2016 bp, Staphylococcus capitis
gtgacattcaagatgatatggaaaatgataaaacgtgggtatgtcacacaacgtcatattattattccgtttattattgctgtgagtatcatgtttagtattgagtatatattaatatcgataactcaaaatacgtatactcagcgacacagcgtcacgcttccgctatttgctgttttaggtaatgtactcatgtctatgttgacgttaatatttgttgtatatgctaataactttgtaattaaaagaaggcaacgagagtttgctgtatacatgattttagggatggagaaaaaacatataaaagtttctttggttattgaatctttgatcaatttcgtaattattagttgtataagtttaattgggggatacttgttcggttctttattttttatgcttataagtaaaatatggatagggaagagtgcaagtttagttgattacccgtttgatattagagcaatgtggataactttaatcatgctagtggtagttttaatcgtgcttaatattataaatattataaaggtaacctttcaaagtccacttaaattagttaaccaaaatagtaaaaaaactggaaaaacgtctaaaatttttacttacatttcattgttattaggaattcttctaactgggtttgggtatagtattgccttacagaacaatactatgattggttcattagcaagtatatttgtagctatgcttagtgtttttataggaacatacttcctctttatatctttaagcgtattaatattagattggttaaaaagaatacctaacttttattacaagactaataattttttcactgtatctaatttgagaagtagattaaaatctaacgcagtaagcttagctactatatcattattagctacattcctcatagttactttaggtatgacaattcacacttatagaggtttcaatgaacgaatagatcaaatatggccaaatgaatattttatcagcgtgagtggagacgttcataaagataaaaaagtaaaaaaaataatggattcattagaaaatgatattcaaaggcacgttaaaaccgatacctttaaaatgtatagtctaaaaagcaataaggctgaatttgtaaataataaaaataacactatattaaggccgaactcaaaaaagtttgatggtcgattattctatttatctaaagaagtacctcactatattacgacatattttatgacacttaatgattataataaatatcaccctaacttaagtcttaaaagtaatgagatagcaattaatacagataattccgttttaaataagacagataaaataaaaatcaatggaactgaatataggttgaagcatattaagaaaatgaatataaatacgctatcaaattttatggacggtgcttatttagtaacgaaaaataataaaattaaagaaaagttatataattacctaaataatttttctaaagatgatgactactatccacgatcttttttagaattcaatgttatgggggataaaaaactcagtgcttctcaaataaataaaataaataaaaatagcaataatggagcgtttgtagaggatagacccagatttgaaaaggagtggactggcgttaatggcggattgatatttgtcgggactgtggtatccttcgtattattcatcgctatcttcctaatgatgtattacaaacaaatttctgaaggttatgatgatagacgtgaatatgaagtaatgagaaaaattggacttgaacaagacttaattaagaaaattatcaataaacaaattatatggatattttcaatacctgttattgtagcaattatccataccttagttgcttccaaaattatttttaatcttcttggatttataacacctaaaaatagtggagtatttgctacaagctttataggagttactttagcatttatcgctatatattctcttatgtactgggtaacttcacgtatttactatatgatcattaataataaacattaa

SEQ ID NO: 1233 - DNA, 750 bp, Staphylococcus capitis
atgttattagaagtgaaaaatgtaaaaaaagtatatggaagaggacttaactcaactaccgcattaaataatatgaatttagaaattgatgacggcgagtttgtagctatcatgggtgaatctggctcgggaaaatctacgctactcaatctcattgcgacattcgataaggtaacagaaggttttatttcgcttaatggaaccgcaatcaacaaactgcgaaataaagaagttgcccgttttcatagagaaactttaggatttgtctttcaagattttaatgtcttaaacactatgaccaataaagacaacattctaatgccacttgtcctttctaatgaacgtcctaaaacaatgaatgaacgacttgaaacaataagcactcaattaggtattaatgatttgttggacaaatatccatacgaaatctcaggcgggcaaaaacagcgaattgctatagcacgcgcactcatcgctcagcctaaattattactagccgatgaacctactggagcactagactccaaaacttctaaaaaccttatgaaattatttcgagaaattaaccaaaataatcaaactatcttaatggtgacacattctaatatcgatgcgtcatatgccgaaagagttatttttattaaagatgggaaactttatcatgaaatctatcgtggtgaagaatctcgagatgaatatcagaaacggattgcagatagcttagctatcctaaatggaagaggtgattag

SEQ ID NO: 1234 - DNA, 903 bp, Staphylococcus capitis
atgattatgttactatcttttataaaatcgattcgaaatgagattacaattatattttgtatatttttattatttgcattaatattttacttattttcattaccatttagtgccttcggtcttgcgttaggaatcgtattactcatcattgttattcattggtgggtaaagtaccttggatttaagagaaatgaggatcttaaagagaaggtagataatttggaaaatgaattaactgaagtaaaaaatcgccaagtagaatatcgtaatgatgtggaaagttactttttaacatgggtacaccaaattaagacacctatcacagcgtcacaactattactcgaacgtaatgaagaaaatgttgtcaatcgcgtaagacaagaaattgttcaaattgataactatacaagcttagcattgagttatttaaaattactcaacgaagaatctgatatgacaatttcatcagtgacagtgaatgaactaatacgtccgttaatcatgaaatatcgaattcaatttatcgaacaacatactaaaatacactatgaaaagtgtgaagcaactgttttaacggatgcacaatgggcgtctattatgatagaacaaattttaaataatgctttgaagtacgcgcgtggaaaagacatttggattgaatttgattctgctaaacaaacattaatcattaaagacaatggtgtaggtattagtaaagcagatattcctaaaatatttgataaaggctattctggttacaacggcagacttaatgaagaatcaagcggcataggattgttcattgttaagcatatttctaatcatttgaatcatgaggtcgatgtagattcaggacttggtgaaggtacgacatttaaaatacattttcccaacgaagattag

SEQ ID NO: 1235 - DNA, 666 bp, Staphylococcus capitis
atgaagattctcatagtcgaagatgatttagttattgctgagagcttggctaatgaactttcaaaatggaattatgaagtgaatgttgttgaaaactttgatcaaattatggaagattttcgtgaaacagaaccacaactagtattgttagatatcaatttacctacactcaatggatttcattggtgccaagaaatgcgcaaagaatctaatgttcctatcatgtttattagttcaagaaccgataatatggatcaaattatggctattcaaatgggtggcgatgactttattgagaaaccgttcaatttatcgctaacagtagcgaagatacaagcgttacttcgccgtacatacgatttatccgtatcaaatgatgaattagatgtgaaaggttgcaagttgattcttgatgaggcgaaactcgtaaaggatgatgacgctgttcaattgtcattaacagaacttcaaattttgaaaatgttattccaaaatgaaggaaaatacgtgagtcgtacagcattaattgaaaagtgttgggaatctgaaaactttattgatgacaataccttagcagttaatatgactagattacgcaagaagttattatctataggcgttgatgattttattgaaactaagaaaaatgtcggatatagggtttaa

SEQ ID NO: 1236 - DNA, 153 bp, Staphylococcus capitis
atgatacttgttatgttatctccaatattgattattggatttatagctttaggtatttttgaagaaagaagaagaagtaaaaaagctcaagatcaaaaagaccaaattgaaaaagataaaaataaagtttatgattcagaagagaacaaatag

SEQ ID NO: 1237 - DNA, 1485 bp, Staphylococcus capitis
atgagtttcattaataaatttggtaaaacaacgatagcaagttctattgtagctgcatctgtaataggtgcttcaaatgtatcacatgcttcaggaagtggtgcgggtccaggtgaaaatgctcaaggacagcaaggacaagatgatgcagtagcatttggtaatactaagaatcctaaaaatgttattttcatggttggcgatggcatgggcccatctttcaatacagcatatcgttattataaaaatcaacctggcgctaaaaaaatgaatgcaactgcatttgataaataccttaaaggtacaaatcgtacatatcctaatgatccaaaagaaaacgtaacagattcagctgcgggcggaactgctttcgcgactggtcataaaacatacaatggcgcaatcagcgttgataataataaaaaggcattaaaatctgttttagaacaagctaaagagcaaggtaaatcaactggtttagttacaacggctgaacttactgatgcaactcctgctgtttacgcatcacatgttgactctcgtgataaaaaagatgaaattgctcaacaattttataatgataaaattaacggtcaacataaagtagacgttctcctaggtggcggttctaaatacttcggtaaagaaaatggcaaccttgataaaaaattcaaaaaagacggttatgatttagtaagtaataaaacacaacttcttaattctcaaagtgacaaagtattaggaactttctctgagaaagatatgcctcttcaaattgatgcaccatctaaaaatcctttactcgtagatatggaacaaagtgcattaagtaaattagataagaacaataaaggcttcttcttaatggttgaaggtgcttctatagataaagctgcacatccaaatgatgttactggtgtaatgtcagaaatgggaggctttgaaaaagcattccaaaactctatcgactatgcgaaaacacataaagatactttagttgtggcaacagctgaccattcaactggtggtatgacgattgctaaaggtaaagattacaaatggaatccagaagctattcataaaatgaaacattctggtatgtatatgactaaagaaattgctgcaggaaaagaccctgaaaaagtcatcaacgaaggttacggcattgacttccctagcaaacaaatggataaagtgaaacaagctgccaaagatttacgcaaacttcaaaaagaaggtaaagatgataaagatcctaaagtagcagaagctactacaaaattacaaaatgccatccaagaaccaattaatgatgcgtcccacactggatggactacaaacggtcatactggtgaagatgtgaatacttacgcttacggtccaggatctagcaagtttaaaggcaacatggaaaacactaagagtgctcaaaacatcttcgactttttcaaaaatgatgtaacatctaatcaaaatcaacaataa

SEQ ID NO: 1238 - DNA, 1542 bp, Staphylococcus capitis
atgtctaaaattttattaactggggcctcgggatatatcggtggtcaccttaaagataaattaaaagatcaacatgaaatcatcgcgatttctagaaatacgagtaacaaacagaatgaggagaatgttacttggaaatctgcagatttatttgatttagatgaaattactgaagtaatggaagggatcgatacagccatttatctcgtccattcaatgatgccatcagcaaagttaacacaagctaactttgaagatatggatgcactgcttgcagataacttcgcacgtgcagcgaaaaagcagggtgttaaacatattgtctttatgagtggtttgattccagatgacaatcatttatcagctcatttaagaagtcgtcttgaatgtgaaaagattcttggtgattatggtattccggttagtacattacgcgctggattaattattggtgcgaagggaagttcttatccgatacttaagcgtttagttgaacgtttaccagctatggtattacctagttgggcatataacatgatagcaccagtagcgatagaagatgtcatagatgggttagcagcacttgttgaacgctctccatctgaaaatgaatctatcgatattagtgggcctgagacaatgaattataaagagttgattcagcgaacagctaaagtattagacaaaccattacctatgcttgacttgcccattataccgataattgtaagtcgttattgggttcaattgatttcaagtgtaccgaaagaaatggtttatccgttaatgaatagtttaattcatgatatggtaccgcatgataaacgcatcgtacctaaattgtcattaggaaatattacatttgaagatagtgtgaaacgtgctttagacgaagagaaagaagagaaaaagaagaaggcgaaacaaagttctagtcactctaaatctaagaaagaagaaattaaagatgtgcgcgccatcacacgatttgaaattcctgatggatatagtattaaagatgtgacaacggaatatgctcgtttcataaataatattacattgcacttagtgaaaggtacgattaatgaacatgaattcaatatgaatgtaccatttattaataaatttattttgaaaatgaaaaaagatgaacatgactcaagtgaagaaatggcagtttatcgcattgtcggtggcgatttagcacatgcggataatggaggaaatgcacgtttcgaatttcgcagattgagaaatacaaatgaagggattattgcccttcaagaatatgaaccaacattaccatgggtcgtttataaattaacacaagcgaaagcccataaaacggtaatgaacatatttaagaatagaatggcaaaattatcaaaacaaaagaaaggattaggtgagcaagatatgacaagaaatattattattggtgtttcagtagcagttgcattagtggcaggaggagcaggagcgtttgctttaattaagcgcaatcaaatgaaaaaagaaagtatgtcaaacgcagaattataa

SEQ ID NO: 1239 - DNA, 627 bp, Staphylococcus capitis
atggcaaaattattatacattacagctcatccactcgatgaactcgtttcaaattctatggcagctggcaaagctttcatcgacgcttatcaagataatcactcaggagatgaagttaaacacatcgacttatttactgaagatattcctcatattgataaagatgtattaattggttggggaaaagctgcaaaaggcgaagaacttacttctgaagaaagtaaaaaagttactcgtttaggagccattcttgatgaatttttagaagctgataaatacgtatttgttagcccaatgtggaacttatcattcccacctgttttaaaagcttatatcgatgcaattacagtagcaggtaaaacatttaaatacacttcagaaggacctcaaggtttactcactgataaaaaggtacttcacattcgatctagaggcggatactatagcgaaggaccgactgcagaaattgaatctggagaccgatatttaagaaacattatgacattcctaggtgtaccttcatacgaaactgttattattgaaggtcataacgctgaacctgaaaaggctgaagaaatcaaattagccggcgttgaagaagcaaaagaactagctaaaactttctaa

SEQ ID NO: 1240 - DNA, 888 bp, Staphylococcus capitis
ttgattttgaaaaagagaatatcaataagtacctcaagtaaaatgaaattatcaatacttatttgcttagtcattttaattataggaatcactagcgcctgtgctataacacatgaacataagaattctgcaacgcatcactcaaagttgcatcatgtaccactgattgtaggtcaaggagaagataagggacaggcatccactgtcaatcttgagccttcagaatcagcacaagaagatgtacatcataaagaccgttttaaatctatgactgatttatttaagcatacaaaacggaatgtggattggaagaaagaagttaaaaaagtaggaagtcatgtattaattattgcgcctcacggaggaaacattgaagcgggtaccacagagttaactaaattaatagctaacgataatcactatgattatttttcatttaccgttttaagaaaaaaacatgctgaagatttgcatgtcacttcaagtcattataatgatcctacattattaaatatggttaaatctaaagattatgcagtttccatacatggtgctaaaggggataaacctgtcatttatcttggaggattagatacacctttaaaagaagcaattaaaaaacaattagttaaacatcattttgttgttaaaatcgcaccaacttatttaggtggagacttaaaagaaaatttcattaatgaagatatcaaagggaaaggtgtgcaacttgaattaacgacagctttaagaaaatctttatttgtgaatgaaaaactatctgcgaaatctagaaataatagaagtaattggtcaccggcgatgtatcgtttttcagatgccattgataaagccgtacaacaagttgatgaatcaggaaaagatagataa

SEQ ID NO: 1241 - DNA, 696 bp, Staphylococcus capitis
gtgcctaccactaatcaaacagataataatcaagaaatgattggtactgcaccagaaggacatataaaagataagtatcaatcgatgacacaacttgagagtgaaacggtggaaggtgtagattggaaaaaagatacaagagataatggtacgaaagtacttattgttgcacctcatggaggaaacattgaacaaggaacgacagaagcaacgaaagctttggcgaaaaaaggaaattatgattatttctcttttgaagctataagacctaaaaataatactgaattacacgttacttcaacgcattatgatgatcctactcttaaccaaatgattcaaaatcgcacagctacaatttctattcatggtgcagctggtacagatcaaattatttatttaggaggaccaccttccactttaagagatgaaatggaaacacaattaaaaagtagtggttttacagtgatggctccacttgattatatcggaggagtaaagaaaaataactttataaacagagaagaaaacaatacaggcgttcaacttgagctaacaactgcactcagaaaagctttcttcaataatggtgatacaagtactaagaatcgttctaatgaaagtaattggacgccgctgatgcagacatttgttgatgcgttatatacgagtatcaacaatatttatccaaatcattaa

SEQ ID NO: 1242 - DNA, 258 bp, Staphylococcus capitis
gtggtaggcacggtagttgccggtgttgttgtaggctgcttagttgatgttgatggctttgtcggtatcgtagttgattttgttgctgaagttgtagacttcgctgttgaagttgtaggtttagtcgttgtcgtagttgatttcttagttgatgatataggctttgtcgacgttgaagttgattttgttgttgatggctttgttgtagatgttgtagactttttagtcgaacttgtgcgagtagatgtgcttgtatga

SEQ ID NO: 1243 - DNA, 351 bp, Staphylococcus capitis
gtgcgagatgttgtcgttccactcttacttcccgatgttgatgacgacgtacgtttcgtagttgtagtagactttgttgctttagtcgtagtagttgattttttagatgttgatgatgttcttgaagttttagctgtcggcttagtagatgtagattttactgctgatgtagattttggtcgagtagtaactgacttagtagttgtcgttttacccgtagaagttgtgggtgctttggatacagtaactgaagttttactactcgtagcttgtttagttggtgctttcgtaactacaggttttatactcttagtcgattgtttagtaggcacgactttcttagtagtttga

SEQ ID NO: 1244 - DNA, 177 bp, Staphylococcus capitis
atgaatgacggtctcagctttctttgttttcaaaatatatataatgatgattattggctattctttttaattagacttacaactaatgcaataaaacctactgggattaataaaataagtaatgcaattaaccctaaagcacctaataccattgcgattcctcctcatttggtttag

SEQ ID NO: 1245 - DNA, 456 bp, Staphylococcus capitis
atgtcgatgaataaaaatgattatgaacacatgttattttatttcgcgtacaaaacttttattacaacggcagatgaaattattgaagaatatggtatgagtcgtcaacatcatcgctttttatttttcatcaataaattaccaggcattactattaaagaattattgttaactctagaaatatctaaacaaggctctcatggaacgttacgtaaattgaaagaagaaggtttgatttatgaagaaacgtctgaagtggatcgtcgtgtaaaaaaattatattctacacaaaaaggcgatgcgttaattcataagttgaataaagcacaagatgatttatttcatcagaccaagcaaaatgttggtaatgactggtatgccataatggaagaattagcgaattatcgtgaaggatttaaaacagtagaacatttaaaggaaactgataaaagctga

SEQ ID NO: 1246 - DNA, 1641 bp, Staphylococcus capitis
atgaaacaacgcgtaggacaatatttaatggacgcagtttatgcagccggagtagataaagtctttggtgttcccggggattttaacctagcctttttagacgatattatttcacatgaacatatagaatggattggcaatacgaatgaattaaacgcgagttatgccacagatggttatgcacgtatcaatggtttaggtgctatggtcactacatttggtgttggtgaacttagtgcagtaaatggcattgcaggttcttatgccgaacgtgtaccagtaatagctatcacaggcgcaccaactcgtgcagtagaagaagctggaaagtttgtacaccattcacttggtgaaggtacatttgatgattacagaaagatgttcgaacctattacaactgctcaaggttacattactcctgaaaatgcaacaactgaaattcctagattgatcaatgcagcaattcaagagcgtcgaccagttcacttacacttaccaattgatgttgcattagctgaaatcgaagtttcagaaacattccaacctgaagacgtgcctcatcaagatgttaaaaaatatattgatatgattgaagataaattgaaatcagcgaaccaaccacttattattgcaggacatgaaattaatagtttcaacttgcataaagagttagaagagattgttaatcaaacaaatattccagtcgctcaattatcactaggtaaaggtgcctttaatgaagaaaaccctcattatattggagtatttgatggtgaaattgctgaagataagattaaagattatgtgaataacagtgacgcgattttaaatatcggtgcgaaattaactgactcagcaacagctggcttctcttacgaattcgacattgatgatgtcgtgatgattaatcataagaacttcaagatgaatgatacagttgcgaatgacgttacattacctagcttagtacatggtttgaaggatcttcattttgaaaataaaaacgactaccctcaatatgaaagaccacaaaagaataattatgaactaagtgatcagccattaactcaagaaacatatttcaacatgattcaagatttcttacaattagacgatatcttaatcgcagagcaagggacatctttcttcggtgcatatgacttagcaatgcataaagataatacatttataggtcaaccactttggggttcaattggttatacgttaccagccacattaggtactcaaattgctgaccctcaacgtagaaatgtcttactcattggcgatggttcattacaattaacggtacaatcattatctacaatgatacgtcaaaacttgaaacctgttatctttgttatcaataatgatggctacactgttgagagaatgattcatggtatgaaagaaccatataatgatatacgcatgtgggattataaagctttacctgcagtatttggcggagacaatgtcgaagtacacgatgttaacacgtcagaggaattaaagcgtgcatttgaaaaaattaattcaaatagcgatcgtatgcactatgtagaagtaaaaatggcagtggaagatgcaccagtaaaattaagtgaaattgccaaagcatttgcttctcaaaataaataa

SEQ ID NO: 1247 - DNA, 858 bp, Staphylococcus capitis
atgactaaagaaattaaacaaaatgttggcacagttgaagttcctgatacagttgaatctgcagttgctttagagtattcatttgtagaagcattagtgaaattagacgtaaatgtaactggtattgcagatgataacaatgtagacaatttagacagtgaaactcgtaaaaatgtaggtagttatcaatcagttggccatcgtcaaacacctagtgttgatgacattaaaaatgctgagccacaagtgattttcgcagatgaggatagacataaatctatctttgaagatttaaattcaattgcacctacagtattagttaaaagttttgatgcagactataaacaaaacaaagaatcattcgattatattgcgaaagttgtttctaaacaagatgaaggtaaaacaattttagataatcatgaaaaagaaattaaagatttaagttctaaagtacgtatagataaagatgttgctacaatcgctggcgttgttactgatcaagatttaatcattcatgcttctaaatcttatgttggtcaattattagaagatgtaggttttaaagctggtatttctaaagaaaatgaaaatgatttacctggatatatgggtgctgattatcataaattacctattagcaaagttgctgaagttaatccagaacgcttaattgttatggtagatgaagataaccaaaaagatttcaataactttaaagagtcagatgtatggaatcaattagatgctgttaaaaacaatcgtgttcatgaagttaatcgtgaaacatgggctaaacatcgtggtttagtagcagcagaacaaattttagaagacattacacaatttactgagtaa

SEQ ID NO: 1248 - DNA, 258 bp, Staphylococcus capitis
atgccttcagttaattattcaaacgctagacagaatttcaaagaacttattactaaagtgaacgaggatagtgtggcttacactattacgacaaaggaaaatgaaaatgcagtgattttagctgaaaaggattataatgcgatgttggaaacgatgtaccttcaatccaatctcgctaatgtgtctcacttaaatcaatcaattatggaattgaatcataaccaaacaattacaatagagattgatgataatgagtaa

SEQ ID NO: 1249 - DNA, 270 bp, Staphylococcus capitis
atgagtaagtttagtgtaacttttacagctcaagcatttaaagattatcaatattggcaacaacacaatcaaaattattttaaaaaagtgaatgctttacttaaaagtattgcaagagatggttgtgtcgatggtattggaaaaccagaagcattaaaaggaaactacgaaggctatttcagtagaagagtttcaatagaacaccgattaatatacaaaattaaggatgattcaatattcgtagtgtcttgcagatttcattatcaataa

SEQ ID NO: 1250 - DNA, 366 bp, Staphylococcus capitis
atgaaattggtgaatcaatctaaaaatcctcatgcatttaaagatgtttctgataatgaaactacgattgctatggtcatttggttattatcatttttcacaactttcttagggccactcattatttgggtattaaaaagagatgattctgcttttatcgatcaacaaggtaaaaattatcttaattacttaattagttatcttatttatacaattattgcatccgttttagtctttgtacttataggcgtcgtcttattgttcatccttggtatagcaatgatcatttattcaatcgtcgcaatcatatttgtactcaaaggtgaagactatgtcgtgccttttacaatagaattcattaaataa

SEQ ID NO: 1251 - DNA, 1137 bp, Staphylococcus capitis
ttgaaatactatatttctacagttatattctttattgcttttttatgtgtaagtggattaacattagctacaaatctagagtcagaagcatctgttgtagctgtaggtgataacttgatccaccctgaagtctataatgatgcgaaaacaggtaaaaatagttttgatttcaaacctatgtatgagcctgttaaaaaagatattcaaaatgccgatattgcatatgttaaccaagaatctccacttggtggcgatgatagaccttatcatggatttaagcgttttaatacaccaagtagtgtggctcaggacttagtagatacaggctttaactttgtaaatggctctaataatcacgcaatggatcaaggtgaatctggtataaacaacagtatacatacatgggataaatttaaagacaaagttttatttacaggtgtttttaactctcaagaagctcgagatgagattccaacaaaaacagttaatggtataaaagtatcaatgttaagttatacatttggcactaatggtattaaaccttcccatccatacacaattaatacatttgatgaaacacaaattaaaaaggatgttaaagaggctaaaaagcaaagtgatgcagtgattgtatcagctcactggggcaacgaaggtcatcatatggaaaataaaactcaagaaagatacgcaaaagtctttgcagatgcaggagttgatgtagtgttaggaatgcatcctcacgttatcgagccggtgaaatgggtgaaagggaaagatggcaataaaacacttgttgcatattcacttggtaactttttaaacggccaagctacaggtaatgaaagcaatgatttattagggcgtcttaattttaaattagttaaaaatccaaaaggcgttaaagtggaaaacgtgaagtggagaagtatggttaatcattacgaattagccaatgtatatgataagaattctaaaaaagattttaaaatatatcctttacatgactatactgacaaattagcagagaaacatggtttacattatgttaatggagcaaatatgacaaaagaaagattgcaagacattactaaagaagttattgataaagaattcttagatgatgaaagtttatag

SEQ ID NO: 1252 - DNA, 759 bp, Staphylococcus capitis
atggctttaatgacattgaattatagttcaccgacaataggtatgcatcaaaatcttacagtcatcttaccggaggactcaacttactttgataactccacttcacctaaacaacttaaatcattattacttttacatggtttgtcgagtgatgaaaccacttatgtgagatacacaagtattgagcgatatgctaatgaacatcagctcgcaattattatgcctaatgtagatcatagtggttacgctaatatggcctatggtcatagttattatgactatattttagaaatatatgagtatgtacatcaaattttgccactctctaaaaaacgtgaagataattttatcgcgggacattcaatgggtggttatggaacgattaaatttgcgcttacccaaccagataaattttccaaagcagcaccattgtctgctgtattccaagcgcaaactctcatagatttggagtggatagatttttctgctaaagctatcactggagagaatactgatattaaaggtacaaatctagatacgtatcatcttttagaacaagcaattgtttcaaatgcgcaattaccagaacttcttattatgtgtggaactgaggatttcttatatgaagataatttagaatttattcgcacgcttgatgaaaagggtattggttatacattcgaggatagcccgggtgagcataattatgcatttttggataaggcgattaaaagggccattgaatggtttgtagaataa

SEQ ID NO: 1253 - DNA, 1668 bp, Staphylococcus capitis
ttgagaaaaagaatggatttcgtgcctaacaggcacaataagtatgccattagaagatttacagtaggaacggcatcaatattagttggtgcaacattaatattcggagtgaatcatgaagctaaagcggctgagacttcaactgaattaactcaggcacaagtggatgaagattgttcgggtattactgatcaaggccagcaagaagaaatgttaacagaaactcaaaacacacaaaacgactataacgagcaacaaccaactcagcaaatagacaacgattgtattattgatgaagttcctatgaacgaagttgaatatagtgatgatgcatcatccaaagcccaagaagaagatgctacatcattagaaaatgtttcaacagatattaacacacgtaatacggagaatgaatcagttgacgcccaatcaactgataactgcattgcaaatgaacaaacttttgacaacgaatcagtgcaagaacaaacagataaccaagtgaacaacgacaataatatagatgaattacaaaaagcccaagaatatgaaactcaagaagaaaataatgatgctaatcaatcattgtcagaatcagcagactgtgaaaatggtattcaagcaggttctaacaattacgatatagaagcaataagtggtgtttccgaaaataataatgatgatttagataattcatctgatgtctcagctaatggagacgttgctgaaaatgtttcagctttagatagcaactcagattgcgatttatacgcggatcgtagcttagactatgacactgactcaacaagcaatgattacaacacagatagtgattacaatacagattgtgactacggctcggatcgtagcttagactatgatactgattcaacaagttatgattacaacacagatagtggttacgacacaaacagtgaatataatactgattgtgattacaacacagatagtgattacaactcagactgtgattatagctcagatagtgattcaggcttagattatgattcagattcaagctatgattcagactcaagctacgattcagacgcaagctatgattcagacacagactgtgattacaactcagactgtgattcagactcaagctatgattcagactcaagctatgattcagactcaagctatgattcagactcaagctacgattcagacacagactgtgattacaactcagactgtgattcagactcaagttatgattcagattcggactatgattcagattcagatagtgatttagattcagatagcgactcagactcagactgtggttcggattcagactgtgactcagactcagatagtgattcagactcagatagtgactcagattcagacagcgattcatactcagatagtgactcagattcagacagcggctcaaattgtgattctggttcagaacataaagtaccagtagtaccaacacagtatcatgaaatgacatctcatcatgactcaaaccatcattataataatctagtgatggagcagcatcataagcaagaactaccagatactggttatgatgtggcaaataatggtacgttatttggaggtattcttgcagcattaggatcattacttttagtaggaagaaaacgtagaagtaagaaatactaa

SEQ ID NO: 1254 - DNA, 687 bp, Staphylococcus capitis
atggctggaaatcaaatgttttgtagagaaaatgaacttgatgaaagttttaaacaattagcgtcatatattcatatacctgtaggtgtcttacttccatttaaaagccaatgctttgtgagacattatagtaagggtcaggtaatttacttttcgtcagatgaaacgacgcatatctatttattaatagaagggaatataatgagagaaaactttaatcttaatggtgatgtgtatcgttatttaaatagagaaaaagtgttatttcccttaaacaatttatttcaagataaggcgccaaatgaaatgtgcaccgcattgacgaattgcgaagtgattggcatacctaaagatttaattgaatatctttgtaaaaatcatgaggatatctttgtaaggttatttgaattattgagtgcaacacaatgccaacacattgaatataatatggcgttaaccagcaagcttgcgaaagaacgcgtaacaaagatattacgctatctttgccaaacagttggttatgataatgatgaattttatgaaattaagcaattcatgacgatacaactgttgagcgatatggccggtatatctagagaaaccacaggtcatatcattaatgaacttcgagaggataaagttctattcaaaagtaataaaaactggttaatcagcaaagatttataa

SEQ ID NO: 1255 - DNA, 945 bp, Staphylococcus capitis
atggataaaaaaattgtcatcgcattaggtggtaatgcgattcagacgtctgaaggttcagcagaagcacaacgacgggctattcgcatgaccatgcaaacacttaaaccactatttcaatccgataatgatattgtcatttcgcatggtaatggtcctcaaataggtaatttattgattcaacaatctcaatctgatagtgaacaaacgcccgctatgccacttgatgtatgtgggtctatgacacaaggtatgataggctactggttagaaacagaaattaaccgtgtactatctgagattggcagtgacagagctgtcggtactattattactcgtgtagaagtcgataaagatgatccgagatttgatcgaccaactaaaccgattggtccattttatactgaagaagagatgcaagaattgaaagaagcgcaacctgaggctatctataaagcagactcagctggtcgtggttatagaaaggttgtcgcatcacctttaccaatttcaatacttgaacataaattgataagtacacttgttgaacaaaaaaatatcatcattgcatgtggtggtggcggtgtacctgttattaagaaagataatatttatgaaggtgttgacgccgtcattgataaagacttcgctagcgagaagttagctgccttaattgatgcggatacgctaatgattttaaccaatgtagagcacgtgtatattaattttaaagaacctaatgaagaaaagttaacagatattgatgttgaaactttgaaacgttacgcgaaagagggtaaattcgctgaaggatcaatgctacctaagatagaagcggcgattgatttcgttgaaagtggggagcataaagaagcgatcatcactaatttggaaaatgcttatcaagcgttcgacaagcaagcaggtacacatattcataaataa

SEQ ID NO: 1256 - DNA, 1431 bp, Staphylococcus capitis
atgagcgaacaaggagaaaataagttaagtcgatcatcattgataggtcttgtaataggatcaatgataggtggcggtgcattcaatctcatgtctgatatgggaggacaagctggtggtttagccattattataggatgggttatcacagccataggcatgatttcattagcattcgttttccaaaaccttacaaatgaacgaccggatcttgatggcggtatatacagttatgcccaagctggttttggcgattttatcggctttgcaagtgcatggggatattggttctctgcatttttagggaacgtcgcgtacgcaacattactaatgtcttccgtcggtaactttttcccaatttttaaaggtggtaacacattcccaagtatactcgttgcttcaattttattatggggtgttcactttttaatacttaaaggggtagaaactgcggcgtttattaatagtattgttacggttgccaagttaatacctatattattagtcattatatgcatgttagttgcctttaattttgaaacttttaaagaaggattcttcggaatgaatgcacatggtgcactaccatttaactttggagacacaatgtctcaagtgaaaagtacaatgctcgtcactgtatgggtatttatcggtatagaaggtgctgtcgtcttttcaagtcgtgccaaacgtaagaaagatgtaggtactgcaacagtaataggattaatttcagtgttactcatctatttcttattaactgtattagcacaaggtgttatcattcaaaaccatatctctcaattaaacgcaccatctatggcacatgtccttgcttacatcgtaggtgattggggttcaacacttgtaaacatcggactaattatctcagttttaggtgcatggttaggttggacactacttgccggagagttgtcttttatcgttgcgaaagatggattattcccgaaatggtttgctaaggaaaatgaaaacggcgcaccagtcaatgcattattaatcactaacatattagttcaaattttcttgattagtatgttgttcactgacagcgcgtaccaatttgcattttcattagcatctagtgccattttatacccatatatgttcagtgccttttaccaagttaagtacactattgaacataaacaacacgcgacacctaaacaatggacaataggtatactcgcctcattatacgcagtatggctagtctatgctgcaggatttgattatttattattaacaatgttgctttacattcctggtcttatcgtttattcaatcgttcaaaaaaataaccaaacacgcttaacacgcattgactatatcttcttcgctatcattatcattctatctattgtcggacttatacgactatgtagtggcgcgattaacgtgttctag

SEQ ID NO: 1257 - DNA, 1008 bp, Staphylococcus capitis
atggaaaaaatccggaaaccatttgacttaaaaggaagatcactacttaaagaatgtgattttaccaaagaagaatttgaaggtttaatagattttgccatgacgttaaaaacgtataaacaacaaggcacaccgcatcgttatttagaaggtaaaaacattgcattactttttgaaaaaacgtctacacgtacgcgtgctgcattcacagtcgcatctattgatttaggtgcacatcctgaatttttaggaaaaaatgatatacaattaggaaaaaaagaatctgttgaagacactgcgaaagtattaggcagaatgtttgatggtatagagtttagaggtttctcacaagagaaagtagaacaacttgcagaattctctggtgtaccagtttggaacggattaacagatgattggcatccaacacaaatgttggcagactttatgacagtaaaagaaaacttcggacatcttgaaggcattaatttgacttatgtcggtgatggacgtaataacatggcacattcattaatggtagctggtgcgatgcttggtgtaaatattagaatttgtacaccacaagcactaagtcctaaagatgcttatgtagaaattgctagagattgtggctctaaatatggtggttccgtgttagtcactgataagatcgaagaagcagttaaagatgccgatgttatttatacagatgtatgggtatctatgggcgaagaaagtgagtttgaagaacgcattaatttattgaaggactatcaggtcaataaagcgatgttcgaattaactggtaaagacagtacaatcttcttacattgtttaccagcatttcacgatacacaaacagaatacggtcaagatatatatgataaatatggcctcagtgaaatggaagttactgatgaaatctttagaagtgagcactctaaagtatttgatcaagccgaaaatcgcatgcacacaattaaagctgttatggctgctacactaggctag

SEQ ID NO: 1258 - DNA, 1236 bp, Staphylococcus capitis
atggcagatggacccattcaagtaaacagtgaaattggtaaacttaaaaccgttttacttaaacgtccaggtaaagagttagaaaatttagttccagattatttaggtggtttactatttgacgatattccttatttggaggttgctcaacaagagcacgatcggttcgccaaagtgttacaagatgaaggagtagaagtactatacttagagaaacttgctgcagaaagcattgaagattcagatattagagaacaattcatcaatgatgtgttagcagaatctcgtaaaacaattcttggtcatgagaaagaaataaaaaaattattctcaacattatctaatcaagagttgattgataaagttatggctggtgtgcgtaaagaagagataaaattagaatctacgcatttagttgagtatatggatgacaagtatccattctatttagacccaatgcctaacttatacttcactcgtgacccacaagcatcaataggtcgaggtattacagtgaatcgtatgttttggagagctagacgtagagaatcaatcttcatttcatacattttaaaacatcatcctcgcttcaaagatgcggatgttccggtatggttagaccgtgattgtcctttcaacattgaaggtggggacgaacttgtactttctaaagaagtactagcaattggaatatcagaacgtacgtcagctcaagctatcgaacgcttagcacgacgtatatttaaagatccgttatccacttttaaaaaggtagtagcaattgagattccaactagccgtacatttatgcacttagatacagtttgtacaatgattgattatgataagttcacaacgcactctgcaatccttaaagctgaaggtaatatgaacattttcattattgaaaatgatgaagctagtgatgacattaaaatcactcattcaagtcaccttaaacgaacattggaggaagtacttggtgttgataatatcgagttaatcccaactggtaatggtgatgtgattgatggtgcacgtgaacaatggaatgatggttcaaacacattatgtatccgtccaggtgtagtagtcacatatgatcgtaactatgtatcaaatgatttgttaagaaaacgcggtattaaagtaattgaaattcctggaagcgaactagttcgcggacgtggtggcccaagatgtatgagtcaaccattattcagagaagatttatag

SEQ ID NO: 1259 - DNA, 462 bp, Staphylococcus capitis
atgaaaaagagtaaacgtcaggatttagtaaccatgattgttaaacaaaatcacatctataaaaaagcagatatcattgattatattgatgatcactttggcattcgttatagtatgacaaccattgcgagagacttgagagaacttaatatttttcgtctgccagctgagagcaaacaatttgaatacaaaattttaaataatcaatcgcaaatcgacgctaaaattaagctagatgattatctagaaacagaaatcattagtaccgtgattaaagaatcatatatacttataaagacgtcaccaggatttgcgcaaagtatcaattattatattgaccaattacaacttaaagagattgttggtactataagtggcaacgacactattatgatacttactcattctaaagcaatggctgaatatgtgtattacaaaatattcaatcataattattcataa

SEQ ID NO: 1260 - DNA, 201 bp, Staphylococcus capitis
ttgaataaatctgagcaaggtctgaatattatagatttcattttatttacaccactaatcattcttttcttcattaatattttaatattcactcatttgattcacgtatctgcattttattctaacttattatcaatcattaattcggctttattaatgattggatggattagaatgatttataaagataagacatcttag

SEQ ID NO: 1261 - DNA, 204 bp, Staphylococcus capitis
gtgcgtaaattattaaagaagttaactaaaaaagatttcgtattgattgtcattttatttatagttgcagtgatgtgcttcttaaatacctttgacatagtaaagttgtcagaaagccaatctaattatgttgccactatttataccattatcgtttttattagtttgattcgaataaataagaaagataaacacgatcaatga

SEQ ID NO: 1262 - DNA, 195 bp, Staphylococcus capitis
atgaaagattttaatttaagagacgttataggaatattgattatgggattcgttagtttttttaagttgcctttactaaatgtcgtattattagcattgcttatgattattgtgacatcttttataaatgaaaaattatgctctaaaagcaatattactaggagagaagaggatgaaaaagataaaacaacttga

SEQ ID NO: 1263 - DNA, 1521 bp, Staphylococcus capitis
atgaaaaatttttcaaaatatgcacttacaagtatcgcagcacttacggtcgcaagcccctttgtcactatggatggccatgctaaagacaagtcagtaaaacaagacattgatgcgaaggttactcaacagactgacgcaccaaaagcacttaaagcattgcctggttcagaaaacgttaagaaccattataaagactatgttgtcactgatgtaaaaaaagacaacaaaggatttacgcactacactttacaacctaaggtaggtaacgtctttgctcctgatgaggaggttaaagtacatgtgaatactgaaggcaaagttgtattaattaacggtgacactgatgcgaagaaggtgaaaccaactaatgaggtgtcgatcaacaaagaacaagcatctaaaaaagcgtttgaagcggttaaccttaatcctaaaaaagcgaaaaatatgaaagaagacgccgtcaaaacaaataaagtagaaatcgatggtaaaacaaataagtatgtttacaatgtagaattgattaccacaatacctaaaatttcacattggaatatcaaagttgatgcagaaacaggccaagttgtcgataaactaaatctcatcaaagaagcagcgacgacaggtaccggtaaaggtgtgcttggtgatacgaaacaaattaatatcaatagtgtaaatggaggatatgcgttacaagatttaacgcatcaaggacaattagcagcttacaattatagtgataacactggccaacattcgctcatcaaagataacgataaaaacttcacagatgataatcaacgtgctggtgttgacgctaattactacgctaaacaagtgtatgactactataaagatactttcggtcgtgaatcatatgatgatagaggaagttcaattatctctctagcccacgtaaacaaattccaaggttctgataatagaaataatgccgcatggattggcgataagatgatatatggggatggagacggacgaacatttacagcactatctggtgcaaatgacgttgtagctcatgaaatcacacatggtgtaacccaagaaacagcgaatcttaattatcgtaatcaatcaggtgctttaaatgaaagtttctcggatgtcttcggttactttgtcgatgatgaagatttcttaatgggtgaggatgtgtatacaccaggacaaaatggagatgcactaagaagtatgtccaatcccgaacgatttggacaaccatctcacatggatgattatgtaaatacacaatcagataatggtggtgtacacactaactctggaattcctaataaagcagcttacaatacaatacgtagtattggaaagggtaaagcacaacaaatttactacagagcgctcacagaatatttaagttcaaattcaaactttagtgatgctaaagaagcgctgtatcaatcagctttagatttatatgataaaaacacagctaaccaagtagcagatgcatgggacgacgttggtgtataa

SEQ ID NO: 1264 - DNA, 840 bp, Staphylococcus capitis
atggacttaaataaattaattactctaatcgaaaataaaaagcacaatgagttatataggatgttttctaaaagttttaagcgctctattagtaaacgcatgttaaaggaaacattagatctatatatgaaatatgcgaagaaacatactttgtatgttgatataggtaatgaaaagagtggcgaaaaaatctggctagatgaataccaaaattatggtattttcgtgttattggaaaatgatgttatttatagtttaatactgaaacccctctattattttaaagataaatggacgaaacagacttatgatcttcctattaaagatgaatggctaatatattggggtggagataacgaattatttaattaccactataactatgaaacgcaacgctatgcatatgatttagtgaaactagtcaatggtaaaacgatgtatgatggtggtcaattttgttcaaattattatagttttggggcgaatgtggttgcaccgatttatggagaggttgtcaaagttgtgaaccatattaatgataatacgcctggaaacacaaatgagagtgagccatatggaaattatgtaatgatgaagcatggcgatcatgagtatagtgttcttgcccatttaaagaagcattcgattactgtacatgaaggggatttaatttatgcgcaagaagtgattggccagtgtggcaattcaggaaactctaccgaacctcatttacactttcaagttatgaatgcccctgatttggaaaatggtcaatcattgaagattcaatttaaagattataataatcctattaaaggtgaaatattaaaaaatgattga

SEQ ID NO: 1265 - DNA, 1239 bp, Staphylococcus capitis
atgagtgtattaacaaatgaagagagagtcaaaattctatcggatatcgtcgcaatcaaaacagtgaacgacaatgaattggaagtagcgaaatacttacaaaagtggttcgacaagtatggaattgaatcagaattagatgaagtttcagaaggacgtgccaatttaattgccactgttggttcaggtcaacctgtcatcggtatttcaggtcacatggacgtggtcgctgaaggaaatcatgatgactggacttacgatccatttgaattgactgaagataatggttacttgtatggacgcggtgctgctgatatgaaatcaggtttagcagcattagccattgcgttaatcgaaattaaagaaagtaaccagttaaataaaggtacaattaaatttatggcgactgttggtgaagaaatggaacaagcaggttcttcacaattatatgaaaaaggctatgcagacgatttagacgcgttacttatcgctgaaccgtcttatccaagtttagtctatgcgcataaaggttctatggatttccgaatcacttctaaaggtagatcttcacatagttcaatgccattcttaggtgaaaatgcgattaaaccactactcgaatttattcaaaatattgataaagaatatgaagaacttacgcaaactgttaaaggtgagtctttagactacagtaatatggtgaataagttagcaggtcaattacctgaaaatgtcactaaagaacaggctaaagatttaattgaaggtttagtcatgacaaatagtatctttaacggtggttcacaagtcaattctgtaccggatagtgcgactgctgaatttaacgtgcgtactataccagaatataataatgacaaagttaaagaattatttaataaatatttaaaacaagctaacgaaaatggttcaagtttatctcaagaaatctatcttgatttagcgcctgttgtaacaactggtaaaaatagattggtagaacttggccatgagaaagcacaagcacatttccctaatgaggaaggtttaattattacgccgactgttgcggttacagatgcgtctaacttacttcgtggtaaggatgagcacttcccattcttaatgttcggccctggtattagacctcatcaagttgacgaatgtgttgaaaaacaaaattatcttgattttgttgattattatatcgatttcttaacgtcatttactgatgaattttaa

SEQ ID NO: 1266 - DNA, 522 bp, Staphylococcus capitis
atgagaaaactaactaaagtatttgtagcatcaactatcgcaatgggaacattagtaggagtgggtgtttctacggcttcaccagttaatggcattgctcaagctacaaactcacattactatacgtatcaaggttacgttaaaggaaatggatcattcttaattaaagagcaatttattaaagccgttaagagtaataatgtgacatttaatggaattaaattgacacattcgactggtactaaaatggtcgataagtatgatcaacatttcgaaggtgtcgcaaatgatgggattaaggctaaacaagtccaatttactgtgactaaagatttaaccttaaatcagctgaaaaaagcttatggcaaagatttaattaagaaaagtcataataaaaacaaggatggcggtattttttgttatacaccttcaggtaaaggtttaggtgtattgtttgtagtagataatagtcgtgtcgtagcagtgacgattggctactcactttctacaccaagtaaataa

SEQ ID NO: 1267 - DNA, 543 bp, Staphylococcus capitis
atgaacagaactacaaaagtaatcttatcgtcaatgttagcagccggaacagtatttggagttggcctttcaacagatacgccaccagtgaatcaagcccatgcagcaacagcaccttactactcatttacaggatatgctggtaatcatgcctcatttgttttaaaccaactatttattaattcgttaaagtatgacacttttagaatgaatggaattaaaattccttacacaactggtaaaaatcatgtgaacaaatataaaggcacggttaagaaatatgaccaaagctttagtggagttaatactaagaaaacgagagcaggtagcgtagagtttaaagttacaagtcatctatctgtgaaacaacttaaagaagcttatggtaaaggtttgagagctttacctaacaagcacaaaggcactaaaacgtatgcttatagcccaggaaataaacactatggtatatcatttactactaagaataataaagtaactaaaattacaatcggaacactaggtgtgactggagaaaaattctag

SEQ ID NO: 1268 - DNA, 561 bp, Staphylococcus capitis
ttgaaaaagatattagcaagcatcgtagtgatccttcttgtcgctgcattaagcttctcaatttatgcagcaatgacgcatgaaagcaaatcttctaatacagactcaaataaagacaatcaaaaaactgaagagaaacataagaagaaaaataaatctaatcaagacagcgatcaatataatggaaataataacgctaaccaaagccaagaaaatgcgcaatcagaaccagcatctggcacatataacggaaactctaatatcaatcattccaacaacacaactaagcaacctagcaataatcagtatcaaaacgataaacaacaaaccaaaacaaacgaaactaaagataaaccatctaagaacaactacaaaccaagcacgcaaaataacacgagcaataataactacaataaccattcacaacaaaatagtcagaactctacacaaccatcaacatcagagaaacctaacaaccagcaatctagctcacaaaactctgaaaacaaaccaagtaaccaacaaaacaataacaacagcacacaaaataaacacgagtaa

SEQ ID NO: 1269 - DNA, 780 bp, Staphylococcus capitis
atgagtaattctaaaaaagtagctgttgttactggagcggctcaaggtattggtttgaaaattgctgaacgtttatttaaagatggatttaatttagccatagttgattacaatgaagaaggtgctaaaaatgctgcgtcatctttaactacaaatgaacaagaggcaattgcctttaaagctgatgtctcaaatcgtgatgaagtcttttcagtattaagaaaagtggtcgagcactttggagagtttaatgtattagttaacaatgcaggtttaggtccaatgacgccaattgatacagtgacacctgaacaatttgatcaagttattggagtcaatctaggtggcgtattctggggaatacaagctgcattagaacaatttaataagttaggtcatggcggtaaaattattaatgctacttctcaagctggtgtagagggtaatgcgggatcatctttatatagtagtactaaatttgctgttagaggtttaacacaagttgctgctcgtgatttagctgataaaggtattacagttaatgcgtatgcacctggtattgttgaaacaccaatgatggaaggtattgcaataaaattagctaaagagaacaatcaacccgaagagtggggttggaaacagttcactgatcaaatcactttaaaacgtctttcaaaaccggaagatgtggctaacgttgtcagcttcttagcaagtagtgattcagactatattacaggacaaactatcattgttgatggtggtatgagattccattaa

SEQ ID NO: 1270 - DNA, 360 bp, Staphylococcus capitis
ttgaaaaagttaatttatatcgctcttgtaattatagtagtagccatttgttatatgattctaaatttcttattttttgataaatgggttatgtattccagtgaaaaacaattaaatacctctattaaaaataaagatactaaaaacttaaaagaaattgctaaagataataaaacttatcaatttctaaaaagccaagataaagtttctattaatggacaatcagataatcaaggtagcggtcatataggttattatcaagtgaatattaatgacaaactagctactctaactgttaaaattaagtatgcattactaccagaaaaaccaaaaataaaatcagtagaattaaatgactaa

SEQ ID NO: 1271 - DNA, 816 bp, Staphylococcus capitis
ttgaacatttcttctaaatattttgattatttagttgtttttaccgcaggcataggaatgtttttatctaccttagatagtgggattattaacgttgcattacctactttatcgaaatcatttaatgttgatacatcattgataacatggagtgtcactttatatactttattattgacgggaacgattatcatatttggaagattgagtgacaaatttagtcgaataaatatctatagtatcgggcttattgtgtttttaatagcttcaattttatgtggtttttcaagtaatattatccaattgatcacatttcgaggtttgcaaggcatcggagcagcaatgttgcaaggcactgccactgctattattacaactagtattcctgaagatagacaaggatcggccctaggaacgctaagtatacttttaggaataggaccagttttaggacctagtgtaggagggagtttactctctttaggaagttggagatggatattttggatgaatattccctttatcgtagtagggttagttggctgtttaatattgaagagaaatattaaagaaaatagaagtacatctattcacctagatttgcgaggaaatatattgttatttctatctatattttgtttattaatcagtctaactgcatggtctcataattctattaaaagtttactcgtttatgggaatttaataacttttatcatactatttagtttgtttgtagtatgggaattaaaaaatagtcttctctacaactctatgatagacaatacgtttttgaggatttttcgcattaggtga

SEQ ID NO: 1272 - DNA, 1878 bp, Staphylococcus capitis
atgataaacagacagattaaactcattcaactcttaatcaataacgctcaaacgtacattagcgggaatgaagtttcggcttatttaaatgtgtctaatcgcacagttaggaatgatattaaagttattaattctacattcattgataatcttatagtgagtgttaaatctagaggctatcaattaaatttagatgcatattctattagttttattgagggacaattaaatgacagtattcttaaagagagaaagttattaattacgattgcttataaattattgatggatcatcatacatatactttgagtgagcttgcatcacattttcatctatcaaaggcagatgtactcgattgtgtcacacgtatccaaacttggtgtgaaaaatttgatgtcaccatcactttgaaaaggaaacaaggcatcattatcgatgctagtggttcggatttaagtaatgcggttcttcatctgaatcaactctcttcgaatgaaattaaagtggaagatttgattctgcaagaattaccacagggacatattcagcgtattcatcatattattaagaaacatattcaagcttccgagcttcaaacgtcagataatcaagtgcgacaattacttgtgcatttaatcttaattattaagcgctctaactctgaggagttagattgggagtcgaatccaacttctctagccatagcacgacagtgtattaaagatattaatcaacaactaggttaccagctaactgatgaaacgagtcaattgttttcattcttcattagttatcatttcaatcaatttgatttaagcttccaacaactctttattcaaagttatattcaacggttaatacaattgatggaaacgaatgtagatattcctttttctaaagattcaattctaaaagaaaatatttatacgcactttagtcgtacctacttacgattaatgcgcaatgtttacctcaacaatccgctgacatctgaaatcaaacaactctatccttttatctttaacacgctttacgatgtaattcatcagttatctaaagacactgacatacaacttagcgaagatgaaattgcctttttgacgattcattttcaatcatcaattgaacgacaaatgcactcgaccattaacgtcgtcattgtgtgctattacggcttaggggtttcaactttattagctgaaagaattaagaaattaagtccttcaatatcaattgttgatacattgaaacttgaagatgttgagacatatgactttgcgcaagtggatttactcatcacaacgcatgatatcgacttaagtcacaaacgttcatcacaccttccgaaagtgattcaggtgtcgccattattttcgaaagatgatgaacgccaagttgaacatgtaattaaaacgtttaaaaacccaacgttacaaagagatgccctgtcaccaatagaatttgtggttgagtccgacatcgaacaagatgaaccttccattgcactctcaatctttaagagaactcaagagattctagaagaacatcaaacgactttagacggttacattgaatctgcgatggaacgcgaacgtcagtcttcaactttcataggcaatggtatggcgattcctcacggtaatcctgagaaggtgctgaaatctcatgtgattgtctataaattcaagcaccccattccttggaaacaacatgatgtgaagttagtattcttcctagcgattgcgaagaaggatgcgcaaatgatgaaaaatatgattcagtcactagcccaacttgatgaacatacggttgatcagtggtgtatgatggagaaccatgactttaaaaataagttaatcgctcaaattcgagaataa

SEQ ID NO: 1273 - DNA, 1977 bp, Staphylococcus capitis
atgaaaatacttgctataacatcatgtccgaacggtatcgctcatacatatatggctcaagaaaagttagaacaagctgctaaagaaatgggcgtagatatcaaagtagaaacacaaggcggtgtaggtgctgaaaacattttaactgccaaagaaattaaagaagcagacggcatcattatcgctgctgatagacaagttgatctttcacgttttaatggtaaacgcctcattaatgagaacgtgcgtgaaggtatccatcatccaaaacaattaattcaacgtatcattgatcaagacgcccgtatctatcatggaaatgattcagaaactcacagccacaattctgaagaagataatgaacataaaagtggcatgcaaatggtctatcaacacttaatgaatggtgtctctttcatggtgccattcatcgttgtaggtggattgctgatggccattgctttaactataggtggcgaagcgacttctaaaggcctcgtcattccagagcattcattctggaaatcaattgaaaatattggaagcttatcttttaaatttatggttccaattctagccggttatattgccgtaagtattgctgataaacccggacttgttccaggtatgattggtggagctatcgctgctgacggaagtctctatggcagtactgcaggtgctggtttcttaggtggtattgttgccggtttcttagctggttatatcgctaaatggattaagcaaattaaagttcctaaagcgatggcaccgattatgccaattattatcatacctattatttcttcacttatcgtaggactgatatttatctttgtcatcggtgctccgatttcaagtatctttgctgcattgacgacatggttaaaaggtatgcaaggcgcaaacattattattctagcgttgattatcggcgctatgattgccttcgatatgggtggtccgattaacaaagttgcctttctcttcggttctgcattaattgctgaaggtaactatgcagtgatgggaatggttgctgtagcagtatgtacgcctccaatcggtttaggcttagccacatttattcaaaaacgtaagtttaataaagctgaacaagaaatgggtaaagcctcatttacaatgggtctcttcggtatcactgaaggtgcgatacctttcgctgcccaagacccacttagaacgattccagctaatatgattggtgctatggtagcatctgtcatcgccgcgctgggaggtgttggagatagagttgcccacggtggtccagttgtagcagtacttggcggtattgataaggtcctttggttctttatcgctgtcattatcggtagtttagtcacaatgatgacggttttaattttcaagagacatacacctgtgaatgaagtgaattcacacgagactgaccctacccttgaaaatgattctacatcagcaaacgatacaacaacacaaagtaatgtagcaacgactgctccacaaagtgagcctacaaatgaaagtaaagaacatgaagtatttgccgagaatattattgaaatatcaaatactgaacttacgcgtgacaatgcgattgatacgcttatttctaaattaaatgaacatcactatatctctaatgttgaagaagttaaagaagctattcataagcgagaagcagagtcaactactgccattggtatgaatgtggcgattcctcatgcgaaatcaagtgcagtcaatcaacctgccgtagctgttatgcaaaatagaaaaggcattcagtgggaaagccttgatggttcattaccgcaattggtcttccttatcgctgtgccaaatgacagtaatgatacgcatttaagattattgcaacgcttatcaaaagctttaatgcatgatgatacaagagacaacctcgtgcatgctcaagataaaaatgaaatttacaacattttaaaagagatataa

SEQ ID NO: 1274 - DNA, 936 bp, Staphylococcus capitis
atggtattgtttcttaagcctgtatttcaagagcgcatttggggtggcaatgctttaactcagtttggttacgatattccaagtgatcaaactggcgaatgttgggctatttcagcacatcagaacggacctaatgtcattgaaaatggcaaacatcaaggtaagacgttagatgaggtatgggaagaagatcgtgcgttattcgataacgattctagaacacacttcccgcttctaactaaaattctagacgctcatgatcaactttcagtacaggttcatcctaatgatgactatgcacttaaacatgaaggtgaatatggtaagacagagtgttggtatattcttgatgcagaacctggctcagaaatcatctatggtgtagaagcacaaacaaaagaagaattagaacaactcattgataataaagacttcgaccatttatttactcatgttccagttcaacctggcgacttctattatgttcctgctggtacagtacatgcgataggttcaggcatcctcatcttagagacacagcaatcttctgataccacatatcgtatttatgattacgatagaaaagataaaaatggcaacacacgtgaattacatttagaacaaagtaaagaggttatcgatatttctaatcgacagccgaatacttctccacatactaaagagattgatggtaacacttatacgcaatttgtgtcgaatacgttcttcacagtagagaaatgggatgtttctgaacatctaactttaacgaaacctcatccgtattgcttagtatcagtcattgaaggtgatggtcaattaacagttgatgacgaaacattcactgttcaaaaaggtacgcattttattttaacaacagaagataaagcaattcagtttaatggacacatggatctaattataagccatccttaa

SEQ ID NO: 1275 - DNA, 2853 bp, Staphylococcus capitis
atgaagaacgcactaaaactctttatcacggatttgaagagggtagcgaaaacgccgggtgtttgggtgatcttagcaggtctagctattctaccttcgttctatgcatggttcaatttatgggcgatgtgggatccgtatggtaatacaggccatattaaagtagcagtagtaaatgaagacagtggtgacaaagttcgaggtaaaaaaattaacgtcggcgatacaatggtcaaatcgttaaagaacaatgacagtttcgattggcaatttgttagcagagaaaaagcagaccatgaaattaagatgggtaagtactatgccggtatatacataccaagtaagtttacacatcaagttactggcaccttaagaaagcatccgcaaaaagcagacgttaatttcaaagtgaaccaaaaaattaatgccgtagcagcgaaactgacagatacaggttcatcgctcgttgtagagaaagccaatgagcaatttaataaaacagttacgaaagcattgttaactgaagcaaataaagtcggtctaacattagaagacaatgtgccgacaatcaataagattaaaaatgcggtatatcaagcgaatgatgcattacctaagataaacgacttcgctgacaaagttatttatcttaacaatcatcaagacgagttagatcaatatgcgaataaatttagagatttaggtaaatataaggctaatattactgatgctcaagataaactcaatgcagtcaattccgctgttcccgctttaaatgagaaggcgaaactcatcctagcacttaatgattatatgccgaatatcgaacgactactcaatgtagcttcgaatgatgtgccagcacaatttcctaagattaataaaggtgtagacattgctagtgaaggcattgatgcagcaagtagtcaattaaacgacgcacaaggatatttaactcaagcgaagcagcgtgtgaaagactatcaagaagctgccggtagagcacaagaagtgaatggtgctgtgaataaagatttaaacaatcagacaacgacacagcaacaaagtgctacccaaagccataaagatttagggcatagttactctaatataaagaccagtcaaatgagtacgatgggtgattcatctaacaatgattcagatttaacacaaaacgacattaaatcaatgaacaccgccttagcagaatcgttattatcattatcaaatcagacagacaaacaagctcaagccactcaacaagatattaaagcgttgaagaacatggcatatggtattatcgcatcagataaacctacacaatttaaagaaccacttgagaatattaaatctcgattggaaaatgctactaaatataatcaacaaatggtcgatattctttcagaactagagaaaagtgaagatgtagatttatcatcagaaattaaacatattaaaaaggcgaataaccaaattaatgatagtttacgaacaactaatcaattaattgatgctttatcaaatggtagttcaggccagtctgaagcagtaaaagtacttcgtggactgccaaaactgagtgataatcttgataacttccgttcatatattaaaaatgaactaaacaaaaatttattagctgtttcaaacgaaattacagatcaattaaataaaggtcagaatactttatctacaattcaatcgaaattgaactcaatcaaccaagtgattaatgcaggtcaagatatcttaagtgatggtaaagaacgtattgatacaatacaaagcactttacctggtattgaacaaacttacatcaatgccatgaaaactgctcaagcttacttcccaactgtgaagaaagatgttgcacaagccgctagtttcgtgcgcaatgacttaccacaattggaacaagaattagccaatgtcactcaatcagtaaaccaaaatttaccggcattatttaatcgatatgacaacgctgttaatttattaaatgagaatcaaccacgcgcgaaagaaggtttagcttcactagctgacttcgcacagaataaattgccagacgttgagaaggatcttaaaaaagcagataaagtcttcaagaaactagacaaagatgatgctatcgataaacttatagacacattaaagaatgatttgaaaaagcaagcagacacaattgcaaatccaattaataaaaagactacggatgtcttcccagtgaaagattatggttcaggaatgacaccattctatacagcgttatcaatatgggtaggtggcttattaatggtaagtttactttcagtagataacaaacatgaacatttgcgacctatattaacagcacgacaaatctatattggtaaagctggtttcttcttcctcttaggtatcattcaagcacttatcgtgtcgataggtgacctagtgatacttaaagcggcggtggaatcaccagtcttattcgtaaccatcgctgtatttagttcactcgtatttaactcaatcatctatacatgcgtgtccatgttaggtaatccaggtaaagctgtagcgattatcttgctcgtattacaaatcgcagggggtggaggaacattcccaattcaaacgacaccacagttcttccaaaccatttcaccatatctgcctttcacttatgccattgacgccttacgtgaaactgtaggtggtattgtacctgaaatattaattactaaagttgtcgtactcacattgttcggcctcggatttattatattcggtatatgtatgaaacctgtgatggatccaattatgcgtaaaattgctaaacgtgcagcagaaagtaaagtaactgaataa

SEQ ID NO: 1276 - DNA, 2097 bp, Staphylococcus capitis
atgtcgaaaaacaaattgttaatttatttactatcaactacgttggtatttccaacattcactacccctacggccgttgcgaaagataatacagatgacatgaatcaacaaacaaaggtaactcataaaagttcacagtcgaaagaagataaacaagagcaaactgatagcaatcaacgtgcgcaccaagctgaaaaagcttcttctgagaaatctccttctaaagagaacggtaaatcttctaaaacgcataaaaaagataatgatgttaaagcggataaaaacaaagcatccaatcagtcagatcagaattctaaccagccgcatcaaactacaacagcagttactgatcaaaataagcaaaaaaatacaaatttagttgaccaattttaccataacgttgctcaaagtcagtctcatatgaacgacctgttaaaacctgataaatatgatgatagctttagtttaactacattaattcaaaatctttttaactttgattctaatatttcaaattatgaacagtcagacgatcatacaagtcaatcaccttccacttcaaatagagatgattctactgatagtgataacaatgattctaaagaggtaacatcgaataaaaatactaattcagacattccttctgaaggaagtcattcctctcattctgaagatcaatcacatcaaagtagtacatcatcttctaaagcagaaacagatgattcaaaggtgagtgacgcattatctcaatgggaacaagacgatgataaaaatacttcccagtcacaaggtcaatcgtctcaacaagatgaatctaaacagtcatcaaatcaaacgcatcaatcatcttctaatcaaacaacatcacattcatcaagtgacaacaaccactcaagcgtatctgattcagcactagataccattcttgatgaatacagtgaagatgctaagaagacccaatctaattatgagcagaaatctaaacatcagaagaacacatcgcagtcttctcaaaataataatccgcaactacctacagagaatgaattgaaacataaatctaaaccggttcaatcgtttgagaatgatattaaaaaatctaatacgcgttcaacaagtttattccaacaagtaccacaaattgaagatggcaaagtgtcagacgataactttaatgtggtagacagccaagatactcgtaaatttattaaatcgattgctaaagatgcacataaaattggccaaaaagaaaagatttatgcctctgttatgatggctcaagctatcttggaatctgactcaggtaaaagtagtctagctcaatcacctaactataatttattcggtgttaaaggcagttataatggggaatctgtgaacttcaatacactagaggctggtagcgataaccaaatgtttagtataaacgctggattccgtaaatatcctaatttgaaatcttcactccaagattatgctgacttaattaaaaatggtattgaaggcaatcctacaatttataaacctacttggaagagcgaagcattaacatataaagaggcaacgtcacacttatcacattcttatgcgacagatccgaattatgctaaaaagttaaatagtatcattaaacattacaatttaactgcatttgataaaaaacgtatgccaaatctgaaaaaatatactcaatcaattggaacagaaacttcaggaagtgatttcaaaccatttgttgaagctagtggatcttctccatatccacaaggacaatgtacgtggtatgtttatcaacgtatgcaacaatatgactcatctatttctggtgatttaggtgatgcacacaattggaacaatcacgctgaaagagaaggttacactgtaacacagtcacctaaaaaccatactgctgttgtcttcgaagctggccaacttggtgcagatacacaatatggtcatgttggtttcgttgaaaaagtcaacgacgatggttcaattgtgatttcagaatctaatgttaaaggtcttggcgttatttcatacagaaccattgatgcagaagatgccaatgatttagattatattcaaggaaaataa

SEQ ID NO: 1277 - DNA, 561 bp, Staphylococcus capitis
atgacaaatcaaacagctctattagtgatggatatgcaaaaaggtatcgcaaataatgtgccacaaattaatagtttaattaaagcaaatcaacgtgcaatagaagcagcacgcgcacaccaaattccggtagtctttatgcgtgttgcattagagaaaaactttgcagacgtttcacctcataatcgtgtgttctcaagttttaaacaacgcggtatatccatgacagaggatgatgcgtttgcacaaattcttgaggaattagaacctgcagaggatgaaccaatcatgactaaacgacgttttagtgcgtttacaggtagtggtttagaggtcttcttgaatgcgaatcaaattaatcaccttgttttaacaggtatttcgacaagtggagtggtgctaagtaccgcacttgaagctgcagataaagattatcaaatcacagttttagaagatgctgtgggagatcgttcagatgataagcatgatttcataatagaacaaattttaaatcgttcatgcgaaatagaatcagtcgaatcatggagaaaccatttatag

SEQ ID NO: 1278 - DNA, 1965 bp, Staphylococcus capitis
atgaagagaacacgtgtacaccaacttagcggatatttaaaaatctcatgtacagcactacttgtcagcgggacaatcattggttatggatttacccacaatacacacgcagattctacagagacatctcgtacgatgacacaatcgcaagatcaaaatcattctttaagtaaacacattaaagaagctaaagataaattaaatcacttaaaagacttatcaaaagaagatatcaaagattatcaaactcgtatagatcgtgccaaagatgactctaaaatagatgctattattgaagatgcgagacaacataatgaaaagttagtaaattcaacggtctctaatgatagtaacaacaattcaaaagcgtctaaggagttagatcaatttttagaagatttggatgccatttctaataatgttgataactatcaacaaaacaatggtgtaaatgaagaccatcccaataaagacgctattcataaagaagatacacagaatacagaagctaaagacaatgatactaaagcacaggcgaatgatacgaccattttcaagaaattagactctatcaaagatgatgtggattctctccgctcaaatgaaagttctagtacgagtcaaagtgataaaaagacttcaaatcaatctgataacaaagagcgtcaaaatcaaattgagcatgatatagcaacactaaaatcagaagctaatcaaaatagggataatgctgaggatacgattggaaaaatcactaaggacttacaaggtagtgataaaatcacacatgcgcttgcacagagacaatcacgacaaaatgataataatgagaactatctaagtcgtaaattgaatgatttaggtgctttagaaagcaaagttaaggaagataaccatttatccgacgataataagcaaaaattaaaacgtgaaattgatcgagcgcatcaaaaacttgatggacaacaaaacgcgatattaaatcaacttaaaaatgataaagataaagctaagaccactgaaaatatacttcatagcatcatgagtaacaatgaagctcaacgtgcattgaaaaacattaaaattaaaggtcaatctgataaagacattgctaatcaaatcgcgaagcagattgatggcgttgccactacttcaagtgatgatattcttaaatcaatgttggatcaatcacataataaagaaaaattgattaaagaactattatctacgcgactaggaaacaatgaagcttctcaaatagcaaagaaattagccaatggtcactttagtcaatctcaaattgttgatcaattaaaacactattttgataaaaatggtcacgcaacagcagatgatattttaaatggcgtattaaataatgctaaaaataaaaaagaagcaatcgaaacgatattagcgacacgattgaatcaagataaagcgaaaattttagcaagtgtcattacacgtattcaaaatgataaaacagatgcgttacaactgatacaatccgctttaaatggtaaagcaaatgacttattgcaacttcaaaatcgtgttaaacgagctaaaggtgatttaaattatattttatcaccaataaaagatcgcccatcattacttgatagaatccatggtaatcatcacaacagtagtcaactcgctgatatattaaaccaactcgcaggtttaacaaatggatcaggtatattagataatttaaactctaaagattctatactagatggtattggtaatatggatacaccatccccagagaacaatttatcattaggttcaggtgatggcttattgagtggaatattaaatgacgacggcaatatctctttaccagctgcaggtaaagttcttaaattgagtgttttaccatttgcaatcattgctttagtgattggaagcacgttgatttgggtaagtcgccgtaagaaacatcatgcatcataa

SEQ ID NO: 1279 - DNA, 429 bp, Staphylococcus capitis
atggcaaaacctttatatactacgacaatgatttcaaatggtggccgtgatggtcgcgtatttagccctgataatacattcgttcaaaatctagccacacctaaagaaatgggtggtcaaggtggtaatgacacgaaccctgaacaattatttgctgctggatatagtgcatgctttaacagtgctttatcattaattttatctcaaaacaaagtaaacgatgctaacccagaagtagaaatcactattgaattaattaaagatgacactgacaatggctttaaacttgcggcagatatcaaagtaacacttgaaaatatctcacaagaagacgctgaaaaatatgtagaacaagctcatcaattctgtccttattctaaagcaacacgaggtaacatcgacgtgcaattagaagtaacagcacaataa

SEQ ID NO: 1280 - DNA, 618 bp, Staphylococcus capitis
atgcctaaaagattattagcagtatcggacattcatgggcatggtaagtctctagcgcgattgctgaaagcagctcactatgatgcaaaagatgaccaactagtacttatcggagactatgtcaataatggtccagattcagtggggacattaaaatttgtaaaacaattagtaaacgacggggctatcgcgttagtggggaatcatgaattaagatggctcgaacgtaaagacaaaccagcgatacagtggcatcaatttatcaacgaacttccatattataaagtcattggtcaatatatttttgtacatgcaggaattgatacaagtaagtcgatgcgcaaacaatcaagagcagttgttacaggccatgctccagaaaatttaaaccacttcttacctaaaaataaagttattgttcacggtcatgtgccgaattatagattaggatataagaaagatcacattcatattgaacctcgtgtcatagatattgatactggcgcaggtcataatcaatacttaacattactagatttaacatcgcagaaacaatattctgtgaaggtttctgatgatgatgctaaaattcaagagcgtcgcgttaaattaaagtag

SEQ ID NO: 1281 - DNA, 1650 bp, Staphylococcus capitis
atgcgacatcattcttcattctatcgtgtgaaccaagtactagcagtcattgtgttgttcctcctcatcatcttgcccttatgtttaatactttttaaagggtttgtgtctagtgaggatggcacatttggggaacacatccaacaactaggtcaaccttaccaccttaaaatattatggaactcagttattttaggtatttcagtcgtcatattatgcacaatcattgcactaccactgagctatattatgacaaagacgtcactttctaaacatcaatggttagatcttgttattatgattccatttatgacaccaccttatatcggatcaatgggatggatgctaacaatgcagagaaatgggctgttggaacaactcagccccattttctcacgtgtgacaccatatttctttagcttttttgggatggtgttgatcatgagttgccacttgacaccatttttatatattattttgaaaaatgcactcatgacaattcatcaatcacaagaagaagtagctgaaatttacggaggtacattcttttatcgttttcgtaaaattatagcgccactttttgcatcaggatatagtatgggagcattgcttattttcgttaaaacaatcggagaatttggtacaccagtcacaatgggaaacagaataggctttcaggtattaacctcagaaattcatcatagtgcttctatatggccgattgattttcaaagagcagcgttattatctactttattattagctgtgagtatgacagtatgggcatttcaacaatggtttcaatcgcgaaatcacttaagttctaatgctggaaaaggacataaagtgaaagttcattctcgcagtaagtggaatatattatgttatgtatttattatttgtgaaattatcgttactatcgttttaccttatgcaagtatctttatgaatgcctttatgaaacagttatcgtcaggatttcatctaagtaactttactttgcaaaactttgttaatgtattatcgggtaatggtggcatagctttatttaatagcatcatgttagctactatttcggctacgttagcaagtttaattggtctatgggttgtattaatcacacgaagacgtaattctttaggtcgggtgattgacttttcaagtttattaccaaacacagtacctggtattattgtggttattgggctaatccttttctggaataataaacataatcccttaccggtttataatacaatcggaatattagtcgttgcttacacagtgctttatattccatacgctgttcaaaacataagaacggttgatcaacgtttaagtaaaaatcttattgaagcagctcagatttcaggtagtaaaggatggacattgttcagaacaattacatttcctttgttaagaccaggcattatttctggatggatacttatattttgcatatctatgagagaattagttgcttcgttaatgttgagaccacctaatacggatacatcttcaacgtttatttaccgtcaatttgagcaaggagattctgcccaaggtatggcaatggcaataatgtctataggtattacttcaatcattttattcatattagaaacgtatcaaagaaagaaaaagctttaa

SEQ ID NO: 1282 - DNA, 1041 bp, Staphylococcus capitis
atgaagcagttcactaaatatatcgtaatcttaattgcaacggtagttttattagcagcatgtcaaaataaaccagagaatggcgacaaagggagtaatagttctaaatcgagttcaaatgacggaaatagtaaagataaactcgttttatatgcagcaggaccagataatttagttaatgatatggtcaaacaattcgaaaaacaaacaggtaaaaaagtacaagttttccaaggaactactggagaaattcttggtcgcttagaagctgaaaaagataatcctaaagcagatgtagttcaactcgcatcactacctgcagcattagattataagaagaaagggttaattgaaccttataaagttaaaaatcataaaaaattatataaagattggatagataaagacggatactattatggatttagtggcagtgcattaggtttatcttacaatactaaaaacgttaaaaatccacctaaagacgtcaaagacttaactcaatctaaatttaaaaataaaattgccattcctgatccttcagaatctggtacggcattagatttattatctattaaagtgaataacgaaggaagtaaagcttgggatgaatataaagcattgaagcaaaatggcatgaaacttgctggtgcgaataaacctgcattagaatcagtgattaaaggtgacaatgatgttgtatatggtggtgtagactacatggtatatgcagcgaaagcaaaaggtgaaccggtagacatcaaatatcctaaatcagggacagcgatttcaccgcgtccagcatttattctaaaatcatcaaaacataaagagttagctaaaaaatatatgaactatgtcactagttctaaaggccaaaagcaagtggatgatcactatttaattccagcagacaaaacagcagagaagaaaaaaggtaaagctaaacttaaagatatcaaagagtataaatatgattggaatcatttaagtgataagagtgaaaaagtattgaaaaagttcacggaattgatgagataa

SEQ ID NO: 1283 - DNA, 1065 bp, Staphylococcus capitis
gtggttttagaacttaaaaatattaaaaaatcatttggttcaaggactgtgattcaagatattaatttaacgattgagagtggtaaatttgtatcgctcctaggggcctcaggatgtggtaagaccacgttgttacgattaattgccggtttagaaacaccagattctggaagtataaatcatgatgagcgcacttattatgattctaaccaacatacatatgtatcaccggctgagagagacttagggatggtctttcaagatttcgcactatggccacacatgactgttttccaaaatgttgcgtatccattgaaggtaaataaagatacgaaagatttaaaaacacgtgtgatgcaagcactgaaagaggtacacttggaagaacactatgataaagcgattcatcaactttcaggtggccaacaacaacgtgtgtcattagccagagcaattatttcacaatccaaactgatattgatggacgaaccattatcggctttagatgcaagtttaagggaagatatgcagttattaattcaaagattaattaaaacatatgacatgaccgctatattcgtcacacacgatcaatatgaagctatgagtatgtcagattatattgcagtcatgtcgaatggaagtatcgttcaatatggaacgcctgaaacattgtatcaacatcctaagaacaaggaagttgccacatttattgggaaggggacatttttagaaggcgtgagtcataatcaagttttaagcacgaatgaaggttttcaacttaatcattctatccaaactaaagaggggaaatatggcgtattaattcgcccagaacacgtacatatagaagaagcaactcattcgaaagcgacacccgctgtcattgagacagtgagcttcacaggtgaacgttatcaatatacagcatcatcgcatggtgtctcgattatgttttacgatagtaactattttcaagagaatgagacggtcaatttaacctttgatattcctgaaaattactttataaaaatgggggaaactaaacatgaagcagttcactaa

SEQ ID NO: 1284 - DNA, 900 bp, Staphylococcus capitis
ttgaatacaaagcagatgatgatatttaagcagtttgttgaatttcaaaatgaaaatgcggtagctgaatcaatgaatattactcaaccgaccgtgacatttcatttaaaaaatttaaataaatattatggtattcctttatattacaaaaaaggaaagcattttaaattaactgaagctggggaattgttatatcgaaatacaactaaattattaaatttaatgcaggaaacaaatgatgtcatgtcagacttcaaagcttctaagcgaggaactttaaaaattggtgcaagccatgcgcctgtttaccacattttgccagaagcctttaaaagttatatgaataatcatccaaatatacaaattgatttaacagtagatacagcgcctcatatcattgataaattgagaagtagagaaattgagttagctgtcatttctgaaaatgccttttacgagaatgatttaaaggtaaaacgttttatggaaaatgaattaatgatagctatggacaaagaacatccactagctcataaagaagcgttaactatgaaggatttagaatactatgattttgttatacatagtggaggatctaccagagaaagtattgatgagtggcgtcgtgataatttagtacaacttcgtgcacgtatgcaatcgaatagtttgagtagtattttagaaacgattaaacattctcattatttaagtttaattagtcatagtgcaattcaacatcgtcaagacatcgtaagtaaaaagctacctaatggacccagacctcgatacatatcaatagtttaccgtgatgatatgtatttaactccagttatacagaattttatctcactcatatacaatgtaaatttcggggaagctccaaatcaacgtacgtag

SEQ ID NO: 1285 - DNA, 798 bp, Staphylococcus capitis
atgacaagttcattaattaaagttggaatggttacaacagcaattttacttggtagcggagtaacgcataatgcgcaagctgagacaaatcaaccagatcaatatgaagttaaagtatatgcagatagtcataaaatagtaaaagacaatcgccatattaagcacagtgtcttagaagatttaggttcagaagacaaagatgaagactttcaagttcaatatttagatgatgccaaccgtacgaattatcaaaacaacgtcacttatcgtatacgcaaatctgaagatgatagtaaacataaactgcagtataaaaagagatatgctatttctaatcatgatgtgtctagcgccattcaacaagcaaaagcagatggctataatggagatgagtacgaagtagaatatggtgaaggtaaagaaacattaagcgtgacaaaagaagcaaaagaaaaactaggttcaggaagtttagctatgcctaatgctcaagatagtttaaagattttaaagactcatgctgaacaaccttatagtgatgcattagataaaatcaaacaacctcatttaattggaccggtccattttgaacgacataaaggtcatattgatggtaatgaagtgaagatcgaaaactgggatattaaagatcaaaatgttgtagaaatctcctctaaagttaccaatgaagcggaagcgaaaaaagttcaaagtgctatcattaagaggttagatcaattaggaattcatgagaagaaagatcaacttaaaaccaatctgatatttgaaaattactaa

SEQ ID NO: 1286 - DNA, 177 bp, Staphylococcus capitis
atgttaacaacttccattatttttatgataattggtctattacttattttagtgagtagaatcgtgtctaaagctgaatcatttgatttaagagagaaaatttatgtaccaggtttgtgcttactcttaataggaacgctttgtttaattgggcattttgttaatgcttcactctaa

SEQ ID NO: 1287 - DNA, 2850 bp, Staphylococcus capitis
ttggcaaaacttttatacaaattgggcaaattcattgctaagaacaaatgggtgagtatccttgcatggttaatcgttctaggcgttattatcaccccgctaatgattaactcacctaagtttgatgatgacatcacaatgaatggtctaaaatcattagatacaaatgataaaatcactaaagaatttcatcaggatagtcaaaaagcctcgatgaagattgtcttccattccgataagaagaatggtattacagacaaagatactaagaaagatattgaaaaagcacttgataatatcaaacaagatgatgattacgtacaaaacgtaagtaacccttatgattctcatcaagttaatgatgataaagatactgcaatcgcaacagttaactatgtcgttaaccaaacagcgttgcaagattcttctaagaaaattatcgatagagaattagatgatgtaaaagcagatcataatcttaaaattgagcaaactcaaggtggctcaatgaattctgaagtaggtggttcttcagaacttgtaggtattgtcactgccttcatcattctactgattacattcggctcattaattgcagctggtatgccaattgtcagtgcactcatcggactaggctccagtgttggaatcatcgctctattaacatttatattcgatattccaaacttcacactgactctagctgtaatgataggtttagccgttggaatagactactctctatttatactctttagatataaggaagttcgtaaacgcggtctagagcctgtcgaagctattgcgacagcagttggtactgcaggtagtgccgttatcttcgccggtgtgaccgtaatgattgcagtttgtggtttatcactagttggcattgatttcttagctattatgggattcgcatcagcaattagtgtattattcgctgtccttgctgcgttaacactcttacctgcacttattagcgtgttccataaacgtattaagattaaagataaacctgaaaagaataaagatcctaaaaatcatccatgggctaaatttgttgtaggtaaaccaattattgctattattattagtttacttatcttaattgcagctgcccttccagtgagtggtatgcgtttaggtatccctgacgatagtcttaaagctaacaatacatcagcacacaaagcttataacttaattactgataactttggtgccggttataatggtcaaatcgttatgttagtaaacacgaaagacggcggaagcaagaaagatattcaacaagatctaaataatattagagatgatattaaggatatggataatgtagataaagtggcatcaccacaattgaatgataataatcactatgcattgatttctatcattcctgaagatggtccaaatgcacagtctacaaataatttagtttatgatttacgtgattataataaaactgctaaagagaaatatgactttaatacagagatttcaggacaaagtgtaattaacattgatatgtcagaaaaacttaatgaagctatcccagtatttgctggcgttattgtactcttagcatttgtgctactagtatttgtattccgttcaatcctagtaccattaaaagctgtactcggcttcgtattatcactactagcaacacttggatttacgacactcgtgatgcaagatggcttcttaggtagcctattcggtgtagaaaatacgggtcctttattagcattcctaccagtcatcaccattggcttactcttcggacttgccattgactatgaactcttcttaatgacacgtgtacatgaagagtatagtaaaacgggtgacaacgatcattctatccgtgtaggtatcaaagaaagtggtccagtcatcgttgcagcagcactcattatgttcagtgtgtttatctcctttgtcttccaagaagattcagcgattaaatccatgggtatttcactcgcattcggcgttcttttcgatgcattcgttgtacgcatgactttaattccagcacttactaaattatttggtaaaggttcttggtatatccctaaatggttaggcggtatcttacctaagattgatatcgaaggtaaagctttagaagaaggtcattcaaacacgaatacttctacgaatgaagcacatcgctataaccgtcgtaatcgtgatgaagacatttattatgatgaccaagaatatacacgtcgtcatggtcaggcttatgacaaacgtgatgcacatgatgagagacatagacgttatgatgaccgcgagcgctatttcaatcgtgatcgctatggcaataatgataaagaggactatcctcgctacgttcgtctagatgatgaccgtcgtggctatggggaagatcattttccggaaaatgactcacaatatcgtagatcacaatatagacaagatgagagagaatcaaatgtagatgaaccatctcgtcaacgacgtgagcatgtagattatgaatctctctacacacaacaaggtaatcattaccgtagtgaaggcgaaagaaacagatatgaacgtcaacctcatcgtgaggaaagatatgatgaccctcaatctcgatacgaggatggccgatacgaagaacgtcattatagagatcatgcgcaacgttctgatagtgagtctcgtacaactgatttatttaaacaattgtctcgcgaaactaacgatcaagatatgttatttaacgcattaatgttatatgcacgtgaaaataacaaagatttatatgatgactatgcgcgtcgtgcacctcgcagacatgataatgaagatgagagagagtaa

SEQ ID NO: 1288 - DNA, 975 bp, Staphylococcus capitis
atgttcaagaaaagtagtttcaaagttttaggactacttgccacactcgccttagcaattgtgctaagtgcgtgtggtaatggtggcaatggatcatcgagtggcggaaatacgtcactaggtaagaaagatgttaatatcccttatattgcaagcgataattctacaccacgttcattagttattgcggaagtccttaaaaaagctggatacaatgttactactacgccagtacaagcgagtggtccattatatgcgtcagtatctcaagactctgactcattccacgcatcaggtatcttcccttcaacagataaaagcttttacaataaatttaaaagtaatttaactgtttatgataagaagaatttagttgataatgttaaagttggcttagctgttcctaagtatgaacaggatattgattcaatttcagacttaaatagcaagaaatctactactagtagtaatactggcaatagtagtaacagctttggtaaatctgtcgattggacaatacaaggtacagatgctagaaatggtgttatgaaacaaactaaaagtgaattagatgatggtcaattagacaaatatagtcttaaagagtcatctgaccaagatcaatttaaaacgattcaaaaagcttataaacaacaaaaacctatcgtctttactgctatggaaccaagttggttctctaaggaacttgatattaaaatgttgaaagatcctgagaagatttacggtaaagatgatgaacatattaacctagtgtttaataaaaatttcaaagatgatcatcctgctgcatatacgattgcaacacgtatttccgataattggagcaaagatgatgaagaaaaattagcgaaaaaaatcttcaaagataataaaaaccctgaagacgttgctaaagattatgtagataatcatgatactaaagtcgataaatggttaaaaggtattgatcactaa

SEQ ID NO: 1289 - DNA, 576 bp, Staphylococcus capitis
atgcctacatcaacgcaaaaacgtatgattcgacatatcaataaaactgtttttgaactgttatatgattatcactttgatgaaattactgtacaaaagatatgtgaagtagctgaaattaatcgcagtaccttttatcgttattttcaagataaatatgacctactctattcattacctccgtatatgacaggcgaaatcatgggtgatccaaatacagagcactctattgataccgctgagtcatttaaagcgtttatttattatatagaacaacataaaactgttttcaaacacttgctcgtatcttcaaggcaagtatatgtatttagaagtctgacacatgcaagtcgcgaaatgatgttgtatggttcaaaaaataatcacaacgatccactagcacttaaaattcgagaaagtaagcaccctgaaattttagctgacttctatagtagtggcgtcatagaagttttaagacgctgggttgaaaatgattacaattattctgttgatgaaatctttgaaacattaaatgcaacactagaaagttctctaaacggttgtaaaaattcataa

SEQ ID NO: 1290 - DNA, 687 bp, Staphylococcus capitis
atgaagaaaataatgattgttaatacaagtacagagtacttcggtaatacggaaacgcccacgggtctttggctaagtgaacttgttcatttctatgatgctttcaaagatacgaatgtagatattgatttattcaacatcacaggaggcaatacacctattgacccagtgagccttagtccatttatgttagacaatactacaaaggcatattataacaatgagcatttcatggatatgttgaaatattctcaacctatcagcgaagctcaacctgataaatatgatgctgtatatttcactgggggtcacggtgtcatgtatgatttcccggaaaataaatttatacaaagtgcagtgaacacgatatatgagcaaggtggtattgtgtcagcagtctgtcatggtgttgctgcgttgctaaacgttaaagatgcaggaggcacatttctcctacagaataaaaatgtgactggtttttcaaatgttgaagaagtactagctaaacgagatacaatgattccatttcatttacaaaatgaaatcaaacaccgtggtgccagctatcatttcggacgtgtgccttttacatctacacttgaagtcgacgatcgaatcattacaggacaaaaccctcagtctccatcacaagttgctgaagcagttaaaaaacaactcttatcctaa

SEQ ID NO: 1291 - DNA, 1017 bp, Staphylococcus capitis
atgaaaacagatatgcaagcaatggtcatccatcattatggtaaaggacctgtatcacttgaaagaatgccattaccaagtatgagtccttacgaagttcgtgtaaaaattaaagcagcaagcattaatcccatcgattttaaaattcgtgatggtgggcttaaaatgttattaacatatcaatttccactcattttaggcaatgactttgctggtgaagtgtatgaagtaggagacaaagtcactcaatttaaggtaggggacaaagtttatggtcgtccacgaaaatctaaaattggtacatttgctgaatatatttcagttaatgcagaagaaatcgcgccaatgcctaaaggattatcgtatgaagaagcggcgagtatacctttagtgggcttaacagcgtatcaggcaatcaatgaagttattcaagcgcaaccaggggacaaagtacttattcaagctggatctggcggtgttggaagttttgcaatccaatacgcgaaagctaaaggactctatgttgcaacaacgggaagcgatagtggtaaagaactcattgagtcactcaatccagatgaatttattaattataaagaacaagacttctcagaggtactcaaagacttcgacggtgtatttgatacgcttggaggagagaacctcgagaaatcgttccaaattcttaagccacaaggcatcatcgcgtccatttcaggactgccaactgaacgtaatgcacgaaaattagataaaagtatctttaaacgtggcatactcaaagcagcttcatataaatatcaacgtttagctaaaaaatacgatgttcaatatgaattcctgtttatgcatccaagtggtcaacaattaagagaaatcacagaactcattgaagttggaaaaattaaacctattattggtaaagtatatgactttaaagaaacacaaaaagctttagaatactctgagagcggcagagctaaaggtaaaattattgtgaagatggaagatgaataa

SEQ ID NO: 1292 - DNA, 687 bp, Staphylococcus capitis
ttgaattattctccaaagcaaggcacgagaagtcacgggttaccgcatgacccatttaaaagtagtaccgtaccaagacctatcggttggatttcgacagtatctaaagatggtgaagataatttagcaccttatagtcaatatcaaaatttaacatgggatccaccgatggttatgttcgcagctaatcaatctgtattaggtaatcatgaacggaaagatacagtaaagaacgctgaagaaacaggttggtttgtatggaatatggctacatatgacttacgtgaagcggttaatctttcttcgaaggctttaccacctgaagaagatgaatttgaattcgccggagttacaaaagaagaatgtattgaagcgcctggatatagagttaaagaatcaccaatacactttgaatgtgaatatgttcagacagtacgtataccaacaggtgatcctgtatcaactgtggatattgttataggacgtgtggcacaagtccatatcgatgacaaagtcattctcgataatggtaaattagacattcaatccattcgacctatcgcacgtttaggatattatgactatacagtagtggacgaaatctttgagatgaaagcaccagctgctactaaagaagaattagctggattagaaggccgaaattttgataataaaacggaagagtaa

SEQ ID NO: 1293 - DNA, 1176 bp, Staphylococcus capitis
atggaagacagtagaaactataatctcatcacgacaattatgtttatttcaggaattatcgtgatgggtagtttatacacagcattgcctttaaccgcagcttttgcagaagactttcatgttcctcaatcagtagcaacattgaatggtgttgttttctcactcacttattcaataagttgtcttttctacggcaccatctctgaaaagttcggcagaataaaaacgatactgatgggtattagcgcgctagtcatcatttgcttaatcataggattcgtacattcatttatgcttttacttatcatgcgcgcattgcaaggtatcttcgctgcagcattctctccagtagcgattacgtacacaactgaaacatatcctccagtcaaacgaattacagcaatcagctttattagtacaagttttatgttatcaggtgtactcggtcaaaatatgagtgaaatagtagtcagttatctcaattggcattgggtttattttatcttaacgatattatatttaacactgacatttattatttataaacatgtgccagaaagccctaataaaaagccagatctaaaactacttaatttcttcaataactttaaagactttggtcaaaatcttaaagtattgtattgcttatttatttctcttacgctactcattatgtttattagtatgtatagtatcttgaattcatatataacctctaataaagttggtggggatatgtcagttgcatcagtcgtaaaattatttggtgtgataggaatgtttttatcattattagcaggacgtttgagtggtcgattaggtacgaaacgtgtcctaactttagcgctctctacatgcgtggtatcacttatactcatgggaactttcacgaacattgtactcatcactatttttagtgtgacatttgtagcaggtattgcatttgctatacctacagtgatttctaaagtgggggttgtggtgaacagtaatcaaggtttctttttatcagttaatacagtgattttattcttaggaacggctattgcaccaattttaatgatttatgttaagcaaattcctaatttcttcttagagtttgtaactattgcaataataggtgttctagcagttatcgtttctatatttatgccgaatgaccattatgtgaattaa

SEQ ID NO: 1294 - DNA, 1053 bp, Staphylococcus capitis
atgaaaatagaattgggattaacatcttttgctgagaatagcgatattgttatgcctgatggcaagcatgaatctattagtcatgcacaacgaattcgaaatattgtcgaagaaattgaactcgccgatcaacttggtttagatatctatggtttaggcgaacatcacagaaaagactatgcagtttctgatcccgtaacagttttaggcgctgcagctgcaagaacacagcacattaaattatcatctgctgttacggtcttatcttctgatgatccggttagagtatatgagagattttcgactttagatgctgtatctaatggccgagctgaaatcatgattggtcgaggttcatttatcgaatctttccctctattcggttataatttaaatgactatgaagatctatttaatgaaaaacttcaaatgttgcttaaaatcaacaaacatgaaatcataagttgggaaggtaaattaagaccaagtttagaatacactggcatttacccacgagtagaaaatggcgaattacctatatggattgctacaggtggtacgcctgaatcatcactcagagctggtgcgtttggcttacctattacgtatgctatcattgggggaaatcctagacgatttgcacgtaatattgaaatatacaaatcaattgcgttatcttacggacatgatccttcaaaattacctattggtgtacactcatggggttatgtagctgaaacagatgagcaagctaaacgagaattcttcccttcacttaaagcacatcaagatattataggtaaagaaagaggttggccagctttcgatgagaatgcattcgaaagagaaataggcagtcatggtgctatctacttaggtagccctgaaacagttgcacaaaagattattgatacaattgaaactctaggtattaatcgctttatgattcatacgcctgtaggttctatgccacatgagtatgtgatgaattcaattcgtctttttggggaaagggttaaacctatagtagataaatattttgaagataaatag

SEQ ID NO: 1295 - DNA, 357 bp, Staphylococcus capitis
atgattttacgttatgctacaaatttaaaacttgctaaagaattatacaatgcaagcaaaccaaaattacaaggtgaccaaggtatggtagatactttcactaacacattcggtttaccagctagttcagttaaagtagcgggtggtgttgaagctactgcagctgcattattcgctgcaagtttcttaaacaaaaacatctcacgtctaggttcacttgctactatttcagtattaggtgttgcaacttataaacactttgaagctggccacggtaaaaaaggtgctcaacatgcccttgatttactaggtttagctactttaagcttattagatactttcacttctaaaagataa

SEQ ID NO: 1296 - DNA, 480 bp, Staphylococcus capitis
ttggatatcgtatatcttgcaggcggatgtttatggggtacagaagccttttttaaaacgatacctggcgtgattaatactgaggcaggaagagttaatggaactacaaataacttagatggcccgtacgacgggtatgcagaatgtgtaaaagttgaatttaactcaaatcaagtaaccattaaagagttaatgagttatctctttgaaatgatagatccatatagcttgaataaacaaggacaagatgtaggtgaaaaatatcgtaccggtatatatagtgatgattctaatcacttaaatgaagctcgcgattttattgatagtagatcagacgcacaacgaattatggtggaagttaaaccattattaaactatgtgaaaagtgctgaagaacatcaagatcatcttgataggcatcctgaagatcaatatctttgtcatgttcctgaatcacttttaaataaatataaaaagtaa

SEQ ID NO: 1297 - DNA, 348 bp, Staphylococcus capitis
atgaatgaaatgcaaaaagttaaacctacaaatcgagttgctgaaatggtgttagggatcatgggtagtatatttggtatattaggtggtttgttcgctattatgctccaaggtgttagttctcaacttgatactgatggtggcaatgtaggtggattaggcgtagctgtaattattacttgcattataactcttattttaagttgtattattaacaaaaaaagagttttaattggtgtgcttttaatcattggtgggatcctaaactttatttttattagtttttttggaattctttcaggaatcttgattttagtagcaggtatactagcgttggtaagaaaataa

SEQ ID NO: 1298 - DNA, 348 bp, Staphylococcus capitis
ttgactcaaaaatttgtcgcttgcactattggtagtgtcttaattactctcgcttttcttgtggtatgcaatcaaccagtatctgctgcaactcctaatgagaatcaaacaatgaatcaattacaactacattcattaaaagatgattcaaaagatgccagttcagagccatatttttttaaatccaacgcagtagaacataaacatcctatttatcaaacgacatcaaaatccacacttcctgaaacaggtaaatctatatctcattctcctgttatggcaggaattatagcgctcgttttggggttagttattttgattcataaaaagatttctgctagaaaataa

SEQ ID NO: 1299 - DNA, 360 bp, Staphylococcus capitis
atgaacaattttgatgaaagatatgatgaaagacataatgaaaaagctaataatgtattaggcgctttaagttatcttagtgtgttttttgcacctgtgttattcccactcgttgtatggattatagcgaaacccccaggttctactcattctagaaatgctttatttaatcatattttcacttgggtatttgtagctattggattgttaagccttatgattattccagcgttatttgatagcgcgcattctggaataggaataacaattgcatttatcgttgcagcaattttctttatatgggcaattgtcctattctttacaaatataattagaggtattaaattactcattatttaa

SEQ ID NO: 1300 - DNA, 1338 bp, Staphylococcus capitis
atgattaatttattcgagaattatgatagtaatacccgtgagttacatgaatcacttaaaatagctggctatcatccttttacaattgtattaaatgatgatggtttcttaccagatgaagtgacttcaccttatcaatactttgcaaattatcaaatctatgatgatgacaaaccagcattttttaatgatgtaactacaccgcccttttgggaaataaaaggaaacggtacgatggctcaagtcatagacatgggcgagttgcgaggtaaaatattctataaagaatattataaaacgagagtcgtaagttatgtagaatggttagataaacaccaacgacttcgttcggtcgattactacacaaaagaaggattcaaatacgctgaaaaggtctatgatttgtccggtacacccatattaaaaaaatatatggatagaaatggtaaagaagttatatacgaaaactatgtgactcaaaatatagttttggattacagagggaagtcttatttctttgaaacgacgaaagaatttatagcattttatttaaatgaactaaatattgattataaacaagtcgtttttaattccctttcaacaccgtttattacgctttatcatcaatctattgcacaacaagtcgtgttattttggcaagaacagtctcaagggcatgtcccgggaaatatgaaattaatgtttgagccaaataatttcagccagttttcagtaattattcctgaaagagaagagtatcaaatgattactaatcaactgaattcaactgaaaatcaattcgtatatccctctgggtacttatatagtaaaaagaaagaaaatcaattatcaaaaaatattttaattctaactaattccgatcaaattccgcatttagaggcattaatacaacgtcatgatgattttaactttcacattggtgcagtgacagaaatgtctactgtacttacaagcctagaacattatccgaatgcgaaactttatccgacaattaaaagagatatggtagaggaactttatcaacgatgcgatatttatctagatattaatgaaggtggggaaatattgaatgctgttagaacagcatttgattataatttactcatacttgggtataaagagactgcacaccatttaactataacttcaccatcacacttattttcagctgaaaatgttgcagaattgagccgagtacttactgaggtaggttctaataaagatatatttaaagataaacttgatcaacagtcgtctcacgcgaatgaaatctcggtttcaacatttaagacggcactcaatcaagcattgaattaa

SEQ ID NO: 1301 - DNA, 1509 bp, Staphylococcus capitis
atgacgatttataatataaattttggtattgggtgggcaagtagtggggttgaatatgcgcaagcttatcgagctcaactgcttcgtcaactcaactatccaatcaagtttgtgtttttagattttattcaatctgaaaatattcaaactctaacgagtaatattgggttcaaagatgatgaaattatctggttatatcaatacttcacagatattaatatcgctcccactacatatacagttaatgatttaatatctgaacttggtaacgaggtctcaagttatgagcgaaatgggaaagtattgagactgtatttagacaataatgagactttcgttacatgctatttaaaaaatcctgaagaaaactatgtcgatcgtgcagaatttgtagtgaatggcatgttaattcgtaaagatttttatagttatgtgcgtacattttctgagtattatgcgccgtatgataagagagctaaactatatatgcgtcaattctataatgaggacggatcaattgtttataaagaatacatagatgatgatgcacatgtatatgtatttgatgatgcacgtttatatagtaaagaagaatttatcgcgtattttattcgcaaacttcacttagaaagcgacgatattgtcattattgatcgcgctacagatgtaggtcaggctattttacaaaataagggcgacagcaaagtgggtgtagttgtccatgccgagcattatagtatgaactcaactgatgatacacatattttatggaataattattatgaatatcaatttgagaatgcaaaatacattgatttctttattacagcaacagatttacaaaataaaatattaaacgaacagtttaaaaattatacgcatgattctcctagaatcagaacgataccagtggggagtctacatcaattaagttatccgcaagaacctagaatgcctttctctataatcactgcttcgcgcttagctagtgaaaaacatgtggattggatagctctagcggtaattaaagcgagaaaagcgctacctgaattaacatttgatatttacggccatggtcctgaacaagaaagaatcgagaagataatccaagaacatcatgcccaagactatattcggttaaaagggcacgtgaaccttcaagatgtctatcgtcattatcaactatttgttgctgcttctcaaagcgaaggcttcggtttgacactgatggaagcagtaggttcagggctaggcatgataggatttgatgtcaattatggtagtccgacatttattaaagatgctcgtaatggttaccttattcctattaacttggatagagaatccatcaacgacgtcacagatcatatggcgactaagatcatccaatattttgaaaatggcccctcacacccgcacgatgtatcatacgaaattgctgaggagtttaagacaactcatatagttgaaaaatgggaacaattaattaaagaggtgctacatgattaa

SEQ ID NO: 1302 - DNA, 2343 bp, Staphylococcus capitis
gtgagtaaatctttaaagcaaattaattcattaagcaaggaatatgcgaactatacagatgaacaattaaaagcgaaaacgctacaatttaaagaacggttacaatctagtaaaactaccttggacaagttattgcctgaagcgtatgccactgtacgtgaagcgtcgaaacgtgtgcttggaatgtatccattggatgttcaagtacttggagcaattgtcatgcaccaaggtaatattgctgagatgcaaacgggtgaaggtaaaactttaacggctacgatgccactgtatttaaacgggctcgcaggaataggtgcctaccttattactactaatgaatatcttgcgaaacgtgattatcaagagatgaaaccattatatgaatggcttggccttagcgcatctcttggcttcgtcgatataccaaactatgaatatgaagaaaatgagaagtatcatctatatcatcatgatatcgtctatacgacgaacggtcgtcttggcttcgactatttaattgataatttggctgacgatatacaagctaaatttctaccagacttaaattttgcaattattgatgaggtcgactcaattattttagatgcagctcaaacaccactcgttatttcaggtgcaccacgtgtacaatctaatttatttcatattgttaaatcatttttagaaacacttgaagaggatgttcattttcaagtgaaatttaataaaaaggaagtttggttaactgaagaagggatagaagcggcgaatcattactttaaagtaaataatatgtacgagaatcaacattttgatttagtcagaattatcaacttatcgcttcgtgcaaagtatttatttaagtataatttggattattttatctttgatggtgaaatcgtgttaattaataggataacagggcgcatgttgcagggtactaaactgcagtcaggtttacatcaagcgattgaagcgattgaagatgttgagatttctagggatatgagtgtgatggcgacgattacattccaaaacttgtttaaacaatttaatcaattttccggaatgacagggaccggtaaactaggggaaaaagaattcttcgatttatattccaaaatagtggtagaaatcccaactaatagtccaattaaacgtgacgatcgtccagatagagtctttgcgaatggaaatattaagaatgaagcgattttaaaaagtgtcgttgatattcatcgcacacagcaaccagtacttcttattactagaacagctgaagctgcagaatatttctcacagcaattattcaaaaaagacatacctaacaacttgcttatcgcacaaaatgttgcgaaagaagcacaaatgatagcagaagctgggcaattatcagcggtaacagtggcgacaagtatggctggacgaggtactgatattaaattagctaaagatgtcttcgaaattggtggattagcagtcataattaatgagcacatggaaaatagccgagtagaccgtcaattgagagggcgttcaggacgtcaaggagacccagggtattctcaaattttcgtatcattagatgattatttagtaaaacgttggagtaattctaatttagtgggaaatgaaaaactactatcgttggaatcttcaaaattagaaaatagtacactattccaaagacgagtgaagtcaatcgttaataaagcgcaacgggtttctgaagaaactgccatggttaatagagaaatggctaatgaatttgaaaaaagtattagtattcagcgagaaaaaatttatgacttaagagatcaaattcttgagagagaacactttgaggactttaactttgaacaattagcgcgagacgtctttgcgaatgatattaaatacaaaaagttaatcaacgaagaagcactgattaattacatttataaaaatttaagttttgtttttaatgaaactgtttcaaatatagacattaaaaatcgtgaagaggttatacagtttttaataaaacagtttaagcaacaacttaatcataatctgaaagaagtatctgacccatacttaaaacgccgttttttacaaaagtcctttataaaagcaattgatagtgagtggatagaacaagtggataacttgcaacaacttaaagcaagtgtcaataatcgacaaaatggtcaacgaaacatcatttatgaatatcacaaagttgctttagaaacgtatgaattaatggcgaaggacatcaaaagaaaaatcattcgaaatttatgcttaagtattctaacattcgataaatctgatgatatggtcatccattttccataa

SEQ ID NO: 1303 - DNA, 573 bp, Staphylococcus capitis
atgcaagaagctaaacaatttgaagtgaaatggcgattagtcaatttaactacatttatgtatggcactaagttacattttaataatgatgatatttattttgaaaatccactcatgccttcaggtacagtgattcacaattggtatatgctgacgaactttacagaagatcgtgtgagtcctaaacttccgatattaaaaaaaggacatcgttacttatttaaatttaattttcaagttgagcctgaaggagcagcctatttcaaaattaagttttatcgtaaaaacaaagaacaatttgaatacaaaattattaaaaataaggaagaagaaatcgtttatccgttagaaacgcattcttatcagttggagttagttaatgctggaatggatcatcttcactttcaaaatataacgattgtggaactaggagatgggacataccgtaacccaagtactgcaaaaggcattaacactaaagagaagtttgaaattatgaatcgtgtgataaaaaatgcaagaacgtatgacttggatgcactttccgatgctggaggtgaaaaccgtgaatag

SEQ ID NO: 1304 - DNA, 1560 bp, Staphylococcus capitis
atgccacgtacatttaaagtactccaaattggagggaatgatttagaaaacctttttgaaaataaaagagaagtcgaatgggattatatagatacggctgtatttgattttgaaagtggttatctccaagcagtagaagctcttatagaacaaaacggggcatttgattttgtgtttacacaagcgccgtactctgagtcacttatcaatttattcaaaatcgttagcacgccctataacacggtgatagacgaggcatattgggatgtgcattttcaagaagaaaaggtcgttcagcaaaattttatcaaacctctcaagtatgataatgaggaagatttgcatcagaaattacaggcgataacatttcctgggcaatatggtgataaagtaacacctatacattgtcgtgtaaatacagcgtttattggaaaataccaatttaacggtaatgaatcgttagagatttcgggaaactttggcgaccaacttacacctcttgtcacatggagtcgaaacattattgctgatgaaaataaagtcaatcaaatatggccagaatttaaaattgaaggtgaagttaagatacagtatacgctacgtatgataccggtctactctactgagcaaccagttgaaacattcatctttgaacagaatgaattagaccaaccgatagagttgcctgcgagaccgtataaagctaatgtgagtatttctctcaaagcgcaaggagaaggtacgttgtttgtaggttcaattcacaagcgttggtctaggttggaattaggtcaatttattctaggaggacaacggtttagcgataaaaaccgtaatgagttctttcattacttcaatccaggtgattttaaaccaccattgaatgtgtattttagtggctatagaactgctgaaggcttcgaaggtttctttatgatgaaccgtttgaatgcacctttcattttaattagtgatcctcgaattgagggtggggccttttatttaggatctgaagattatgagaatggcattaaagatgtcatcctgggtgcgttagattatttaggttttacccatgaccaattgatactttcaggattatcaatgggatcttttggtgctttatattatgcgacacgacttcagccggcagcagtgatagtaggtaaaccattgattaatgtcggaacgattgctaataatatgaagctagtccgtcctaacgactttggtacatctttagatgttttaagatctaatgaaggcggtatttctgaaaatgaaatcaaccaacttgatcaaaaattttggaatcaaatacacaacagtcaactcacccagacaacatttgcgattgcatatatggagcacgatgattatgatatcaatgcctttcatgaattattaccagtacttacaaaacaatatgcgcgtgtaatgagtagaagtgtaccagggagacataatgatgattcttcgacaattactaactggtttatcaatttttatcatttaatcatggcacaacaatttgggagagaatcacatgcaagaagctaa

SEQ ID NO: 1305 - DNA, 1569 bp, Staphylococcus capitis
atgaagcgatttattcctgcatggtatagtcatgataaatggtgggaaagtacatcagtacctttctatcaaaagcgtcaatacacagactttgatgatatgatcagtttaatgacaatgcatagtaaaaataatgtggattatcagttgatgatacttagtttcagtccttatctcagaactttccttcacagatatgatttgtttgaaactaactattggtcagtgtttgatgatattcaaggtgttagtcatcaaaccccacaggcaattgattatcgagatttagcgtggcctgaaaatacagaatttatatttactccttatcaaattcaggcggtcacaggggaacatactttttcaaagatacactttagtcaagaaggatatttaatgtggatagaagactttcaacacaatataatccaacgacgctatgtcattgatgatagaggttttatttcagcggttagaacatatactgagacgggtcaaagtaaaatgaaacattacttctcaatcaaaggagaagaaatatttaaagaagatttgagaaataaaacagtgacaattaaggagcaattccaatcaaattttaaacaaacaacttatgcaactatggcagatttaattgaagaaaagtttaaagagtatgccgaaagagagattaaaaaagatgacttaatcatcgttgcatcagatgaaagacacaattcagtgatggctcatacgatagatgagtcttctttatgtttttcagtatttacagagcgaaataagaaagtgacgcctgaactatttgattcaatctctcaagcacgctattgtctggtcgatacgcaagacaatcagagagagattcaacgttatgctaaggagtctcaaacgcatctacatttattaagagtaacgccctttgatgcgcaaacgatatctaataaaagtagtcaactctatgatacgtatgtaggattatggatagatcaattacctaaacatgaattgcgagtgattttaacttcattatttcaatatatacaacaaaaagatcatttcaagttaaaattacttaccaaatacaagaatgatccaaacgattggttaatggaagaaattgctcgactcaatgatacgtaccaccaagaaaaacaagaacattctgatgaaattgaggatatattggcatcacaaataaaaaaagaaacggtcatagaattggagtatgtacctttttcagaagactttgttagagctatctccaatttaaggttagttgtcgatttatcaaatgaacccgacctttttctacaaatttgttgtataggcgcaggtgtgccacaagttaattatagagggactgattatgttaaacatgaacagaatggtttaatcataaaagatatttctcaaatcgtctcagctttagattattttttagtacatttaaaaaagtggaattattcgtatgcatattccatgagattagtagatgaatttagttctataaatatcattcatcaaattaatcaattgtttgaaggtgatgataaatatgccacgtacatttaa

SEQ ID NO: 1306 - DNA, 1200 bp, Staphylococcus capitis
atgttgaaagaatttgaatataaaattctatataaaagaatattatttacatgtttcattttaattatttacatacttggcagtaatatttctattgtcggtaatgaagcaattaaacaacataaggattcattctttaagctagcaatttccaatgtcggtggagacttaaatacattgaatattttttcactaggacttggaccgtggttaagctcaatgattatcattaccctaatgaattataaaaatgaagataaagtgaaaacgcaaacgcgcgtggaacgtcattttaaagaaagattattaacacttcttttaagtacgattcagggattctatatcatacattcatttattaataaaaaggcgataactgatacaaatatttttatattgttacttgtcttaattacaggaacgttatttttagtatggttagctgaccaaaataccacatacggtattgctggacctatgccaattgtattaatgagccttgttaaatcaatgttcaatagtcattttgctaaattaaatttaaatccaatactattggtcattatcatctgttcattggctttgatactcttcatcttactctttatagaacggtcagagtatcgcttagaatacaatgatattatgaatatttcttcaaaggatacaccaacttatttgtcgtggaagttaaatccggcaggaagtataacgataatgatgagtttatctatcttcatacttgagaataatatagttaatctcataggtagacttgccgtagataaggattttgagacgactattttcagtttttcaaaccctataggtattacaatctatttattgatgcaaatcgtattagggtatgtcttatcacgatttttaattaatacgcgacgtaaatcgaaagaatttcttaaaaacggaaattattttgaggggatatatccaggtaagcatacgacacgatttttatcacaaaaagcacgccgtgtatgttggtctggttcaatcattgtagctattgtgttagctattccattatattgttcattacttgtgccacatttatttgaagaaatttacttttcgattcaattgattgtctttgtttatataggtattaatatcgcagaaacactgcgtgcgtatttatattttgatggttacaagcaaatattagataaatattggtaa

SEQ ID NO: 1307 - DNA, 1311 bp, Staphylococcus capitis
atgagtacttcaaacagtgcaagcgagtcattaagtgactcaacaagtacctcaggtagtacttcagttagcgcaagtactccagaatcactaagtacatcaacatcagatagtttaagtagttcacaaagcgactcatcaagtgcaagcgcatcaacaagcacttcagactcagaaagcacatcaacatcaacaagcgacagcgcatccacaagtctaagtaactcaaacagtactagcacatcactaagtgactcgatatcgtcatcattaagtaatagtaattcgctaagtgacagtacatcaggctcattaagtgattctacctcaggaagtacatctataagcacaagcacttcaattagcgattcaacaagtatgagtacatctgaatcagaaagtgagtcaatatcatctaagagtcaattctcatcctcgatggttgaaccgactagcacatcgttgccagaatttgatttaccatcatacttggcttcagaatcaatcagtgcttcaacatcaatgagtagttcagaatcactaagtacatcaacatcagattccttaagtgattcgacatcgacgagcgtatcgctttcaaacagtgattcaacatcaaattctcaatcagtcagtgattctaactctagtagcacatcaagttcagaaagtgtctctacgtcaggtagcacatcaagttcagatagcatgtcaacatcaattagcgattcaacaagtatgagcaactctgaaagaggaagctcaacagacagtacatcgacatcagaaagtgactcaacatcagatagcgcatcaatgagtagatcaacgtcaaccagcgatagcacttctaatagtttaagtacatctacgagcacatccgactcagatagtacttcaatgagcacaagtacgtctgaatcaataagcacatcgacatctacaagcaactcggattcttcaaaccatcaaggttcgcttgtggatcctagtggattcaaacctagtcaccaaaatccaggtgaacaacatcttagtggtagtatggattcttcagaattaattaattctaatcagtcgaataaagaatctaatttcacttctgaaaatgaacacaatcataatcaagtgactcaacatggtagaaaacattcagatcaacaaaatgacaaagcattacctaatactggtgaagatgaaacaaatagaggcggattagtttcattagtattaacaatgctagctggtttaggattaattagaagatctaaaaaagacaaaaataaagatagaaaaaataatgaagattaa

SEQ ID NO: 1308 - DNA, 366 bp, Staphylococcus capitis
ttgcgtaagcaacgagataatcattcagcatatgcgtttatcaaacgtctcattaaacaatttggtaaacctcaaaaggtaattacagatcaggcaccttcaacgaaggtagcaatggctaaagtaattaaagcttttaaacttaaacctgactgtcattgtacatcgaaatatctgaataacctcattgagcaagatcaccgtcatattaaagtaagaaagacaaggtatcaaagtatcaatacagcaaagaatactttaaaaggtattgaatgtatttacgctctatataaaaagaaccgcaggtctcttcagatctacggattttcgccatgccacgaaattagcatcatgctagcaagttaa

SEQ ID NO: 1309 - DNA, 114 bp, Staphylococcus capitis; identical to SEQ ID NO: 766

SEQ ID NO: 1310 - DNA, 114 bp, Staphylococcus capitis; identical to SEQ ID NO: 766

SEQ ID NO: 1311 - DNA, 114 bp, Staphylococcus capitis
gtgattcaacaagcgcaagtacgtctgaatcactcagtacgtcaacatctgacagtacatcagagtcaacaagcacaagtgcatcagattcagaaagtgaaagcacgtcaataa

SEQ ID NO: 1312 - DNA, 1380 bp, Staphylococcus capitis
atgaaatcatcacaaccactttacttatctctttatgaaaagttaaaaaatcaaattatcgaaggtcaataccattccaatgataagtttccttcgaaaagacaattaagcgaacatttgtcaatgagtcatacaactattgaacacgcttatcaactgttattagatgaaggatttatatactctaagccgagatctggatactatgtatcagatattgaatcattgccagttatcaatagagaaacttatcctaataatgatcatttagagatgcataatgaaagtaatgaaaactcgcaattcaaattcgccttcaacttagctgaaatcgactctgaaaattttcctatgcatatatttagaaaatacgcaaaagacgtctttgaagaagatcacttatcactattacaaagaggcgaaattcaaggagagttcgtattacgtcaacaaattgcacattatttatttaatagtagaggcgtaacatgtcaccctaatcaaatagtcattggttcttctactagccaactcctcgatatgattactaatttacttaatcaagaaaagtttatcatcgagaaaccgagttatcctccgatcaaacatgtcttagacaaaaagaatatgaactatttacaagttcctgttgaaaaaaatggcatacaagttcgccctatcttagaatcaaaatataatattttatatattacaccttcacatcaatttcctactggtcatgtcaccaatttaaaaaagagaactcaacttattcaatgggcacaacaagatgaacaacgttacattattgaagatgattatgattcagagttcaggtactttggtaaacctataccagctctacaaagtttagatactaaaggaaaagttgtttatataagtacattttcaaaatcactctatcctagctgtagaattgcatatattgttttaccaaaagaaatattatcaaaatataaacaaagaaaattaaaagaaggtaatactgtacctgtgcacattcaacatatggttgcacaatttatggcaagtggtagctttgaaagacatttaaataaaatgaggaaaatttatagagacaaattaaattatatattgcaccatctcgaaaaatataaagaccaattgcaaattgaaggagcacttactgggatgcattttaatttaacagttctgaatggtctcactacacagcaatgcttagacaaggctaagaataacaaattaaaactcgaaatatataactatgatgatatccccttagagtatcctaaatttattttaggattcggtggaattaaacaacgtgaacttgcagattatgttaaagctctcatcaactcgttaattataaagtaa

SEQ ID NO: 1313 - DNA, 888 bp, Staphylococcus capitis
atgtcaaaaatcgtaggctcagaaagagtaaaaagaggaatggctgaaatgcaaaaaggtggcgttattatggacgtcgtaaatgcagaacaagctaatattgctgaagaagctggtgctgttgcagtaatggctttagaacgcgttccatcagacatccgagcagcaggtggcgtggcacgtatggctaatcctaaaattgtagaggaagtaatgaatgctgtgtctatacctgttatggctaaagcccgtataggacatattactgaagctagagtattagaatcaatgggtgttgattatatcgatgaatctgaagtattgactccagctgatgaagagtatcacttaagaaaagatcaatttacagtgcctttcgtttgtggttgccgtaatttaggtgaagctgcacgacgtattggagaaggtgctgcaatgttacgtacgaaaggtgaacctggaacaggcaatatcgtagaagctgtacgtcacatgagacgcgttaatgctgaagttagtcgtctaacagtaatgaatgatgatgaaattatgactttcgctaaagatttgggagcaccttttgaagtattaaaacaaattaaagataatggacgtttaccagtagtaaactttgcagcaggtggcgtagcaacacctcaagatgctgctttaatgatggaattaggtgctgatggtgtatttgttggttctggtatttttaaatcagaagatcctgaaaaatttgctaaagcaattgtccaagcaacgactcattatcaagattatgaattaattggaaaattggctagtgaacttggtacagcgatgaaaggtttagatatcaaccaaatttctttagaagaacgtatgcaagagcgtggatggtaa

SEQ ID NO: 1314 - DNA, 561 bp, Staphylococcus capitis
atgaaaataggtgtattagcattacaaggtgcagttcgtgaacacattcgtcacatagagttaagtggtcatgaaggtgtcgcagtaaaaagagttgaacaacttgaagatattgctggtttgattttgccaggtggtgaatctacaacactaagaagactaatggacttatatggctttaaggaagcgttaaagcaatctgatttaccaatgtttggcacatgtgcgggattgatcgtacttgcaaaagatgttgaaggtgaatctggctatttaaaaaagttggatattacagtcgaacgtaattcatttggtcgtcaagttgatagttttgaatcggaacttaatataaaaggtgttgctaaagatattgaaggtgtattcatacgcgcaccacatattgctcaagttgagaaaggtgtagacattcttagccgagtaggagataagattgttgcggttaaacaaggtaaatatcttggtgtctctttccatcctgaattcaccgacgattatcgtgtaactgaatacttcattaaccatatgataaagaataattaa

SEQ ID NO: 1315 - DNA, 1212 bp, Staphylococcus capitis
atgcatattttgattgggattataggaattatattctttttagcactcgcatttttatttagttcagatagaaaaaatatccgttggaaatatgtcggattactcttagtaattcaattgatatttgcatttattttattaaaaacaaatataggtatcacagttattggtggtatttcgtatggtttcagttatttattaaagcaagctgctgagggtgtcaatttcgtattcggtggttttaaattagatccaaaaaaccctccattcttctttaatgtattgttacctatcgtgtttatctcagcgcttatcggtattttacaatatacaagaattttaccgcttataattaacattttaggttttttaatttctaaaattaatggcatgggacgtttagaatcttacaatgctgtagcagcagcaattttaggacaatcagaggtatttatctcattaaaacaacaattgccatacatacctaaacaacgtttgtatacattaactgcatctgcaatgtcgacagtatctgcttcaattattggagcctacttcacattaatagaacctaaatatgttgtaacagctgtggtacttaacttatttggtggtttcatcatcgcgtctattatcaatccgtataaagtgaatgaagaagatgataaattattagtcgatgaaagtgaaactaaaaatcaatcattcttcgaaatgcttggtgaatatattttagatggtttcaaagtagcagtgattgtcggtgcaatgttaattggttatattgctcttattgctttacttaatggtgtagtaagtggaatctttagtctattatcaggtggaacattggattggaatttccaaacgttaatcggttttgtctttgcaccattcgcattcctaactggtgttccttggcatgatgctgtgcagtcaggttcaattatggcgacaaaattattatcaaatgaattcgttgctatgcaagcactcggtaaaacacatggtttatctgagcatgctaaaggtgtcacttcagtattcttagtatcatttgctaatttcagttcaataggtattatttccggtgcgattaaatcactaaatgataaaaaaggtgatattgtagcacgatttggattaaaactattgttcggtgcaacattagtatcatttatttctgcagcaattgcaggattctttatttaa

SEQ ID NO: 1316 - DNA, 462 bp, Staphylococcus capitis
atgcataacatgtctgacatcatagaacaatacattaaacatttattcgaggaaacaaatgaagatgtggtcgaaatacaacgcgctaatattgcacaacgcttcgattgtgttccttctcaattaaattatgttattaaaacacgcttcacaaatgaacatggttatgaaatagaaagtaaacggggtggcggaggctacatccgaatcactaaaattgaaaataaagatgcatcaggttatattaatcacttacttcaattgatagggccttctatttctcaacaacaagcgtattatgttatagatggtttactagataaaggtctaattaaccaaagagaagctaaaatgatccaagcagttatagatagagagacattaaaaatggatgtggtcgcaagagatattatacgcgctaatattttaaaacgattacttccagttataaactattattaa

SEQ ID NO: 1317 - DNA, 564 bp, Staphylococcus capitis
gtgctttgtgaaaactgtcatttaaatgaagcagaagtaaaattaacagttaaaagtaaagacggtactcacgaaaaatgggtatgctcaatatgtgctcaaggtgataatccatggcaccaatctcatgaggatacttcttaccatgtgcatcaggatgatatagaggaagcttttgtagttaaacagattttacaacatcttgctacgaaacatggtattaattttcaagaaatggcgttcaaagaggaaaagcaatgcccaacctgtcaaatgactttaaaagatattgcgcacgttggtaaattcggttgcgcgaattgttacgcaacttttaaagaagacattatcgatattgttagacgtgtacagggaggccaatttgaacatgtaggtaaaacgcctcaatcttcatataagaaacttgcaattaaaaagcaaatcgaagaaaaaacaaaatatctaaacaaattaattgaagaacaaaatttcgaggaagcggctgttgtacgtgatgaaattaaagcattaaaagatgagagtgaggtgtctcgtaatgagtga

SEQ ID NO: 1318 - DNA, 1005 bp, Staphylococcus capitis
atgagtgacattcatactaatataagtgaatggatgaagatgacagaagaggcacctgtagttatttcttctcgtattagattagcaagaaatctagaaaatcacgtccatcctttgatgtttccttctgaacaagagggttttcgagttatcaacgaagttcaagatgcgcttccaaacttaaagttacaacgtttagacactatggatcaacaaagtaaaatgaaattagttgcgaaacatcttgtcagtccagaacttatcaaacagccagcatccgcggtgctgttaaatgaagatgaatctttaagtgtaatgattaacgaagaagatcatattcgaattcaagcgttaggaacagatttatcgttgcgtgaattatatcaaagggcttcaaatattgatgatgagttggatagtgatttagatataagttatgacgaacacttaggttatttaacaacatgtccaactaatataggcactggaatgcgcgcaagtgtcatgctacatttaccaggactttctattatgaagagaatgaatcgtatcgctcaaacaattaatcgttttggatttacgattcgaggtatttatggagaaggttcacaagtatatggacatatttatcaagtttcaaaccaacttactttagggaaaactgaatccgacatcattgataacttaactgaagtagttaatcaaattatcaatgaggaaaaacaaatcagagaaagacttgataaacataatcctgtagagacacttgatagagtttatcgctcactagggattttacaaaatagtagaatcatatcaatggaagaagcatcatttcgcttgagtgaagttaagcttggcattgatttaaactatatttcgcttgaagattttaaatttaatgaattaatggtagctattcaatcgccatttttaatagatgaagatgatgataaaacagtaaatgaaaaaagagctgatttattaaggaaacatataaaatag

SEQ ID NO: 1319 - DNA, 2454 bp, Staphylococcus capitis
atgctatttggtagattaacagaacgtgcacaacgcgtactagcgcacgcacaagaagaagcaattcgcttgaaccattcaaatattggaacggaacatcttttattaggtttaatgaaagaacctgaaggtatcgctgccaaagtgttagaaagctttaatatcactgaagataaagttattgaagaagttgaaaagttaattggccatggtcaagaacaaatgggcactttacattacacacctagagctaaaaaagttattgagctttcaatggatgaagcgagaaaactacatcataactttgtgggaacagaacatattcttctaggcttaatccgtgaaaatgaaggtgtcgcagcacgtgtctttgccaatttagatttaaatattacaaaagcacgcgcgcaagtagtaaaagctttaggtagtccagaaatgagtaataaaaatgctcaagcaaataaatcaaataacactccaacattagatagtttagctagagacttaacagttattgctaaagatggcactttagatcctgtagttggaagagataaagaaattactcgtgtgattgaagtgctcagccgtcgtactaaaaataacccagtacttatcggtgaacctggtgtgggtaaaactgctatagctgaaggtttagcacaagcaatcgttaataatgaagtcccagaaactctaaaagataaacgagtgatgtcactcgatatgggaactgtcgttgctggtacaaaataccgcggtgaatttgaagaacgcttgaaaaaagtaatggaagaaattcatcaagcaggtaacgtcattttatttatagatgagttacacacattagttggtgctggaggtgcggaaggtgcaattgacgcttctaatattcttaaaccagcattagctagaggagagttacaatgtattggtgctacaacattagatgaatatcgtaaaaatattgagaaagacgctgcgttagaacgtcgtttccaacctgttcaagttgatgaaccaacagttgaagatacgattgaaatcttaaaaggattacgtgatcgttatgaagctcatcatagaattaatatatctgatgaggctttagaagctgcggcaaaattaagtaatcgttatgtatcagatcgtttcttaccagacaaagcgattgaccttattgatgaagcaagttctaaggttagattgaaaagtcatacaactcctaacaatctaaaagagattgaacaagaaattgaaaatgtaaaaaatgaaaaagatgctgccgttcatgcacaagaatttgaaaatgcagcaaacttaagagacaaacaatctaagcttgaaaaacaatatgaagaagctaaaaacgaatggaaaaactctcaaggtggtgtaagtacagctttatctgaagaagatattgctgaagttatcgcaggatggacaggtattccattaactaaaattaatgaaactgaatcagatcgcttactcaaccttgaagatacacttcataaccgagttatcggtcaaaatgacgctgttaattcaattagtaaagctgtaagacgtgctcgcgctggattaaaagatcctaaacgtccaatcggtagctttatcttcttaggtcctacaggtgtaggtaaaacagaattagctcgtgcattagctgaatctatgtttggtgaagatgatgctatgattcgtgttgatatgagtgaatttatggagaaacatgctgtgagtcgtttagttggagcacctccaggctacgtaggtcatgatgatggtggtcaattaactgaaaaagttagacgcaaaccttactcagttattttatttgatgaaattgaaaaagcccatcctgacgtatttaatatcttgctacaagtattagacgatggtcatctaactgatactaaaggtcgtactgtagatttccgtaacacagtcattattatgacatcaaatgttggtgcgcaagaattacaagaccaacgatttgcaggatttggcggtgcttcagagggtaatgactacgaaacaattcgcaaaacaatgatgaaagaactcaaaaattcattccgtcctgaattcttaaaccgtgtggatgatatcatcgtattccataaactatctaaagaagaattgaaagaaattgttactatgatggttaagaaacttactgatcgattatctgaacaaaacatcaatatttctgtaactgataaagctaaagaaaaaatcgcagaagaaggttacgatccagaatacggtgctagaccattaattagagccatccaaaaaactgtagaagataatcttagtgaattaattttagatggtaatcaaattgaaggtaaagaagtcacaatcgatcatgatggcgatgaattcaaatatgatatccatgaaaagtcagatgataaagaaaccactgaagcttaa

SEQ ID NO: 1320 - DNA, 1368 bp, Staphylococcus capitis
gtggccaagaaaaaagtaatatttgagtgtatggcatgtggctatcaatctcctaaatggatggggaaatgtccaaactgtggtgcatggaaccagatggaagaaattgtagagaaagctgcaaaccctaaacatggagtgaaatctaaagaagcagctggaaaagttcaaaaattggataatgttaaacatgaatctacccctagaattctaacggattctaaagaatttaacagagtccttggtggagggattgtcagtggatcactcgtacttataggtggcgatcctggtattgggaagtctacgttgcttcttcaaatatgtgcggcattatctcaaaataagaatgtcttatatattacaggtgaggaatctatcaatcagactaaactacgtgccgatcgcttagaagaagattctagtcaactcaatgtattagcagagactgatttagaagtcattcatcaaacagttaaggatgaacgcccagatttacttgtagtagattcaattcaaactatttatcatcctgaaatcagttctgcaccgggttctgtatctcaagtaagagaaagtacccaaagtctaatgaatatcgcaaagcaaatggatatcgcaacgttcatcgtcggtcatgttacgaaagaaggacaaattgccggtccaagattacttgaacatatggtggataccgtgctttactttgaaggtgatgaacatcatgcttatcgaattttacgtgcggttaaaaaccgttttggctccacgaatgagatgggtattttcgaaatgaagcaaagtggtttgaaaggtgtcttaaatccgtctgaaatgttcttagaagaacgttctacaaacgtgccaggttcaacaattgtaccgactatggaaggtacaagaccattattaatagaggtccaagcgttagtcacaccgaccactttcaacaatccaagacgtatggctacgggcatagatcataatcgattaagtttgcttatggcagttttagagaagaaggagaattatttacttcaacaacaagatgcttatatcaaagttgctggtggtgtgaaattaacagaaccagccgttgacttaagtattattgttgcgacagcttcaagctttaaggataaagcggtagacggtttagattgctttgttggagaggttggtctaacaggtgaagttcgacgtgtgtcacgcattgaacaacgcgtgcaagaggcggctaaacttggattcaaacgagcgattatacctcagactaatattggtgggtggactttcccggaaggtattcaagtcataggagtgtcttctgtgcatgaggctttaaaatatgcgcttcattcttcataa

SEQ ID NO: 1321 - DNA, 1083 bp, Staphylococcus capitis
ttgaatatcattagattaatggtggtaattatttatatcattatcggtgctgcactagggattatcatcatcccagaagtagtatctgatttagggattaacacttacccaattatcactaatcattacatagatggattaatagggatcatattgttcttcattatatttggatttttcttaaaaaaggtcacatacgcttttaaagaactagaacaaattataatgcgccgcagtgcggttgaaatcttgttcgcaacaattggtttgattattggattatttatttctgtgatggtttctttcatcttagaactaataggaaattcaatgctcaatcattttatcccaattataataacaattattttatgttatcttggattccaatttggtttaaagaaacgtgatgagatgttaatgtttttgcctgaaaatatggcacgctcaatgtcctacaacacacgtaaagcaatccctaaaatcatcgatacaagcgcaattattgatgggcgtatattagatattattcgttgtggatttattgatggagatattcttatccctcaaggtgttataaatgaattacaagtcgtagctgatgcgaatgatagtgtaaaaagagaaaagggtcagcgtggattagacattcttaatcaactttatgatttagactatcctactcgagtcataaatccaacgaaatctcataatgatattgatactttattaatcaaattagcacaacattaccacgctcacgttattacaacggattttaatttaaataaagtgtgtcatgtccaaggcattatggcacttaatgttaatgatttatctgaagctattaagcctaacgtacatcaaggtgaccacctcaatatccttttaactaaaatggggaaagagcctggtcaaggcgttgggtatttagatgatggcacaatggtcgttgttgataacgctaagaaattagtgggccaacatgttaacttagaagtcatcagtttactacaaacttcatctggtagaatcgtttttgcgaaacatgtcgatgacaatagttctgattttgaaaattaa

SEQ ID NO: 1322 - DNA, 1455 bp, Staphylococcus capitis
atgagtgaacgcatcagagtaagatatgcgccaagtccaacaggctacttgcatattggtaatgctagaacagcattatttaactatttatttgcgaaacattatgatggagattttgtagttcgtatagaagatacggacagtaaacgtaatttagaagatggtgaatcttcacaatttgataacttaaaatggttaggtttagactgggatgaatctatcgataaagataaaggttttggtccatatcgtcagtctgaacgtgctgatatttataatccacttattcaacaattacttgatgaagatagagcatacaagtgttacatgactgaggaagaattagaagaagaacgtgaagcgcaaattgctcgtggagaaatgcctcgttatggcggacaacacgcacatttatcagaagaacaacgcaaacagttcgaagctgaaggacgtaaaccatctattcgcttccgcgtgcctaaagataaaacttatagtttcaaagatatggtaaaaggtgaaatttcttttgattcaaataatatgggtgattgggtcattgttaagaaagatggcgttccaacgtataactttgcagttgctgtagacgatcattatatgaaaatttcagatgttattcgtggtgatgaccatgtttctaacacacctaaacaattgatgatatatgaagcgttcggttgggaaccaccacgctttggtcatatgtcattaatcgttaatgaagaacgtaaaaagttaagtaaacgtgacggtcaaattttacaatttattgagcaataccgtgatttaggttacttaccagaagcactatttaactttattactttattaggttggtcacctgaaggtgaagaagaaatcttttctaaagaagaatttattaaaatcttcgatgaaaaacgtttatctaaatcaccagctatgttcgacagacaaaagttagcttgggtaaataaccaatatatgaaaacgaaagacactgatacagtatttgaattagcattaccgcatttaatcaaagcaaatcttatcccagaaaatccttctgaagaagataaagaatggggtagaaaacttgttgctttatatcaaaaagaaatgagttacgcaggtgaaattgttccattatcagaaatgttcttccacgaaatgccagaacttggtgaagaggagcaagaagttataaatggtgaacaagttcctgagttaatgaatcatttatacggtaaattagaagctttagaaccatttgaagcagcagaaattaagaaaacaattaaagaagttcaaaaagagacaggtattaaaggtaaacaattgttcatgccaattcgtgtagccgttacaggtcaaatgcatggaccagaattaccaaatacgattgaagttttaggtaaagaaaaagtattatcacgattacaaaagtatgtatag

SEQ ID NO: 1323 - DNA, 642 bp, Staphylococcus capitis
ttgttaagaagaatgagagacgatataaaaatggtgtttgaacaggatccagcagcacgctcaactttagaagtagttactacctatgcaggattacatgcggtatggagtcatttgatagcccataaattatataataagaaacgttatacagcagcgagagtcatctcacaagtgtcacgcttttttacgggtatagaaattcatcccggagcaaaaattggtaaacgattatttattgatcacggtatgggtgttgtaattggtgagacatgtacaattggggataacgtcacgatttaccaaggtgttactttaggtggtacaggtaaagaaaaaggtaagcgtcacccggacattggagataatgttttaattgcagctggttctaaggtgttggggaatattcaaattgaatcaaatgtaaatattggtgcgaattcagttgtactacaatctgtaccaagctataccactgttgtaggtataccgggtcatatcgttaaacaagaaggtaagcgtatcggtaaaacatttgaccatcgcaacttacctgatccacttttcgaacaaatcaaacatttagaacgacaacttgaaaaagctaagaatggagagattcaagatgattacattatataa

SEQ ID NO: 1324 - DNA, 1401 bp, Staphylococcus capitis
atgattacattatataatacgttaacacgtcggaaagaaacatttgagccgattgaaccaggcaaggtgaaaatgtatgtttgtggtccgacagtttacaattatatacacatcggaaatgcaagacctgctattaactatgatgttgttagaagatattttgaatacaaaggttatgaagtgatttacgtttccaatttcactgatgtggatgataaattaattaatcgctctaaagaactaaatgaaagtgttcctgaaattgcagaaaagtacatcaaagcattctatgaagacgtaggtgcattgaacgttaagaaagcaacatccaatccgcgtgtgatgaaccatatgcaagaaattatagatttcattaaagaattagtagatgaagggtatgcttatgagagtgatggagatgtgtactttagaacgcgtcaatttgatggatatggtaaattaagtcatcaatctctagatgacctcaaagtaggcgcgcgtattgaagcgggagaacaaaaagaagatgcgctcgattttactttatggaaaaaagcgaaacctggcgaaatcagttgggatagtccatttggtaaaggtcgtccaggctggcatatcgaatgctcagttatggcttatcatgaattaggagcgacaatcgatattcatgcaggagggtcagatttacaattccctcaccatgaaaatgaaattgcccagtcagaagcacacaatcatgcaccatttgcgaattactggatgcacaatggattcataaatatagataacgaaaaaatgagtaaatcattaggtaacttcattttagtacacgacattattaaagaaatagatccagatgtactacgtttctttatgattagtgtccattaccgtagcccgattaattataatttagaactagtaggagctgcgagaagcggtttagaacgtatacgcaatagttataaattgattgaagaacgtgaagccattgctacagatttagaagaacattctgaatacattgatcaaatagaaacgattctccgacaatttgaagcggttatggatgatgactttaatacagctaatgctgtcactgcttggtatgatttagccaaacttgcgaataaatatgttctagagaacacaacgtctacgaaggtacttcatagatttaaagaagtatatcaaatcttcagtgatgttcttggcgtcccacttaaaggtgaaaatgaaaacgagttactagatgaggatattgaaaagcttatagaagaacgtaatgaagctcgtaaaaataaagatttcgcacgtgctgatgaaattcgagacatgttgaaagaacgtaacattattttagaagatacgccacaaggtgtcagatttaagcgtggctaa

SEQ ID NO: 1325 - DNA, 387 bp, Staphylococcus capitis
atgaatgttaaattattaaatccattgacgcttgcttatatgggcgatgccgtattagatcaacatgtacgagaatatattgttcttaaattacaaagtaaaccgaatcgtctacaccaggtatcaaaacaatatgtttctgctaaaagccaagctcagacattagagtatttaatatctaatgattggtttactgaagaagagttaaatgttttgagaaggggacgtaatgctaaaagctataccaaagctaaaaatactgatgttcaaacatatcgaaaaagttcagccttggaagcagttataggttttttatatttagatcatcaacatgcgcgtttagaagaattacttcaaactattgttgaaatagtaaatgaaaggtag

SEQ ID NO: 1326 - DNA, 750 bp, Staphylococcus capitis
gtggaagatactgtcatagtaggaagacatgcagttaaagaagcgattgtttcggggcatgctataaataagattttgattcaagatggtataaaaaaacaacagattaatgaaattttaaaaaatgcaaaagctcaaaaattgatagttcaaaccgtgccaaaatctaaattagattttttatcaaatgcacctcatcaaggggttgctgcattagtcgctccatatgaatatgaagattttgatgaatttttacaaagccagaagaataaagatggcttttctacaatattaattttagatggtctagaagatccgcataatcttggttctatattaaggactgctgatgcaactggagtagacggagtcattattcctaaaagacgttcagtagcgctcacgcagactgttgcaaaagcttcaactggagctattcaacatgttccagttatacgcgttacgaacctttctaagacaatcgatgaattaaaagaaaatggtttttgggtcgcaggtaccgaagcaagtaatgctacggattatcgtgacttacaggcggatatgtctttagctatcgtgataggaagcgaaggacaaggaatgcgtcgcttagtgagcgataaatgtgatttttacattaaaatacctatggttggacatgttaatagtctcaatgcttctgtagcagcaagcttgatgatgtatgaagtatttcgtaaaagagatgagactggagagatgtcatga

SEQ ID NO: 1327 - DNA, 528 bp, Staphylococcus capitis
atgaaggaaagatatctaattatcgatggctataatatgataggtcaatcttcagcattaagtgcgattgctaaagagagtttagaagaagcaagagagcaacttttggatgccatagcaaactataatgcacttattgctgatgaaattgtgtgtgtatttgatgcatatgaacaatccggaattgaaagagaatacgtataccatggcgttagaacggtgtttactaaagagaaagaaacagcagatagttttatcgaacgttatgtatatgagttatatgataaacatacaacgcatatcaccgttgttacgagtgatatgagtgagcaacatgccatttttggatctggggcataccgcatatcttcgagggaaatgtggcgcgatttaaaagaaaatgaaatcacagtgagcaaatcaattgatgattttagtgaaaagaaacccagaactcgaattcagttatcaaatgagatactagaagaatttgaaaaaatcagacgtggaaaccatcgaaatgattaa

SEQ ID NO: 1328 - DNA, 573 bp, Staphylococcus capitis
ttgaatcaaagacatcaagatgaattaacacagtatcatttcaacatcgaaactgaagatatcgagcgtatatttgagacgctacttagagagttgagaccactcatttttagaaaaattggatacataacatcgaatcaatttgatattgaggatatgtatcaagagattatcataaaaatgtatcgagcacttcaacattatgactttagtagagcaattccatttaaaagatatttgtactttctcattcgctctgttaagtatgactacttaagaaagagtagagctgaacgtcatcgacatgtgatgcttatcaacgagtacgttgtagattatcattgtgcattagcacttgatgaagttgaaaggtcatttttaagagaagaattatcaaaggaaattatgagccaagcatttacattaagcggattggaaagagacgtcttaaaactaattattaaagaatataaaccgagagaaattgcacaagcattagaaattaaagataaagacgtttacaatgccatacaacgttgtaaaatgaaaatgaaacgacaattaaggaaatga

SEQ ID NO: 1329 - DNA, 183 bp, Staphylococcus capitis
atggctaaaaaagagaacttctttaaaggcgttaaatcagaaatggaaaagacaagttggccgacaaaagaagaactattcaaatacactgtaatcgttgtatttacagttatattcttcttagtctttttctatgccttagacgtaggtattaatgcattgaaacaattattattaggttag

SEQ ID NO: 1330 - DNA, 549 bp, Staphylococcus capitis
atgtctgaagaagttggcgcaaagcgttggtatgctgtgcatacctattctggatatgaaaacaaagttaaaaagaatttagaaaaaagagtagaatctatgaatatgacagagcaaatttttagagttgtcataccagaagaggaagaaacacaagttaaagatggtaaagctaagaaacttgttaaaaaaacattcccaggttacgtgctagttgagcttgtaatgacggatcagtcatggtatgtcgttcgtaacacaccaggtgttacaggattcgtaggttctgcaggtgcgggttctaaacctaatcctctacttcctgaagaagtgcgcttcattcttaagcaaatgggtcttaaagagaaaactattgatgttgaacttgatgttggtgaacaagttcgtatcaaatcaggaccttttgctaaccaagtaggcgaagttcaagaaatcgaagcggataaatttaaattaactgtacttgtagatatgtttggtcgagaaacaccggtcgaagttgaattcgatcaaattgagaaactttaa

SEQ ID NO: 1331 - DNA, 423 bp, Staphylococcus capitis
gtggctaaaaaagtagaaaaagtagttaaattacaaattcctgcaggtaaagcgaatccagcaccaccagttggtccagcattaggtcaagcaggtgtgaacatcatgggattctgtaaagagttcaacgcacgtacgcaagaacaagcaggtttaatcattccggtagaaatcagtgtatatgaagatcgttcatttacattcattactaaaactccaccggctccagtactacttaaaaaagcagctggcgttgaaaaaggttcaggtgaacctaataaaacaaaagttgcatcagtaactaaagatcaagtacgcgaaattgctcaaactaaaatgcaagacttaaacgctgcagacgaagaagcagctatgcgtattatcgaaggtactgcacgtagcatgggtatcactgtagaataa

SEQ ID NO: 1332 - DNA, 696 bp, Staphylococcus capitis
atggctaaaaaaggtaaaaagtatcaagaagcagctagcaaagttgatcgtactcaacactatagtgttgaagaagcaattaaattagctaaagaaactagcattgctaactttgacgcgtctgttgaagtagctttccgtttaggaattgatacacgtaaaaatgaccaacaaatccgtggtgcagttgttttacctaacggtactggtaaatctcaacgtgtattagttttcgctaaaggcgataaaatcactgaagctgaagaagcaggtgcagattatgtaggagaatcagactacgtacaaaaaatccaacaaggttggtttgatttcgacgtagttgttgctactcctgacatgatgggcgaagttggtaaattaggtcgtgtattaggacctaaaggtttaatgcctaaccctaaaacaggtacagtaacaatggatgttaaaaaagctgtagaagaaatcaaagctggtaaagttgaataccgtgctgaaaaagcaggtatcgtacatgcttcaatcggtaaagtttcattcgacgatgaaaaattagttgaaaactttaaagctttacaagacgttttagcaaaagctaaaccatcttctgctaaaggtacttacttcaaatctgttgctgtaactacaacaatgggccctggagttaaagttgatacttcatctttcaaactataa

SEQ ID NO: 1333 - DNA, 501 bp, Staphylococcus capitis
atgtctgctatcattgaagcaaaaaaacaacaagtagatactattgctgaacaacttaaaaattcagtatcaacagttatcgttgactaccgtggtttaacagtagcagaagttactgaattacgttcacaattacgtgaagcaggtgttgagtacaaagtttacaaaaacactatggttcgtcgtgcagctgaacaagcaggtatcgaaggcttagatgaattcttaacaggtcctacagctatcgcaacttcaactgaagatgttgtagctccagcgaaagttatcgcaggatttgctaaagaacacgaagctttagaagttaaaacaggcgttatggaaggtagcgtaatctcagctgaagaagttaaaactgttggttcattaccttcacacgatggtcttgtatcaatgcttttatcagtattacaagctccagtacgcaacttcgcttatgcagttaaagccgttggtgaacaaaaagaagaaagcgctgaataa

SEQ ID NO: 1334 - DNA, 369 bp, Staphylococcus capitis
atggctaatcaagaacaaatcattgaagcaattaaagaaatgtcagtattagaattaaacgatttagtaaaagcaattgaagaagaatttggtgtaactgcagcagctccagtagcagcagcaggtgcagctggtggcggcgacgcagcagctgaaaaaactgaatttgatgttgaattaacttcagctggatcttcaaaaatcaaagttgttaaagcagttaaagaagcaactggcttaggattaaaagatgctaaagaattagtagacggagctcctaaagtaattaaagaagctatgcctaaagaagatgcagaaaaacttaaagaacaattagaagaagttggagctactgtagaattaaaatag

SEQ ID NO: 1335 - DNA, 609 bp, Staphylococcus capitis
atgagtcactactatgatgaaaatcctgaagtgaaaagcaatcaaaagaaaataagttatcattttgataaggtgcatttagagttcacgactgacacaggtgtgttctcaaaagatagagtagattatggttcggatttgttaattaaaacatttttaaaggaacatccgcctggacctagtaaatatattgccgatgttggttgcggatatgggcctatcggattaactattgctaaagtttcaccacatcatcaattatatatgttagatgtaaataatagagcattggctcttactggaatgaataaaactaaaaatcaaattgaaaatgctgaaataatagaaagtgactgcttgtcaggtgtaagtgatcaacaatttgattacattctgacaaatccacctattagagctggtaaagatgtagtgcatagaatttttgaagaggcttatggcaaattaaaagatcaaggtgcactctatgttgtgatacaaaagaaacaaggtatgccatctgcaaagaagaaaatgcaagaatgctttaaccatgtagaagtcgttaataagagtaaaggatattatattttgaaaagtttaaaaggttga

SEQ ID NO: 1336 - DNA, 3552 bp, Staphylococcus capitis
ttggcaggtcaagttgtccaatatggaagacatcgtaaacgtagaaattacgcgagaatttcagaagtattagaattaccaaacttaatagaaattcaaacaaaatcttacgattggttccttaaagaaggtttattagagatgttcagagacatttctccaattgaagatttcacaggtaacctatctttagaatttgtagattatagattaggtgaaccaaaatacgatttagaagaatcaaaaaatcgtgacgctacttatgctgcacctcttcgtgtcaaagtacgtcttattattaaagaaacaggcgaagttaaagaacaagaagtcttcatgggtgatttcccattaatgacagacacaggtacatttgtaatcaatggtgctgaacgtgttatcgtatctcaattggtacgttcaccatccgtttacttcaatgaaaagattgataaaaatggacgtgaaaactacgatgcaactattattcctaaccgtggtgcttggttagaatatgaaactgacacaaaagatgtagtgtacgttcgtatcgatagaactcgtaaattaccattaactgtattattacgtgcacttggtttttcaagtgatcaagaaatcattgatttactaggagaaagtgaatatttacgtaatacattagaaaaagatggtactgaaaacacagaacaagctttattagaaatttatgaacgtttacgtcctggcgaaccaccaacagtagaaaatgctaaaagcttattatactcacgtttctttgaccctaaacgttatgatttagcaagcgtaggtcgttataaagctaataagaaattacacttaaaacatcgtttattcaatcaaaaattagcagagcctattgttaacagtgaaacaggcgaaattgtagctgaagaaggcacagtactagatcgtcgtaagattgatgaaattatggaagttctagaaacaaacgctaatagcgaagtctttgaacttgaaggtagcgttattgacgaaccagttgaaattcaatcaatcaaagtatacgtacctaatgacgaggaaggtcgtacaactactgttatcggtaatgcattaccagactcagaagttaaatgtataactccagctgatatcatagcttcaatgagttacttctttaacttattaaatggcattggttatacagatgatatcgaccacttaggtaatcgtcgtttacgctcagttggtgaattattacaaaaccaattccgtatcggtttatcaagaatggaacgtgtcgtgcgtgaaagaatgtcaatccaagacactgattcaattacaccacaacaattaatcaatattcgtccagttattgcatcaattaaagaattctttggtagttctcaattatcacaattcatggatcaagctaacccattagctgagttgactcacaaacgtcgtttatcagcattaggacctggtggtttaactcgtgaacgtgctcaaatggaagtacgtgacgttcattactcacactatggtcgtatgtgtccaattgaaacaccagagggtccaaatattggtttaattaactcattatcaagttatgcacgagtaaatgaatttggtttcattgagacaccgtatcgtaaagttgatttagatacgaactctattacagatcaaatcgattacttaactgctgatgaagaagatagctatgtagttgcccaagccaactcacgtttagacgaaaatggtcgtttcttagatgacgaggttgtttgtcgtttccgtggtaataacacagttatggcgaaagaaaaaatggattacatggatgtatcacctaaacaagttgtatcagcagctacagcatgtattccattcttagaaaacgatgactctaaccgtgcattaatgggtgcgaacatgcaacgtcaagcggtaccattgatgaacactgaagcaccatttgttggtactggtatggaacatgtggctgcacgtgactctggtgctgcaatcactgctaaacacagaggtcgtgttgagcacgttgaatctagtgaaattttagtgcgtcgtttagttgaggaaaatggcactgaacacgaaggtgaattagaccgttatccattagctaaattcaaacgttctaacacaggtacttgttataaccaacgtccaattgtttcagttggtgacgtggttgaatataatgaaatccttgccgatggtccttcaatggaattaggtgaaatggcattaggacgaaatgtagttgttggtttcatgacttgggacggttacaactacgaggatgctgtaattatgagtgaacgtttagttaaagatgacgtttacacttctattcacatagaggaatatgaatcagaagctcgtgatactaaattaggacctgaggaaatcactcgagatatccctaacgtatctgaaagtgcacttaaaaacctagatgatagaggtatcgtctatgtaggtgctgaagttaaggatggcgacattttagttggtaaagtgacgcctaaaggtgtaactgagttaacagctgaagaaagattattacatgcaattttcggcgaaaaagctcgtgaagttcgcgatacttcattacgtgtgccacacggtgcaggtggtattgtactagatgttaaagtgtttaatcgtgaagaaggagacgacacattatctccaggtgtaaaccaattagtaagagtttatattgttcaaaaacgtaaaattcatgttggggacaaaatgtgtggtcgtcacggtaacaaaggtgttatttctaaaatcgttcctgaagaagatatgccttacttaccagatggacgcccaattgatatcatgttaaacccacttggtgtaccatcacgtatgaacatcggacaagtccttgagttgcacttaggtatggctgctaaaaacctaggcatccacgttgcatctccagtatttgatggtgctaacgatgaggatgtatggtctactatcgaagaagcaggcatggctcgcgatggtaaaactgtattatatgatggacgtacaggtgaaccattcgataaccgtatttctgtaggtgttatgtatatgcttaaacttgctcacatggttgatgacaagttacacgcacgttcaactggtccatactcacttgttacacaacaaccacttggtggtaaagcacaattcggtggtcaacgttttggtgagatggaggtatgggcacttgaagcttatggtgctgcatatactttacaagaaatcttaacttataaatctgacgatactgtaggtcgtgtaaaaacttacgaatctatcgttaaaggtgaaaacatctctagaccaagtgttcctgaatcattcagagtattgatgaaagaactacaaagtttaggattagatgttaaagtgatggatgagcaaaacaacgaaattgaaatggcggacgttgatgatgaagatgcaacagaacgcaaagtagatttacaacaaaaagatgctcctgaatcacaaaagaaaacaactgattaa

SEQ ID NO: 1337 - DNA, 3624 bp, Staphylococcus capitis
ttgattgatgtaaataatttccattatatgaaaataggattagcttcacctgaaaaaattcgttcatggtcttatggtgaagttaagaaacctgaaacaattaactatcgtactttaaaaccagaaaaagatggtcttttctgtgagagaatttttggacctacgaaagactgggaatgtagttgtggtaagtacaaacgtgtacgctacaaaggtatggtatgtgacagatgtggcgttgaagtaactaaatcaaaagtgcgtcgtgaaagaatgggacacattgaattagcagcacctgtatcacatatttggtatttcaaaggaattccaagtcgtatgggtctattgctagacatgtctccaagagcattagaagaagtcatctacttcgcttcttatgttgtagtagatccaggccctactggattagagaagaaaacattattatctgaagcagagttcagagaatattatgacaaatatcctaatcaattcgtagctaaaatgggtgctgaaggtattaaagacctattagaagaaattgatttagatgaagaactaaaactgttaagagatgagttagagtctgctactggtcaaagactaactcgtgcaattaaacgtttagaagtggttgaatcattcagaaattcaggaaacaatccttcatggatgattttagatgtacttccaatcatcccacctgaaattcgtccaatggttcaattagacggtggacgttttgctacaagtgatttaaacgacttatatcgtcgtgtaatcaaccgtaacaatcgtttgaaacgtttattagacttaggtgcacctggcatcatcgttcaaaacgaaaaacgtatgttacaagaagctgtagacgctttaattgataacggacgtcgtggtcgtccagttactggaccaggtaaccgtccattaaaatcactttcacacatgttaaaaggtaaacaaggtcgtttccgtcaaaacttacttggtaaacgtgttgactattcaggtcgttcggttatcgccgttgggccaagcttaaaaatgtatcaatgtggattgcctaaagaaatggcacttgaactatttaaaccattcgttatgaaggaattagttcaacgtgaaattgctacaaatatcaaaaatgcgaaaagtaaaatcgaacgcatggatgatgaagtttgggatgtattagaagatgttatcactgaacacccagtattacttaaccgtgcaccaacgcttcatagacttggtatccaagcatttgaaccaacattagttgagggtcgtgcaatccgtcttcatccacttgtaacaacagcttacaatgcggactttgacggtgaccaaatggcggttcacgtaccattatcaaaagaagcacaagctgaggcacgtatgttaatgcttgcggcacaaaacatccttaacccgaaagatggtaaaccagttgttacaccatctcaggatatggtattaggtaactactatttaacattagaacgtaaagatgctgttaatactggtgcgattttcaatgacactaatgaagtattaaaagcttatgcgaacggtcatgtacacttacacactcgtattggtgtgcatgcaagctcattcaacaacccaacgttcacagatgctcaaaatagtaaaatcttagttacttcagtaggtaaaattattttcaatgaaatcattcctgattcatttgcatatattaatgaacctagtcaagcaaatttagaagatactacgccagataaatacttcatagatccgactcaattaggtgagggtggcttaaaagaatactttgaaaatgaagaacttattgagccattcaataagaaattcttaggaaacatcattgctgaagtattcaatagatttagtattactgacacatctatgatgttagatagaatgaaagacttaggtttcaaattctcatctaaagctggtattactgttggtgtatctgacatcgtggtacttccagacaaacaagatatcttagatgaacatgaaaaattagttgaacgtgtaactaaacaatataatcgtggtttaatcactgaagatgaacgttataacgctgttgttgaaatttggactgacgcaaaagaccaaattcaaggcgaattaatgcaatctcttgagaaaacaaaccctattttcatgatgagtgattctggtgcccgtggtaacgcatctaacttcacgcaattagcaggtatgcgtggattaatggctgcaccatcaggtaaaattatcgaattgccaatcacatcttcattccgtgaaggtttaacagtattagaatacttcatctcaactcatggtgctcgtaaaggtcttgccgatacagctcttaaaacagctgactctggttaccttactcgtcgtcttgttgacgttgcgcaagatgttatcgtacgtgaagaagactgtggcactgaccgtggtttattagtttctgatatcaaagaaggtacagaaatgattgaaccatttattgaacgtatcgaaggtcgttattctaaagaaacaattcgtcatcctgaaactgatgaagtaatcattcgtccagacgaattaattactgcagatatcgctaagaaaattactgatgctggtattgaacaaatgtacatccgctcagcgtttacatgtaacactcgtcacggtgtttgtgaaaaatgttacggtaaaaaccttgctacaggtgaaaaagttgaagtcggtgaagcagttggtacgattgccgctcaatcaatcggtgagccaggtacacagcttacaatgcgtacattccacactggtggggtagcaggaagcgatatcactcaaggtcttccacgtatccaagaaatctttgaagcacgtaaccctaaaggacaagcggttattactgaaatcgaaggtgtagtagaagacattaaattagctaaagatcgtcaacaagaaattgttgttaaaggtgctaacgaaactagatcatatctagcttcaggtacttcaagacttaaagttgaagttggtcaatcagtggcacgtggtgaagttcttactgaaggttcaattgagcctaaaaactacttagcagtagcaggacttaatgcgactgaaagttacctattaaaagaagttcaaaaagtttaccgtatgcaaggtgttgaaatcgacgataaacacgttgaagttatggttagacaaatgttacgtaaagttcgtatcattgaagctggtgacactaaattattaccaggttctcttgtggacattcacagctttactgatgctaacagagaagcctttaaacaccgtaaacgtccagcaactgctaaaccagtattgcttggtattacaaaagcttctcttgaaactgaaagcttcttatcagctgcgtcattccaagaaacaacacgcgttcttacagatgcagcaattaaaggtaaacgcgatgacttacttggacttaaagaaaacgttattatcggtaagctaatcccagcaggtactggtatgagacgttacagtgatgttcaatatgataaaacatcagctcctgtagcagatgtaactgaagatgttgagattactgaataa

SEQ ID NO: 1338 - DNA, 261 bp, Staphylococcus capitis
atgtctaatgaaaaagttgcacgctttaacaaacaacactatgtagttggtcttaaagaaacgcttaaagcgttaaagaaagatcaagttgcatcattgattatcgctaaagacgttgaagttcatttattaactcgcgtgttaagctatatcaatcaagaaaatataccagtgacatttttttctagccagcgggctttaggagaatatgtaggtatcaatgttaatgcaactattgttgcgttattgaatgagaattag

SEQ ID NO: 1339 - DNA, 414 bp, Staphylococcus capitis
atgccaactattaaccaattagtacgtaaaccaagaaaaagcaaaactaagaaatcagattcaccagctttaaacagaggtttcaatagtaaaaagaaacaatttactaacttaaactcacctcaaaaacgtggtgtttgtactcgtgtaggtactatgacacctaaaaaacctaactcagcgttacgtaaatatgcgcgtgtgcgtttatcaaataacattgaaatcaacgcatacatccctggtatcggacacaacttacaagaacacagtgtagtacttgtacgtggtggacgtgttaaagacttacctggtgtgcgttatcatattgtacgtggtgcacttgatacttcaggtgttgatggacgtagacaaggtcgttcattatacggaactaaaaaacctaaaaattaa

SEQ ID NO: 1340 - DNA, 471 bp, Staphylococcus capitis
atgcctcgtaaaggatcagtaccaaaaagagacgtattaccggatccaattcataactctaagttagttactaaattaattaacaaaattatgttagacggtaaacgcggaacagctcaaagaattctttattctgcattcgacttagttgaacaacgtagtggtcgtgatgcattagaagtattcgaagaagcaatcaataacattatgccagtattagaagttaaagctcgtcgtgtgggtggttctaactaccaagtaccagttgaggtacgcccagaacgtcgtactactttaggattacgttggttagtaaactacgctcgtcttcgtggtgagaaaactatggaagatcgtttagctaacgaaatcttagacgctgcaaataatacaggtggtgcagtcaaaaaacgtgaggacactcacaaaatggctgaagcaaacaaagcatttgctcactaccgttggtaa

SEQ ID NO: 1341 - DNA, 2082 bp, Staphylococcus capitis
atggcaagagacttttctttgaaaaatactcgtaacatcggtatcatggctcacattgatgctggtaagactactacgactgaacgtattctttattacacaggtcgtatccacaaaattggtgaaacacacgaaggtgcttcacaaatggactggatggatcaagaacaagaccgtggtatcacaatcacatctgctgcaacaacagcacaatgggatggccaccgtgtcaacattatcgatacacctggacacgtagacttcactgttgaagttgaacgttcattacgtgtacttgacggtgcggttactgtacttgatgctcaatcaggtgtagaacctcaaactgaaacagtttggcgtcaagcaactacttatggcgtaccacgtatcgtattcgtaaacaaaatggataaattaggtgctaacttcgaatattcagtaagcactttacatgatcgtttacaagcaaatgctgcacctatccaattaccaattggtgccgaagatgaattcgaagcaatcattgacttagttgaaatgaaatgctttagatatactaacgatttaggtacagaaatcgatgaaattgaaattcctgacgatcacaaagaaagagctgaagaagctcgtgctcaattaatcgaagctgttgcagaaagcaacgacgaattaatggagaaatatcttggtgacgaagaaatttctatcgatgaattaaaagctgctatccgtaaagcaactactgacgtagaattttacccagtactttgtggtacagcattcaaaaacaaaggtgttcaattaatgcttaatgcagtaattgactacttaccttcaccattagacgttaaaccaatcattggtcaccgtgctaatgaccctgaagaagaagttgttgctaaaccagacgattcagctgaattcgctgcattagcattcaaagttatgactgacccttatgttggtaaattaacattcttccgtgtgtactcaggtacattaacttcaggttcatacgtgaagaactctactaaagataaacgtgaacgtgtaggtcgtttattacaaatgcacgcaaactcacgtcaagaaatcgatactgtttactcaggtgatatcgctgctgcggtaggtcttaaagaaacaggtactggtgatactttatgtggtgagaaaaacgacattatcttggaatcaatggaattcccagagccagttatccacttatctgttgaaccaaaatctaaagctgaccaagataaaatgactcaagctttagttaaattacaagaagaagacccaacattccatgcacatactgatgaagaaactggacaagttatcatcggtggtatgggtgaattacacttagacatcttagttgaccgtatgaagaaagaattcaacgttgaatgtaatgtaggtgctcctatggtttcataccgtgaaacattcaagcaatctgcacaagttcaaggtaaattctctcgtcaatctggtggtcgtggtcaatacggtgatgttcatatcgaattcacacctaacgaaacaggtggaggtttcgaattcgaaaactctatcgttggtggtgtagttccacgtgaatacattccatcagttgaacaaggtcttaaagatgctatggaaaatggtgttttagctggttatccattaatcgatgttaaagcaaaattatttgatggttcttaccacgatgtcgattcatctgaaatggccttcaaaattgctgcatcattagcgcttaaagaagctgctaaaaaatgtgatccagttatcttagaaccaatgatgaaagtaactatcgaaatgcctgaagaatacatgggcgatatcatgggtgacgtaactgctcgtcgtggacgtgtagatggtatggaacctcgtggtaatgcacaagttgtaaatgcctttgtaccactttcagaaatgtttggttacgcaacttcattacgttctaacactcaaggtcgcggtacttacactatgtactttgaccactatgcagaagttcctaaatcaatcgctgatgaaatcatcaagaaaaataaaggtgagtaa

SEQ ID NO: 1342 - DNA, 1185 bp, Staphylococcus capitis
atggcaaaagaaaaatttgatcgctcaaaagaacatgccaatattggtactatcggtcacgttgaccatggtaaaacaactttaacagctgctatcgcaactgtattagctaaaaatggtgacactgttgcacaatcatacgacatgattgacaacgctccagaagaaaaagaacgtggtattacaatcaatactgcacacatcgagtatcaaactgacaaacgtcactatgctcacgttgactgcccaggacacgctgactatgttaaaaacatgatcactggtgctgctcaaatggacggcggtatcttagtagtatctgctgctgacggtccaatgccacaaactcgtgaacacatcttattatcacgtaacgttggtgtaccagcattagttgtattcttaaacaaagttgacatggtagacgacgaagaattattagaattagttgaaatggaagttcgtgacttattaagcgaatatgacttcccaggtgatgatgtacctgtaatcgctggttcagcattaaaagctttagaaggcgatgctcaatacgaagaaaaaatcttagaattaatgcaagcagttgatgattacattccaactccagaacgtgattctgacaaaccattcatgatgccagttgaggacgtattctcaatcactggtcgtggtactgttgctacaggccgtgttgaacgtggtcaaatcaaagttggtgaagaagttgaaatcatcggtatccacgaaacttctaaaacaactgttactggtgtagaaatgttccgtaaattattagactacgctgaagctggtgacaacatcggtgctttattacgtggtgttgctcgtgaagacgtacaacgtggtcaagtattagctgctcctggttcaatcacaccacacactaaattcaaagcggaagtttacgttttatctaaagacgaaggtggacgtcacactccattcttcagtaactaccgcccacaattctatttccgtactactgacgtaactggtgttgttaacttaccagaaggtactgaaatggttatgcctggcgacaacgttgaaatgacagttgaattaatcgctcctatcgctattgaagacggtactcgtttctcaatccgtgaaggtggacgtactgttggatcaggcgttgtaactgaaatcttcgaataa

SEQ ID NO: 1343 - DNA, 1176 bp, Staphylococcus capitis
gtgataaatgtgtttgattggttccaattggctagcaaaaaagagaaaagaatggtacaactacgacgatatttgcatcaatatcccgaactctcttttgaggaaaagcgtacgcatgactttatcgtgaatcaattaagccagttgtcatgtgatattgttactccagttggccgtaatggtatcaaagctacatttaaaggtagtgaaaacgtcccaactatagcatttcgtgcagactttgatgccctacctgttcaagaattaaacgacgtcccataccgttctaaaaacgagggctgtatgcatgcatgtggtcatgatggtcacacggcaatattacttggagttgctgaaatagtaaatgaacaccgccatttattaaaaggaaacgttgtattcatcttccaatatggggaagaaattatgcctggtggctctcaggaaatgattgatgatggctgtcttcaagatgttgataaaatctatggtacacatttgtggagtggttatccttcaggtactatttactctagacctggtgcgatcatggcatcacctgatgagtttagtatcacgatcaaaggtagcggtggacatggggctaaaccccatgaaaccattgatcctatagtcattatggctgaatttattttaagtgcacaaaagattgtctctaggacgatagacccagttaaagaagctgttgtgacatttgggatggtacaagctggatcaacagatagtgttattccggataccgccttttgtaaaggaactgttcgtacatttgacaccgagctacaaaaccatattaagaataaaatggataaactattacagggcttagctgttgctaatgatattacttatgacatgaattatattaaaggctatttacctgtacacaatcatccgcaatcttatgaggttgttaaacaagcagcgaatgatttacatttaagatttaatgaatcagatttgatgatgattggcgaagatttttcacattatcttaaagtacgtccaggtgcctttttcttaacaggttgtggtaatggggataaaggtatatccgcgccacatcataatccatactttgatatagatgaatcatcttttaaatatgctgcaagcgaatttcttaaaatactagaaattgaacatgtattttaa

SEQ ID NO: 1344 - DNA, 1188 bp, Staphylococcus capitis
gtggttcaatcactaaatgagtttttagatgaaaatatacaatatttaaaagacaatggcttatataacgaaattgactcaattgagggagcaaatggtcctgaaatcaaaattaatggtaaaaactacgtcaatttatcatcaaataactacttaggacttgctacgaatgaagatttaaaagaagcagctaaaaaagcaattcattcacacggagtgggtgcaggtgcagtacgctcaattaatggtacattggacttacatgatgagttagaagatacacttgcacagtttaaaggtactgaagcagctattgcatatcaatcagggtttaattgtaatatggctgctatatcagctgttatgaataaaaatgatgctattttatctgacgaattaaaccatgcctctattattgatggttgtcgcttatctaaagctaaaattattcgagtaaatcattcagatatggaggatttacgtacaaaagctaaagaagctgttgagtctggacaatacaataaagtaatgtatattactgatggtgtatttagtatggatggggatgttgctaagctaccagaaattgtaaaaattgctgaagaatttggtttattaacttatgttgatgacgctcatggttcaggtgttatgggtaaaggtgcaggtacagttaaacatttcggtttacaagataaaattgacatccaaattggcacattatctaaagccattggtgttgtaggtggttatgtagcaggctctaaacaattaattgattggttaaaagcacaatcaagaccgttcttattctcgacttcattagcacctggagatactaaggctattactgaagctgttaaaaaattaatggcatctacagaattacatgatcaattatgggataacgcacaatatttaaaagatggactctctaaattaggttttaatactggggaatctgaaacaccaattactccagtcattattggagatgaaaaagatacgcaagagtttagtaaacgtcttaaagaagaaggaatctatgttaagtcaatagtattcccaacagttcctagaggtaccggtcgtgtaagaaatatgcctacagctgctcatactaaagatatgttagataaagcccttaatgcttatgagaaggttggaaaagaattaaatattatatag

SEQ ID NO: 1345 - DNA, 507 bp, Staphylococcus capitis
gtggaagaattaagacaacttacgtataaagatgaagaaacattcaacgtttatattcaagaatggtatgacaataatgaaaaagttgtaccaggaaatacgaatttaaaagaatatcagtccttcaaagatatggttgattttcttaatcaagaaagaccaagtaaagattgggttcccaccacaacattattttattttgttgatggaaatattgtgggtgcggtggatattagacacgaactcaatcatcgattaagaaacattgggggtcatattgggtatggcgtagctcgatcatatagaggtaaaggatatgcctcaaccttattaggacaagcccttgactacttaaaaatacgaaatgttgaaacaattcttatgactacaaatccattcaattacgcatctcaaaatgtcataaaaaaatatggtggttatgaaatcgaaccctatattaaaaagaatgggaaagttgttaatcgatatcaaattttgaataaataa

SEQ ID NO: 1346 - DNA, 132 bp, Staphylococcus capitis
ttgtcacaacaaaaatttaataaatccgacattttagcttcatttatcggattacttattattttaatcagagtgtattattatatgagtgaaagtaacaatgtaaattataattcaaatttgaaacgatag

SEQ ID NO: 1347 - DNA, 270 bp, Staphylococcus capitis
atgaagtatgtaatatatggaatgaacctatttaattatattattttaatcacttggatcagcctatctttaaatcgtataagtgaagtaggaccagatatagtctcattttttgctttatttagcattttcttacttatcatttcattgatatttagttttatatcaagaactcaagacgatattaaggatacgcttaatataagtatttttatcaatttatttaatttagtggtactcacatcgatacttttagcaatactattttaa

SEQ ID NO: 1348 - DNA, 957 bp, Staphylococcus capitis
atgcgatatttagatgaacaaactcaatcagagttattaaatatgaatgaagttattgaagaggttggacaagcgctaaaagcattttcagaagataaaactgaaaccccattgcgacatgtgttgccatttaataaacacaatcgatacttagtgatgccagcattatcagatgaattaaaaattgtcggattaaaaaccgtttcatttgctcctgataatcctaaaaaaggtaaagcaacaattacaggctcagtaatactaagcgattatgaaacgggggaaacactagcagtactagatggtggttatttaactaaaattagaacaggcgcgatttctggtgtggctacaaaatatttgtctcgtgaagatgctaaagtattaactgtcattggtgccggagtacaagctgaaggtctcatagaagctgtcatggctgtgagaaatattgaggaagttcacttttcaagtagaactaaggaaaaagctgaaaagcttgctgaagcaactcaacaaaaatatggagttaaagccaaaacgtatgatcaagcagatgaagcaatggaggctgcggatattatagttaccgctacaaatgcttcagaaccagtatattcacacacgttacacccaggcgtccatcttaatgcagtaggttcattcaaacctgatatgcaagaattaccgtcagagtctatgatgatcgctaataagattgttgttgaatcgaccgaagcggcaatggaagagacaggcgatttaaaagtgcctcaggaagagggtatattaactcacaatatgttatatggtgagttaggtgatattgtctcaggtaagaaagcaggacgtgaggacgaaaaagaggtaactttatttaaatcagtgggtctagccattgttgatattgtagtagctcagtatttctataaaaaagcacttgaaagtgataattaa

SEQ ID NO: 1349 - DNA, 216 bp, Staphylococcus capitis
atgaatggtggtttgaaaacgtataaacaacgacaagtaggtttgctatctagcttattaatctttttagcatttatctttcaaaatatttatgtacttgtaactaaacatgagttagtgcctgagatgctaagtacatttagcctactcgtttttctaattttagctacactttgtgttaaacaggttatatataattatagacatcgaccatga

SEQ ID NO: 1350 - DNA, 1701 bp, Staphylococcus capitis
atgaaaaaaatcataatcactattatcactttatttataacccttggtacgatactaaactttaacctcgttaatgcttcagaacaacacacgcactcaaatgacaatcaaagtaaaactgaacacacaatattacatactaatgatattcatggtcgcttcgtagaagaaaaaggacgtgttattggcatgcctaaattaaaaggtctcaaaaataaagaaaaacctgatttagttttagactctggggatgcctttcaaggattgccagtttctaaccattcaaaaggtgaagaaatggctaaagcaatgaataaagtaggctatgacgctatgacaattggtaatcatgaatttgattttggctataaccaattattaaaattacaaaaacagcttcattttccaatgatctcatcaaatatttataaaaacgggaagcgcattttcaaaccttcaactataattaaacgtaatggtgtgcgatacggtttagtaggtgttacaactcccgaaactaaaattaaaacctctcctgatgctgtgaaagatgtagaatttaaagatccattgagcagtgtgaaaggtgctattaaagaaatggatggtaaagcagatgtatatgttgttttatctcatcttggcatcgataaaaatactaaaaaagaatggcgtggagattatctaattgaacaattatccaaagataactcaataaaaaaaccaatcatagttttagatggtcactcacattctgttataaaacatggcaaaaagtataatcatggtatcttagctcaaacgggtactgctttggaaaatgtaggcaaaattagttttctttttaaccatcataaagtgtcagatttaaaagcgagtctgattaacgtcaaagatacaaataaaataaaagctgatccctcaatagaaaaacaagtaaataaagcgaataatgaatttaaaaaagaaacatctaaagtgattattcctaataataaagttgaatttaaaggcgataaaaatatagctcgtactcaagaaacgaatttaggaaatctaattacagatgcgatggaggattacgcagcgaaaaactttaaacataagccagatttcgcagtgactaatggcggtggtattcgcgcttccatctctaaaggcaaagtcactcaaaacgatattattacagtgctgcctttcggtaatttaatttcacagattaaagttaaaggtacgaatgtgaagaaagcatttgaacatagtctaggttctcctactgaaacaaaagatggtaagaaacaactatcaccaaatggcggtttcttacaagtttcgaaatcaatacgtgtttattatgatatgaatcaaaaatctggctcaagagttcgagatattcaagttcgtaatcgcgagaccggaaaatttgaaaaattaaatcctaataaaacatattatgttgctaccaatgattttaccgctaacaaaggtgatggctacgatatgtttggaggacaacgtgaggaaggtatttcgcttgatgaagtcgtaggaaattatattcaaaagcacaatttaaatgaatataatactaataatcctgaaagaatcattaatggaaaattagattcagtgaaaaaatcaacacataaatcagacaatggtaaacaatcaagcaatcatactcacaaaaagtcagcctaa

SEQ ID NO: 1351 - DNA, 960 bp, Staphylococcus capitis
atgaaaaagataatgattacaggggcacttggccaaattggaaccgagttagtagtgaaatgtcgagaaatttacggtacagaaaatgtattagctacagatattagagaacctgaagcaaattcaccagttcaaaatggtccatttgaaattttagatgttaaagacagagagcgtatgtataagcttatcgaagattttggggcagacactttaatgcatatggcagcattattatccgcaactgctgagaagaatccattattcgcttgggatttaaatatgggaggattaatgaacgctcttgaagctgcacgtacgtatgaactacaattctttacaccaagctctattggtgcttttggcgcgtcaacgcctaaagtaaatacaccacaagtaacaatccaacaacctactacaatgtacggtgttaataaagttgcgggtgaattactgtgtcagtattattatgttaagtttggcgtagatactcgcagcgtaagattcccaggacttatttcacatgtgaaggagccagggggcggaacgactgactacgctgttgaaatttattttaaagcagtaagagaaggtcgttatacaagctatatcgataagaacacatatatggatatgatgtatatggatgatgccatcgacgctattataaaattaatggaagcagatggtgccaaattagaaactcgtaatggttataatttaagtgcaatgagtatagaacctgaaatggttaaaaaagccattcaagagtactaccctaatttcgaactagactatgatgttgatccagaacgtcaaaatattgcttcaacatggcctgatagtatcgatacgagctgttcacgtggtgagtggggatttaatccaaaatatgatttagcctcaatgactaagttgatgctcgcagcaattgaagaaaaagaaaaggttgctaaatag

SEQ ID NO: 1352 - DNA, 1077 bp, Staphylococcus capitis
atgtcagaaaaggtaaaatttgaacaacgagatacattgaaagaaaaaccagacacatcgaaattaggattcggtcaatatttttcagactatatgctaagtttggattatgatgcggataaaggttggcatgatatgaagattgtaccttatgcaccatttgaaatttcaccagcagcacaaggtttacattatggtcaagcggtatttgaagggcttaaagcatataaacacaacggtgaagtggtattattccgaccagaccaaaactttaaacgtattaataattctttagcgcgtttagaaatgccagaagttgacgaagaagcattattagagggattaaaacaacttattgatgttgaacgtgactgggtaccagagggtgaagggcaatcattatatattcgtccattcgtatttgctacggaaggtattctaggtgtacgtgcatctcaacaatataagttattaatcattttatcgccttcaggtgcgtattatggtggagacacgttaaaaactactaaaatttatgttgaagacgaatatgttcgtgccgtacgtggaggagtaggatttgcgaaagttgccggtaactatgctgctagtctacttgcacaaactaatgctaacaaattaggttatgaccaagtattatggctagatggtgtggaacaaaaatatgtcgaagaagttggaagtatgaatatcttcttcgttgaaaatggaaaaatagtcacacctgcattaaatggaagtatcttaccaggtattactagaaaatcaattattcaattagctgaagacttaggttatgaagttgaagaaagaaaagtttcaattgacgaattattcgacgcttacgacaaaggtgaacttacagaagtatttggtgcaggtactgcagcggttatttctccagttggtacattacgctatgaagacagagaaattgttattaataataatgagccaggtgaaatcactcaaaaattatatgacacatatactggtattcaaagcggtaaattagaagataaatatggttggagagttgaagtccctaactattaa

SEQ ID NO: 1353 - DNA, 702 bp, Staphylococcus capitis
atggaatggatattatttgataaagatggcacgctaatagaatttgataagagttgggaaaaaatcggtgtgcgccttgttgataaactattagagacatttcctgtacacgacaaagaagtagcacaccgccaacttggaattattgacgataaaattgttcctgattcaattatgggttcaggatcattaggagatatgattaaatcttttaataaagttactggagaagatacatctgattgggcaagaaatactagccaagaacttgttgatactcgtgttcctgaaaataattggattgaaggtgtgcaagagactattcaggaacttagaaacgaaggttataaaattggtattgtcactagtgataccaaaaaaggcgtagatcaatttctagaagaaacgcaatctaaagaattatttgatttaattatttctacagaaactcatgctgaagaaaaacccaatccaaaagtgttgaatcctttatttgacgcttatgatgtttcaccagatcaagttgccatcattggtgacactacaaatgatatgaaaactgcggtaaacgctaaattaggtttaagtataggtgtattaactggtatcgcaaaaagagaggaacttcatgaagcggatgcggatgtcattattgacagtgctaaagatgtaaaacaaattttagatcaatataaaaaataa

SEQ ID NO: 1354 - DNA, 753 bp, Staphylococcus capitis
atgtcaaaaactgcaattattactggaagtagccgtggtttaggagcggtaattgctcaaacattaattaataaaggttataacgttgttgtgaattataaacatagcagagaaaaagctgaaaaattgattgagaatattagtcatgaaaaagcaattgcaattcaagctgatgtgacagaacgtgccgaagttaaccgaatggtcaaagttgcaaaggaacattttggtaatatagacattgttattaataatgcactagttaattttaagtttgatccaaaccaacaaaagaacttcaaagatttaacttgggaagattatcaacaacaacttgatggcactttaaaagctgcatttaatgttacacaaagtgtcatacctcaatttattgaaaaacaggaaggcagaattattaatatcggaacaaatctatatcaaaacccagtcgtcccctatcatgaatacacgactgctaaagctggcttaataggttttacccgtaatatcgctgcagagctaggccaatatggtataacagccaatgtggtttctggaggattattaaaaactactgatgctagtgcagtaacgacgcctgaggtattcgacttaatcgctcaaacgacaccgctcaaaaaagtgactacgccacaagatgtagcaaatatggttgcttatctagcttctgatgaagcaagtggtatcactggtcagaatttaactgttgatggtgggttaacaatgaattaa

SEQ ID NO: 1355 - DNA, 666 bp, Staphylococcus capitis
atgaataattttggtattcctcaaaatgcaattatcactattgcaggtactgtgggcgtcggaaagtcaacattaacacaggcgcttgctgataaattaaattttaaaacttcttttgaaaatgttgatcataatccttatttagataaattctatcatgattttgagcgttggagttttcatctacaaatatactttttagcggaacgctttaaagaacaaaagcgtatgtttgaatatggtggtggcttcgtacaggaccgttctatttatgaagatgttgatatttttgcgaaaatgcatgaagaacaaggtacaatgagcccggaagattttcacacgtattcagaattatttaacgctatggtaatgacaccttattttcctaaaccagatgtgttaatttatttagaatgtgattatgatgaagtgattgatcgtattaagcaacgtggtcgtgatatggaaattaatacagaccctgaatattggaaaaaattattcaaacgttacgatgattggattaataattttaatgcttgtccagtggtgcgcgtcaatattaatgagtatgatattcacgaaaatctggattcactagacccaattatcgataaaatagctcatatcatccagactcatcgccaagttgatacaagaccttaa

SEQ ID NO: 1356 - DNA, 618 bp, Staphylococcus capitis
atgaataaaccatttattgcaattgaaggacctataggtgttggtaaatcttcacttgcacgaatgctaagtcaaacgcttggttattacgaagagaaagaaattgttgacgaaaatccttttctatcagacttttatgacgacatagaaaagtggagctttcaaacagaaatgttctttttatgtaacagatataaacaaattcaagatattgaggcgttagaacaaggcgttgtaagtgattaccacatacataaaaataaaatatttgcaaataacacattagattcgaaagagttcgataaattcagtcgcatttatgatattttgactgaagatcttgaaatgcctaatatgattatctttttagatgcagatttagatgttctcaaaactagaatagctaaacgcaatcgcgattttgaacatactattgaagatgattatttattaaagctgaaacaagattataaagcttattatgaatccttaaaaaatgagggcgcgaatgtcatacgtattgacacaactgagaaagattttgttaacaatagtgacgactataaagaaattttagaattaataaaaccaatgattggagataatatagatgaataa

SEQ ID NO: 1357 - DNA, 507 bp, Staphylococcus capitis
atgagaactgataaagattatatgcgtttagcaatcaaagaagctcagaaagcacaagctctaggggaggtgcccattggagctgtcattgttaaaaatgatcaagtcattgcacacgctcataatttaagagaatccttacaactacctactgcacacgctgaacacattgcgattgaacgtgcatctaaggtagtgggtagttggcgtttagaagaatgtactctttatgtcacccttgaaccctgcgtgatgtgtgcaggagccatcgtgatgagtcgaataccacgagtggtttatggtgctgttgatcctaagggaggatgtaccggcagtttgatgaacttgttagagcagcctcaattcaaccacagagctattgttgagtcgggtattttggaaaatgaatgcagcacacttttacgtgatttcttcaaaaatattcgccaacaaaagaaggcactcaaacaagcaaagatacaaaatgacacaaatttgttagaataa

SEQ ID NO: 1358 - DNA, 876 bp, Staphylococcus capitis
atgataaagctaattgcaacagatatggatggaacgctccttaatgctgcacacgaaatttctcaagagaaccaagaagcgattaaatttgcacaagaacatggtatcactgttgttatcgcgacagggcgtgcattttacgaagcgaatacaccagttgctgaaacagatttaaaagtaccatatatctgcttgaacggagccgaagttcgcgatgaaacgttcaatattatgagtacatctcatcttaatcattctttagtgagtaagataacgtctacattgaaagaaaaagacatatattatcaagtttacacaaatagagggatttatacggaaaatcctcaaagagacttagaaatttatattgatatcgctgaacgtgctggtcaaaaagcagatgttgagaaaatcgagaacagtattcaaaaacgtatagataatggaactttaaaaattgttgataattatgacaaaattgaagatattcctggtgaattaatcatgaaaattttagcgttcgattctgatttaggaaaaattgatcttgtaggtcaagaattagctcaatcaccaaaccttgcagtttcttcatcttcaagaggtaatttagaaattacacattcagatgcgcaaaaaggcatagctttatctactattgcgaaacaactcggcattgatttaaaagatgtcatggcactaggggataacttaaatgatgtctctatgcttgaaagagtcggttattcggtcgcaatggataatgctgcaccagaagttaagacagtcgctaagtatgtgactgattcaaatgaaaacagcggagtcggtaaagcaattaagaaatttttaaaagaagagaatcaattaacataa

SEQ ID NO: 1359 - DNA, 567 bp, Staphylococcus capitis
atgaaaggattaataattgtaggcagtgctagagtaggttctcatacaaatgctttagctaaataccttataggtcaattagatgaacatgatgttgatgtagatatatttgatttagctgagaaaccaattcatcaattggacttttctggtacaacacaagctgctgaagatattaaaaaaaatgttaaagagcttcaggataaagcaatggaagcggatttctttattcttggaacgcctaattatcatggctcattttctggcatacttaagaacgctctagatcatttgaatatggattatttcaaaatgaaaccggtgggtctcattggaaatagtggaggtattgtaagttcagaaccattatcacatttaagagtgattatacgcagtttattaggtattgcagttcctacacaaattgctacacatgattcagattacgcaaaattagacgatggcacattatacctagaggatagtgaattccaattacgtgcaaaattattcgtagatcaaatcgtttcatttgtaaataacagtccttatgaacacttaaaataa

SEQ ID NO: 1360 - DNA, 1506 bp, Staphylococcus capitis
atgttttattttgtaggaaacaatattggtcaaaaaatcacaggtattgaaaaagctattattaatcgtttaaacctttttaaagaaaataaatattcatcaaaagttattctattagcatggaatcgttacttaactgatacagcatcaaattatttaatgcatgaagattacataaatatgtacgattattttcaagaagctacgcaagtaactataaatattgaatcgataaatagtaaaaattggttacatgattggcagcatgattgtggatacacaattaagtatgttgaacattctaatgatgtacgcgtttatgatggtaacaactttataatgtatgcccattttacagatgagacttataaaaaacttgattatcttaattatttcgatacatctcgtaggaaaatcaaaagagtgctgtatgatactcgaggattcttaagttgtactagaattttatcaactgatcaaaaaattcaatcggagttttactattctcctcaaaaagaagttaaattagagaaatattatgatattgattcaaatgaacctaatatagctaagaaaatactattacatcatcaggggagaacgtatttcttcaataatgatactgagttaagtgcatttttcatagaacaaatttattgcagtggtgatcttttctttagtgacagaaatttaatttcatcacatgtttttaattctacaattcatacaataccggttgtagccgttttacatagtactcatgtcaaagatattaatgatttgatgcattcaaggattaaaaatgtctataaaggcgtcttcgatcatttaaaacgctacaaagccattgtagtttcaacggaacaacaagccgaagatgtacgtcatagaattaaggactgtattccagtttatgcgatacctgtaggtttctctgaaagtacatcacaacataatataggatatacatctcaaaaattaatttctgtagcaagatactcccctgaaaagcaattagaacaacaaattaagctggttagtaaattaaaagggttattccccaaaattgaattacatttatatggttttgggcctgaagaaagtaagcttaaaacattaattaatgattatcatgtagaaaatcatgtatttctaagaggatttcttaatgacttaacagaagaatttaaaacagcatatgttaatttaattacaagtaatatggaaggattctcattagcattattagaagctcaatcgcatggtgttccttctattagctataatattaaatatggaccaggtgaattaattattcctgattataatggctcattagtagaatttaacaatgaagatcaactatatgaaactgtgaaggctctactagaagaaccggaattacaacaaaaatatgctcaaaatagtattgaatcatccaaaaattttagtaaggatgccattataaatagatggcaacaattaataaatgatatcaatacatag

SEQ ID NO: 1361 - DNA, 1299 bp, Staphylococcus capitis
atgaaacgttatcgttattttatcattaccatgattgttattatgacgatgattaattacatcgatcgtggtgcaatctcatatgctcaagaagatattattaaagaatttggttttgatacgattgcttggggatctatactaggatactttggctatggttacatgtttggttcattgcttggtggaattacttccgataaaaagggacctaaatttgtttggatattggctgggacggcttggtctttagttgaaattgcaatggcttgtgcaggtgaacttggtatggcaatatttggaggttcagctattgctggatttggtttacttcgagtgcttttcggtatttcagaaggtcctatcttttcaacgattagtaaaactaatgcgaactgggcggcacctagagaacgtggtttattatcagctcttggtttaattggcgtacctttaggagcacttattactgcacctatcgtatctggtttcttaactatagcaagttggcgtttactctttgtcctattaggcatacttgggttagtctgggtaattatttgggcaaaggtatttacagattatcccgaggacaataaaaaagtttcagaagaagaattaaatgatattcgctctacaaatgagagtttaaatgttgaaaaaacagtagaaacagaagattcaagtgaaaagtggtatcatttctttaaaagtccaacactcgtaggaaacatgattggttattttggtttccaatatgttaattttcttatattaacatggacaccgaaatacttgcaggatgaatatcattttgaaatccattcactttggtatttggggatgattccttggatcggtgcttgttttacagcatattttggtggtcaaatgtctgactggctacgtaaaaagactggtagcttacgtatcgcacgttcatactttgcgattgcaggcatgatttgtgcagcaatatgtttcctaatcattccattcacacatagtatcgttgcagtcatgatattaatgatgatagggaatgcgtttatcttcttacctaacgcagtttactggtcagtgattattgatacagcaccaaataaaactggtacctatggtggtataactcacttctttgttaatacagcgacagtgattgcgcctacacttacaggtattttagtcgctactcacggttattcaacaatgtttatttcagcggttgtagcttcattgattagtattattgcaatgtgtttcgttagaccaggggagaagaatatgagtagacattaa

SEQ ID NO: 1362 - DNA, 879 bp, Staphylococcus capitis
atgacagaatttgatttatctactcgagagggtcgttggaaacacttcggttctgtagatcctatcgaaggtacgaaacctacaactaaaaatgaaatgactgatttacaaagcactcataaaaatttcctatttgaaatagaagaagtaggaattaaaaatttaacgtatcctgtattgattgatcagtatcaaactgcaggattatttagcttttcaacaagtttaaataaagatgaaaaaggcattaatatgagtcgtatattagagagtgttgaaaagcattataataatggaattgagcttgaatttaatacactttatcaagtattacgcacacttcaagaaaaaatgaatcaaaatgctgctggggtggatgtctcaggaaaatggttctttgatcgctttagtccagtgactaatattaaagctgtaggtaacgcagacgtcacgtacggacttgcaattgatggcgagaaagtaacacgtaaagaactaacgattgaagctactgttacaacactttgtccttgttctaaagaaatcagtgaatactcagcgcataaccaacgtggaatcgttacagttaaaacttatttagataaagatgctaaagtcgtggatgattataaagataaaattttagacgctatggaagctaacgcgagttccatattataccctatcttgaaacgtccagatgaaaaacgtgtcacagaacgtgcttatgaaaacccacgtttcgtagaagatttaattcgactcattgctgctgatttagttgaattcgactggattgatggctttgatattgaatgtcgcaatgaagaatctattcaccaacacgatgcgtttgctcgtttaaaatatagaaaatga

SEQ ID NO: 1363 - DNA, 666 bp, Staphylococcus capitis
atgactgatgaaagacacgtacttgtaatctttccacatccagatgatgaaaccttctcatctgctggaaccattgcaagttatattgacgcaggcgtgccagtcacgtacgcatgcttaacactaggacaaatgggacgtaacttgggtaaccctccttttgcgacaagggaatctttacctaatattcgagaacgagaacttgaagatgcttgccgagcaattggaattacagacctaagaaagatggggttacgagataaaacggttgagtttgaaccacatgatcaaatggacgatatggtaaaaaatctcattgatgaaactaacccgtcgttaattatttcattttatcctaaattcgccgtgcatccagaccatgaagctacagcagaagctgttgtacgtacagtaggacgtatgccagaatcagaacgtccacgactcacacttgtagcatttagtaatgatgcaccagaaatacttggtcaaccagacattcaaaatgacatttctaaatatagtgatttaaaacttaaagcctttgaagcgcatgcttctcaaacaggaccattcttaaaacaaattgcgagccctgacattgatggacaagcacaaagtttcttaaaggttgagccattttggacttatcacttcgaatcttaa

SEQ ID NO: 1364 - DNA, 360 bp, Staphylococcus capitis
ttggaaccgattaatgaacaagaagtacttaacttacttacttcttatgcaaataaacccgtgtacttacatgtcgaaactacaaatggcgcatacgctaaccatttcgacgaacgcgtttttaacgcaggtacctttttaagaaatatacaagtcacatatgaacacgcacaacttaaaggtggcgaaaaagatccatatcgtgtcggattaaaattacgagaaggtggttgggtttatgtacaaggattaacgcactatgaagttaatcacgacaacgaattcctcatcgccggatttaattatgaaggacaattggcagctacaatagaaattagcgttaagccattcacaatatag

SEQ ID NO: 1365 - DNA, 741 bp, Staphylococcus capitis
ttgaaaatcatcaacttaggttctaagaaacttgcgtcattttatgttgcatgtgaattatataaagaaatgagttgccaacctacaagtaaattaggtttagctactggtggcacaatgactgaggtatacaaatatttagttgagttattagaaaagaatcaattagatgtttctcatgttgaaacatttaatttagatgaatatgttggattaaaagctgaacaccctcaaagttatcattattatatgaatgaggtattatttgatcaatatccgaacttcaataaagaaaatattcatataccaaatggttacagctctcaattagaggatgaggctgaacgttataaccaattgcttaatgatagaggtcctgttgatatacaaatattaggtataggtgaaaatggtcatattggatttaatgaacctggtactgatttacatagtgaaacgcacattgttgatttgacagagagtacgatacgtgcaaacagtcgttattttgaaagtgaatcagatgttccacaacaagctgtttcaatgggattagcaagtattttaaaggctaaacgtattattttgcttgcatttggagaaaagaaaaaagaagcgattcatcaattaatgaataaccaggttactaaagacatcccttctacaattttacatgcccatccaaatgtggaagtgtatgttgatgatgaggctgcacctcctcatattgataaagtctaa

SEQ ID NO: 1366 - DNA, 633 bp, Staphylococcus capitis
ttggaactacaattagcaattgatttattaaataaagaagaagcagcaaaattagcgaaaaaagttgaagaatatgtagatattgttgaaattggtacgccgattgttattaacgaaggtttaccatcagttcaacatttaaatgagaatattagtaatgcgaaagtattagcagatttaaaaatcatggatgcagcagattatgaagtaagccaagctgttaaatttggtgctgatgttgtaactattttaggtgtagcagaagacgcatcaattaaagctgctgttgaagaagcacataaacatggtaaagaattattagtagatatgattgcggtacaagatcttgaaacacgcgcaaaagaattagacgaaatgggcgctgattatatcgctgtacacactggttatgatttacaagctgaaggtcaatcaccattagatagtttacgtacagtgaagtcagtaattaaaaattctaaagtcgctgtagctggcggtattaaaccagatacaattaaagatattgtggctgaagaacctgatttagttatcgtaggtggaggaatcgcaaacgctgacgatcctgttgaagctgcaaaacaatgtcgcgatgcgattgaaggtagatag

SEQ ID NO: 1367 - DNA, 549 bp, Staphylococcus capitis
atgacagaatttaataactatcgtcttatacttgatgaattagatcatacgttgtcgcatgttgatgatacgtcgtatgaaagatttgctaatgacgttgttggtgcggatagaatatttgtagctggtaaagggcgttctggatttgttgcaaatagttttgcaatgcgtttaaaccaactaggtgaacacgcttatgttgtaggagagtccacgactccatcaataaaagagcacgaccttttcattattatttctgggtcaggttcaacagaacacttaagattgttagctgaaaaagcgcaaaagattggcgctaaagttgtacttattacaacgcaaacagattcgccaatcggagagcttgctgaaactattatagaattaccagctggcactaaacacgatattgaaggttctaagcaaccactaggaagcttgtttgaacaagcgtcactagttttcctcgacagtgttgtattgcctttaatggaagcatttcatatcaatgaagaaacaatgcaacaaaatcatgctaatttagaatag

SEQ ID NO: 1368 - DNA, 648 bp, Staphylococcus capitis
atgaattttgacaactatatttttgattttgatggtactttagcagacacaacattatgtcacgtttatgcaactgagcaggcttttaaggaattaaatttaaagaatcctggtaaagaagaaattttaagtgcacaaagccaaccgttagaggaaggtttgagaagtttaactagtatcggtatagatgaggaaaaagttgaattattcattagggcttatcataaatattatagtcaatatgaaatacataatataaaagagtttgcgggaataagtgaaatgctccaattactacataataaaaagaaaaatatctttgtaatatcaagtaatgaaacagctgtagtaacaagacaattagattatttagggcttaatcgatttataaaagatgcactaggtttacatattaaggagttgcgaaagcctcattataaaatcttacaatccatcatacagaataatcatttaaatcaaggacgtacagtatatatcggagatacaaagcatgatgttaaaagtgcgagtttatcagatattagatcctgtgtagtgacttggggcgcgcaatctgcacatgatttacttcaagaaaatccgtattatgtcgtgaatgaaccagaggaaatttttactataatataa

SEQ ID NO: 1369 - DNA, 1356 bp, Staphylococcus capitis
atgttagaggtaattaaaaatatttatgattttggtgagcatcaacctaagcgattggctttggtatttgatcatcaacgaataacttacgatgaattgattcatgagatagataaagcaagttctcaatattctatgattaacgagggagaaaaagttggtttattaagtaatcatccgataaaaaatctgattcattatttcgctattcatagagttggaggtattccgtgcttttttagtagtaaatggaataaagttacaataaaccagctgattgaaaaatataaaattcaatggttaaagagtgaccagcacttaattaaaacagggtataataggatttctcattctattaatggtacattactgcatattggatttacttcgggaacatctggcttgcccaaggcttattatagaaatgaacattcatggttaatttcttataaagagaatgagaaattaataaagcatgattcaaaagtgattgttgctcctggccctttatcacactcactctccttatacgcatgtatatatgctttgtttacaggacgcacatttgtaggtcaaaaagagtttaatgcagaagtactcgtgaagactatacagtctatacatcagcctgcttcattgtttgtagtacccacgatgctttatcagttcattttaaaaggtttatatactgcggaaattaaaagtattttcagcagtggagcaaagctttcaaaagaacaatttagggctatcgctcaactttatccagattcgaatttaatagaattttttggcacctctgaggcaagttttattagctataatttcaatcaaacagcaccaagacaatcagtaggcaaattgtttccaaacgtggaagccaaactatttgagaaagattcaaaacatattggactactaaaagttcgaagtgaaatgacttttagtggatatgttggtgaagaacaaatttcaaatgagtggattgagacaggagattatgcactaattagaaatagaaatttatatctagtaggaaggaaaagtgaccgtctaattataggtggcgttaacgtatatcctagtgagatagaacagcgcgtgatgaatattgaaggtgtcagtgaagcaataataataggtgagccacatcataagtttggagaaatagcagttcttttgtatacaggaataaaagaattaaaatattcagaagtaaaaacgtgtttaaagaatcatctatcaagatatgaggttccgtctaaaattaggaaaattaacggtatgcattacactgaatctggaaaaattgctagaggaaaaatgaaaactaaatatttgaatggagagatttaa

SEQ ID NO: 1370 - DNA, 1140 bp, Staphylococcus capitis
atgaagcaaccagtcattgtagcagctaaacgaattgcatttggcaagtatggtggatatttaaagcatttggaaccagaacaactactagaacctttattcaattactttcaagcagaatatcctggagcgatggaatacttggaagacgttattatcggcaacacagttggcaatggtggtaacatcgcaaggaaatctttgctagaagcaggccttaaaaactccgttccaggcgttactattgatcgacagtgtggctcaggactagaaactattatacaagcttgtagaatgatacaaagcggcgctggaaatgtataccttgcaggtggtgttgagagtataagtagagcaccttggaaattaaaacgacctcaatcagtgtatgaaacagaatttcctcaattcttcgaaagagcgccatttgctccaaaaggtcaagatccttcaatgatagaagctgctgaaaatgtggcgcgaaaatacggtatttcgcgagtaatgcaagataagttcgcttatagaagccatcaattgactcaagatcactatgataatgggaatatttcccgagaaatattgcctattaaagttaaaggagtatcgtttgatagagatgaaagtgttaagtctcgtttaactactgagaaattaagtagatttaaaccattattaaatcaaggttcaattacagttggtaacagttgtatgaaaaatgatggtgccgtattaatccttgtaatggaagagaaactcgctaaaaacttaggttttgctaagggattaaaatttattgaaagttgtacagttggggttgatcctaattatttaggtataggtcctgtgccagcagttagaaagctgttaaaaagagctaaagttaaaatagaagatattgatactatagaattaaatgaagcatttagttcacaggttttagcttgtcagaaggaacttagtatttctgatgataagctaaatcgatggggcggcgcaatcgcttctggtcacccatatggagcaagtggcgctgctctagttacacgattatttcatatgaatgtgcaaaataaatccattgcaacaatgggaatcggtggagggctcggtaatgcagtattatttgagagatggtga

SEQ ID NO: 1371 - DNA, 366 bp, Staphylococcus capitis
atgcagtattatttgagagatggtgaagaacatcaaagagtcatttttaaagaagaagacgtgcgtaagtattgctatttattaaataaagatttcaattatcaagtccctactttaatgtgtgcaaagctttggtcggaatttaaaagttataaaaaatttgtaaagaaacctttaattttaaaggagacatatgttaaagaatttaataaattagtaacggatgaagtatatgacgcgactttaagcaaaatttcagttaaaaatataaaagattttatcaagcacacctatagtttgaaaataaataaaaataaccataaatgtatatatatagaacaagtttttattgaggtaaagcgttaa

SEQ ID NO: 1372 - DNA, 261 bp, Staphylococcus capitis
atgaagatttcaatcgagattattaaagaatacttagtattagtgaatgatatgaatccaatacacaatgacattgtaccaggtcaattagtatgtgaaatcgccttcgaagaactcaatatacaatgggagaattataaaataaaataccttaaacctattgatatacatgacgatatacgattttttgttgaagacgaaacaattataaaagtttcggatgatttatacggggtaaaactaatggtattaaaaaattag

SEQ ID NO: 1373 - DNA, 1383 bp, Staphylococcus capitis
gtggtagacggtcaagaagcgaaaaaaaccgttgtagctaccggtattggtaacgccatggaatttgactttggggtttatgcttatacaactgcatacataggagcgaatttcttctctccagtacataatcctcaaatccaacaaatttttacatttgcagcattagcaatcgcgttcttattaagacctattggcggtatcgtatttggtatcatcggtgacaaatatggacgtaaagttgtattaactacaacaattattttaatggcattatctacacttactattgggttactacccaattacaatacaataggaatatgggcgccaatactgttattacttgctagggtgctacaaggcttttctacaggtggggaatacgcaggtgcaatgacttacgttgctgaatcatcaccggataaacgtcgtaatagtttaggtagtggccttgaaattggtacactttcaggttatattgcggcttcaattatgattgcattattaagtttcttcttaactcatgatcagatgcaagcatggggttggagaattccatttattctaggtttattccttggattatttggtctttatttacgtcgtagactggaagagtctcctgtttatgaaaatgatgtagcttccactcctcaaagagataacatagggttcttcactattattcgatattattataaagatattctcgtttgcttcgtagcggtagtattctttaatgtaacgaactattctgtaacagcttatctaccaacgtatcttggtcaaattgttaaactggatgccacgactacaagtgtacttattacatgtgtaatggcagttatgattccattagcactaatgtttggtaaaatggccgataaaattggtgagaaaaaggtattcttgattggtacaggaggacttactttattaagtattgtcgcatacagtttactaagtactaaatcattaccattaataattatcggtgtcttcatattaggattcttcctttcaacatatgaagcaacaatgccaggatctttaccaacaatgttctatacacatatcagatatcgtacattatcagtaacatttaacatatctgtttctttatttggtggtactacgcctttaattgcatcatggttagtagaatcaactggaaatgctttagctccagcatattatttaactgcaattagtttaattggattcttagttattactttatttcatgcaagtacagcaagtaagtcacttaaaggttcttatccaaatgttgataatgaagaagatagaaaatactatgaagaaaaccctaaaaaagctttatggtgggttaaagagagaaaagaaaaagaaaacttctaa

SEQ ID NO: 1374 - DNA, 228 bp, Staphylococcus capitis
atggctccttcaggtgaaggcgcaaacttagctatgttagatgccgcggaattagcagaaagcattgcaaaaatgaatggagatttaaatagcgttattaaagattatgaagaaaccatgttccctagaagcgaagaagaagctagagaatcacatgaattattggatatatgtctaggtgaggacagtccacatcgtctagttgaactctttaaaggtaatatttaa

SEQ ID NO: 1375 - DNA, 870 bp, Staphylococcus capitis
atgaatattgaaaatcaaaacgtggggatgactgaacctatcacaatcattggcggaggcatcggaggtttgacacttgccagagtattgtatgtcaatggtataccatctaaggtttatgaaattgatacatctccaaatgcacgtacgcaaggtggtcaacttgatatacatgaacataatgggcaagttgcacttaaaaaagctcatctgatggatgaatttcactctattattcatgaaggcgcagacgcagcacgtatatttaattctaatggggaattacttcacgatgcgcctgctgacgaaaataatggtagacctgaagttttacgtggagatttaagacaaattttaattgattcattacctaacgaaacaatagagtggaataaaaaagtggatcgtgtagaagaattggaaaaaggacaataccaagtgttctttagagatgatacatctttaactactagcaaattagtaggtgcagacggcgcatggtctaaagtacgtaaagttttaactgatattacacctcattatactggttacacatttatagaaacataccttcatgacgttgataaccaatatcctgaaactgcaaaagttgtaggacaaggccaaatgtttgcattatctccaggaaaaggtatcgtagcacatcgtgaatatgggggtattattcatacttatgtacagatgcaatgctcttcagagtggattgacaacattgatttctcaaataaaaaggaagctacacaaactatagctaatgaatttaaaggttggcctaatgaaattactgcattgattatggaagctgaatcctcaattactccaagaaaaattaatgcattgcctgattaa

SEQ ID NO: 1376 - DNA, 831 bp, Staphylococcus capitis
atggctttaaagaaagtattaacaattgcagggtctgatacgagtgcgggagctggtatgcaagcagaccttaaaacattccaagaattagatacgtatggaatggtggctttgacatctatcgttacgatggataaagaaacgtggtctcatgatgtaacacctctagatatgaatgtctttgaaaagcaacttgaaactgcaatttctattggccctgacgcaatcaagacgggtatgttaggtactcaagaaatcattaaacgtgcaggcgaagtttatgaagaatcaggtgcagattacttcgtcgtagacccagtcatggtttgtaaaggtgaagacgaagtacttaacccaggaaatactgacgcaatgattaaatatttactacctaaagcaacagtagtaacgccaaacttatttgaagctggccaactttcaggtttaggaaaattaacttcaatcgaagatatgaaaaaagctgctaaaatcatttatgatgcaggtacacctcacgtgattatcaaaggtggtaaagcgctagatcaagataaatcttatgatttatactacgatggcgataaattctatcagttaacaacagatatgttccaacaaagttataaccacggtgcaggttgtacgttcgcagctgcgacaactgcttacctagctaacggtaaatctccaagagaagcagtcatcgctgctaaagctttcgtagcatctgcaatcaaaaacggttggaaaatgaatgaatttgtaggacctgttgatcatggtgcatatcatcgcatcgaacacatcgaagtcgaagtaacagaagtttaa

SEQ ID NO: 1377 - DNA, 984 bp, Staphylococcus capitis
atgtgtactggtttttcatttttcacaaaatcaaaacatcattatttagctagaacaatggatttcgcattcgaatttaacggcatacctactgtggtacctcgccactatcggtatcaatttgacttagaatcagaattacgacttcaatacggtttcgtaggcactaatttaaaagtcggaagatatcgctttggtgatggcatcaatgaacatggagtggcaatttcaaaccattatttcactggtgaagcttcatatagcaaccatagacggtatggctatttcaatttagcacctgaagaatttatagtgtgggtgcttggcttcgttaaaagtatagaagaactcaaacaaaaagtgaaaaacatcaacattatgaatgaaaaaaatactacattaaatatagttccacccctgcattttataatcactgatacgtcaggacatacagttgcagtggaaccccataacggactacttatcgttaaagacaaccacgttaaggtattaaccaacgcacctaaacttgagtggcatattcaaaatttaagaaattatgctttccttcaacctgagaaatcaacaaatcagcttgttggcaaagtattagtgcgttccatgggatgtgaagctggcactaatggtctaccaggtggctatacatctacagaacgattcgtgcgtgccacttatttaagacatcatttatcatcttctcataatgaagatatcaaccttatgaattgttttaaaatcctagactctgtcagtataccgcaaggagctgtgctagatgctggagaaacacattacacacaatatcaattagttatggagagtaaagataaagcttattacattaagccatactttagtaatcaacttttcaaagttcaattaaatgaagaattactatcaaaggacgatatgacatttcttcctattaacaatgaattacatatttctcaattaaatgcgtaa

SEQ ID NO: 1378 - DNA, 651 bp, Staphylococcus capitis
atgaaatggtcagaagtttttcatgatataacgtcaaaacatgactttcaggagatgcacgattttctagaaaaagaatatacaattaaaattgtgtacccagatagaaagaatatttaccaagcatttgatttaacaccgtttgacaatataaaggtagttatactggggcaagatccataccatggacctaaccaagcacatggtttagcattttcagtgcaacctaatgctaaatttccaccttcattgcgaaatatgtaccaagaactagaagatgatattggttgtcatagggtatcaccacatttacaagattgggctagagaaggtgtgcttttattaaatactgtgctgacagtgagacaaggagaagcacattcacatagagatatcggatgggaaacatttactgatgaagtgattgaagcggtttctaaacatcgtgaaaatgttgtttttatattatggggcaaacctgctcaacaaaaagagaaactcattgatacatctaaacatttagttataaaatctcctcatcctagtccattatctgcttttagaggtttctttggttctaagccttattcaagaacgaatgaatatctaaaagctaaaggaaaagaccctattaattggtgcgaaggttaa

SEQ ID NO: 1379 - DNA, 363 bp, Staphylococcus capitis
atgcgcaataataaaatgattcatttgattgaacaagaattagtgcaagcggatgaagctcatactgaggctgaatttgaaaagcatatgtatgctatacatacattaacttctctatacacttctagtgataatcaaacttcggttcaagataggcatgacgtatccaatgctcaagctttatcttcgcaacgcaaagaatcgaatcaatcaaatcataataaaaatcaagtgtcagctgctgaaattgaagcaatgggaggtaaagtacctcaatcaatgaaaaatgaacatacgtctcattcaaatttaatgactacagatgacaatataggaaatggcgagtctattttcgacttttaa

SEQ ID NO: 1380 - DNA, 372 bp, Staphylococcus capitis
atgatgaaattatttataattctaggtgcactcaatacgatgatggctgtcggtacaggtgcttttggtgcacatggtttagaaaacaaattatctgaaaaatacatgtctgtttgggaaaaagcgacaatgtatcaaatgtatcatggtctcggactattaattattggagtaattagcggtactactgctattaatgttaattgggcaggttggttacttttcttcgggatcgtcttcttcagcggttctttatatatcttagcacttacacaaattcgaattttaggtgctattacaccaattggcggcgtgttatttatagcaggttggttaatgttaattatcgctacatttaaatatgcaggctaa

SEQ ID NO: 1381 - DNA, 1473 bp, Staphylococcus capitis
atggaaaataaaaataataaagtagatagaggtgaccttaagcaaaacctttctgaaaagttcgtatgggcaattgcttacggctcatgtatcggttggggtgcttttattttaccaggggattggattaaacaatcaggacctattgcatcctctataggcatcgtcattggtgcgttattaatgattttaatcgccgttagttatggggcgttagttgagaaattcccggtttcagggggagcatttgcttttagtttcttaagtttcggtagatatgtaagtttcttttcatcttggtttttaacatttggctatgtctgcgtcgtagcactaaatgctacagcgtttagtttattagttaagtttctattacccaatgttttaaataatggaaagttatatacagttgcaggttgggatgtctacataacggagattatcattgcaacagtactattattagtctttatgattatctcaattagaggtgcgagtgtatctggatcacttcaatattatttctgtattgcaatggttgtcgttgtcttacttatgttctttggttcattctttggtagtaactttgacttaagtaatttacaacctttagctaattcagataaaggttggtttagatctattatcatgattgtggctatcgcaccatgggcttatgtaggtttcgataacattccgcaaaccgcagaagaatttaatttcgcaccaaataaaacatttaaattaattgtttatagcttactagcagcagcactaacatatgttgtcatgttactttatactggatggttaggcacacattctaaaagtctcaacggtaacttatggttaacaggtgcagttacgcaaggagcatttggttacattggtcttggtgtattagctattgctatcgcaatgggtatctttacaggactcaacggtttcttgatgagttcaagtcgtcttttattctctatgggacgttctggtattatgcctacagtatttagtaaattgcatagtaaatataaaacaccatatgttgctattatcttcttagtgggtgtagcattagtagcgccttggttaggacgtaatgcattaaattggattgttaacatgtcgtcaacaggtgtctctattgcatacttcattacttgtttatcagcagcaaaactatttagttatgataaacaaagcaacacatacgcgcctatttataagacgtttgcgattattggttcaatcgtatcatttatcttcttaggattactcttaattccaggatcgcctgcatcattgccaggaccttcttacattgctttagcaatttggctagtgataggtcttatcttcttctttatccgctatcctaagcttaagaagatggataatgacgaattaagtcgtttaattcttaaccgttctgaaaatgaagtcgaagacatggttgatgaacctaagaaataa

SEQ ID NO: 1382 - DNA, 453 bp, Staphylococcus capitis
atgttttggatattgaattttgtatttagttttctcgcctcactcttcttctgtgtcatatttgatgcgcctaggaaattgtatctatcatgtggatttgttggagcatgtggttggatggtctatattctattctttgatggtctacaggttcacactatctattcaagtttctttggaagtttagcattaggtttattaagccactacatggcacgccatatgaaagaaccagtcattatctttatggttacaggtattattcctttagttccaggtggacttgcttacgatgctactaaaaatttagtattacttcatttcagcagagcaattaatacgatgcttgaagtaacattgattgcaggagcaattgctttaggcttattgtttgctgaccaaatctctaaaatagttatctcaggctttgatcgtacacgaaaaaaattataa

SEQ ID NO: 1383 - DNA, 765 bp, Staphylococcus capitis
atgactattgaatcaaatgaaacagctcatgaaagtctaattaaagatgtagtcatgttagctgcccgaatattattagaatctggcgctgagggtactagagtcgaagacacaatgactcgcatcgctagaaagttaggttattcagaaagtaatagctttgtaacgaatactgttattcaatttacgttacataatgaatcatatcagcgtttatatagaattaaatcacgtgatacaaatcttataaaaatttctcaagctaatgaaatctcaagacaaattactaatggcacaattgacctagaagaagctaagaaaaaattagaacatatttatatagctaagagggacagtagtcttcccttcaaaggtatagctgcagcaattatcgcaatgagttttctttatttacaaggaggacgtctcattgatgtgattacagcgattttagctgggagttttggttatctagtagttgaaatacttgatcgcaaattacatgcacaatttataccagaatttttaggttcattagtgattggtattattgcagtcattggacattcgcttgtaccaagtgtcgatttagcaacaatcatcatcgcagcagtcatgccgattgtaccaggagtattaattactaatgcgattcaagatttatttggtgggcatatgttgatgtttactactaaatctttagaggcgttagtgacttcattcggtattggtgcaggcgttagctcaattttaattttagtttag

SEQ ID NO: 1384 - DNA, 750 bp, Staphylococcus capitis
atgagtgaagcagccgaaactttagatggttggtatagtttacatttgttttatgcaatggattggactacatttcgtttagttccagaagacgagcgtgaggcaatgatttctgaattaaaatcatttgttgaagataaatctaaagcaagagagtcacacacaggtgatcaagcaatttataatattacaggccaaaaagcagacctactattatggttcttacgtcctgaaatgaaagacttaaataaaattgaaaatgattttaataaattacgtattgcggactacttaattcctacttattcttacgtttcagtgattgaattaagtaattacttagccggcaaatctgacgaagacccgtatgaaaatccacatgtaaaagctagattgtatcctgaacttcctcattctgaatacatctgcttctatcctatggataaacgtcgtaatgaaacttataactggtatatgttacctatagaagaacgtaagaatttaatgtataaccacggcatgattggacgtaaatatgccggtaaaatcaaacaatttatcactggttctgttggttttgacgattttgaatggggtgtgacattattctcagacgatgtattacaatttaagaaaattgtatacgaaatgcgttttgacgaaactacagcgcgttatggcgattttggtagtttctatgtaggtcatatcttaaatacagacgatttcaatgaattctttaatatttaa

SEQ ID NO: 1385 - DNA, 990 bp, Staphylococcus capitis
atggctgatttattaaatgtattacaagaaaaattatctggaaaaaatgtaaaaattgtattacctgaaggggaagacgaaagagttttaacggcagcaacgcaattacaagagagtgattatgtttcacccatcgtgttaggtaatgaagaaaaaattaaatctttagcagaagaaaaatctctcaatttaactaatattgaaattattgatccttcatcaagtgatttaaaacctgaattagtagatgaatttgtagagcgtagaaaaggtaaagcgactaaagaacaagctgaagaaatgttagataatgttaattatttcggtacaatgcttgtttacactggtaaagccgcaggtttagtaagcggtgctgcacattcaactggcgatacagtacgtccagcattacaaattattaaaactaaaccaggtgtatctaagacttctggtatattctttatgattaaagatgacgagcaatatatcttcggcgactgtgccatcaaccctgaattagatgctcaaggattagctgaaattgctgtagaaagtgctaagtctgcactaagctttggtatggaaccaaaagtagcaatgttaagcttctctacaaagggctctgctaaatcagacgacgtgactaaagttcaagaagcattaaaattagctcaagaaaaagttcaatctgataatattgaaaatgttgtgattgatggggaattccaatttgatgctgcgattgtccctagtgtagctgagaaaaaagcgcctggcgctaaaattcaaggagacgctaatgtgtttatcttcccaagtcttgaagcaggtaacattggctataaaattgcacaacgtttaggtggttatgatgcagttggtcctgttcttcaaggtctaaattcgcctgttaatgacttatcacgtggatgctcaactgaagatgtttataacttatctattattactgcagctcaatcactacaataa

SEQ ID NO: 1386 - DNA, 768 bp, Staphylococcus capitis
atgcaatcctttgcatttgacgatacattctctgaaagtgttgggaaagacttatcatgtaatgtagtaagaacttggattcaccaacatacagttatccttggtatacacgattcaagacttccatttttaagtgatggcatacgttatttaacaaatgaagtaggctataatgccattgtgagaaattcaggtggacttggcgtagtattggaccaaggtgtgcttaatatttctttaatatttaaaggacaaactgaaacaactatagatgaagcttttacagtaatgtatctattgatatgtaagatgtttgaagacgaagatgtagatattcacacacatgaaattgaacaatcttattgtcctggtaaattcgatttaagtattgatggcaagaaatttgctggtatttctcaaagacgtgtacgtggaggtatagcggttcaaatctatctttgtgtagaaggatcgggttctaagcgtgctgctatgatgagagacttttatcaacacgcactcaaaggagaaacaaccaagtttcgtttccctaatattgatcccgaatctatggcttcattagagacgttactcaataaagacattaaagttcaagatgtaatgtttttacttttatatgcactgaaagatttaggtgctcaattaaatatggatccagttactgaagatgaatggcaacgatatgaaggttattttgaaaaaatgatcgaacgaaatgcaaaaatgcatcaaaaattagatttgtaa

SEQ ID NO: 1387 - DNA, 921 bp, Staphylococcus capitis
atgacgagacaaggatacggggagtctaccggaaagattattctaataggtgaacacgcagtaacatttggtcagccagcaatcgccatcccatttaatgctagtaaaataaaaatattaattgaaagtatggaggaaggtaactattcttctattacaagtgatgtatatgatggcatgttatatgatgcgcctgaacatctaaagtctatcattaatcgttttatagaaagaagtggtgtaaaagaaccactttctgtaaaaatccaaacgaacttacctccttcaagaggactaggttcaagtgcagccgtagctgttgcatttgttagagctagttatgacttcatgggagaacctttagatgatgacacattaatcaaggaagcaaattgggcagaacgtattgcacatggtaaaccaagtgggattgatacacaaactatagtttctaataaacctgtatggttcaaacaagggtacgttgaaaaccttaaatcacttcaacttgatggttatatgatagttatagacactggagtcaaaggatcgactaaacaggcagtagaagatgttcatagattgtgtgaagaccctggatacttgagccatattgaacatattggatctcttgttcatgaagcaagtgaatctattgaaaaacatgactttaatcatcttgcagatatatttaatcaatgccaaaaagacttaagacacttaaccgttagccatgataaaatagaaagactattaaaaataggtgaagaacatggtgctatcgctggtaagcttactggaggaggacgtggcggtagcatgcttcttcttgcgcaagatttacaaactgccaaaaagatcgtagcagctgttgaaaaagcaggcgcagcacatacgtggattgaacatttaggagggtaa

SEQ ID NO: 1388 - DNA, 984 bp, Staphylococcus capitis
ttggtgaaaagtggcaaagcacgtgcgcacacaaatattgcgttaatcaaatactggggtaaagctgatgaatcatatattattccgatgaataatagtttatctgtcacgctagaacgtttttatactgaaacacaagtaacgtttgacgcgtcactaactgaagaccaacttattctaaacggggaagaagttgatgctaaagaaacaactaaaatccaaaaatatatggatatcgtgagagatgttgctgccacagatttacatgctaaaattgaaagcaataattttgttcctacagcggctggattagcttcatcggctagtgcatacgctgcattagcagctgcttgtaatgaagcacttcaattaggtttatcaagcaaggatttatctagattagcacgtcgaggttctggttcagcttcaagaagtatctacggaggctttgctgaatgggaaaaaggtcaggatgatgcgacttcttatgctcatgctattgatgctaatgattgggaaaaagatctttctatgatttttgtagtaatcaataaccaatcgaaaaaagtctcaagtcgttcagggatgtctttaacaagagaaacatctcgtttctatcaatattggcttgaccatgttgatcaagatttagctgagacaaaagaagcaataaaaaataaagatttcaaacatttaggtgaagttatagaagcaaatggtttaagaatgcatgctacaaatttaggtgcacaaccgccatttacatatttggttcaagaaagttacgatgcgatggctgtcgtccatcagtgtcgtgaagctggcttgcctagttatttcaccatggacgcaggaccaaatgttaaagtgttagttgaaaagaaaaataaacaagctgtcgttgaacaatttttaaaagaatttgatgaatcgcaaattattgtaagtgatattattagtactggcgttgaaattattaagtaa

SEQ ID NO: 1389 - DNA, 1077 bp, Staphylococcus capitis
atgatacaggtcaaagcacccggaaaactttatgtcgcaggtgaatatgctgtaacagaaccaggctataaatctgtccttattgcagtagacagatttgttacagcaacaatagaagcctctaatgaagttgagggaagtattcattccaaaacattacattacgaacctgtaaaatttgatcgtaatgaagataaaattaaaatatctgatgtgcaagctgctaagcaattgaagtatgtagttactgctatcgaggtatttgaacaatatgcacgcagttgcaatatcaaacttaaacatttccacttaacgattgatagtaatttagctgatgattctggccagaagtatggcttaggatcaagtgctgctgttttagtttcagttgttaaagtattgaatgagttttatgacatgcaactttcgaatttgtatatctataaattagcagttatagctaatatgaaattacaaagtttgagttcttgtggagatatagcagtgagtgtatacagcggttggcttgcttatagtacattcgatcatgattgggttaagcaacagatggaagaaacatctgtaaatgacgtattagaaaaaaactggccaggacttcatattgaaccattacaggcaccagaaaatatggaagttttaattggatggacaggttctcctgcatcatcaccacatttggttagtgaagtaaaacgtctaaaatctgacccaagtttctacggtgaatttttagatcgatcacatgattgtgtagaaagtttaattcaagcgtttaagactaataatattaaaggcgttcaaaagatgatacgacaaaatcgtcgtgttattcaatcaatggatgttgaagcaacagttgatatagaaacagataaacttaagaaattatgtgacattggtgagaaacacggtggcgcatctaaaacatctggcgctggtggcggtgattgtggtataacaattattaacactattattgataaacagttaatttatgatgaatggatagcgcaagggattaaaccattaaaatttaggatttatcatggacagtaa

SEQ ID NO: 1390 - DNA, 342 bp, Staphylococcus capitis
atgcagaataaatttctgatttgcgatgaatgtcaggcagttaatattaaaacgttgaaaaagaaattagaaaaattagatcctgaagcggaaattgagattggctgtcagtcatactgtggtccgggaagacgtaagacctttgcattcgttaataatcgcccacttgctgctttaactgaagaagagttaatggagaaggtcattaaacaattgaagaaaccacgtgatcctgaggaagaagagcgtttaagaaaacgtaatgaagaacgcaaacgccgtaaagaagagcaagaccgcaaacttaaagagaaactagaaaaacgtaaagcggctaaatag

SEQ ID NO: 1391 - DNA, 1332 bp, Staphylococcus capitis
atgacatcttatgaccttatcatcattggatttggtaaagcaggtaaaactttagcatctttcgcagccggacaaggacagcacgtcgcacttatagaacaatcatctaaaatgtatggcggtacatgtataaatattggatgtattccttctaaaacattagtgcatgacggtatcgaaggagcatctttcgatgaagcattttcaagaaaaaatgaagtagtgaatgcattaaataaaaagaattataacaatttagcatcaaaagacaatatagatatattagattataaagcgtcttttgtttctaataatgaaattgcgttattggatcatgcaggtaatgtaaaagataaaatcacagggaacaaaatcgtcattaatactggagctcaagcaaatataccaaaaattgagggtataaaaactactaaaaatatatatgattcaactggattattaaatattaatttccaacctaaagacttagtcattgtgggtggtggatatattgcactcgaatttgcttcaatgtttagtaatttaggaacacatgtgaccatattagaacatggtgatgtgataatgcctcgtgaggaccgagaggtggctgacctagcacttcaagatttgcaagacaaagggatttcagttcatacaaacgttgaaacaactgcattttctaatgaaggcgactcaacaatcgttcataccaatcatggtaaattcaaagctgatgcagtgttactagcaactggacgtaaacctaacatcgatggactaggtctagagaatactgacgtaaaaatcggtcaacgtggtgaaatacaggtgaattcccaacttcaaacttcagttaaacatatctatgcagctggggatgttaaaggtggcttacaattcacttacatttctcttgatgactttagaattcttcgttcccaactctttggagatggatcgcgaacaactgagaatagaggcaacattccttatacagtatttatcgatccacctctatcaagagttggtctcactgctgctgaagcagaagcacaaggttttaatttcctggaaaataaaatctacgtaaatacaatacctcgacataaaattaataacgattcaagaggtattttcaaagttgtactaaataaagataatggcgaaatattaggtgcaagtttatatggaaaagaatcagaagaattgattaatctcatcaaattagcgatagatcagcacatcccatacacagtactaagtgaaaatatctatacacacccaactatggccgaatcattcaacgatttgtttttagaaccactttga

SEQ ID NO: 1392 - DNA, 432 bp, Staphylococcus capitis
atgaatttagaattcaacattgcggtacatgtgttaagctttcttactaagcacaaaaacgaaaaatttaatagtaaggaattggcggaattaacttgtcttaatcccgttcagttaagacgtgtcgtggctaacttaagcgaccagcaacttatcactacagtacgtggtaaagatggcggatacaaagctaatcaatatacctctacagtgaatttagctgagttatatcaacaattcgttctcactaaagataataatcaacgcgtttacactggagaccgcaacagtcactgtgacatttctaaacatattgcacagataatggctcgatatcgtgatgaagaaattcaactcattttaaatttctatcgtaacaaaacaattcaagatgtcttaaacgacattttgcaggaggtaaaccaaatatga

SEQ ID NO: 1393 - DNA, 939 bp, Staphylococcus capitis
atggctaataaagtacaattaggtaaatcagatgttaaagtcttcccaattgcacttggaactaatgcagtaggtggacataatttatatccgaatttagatgaagaacaaggtaaagacgttgtacgtaaagcaattgataatggtatcactttattagatacagcttatatttatggacctgaacgttctgaagaactcgttggacaagttgtacaagaatatccacgtgaacaagtacaaatcgcaactaaagggtcacatgttattaaagataatgatgaagtggtacaaaataatgacccagaatatctaaagcaacaagttgagaatagtttaaaacgtctccaagtagattatattgatttatattatattcattttcctgatgaagagacgccaaaagataaagctgttgcagcgttaaaagaattaaaagatgaaggtaaaataaaagcaataggtgtgtctaacttctcattagaacaattgaaagaagcaaataaagatggatatgtcgatgtcgtacaattagaatataatttattacatcgtgaaaatgaagaagtaatggcatatgcagcggaaaataatattacatttgtaccatacttcccattagcttctggaattttagcaggtaaatatgatgaagaccaaacatttgacgatcatcgtgcaacacgtcgtgatttccaacctgaagtgttcaatgataatgtacgccgtgttaaggaattaacggatatagcggaagcgcacaacacatcaattgctaatgtcgtactagcattctacttaacacgtccatcattagacgttgtaattccaggtgctaaacgcgctgaacaagttgtagaaaatattgatgctgcaaatattgaattaactcaagatgaaattaataaaattgatcaattattcccgattgaaaattaa

SEQ ID NO: 1394 - DNA, 540 bp, Staphylococcus capitis
atgattacggtgttgtttggtgggagccgtcctgaagggaatacggcagaattaacccgatatactttagatggtttagattacacttgggtggatgtcactcaatatcaatttaatcctgttcgtgatgtgagacatgaagattactatattgaatcgtatgaagacgattataaacaacttattgatttagtattagagagtgatacagtgatatttgcgtcgccagtatattggtatagtatttcggcttctttgaaggcatttatagatcattggtctgagactatggaagacaaagattatcatgatttcaaatctaagatggctataaaggattttcgattaattttagtaggtggcgattgtcctaaagtcaaagctaaaccatgtattactcagatgaaatatagtgtagagtttttgggcggagagttgaaaggttatattattggaactgctgaaaagcctggagatattaaaaaagatatatatgctttagatcgtgcacgagaatggaatgaagaactaggtaaataa

SEQ ID NO: 1395 - DNA, 477 bp, Staphylococcus capitis
atgtatagagtgagacaagcaactgagaatgatgtagtagctattagagatgttgctactaaagcttggtataatacatatttaaatatttatgcagcttctacagtcaatgaattgttggctgcttcatataatgaaactcatttgaagaagagattaaaagaacaactctttttagtggcggaagaagatgatgagattataggttttgcaaatttcatttatggcgaggaattatatctcgctgcacattatgtgagaccacaatctcaacataaaggttatggtacaagtttacttaaagaaggtttaaatcaatttaaagatagatatgataccgtttatttagaagtagataataagaataaccatggtattgattattataaggaaaatggctttgaaatcgttcgttcttatcaacctgaaatgtatggagagacgatggacttagctctaatgaaaaagaccttttaa

SEQ ID NO: 1396 - DNA, 1299 bp, Staphylococcus capitis
atggcactatcatcatatgcaacaagtaaactaactgaagaaaaggtatttaaagatcctattcatcgatacatacatgttaaagatcagttgatttgggatttaattaaaactaaagaatttcaacgtttaagacgtatcaaacaacttggtaccttatatttatcgtttcatactgcagaacatagtcgctttgggcattcattaggtgtatatgaaatcgttcgtcgaatgattgacgagtcttttataggtagagaggcctgggataatacagaccgtccacttgcactgtgcgcagcgttgctacatgatttaggccatggccctttctctcatagttttgaaaagatatttaatactgatcatgaagcatttactcaagctataatcactgaagacacggaagtcaatgaagtgcttagtcgcgtttctgaaacattcccacaagaagttgcagatgttattaataaaacacatgataataaactaattatatcaatgatatcttctcaaattgatgctgatcgtatggactacttacaacgtgatgcgtatttcacaggtgtgacttatggttcgtttgatatggaacgtattttaagattaatgcgtccttcaaaagatgaagtattgattaaagagagtggtatgcacgcggttgagaattttattatgagtcgttaccaaatgtattggcaaatctattttcaccctgtaagtcgtgggggagaagttttactaaataattgtttacaacgcgcgaagcaactttatagtgaaggctatgaatttagaatgtatccccatgactttgtaccattcttcgaagggacaatgacaattgaacagtatgttgagttagatgaagcggttgtactatattacttgaaaaaatggattaatgaagatgatcctatactcagtgacttgtcacgtcgttttataaatagagatttattcaaatatatcccgtttgatggttcaataattactatttcagaattacaagaattatttgaagcaggtggtatcaaccctgactattactttgtaagtgaagctttctcagatttaccttatgattacgatcgccctggatctaatcgtaaaccgatccatttattaagaagtaatggttctattacagaaataagtcatcaatctatggtaattaatagtattactggtattaatcgtgaagaccataaattatattatcctaaggaactgattctaaatatagataatcttgaaattaaaggtgctattattaatttattgaatgaacttaattag

SEQ ID NO: 1397 - DNA, 507 bp, Staphylococcus capitis
ttggctgagaaaaaaggttttaattttaatattataaaaaatgacccactagatggacataaaggaacgaatatcgggtcaattagtttagataatattgcacctgtttttatagatgttgaaaataaagaagcttttattgatattggcgggatgcatgcacgtgcaaaagttgaaaaaggtgttaaatggattaatgataaagagcaagttgaaggcgacgaagctaaagaatattggttgtgttgggtgactacagaacgtagtgaacaaggaccgtactatgcaggtgtcacagcttgttacttattagtgaatagaagtatccgtcgtggctataagagtatgcctgaacatgtaaatatgatggataaatctatgaaacatcaatttattatcgatcaaattggtgatgaaaataagaaaatcttaaaaaaattcttaaaagatcataacgaagacatgtggaataattctagcgacgaattatatcaagcatttgaataa

SEQ ID NO: 1398 - DNA, 399 bp, Staphylococcus capitis
atgaatagagatgatttaaaatctacaatagaaaagctttatactgatattttaatcaatcttgatgttaataaaattgatacgtactttgccccttcttatgttcaaaccacagatcatcaaacgtctgatattaatgagttcacagatcatcttaagaaactgaaagaagttgtggctcgtctttctattgaagaatttaaaaccatgctcatagatgagtctcaaaacacgatttttttacgctatgatgttcatgtagaaaagaaaaatggagataaaggtaaagtagaagtttatgcagaatttgtctttaatgaagatggtaaagtcatcacatgcaaagaattaacattgccttataatgaagaacttaacggaattggcagtgtgaaataa

SEQ ID NO: 1399 - DNA, 1188 bp, Staphylococcus capitis
atggcaaatgcaatttacttagattgtcatgcaggcatagccggtgacatgctattgtcagctttagtcgatttaggggctgacccacataaaattgaaagcgaacttaaaacgttaccattagataattttgaacttcattttcagaagaaggtaaaacaaggcatacatgcaatgaccttaaacattgatttcgatgaaccacaccatcaccgtcacgcgtcagatatctttaaaatgattgatgacagcgcactttcaccacgtgttaaagctcgaagtaaaagtatatttgaagtgattggtcacgcagaagctaaaattcatggtatgtcatttaaaaacgtccactttcatgaagtgggggcaatggactctattatcgatattattggtggatgtattgctttagaattattaaatattgacgaattatattgctcgcctattcctacaggtaatggcaaaatcaatatcgcccatggtatctaccccgtaccagcacctgccactgctgagatacttaaagacgttccattagctaaatttgatgttcaaagtgagttaacgacgccaactggtgcggcctttgcgaaaagtttagtatcatcatttggcccattcccatctgctacgatgaaagaaattgggtatggcgcagggagtaaagactttgacttccctaatgtgttaagagttattcaatttgaaactcaatcaaaaaagcaagatgacgtccaagttatcgaatgccaaattgatgatatgtcacctgaatcattaggacacttcatggatatagcactcgaacatggtgcactagatatttactacactccaatatttatgaaaaaaggacgtccaagtacgcaattaaccttaatctgtaaaactgagaacgcagctaaatttgaaactttaatcttacaagaaacatcttctctcggagttcgtagttacgcagttcgtagaaatatactagatcgagaatttagagacattgataccgactacgggaatatttctgtgaaattcgctttgcaagagggtgaaattttaaaaatgaaacccgaatatgaagatgtaaaacaagttgctaaaagatttgaaagaccatttcatgtcattcataatgaaattatagaagctttgtatcacacatatcaaattggtgaagaattaaaataa

SEQ ID NO: 1400 - DNA, 759 bp, Staphylococcus capitis
atgagtaaagatccaaactttatagttgacttacttgaaggtgtaaaatcaaatcaaatttctatagatgaagctaaagcccaactcactcactatgacgaattgggctttgctaaaattgatttacatcgagcaaagcgacaaggctttcccgaagtcatcttcggtgaaggtaaaactaaagaacaaattaatcaaattattgaaagccttactcatcacgacaatgtgattttagtgacgcgtattgatgaaacaaaggcaaagtttgtactcgaacatcacccctatcttcaatatcactcagtagctaatattgtgagtactccgatagaagaaattaaaaaatcacaaaattatatttctatcctttgtgctggaacctcggacttagcagtagccgaagaagctgctttaactgcggaagtaatgggaattcaagttaaacgcttctatgacgttggtgtgtctggcattcatcgactatttaatcacatccatgtgatacgccaaggtaaggtatccgtggtcattgctggaatggaaggagccttggcaagtgttgtaggaggacttgtcgatcatcccatctatgccgtccctaccagcgttggctatggtgcaaatttagacggcgtcactacactactttccatgattaacgcatgtgcacctggtaccagtgtactcaatattgataatggctttggtggaggatataacgctggaatgatagtgaagatgatagaaaataactag

SEQ ID NO: 1401 - DNA, 837 bp, Staphylococcus capitis
atgactgaattattaaataaagaaatgaaattaaatcacttacttaaagaaatgcaaagtgttgtcattgcatattcaggtggtgtagatagcagtttagtacttaaaaaagcgattgatgttttaggtgttaaaaatgttaaacctgtggttgtaaaatcagaacttttcagaaacgaagaatttaaccaagcgattgaattaggtcgaagcctagttgtagaagtattagagactgaaatggctgaacttgaggacgataatatcgttaagaatacacccgaaagctggtatttcagtaaacgacttctttatggaaaacttaatgaaatcaaagaggaattcaactttaattatatcttagatggcatgattatggacgatctcaaggatttccgtccaggcttaaaagctagagatgaatttggagtacgtagtgtacttcaagaagcacatctctataaatcagaaattagagaattaagtaaacaacatgatttacctgtatggaataaaccggctctatgtagtttagcttcacgaatcccttatggtgaaacgttaagctttgctaaagtaaacaaagtcaacgaagcagagaaatacattctacaattaggaatcaatcatgtccgtgtacgctaccaccataatatcgctcgtatcgaagtggttgaagatgatttagctactgtaataaaaaatagagacaatatcactttacgcttaaaagaacttggtttcgactatgtcactgtagatttagaaggatacagaacaggcagtatgaacgaagtcattgatacaaaagcaactaatttagtacaaggaagttaa

SEQ ID NO: 1402 - DNA, 1275 bp, Staphylococcus capitis
atgttagtgaagacagatgtgctctacggcaagtctgaaattagtgtcaatgtacctgatgatagcactattatagaacctcaaaatattgacgctattgaagattataaaacagccattaaagacgttttaagacatccaaccaactcaaaacctcttaaagaaatggttaaaagtgatgacatcgtatctatagtaattagtgatatcactcgcccgacaccaaaccatattcttgtacctttactaattgaggaattgaaccatgtgccacttgaaaatttcgtaattattaatggtacaggaacacatcgtgaccaaacgcgcgatgagcttattcaaatgttaggtgaagatattgtggatacagttaaaattgtccataaccactgtactgaagcagatagtcttatcaaagttggggagagtaaatatggttgtgatgcatatctcaataaagactatgttgagtcagatttcaaaatcgtcactggtttcattgaacctcatttctttgcaggattttcaggcggtccaaaaggtattatgccaggtatcgctggattagaaactattcaaactttccataatgcaaagatgattggcgaccctcgttctacatggggaaatttagaagataaccctgttcaggatatggctagagaagtgaaccgtatgtgtaagccagacttcatgttaaatgtggctttaaacaaaagtaaggaaattacggctgcattcgctggagaagtttttgaagcacataaagaaggatgtgcttatgttaaagaacacgcgatgtttaaatgccatcaacgttttgatgtcgtcatcgcttctaattcaggttatcctttagatcaaaacttgtatcagactgttaaaggtatgagtgctgctagtaaaatcgtcaaagaagacggaaatattattatggtctccgaatgtgcagatggctttccagatcatggtaaatttgctgaaatctttaaaatggctgacacccctcagggaattctagagcttatccatgatcctaattttaaagagatggatcaatggcaagttcaaaaacaagcgagcattcagacctttgccaatgtttatgtctactcaaaattaacagatcaacaattgaaagattcaatgttgaatccaacttcaaatattgaacaaacgcttcatgagttagaagaacaatatggacgtaaattatcaattggtgtcatgccacaaggaccactaaccattccatatgttgaaaatgaagaataa

SEQ ID NO: 1403 - DNA, 522 bp, Staphylococcus capitis
atgaatcatattaagggaattaatcatattggtttaacagtattagatattgaggaggcaacaacgttcttaaaagaggcgtttgacgctaaaatagcgtatgatgctctttcatataatgaccaacctcgtgaaggagaagaagttgaacgcatgttagttctttcaaaaggagcaaaaatcgttcgtcaaagaatgatagtgattggtgagggagctaatatagaaatgtttgaaatagaaagtaataatcaaaaagaaccactcaaactagaagatttaggctttaatcatatttcattaatggtcgatcatattgaggacgtattagaaaatgttaaacgtgctggtgcagaaccattatctgaaacacatggtaattcaacttacgaggattctgaaggaagtaagagtgtttatgttaaggcaccgtttaacgctttaattgagttacaatccattccgaatggttattattatccaaatgatagtgaagcaaatgtatttattcctggtgagtaa

SEQ ID NO: 1404 - DNA, 402 bp, Staphylococcus capitis
ttgaatatttatgtttttatccaatttactactcaccttaatctttacaataatacatgtaattatagcataaaaacactatcgcttgtagtacgctcctactttctacgtatcgacttattttgtctaaaaattaaaaaatcgtctccatatcttatcgatatgaacacgattttacataggttatcattagaattacttgttgaattcaacatcaacgatatccatgatatatttatctcgaatagaacaatactttttgaaatatacgatgccgaatacaattgttgcaatgatgaatacatattttttcatctaactacctcatatttcataatttttgatgtacatcatcctttattatatcatcttcttttaaaattggtcacaactattgaataa

SEQ ID NO: 1405 - DNA, 417 bp, Staphylococcus capitis
ttggataaaaacataaatattcaaactaaacaggttttgaaacagaatgatgaaaaacaaaaatttgagtttactacaaaaggtgcttggcagaaacgacgagcagaatttatccggtatacagaagaaattgaagaagcaaaagtcaatgttacaataaaaattgaagatagcggagttaagttgattcgtaaaggcgatatcaatatgaatctacatttcgttgaaggggaagaaacgacaactttatatgatatacccgcaggacggatacctttaacagtgaaaacactgagtattttacactttgtaacgccaaatggtgggaaattgaaaattcactatgaactatatcaaaatgaagaaaagatgggttcttatcaatacgaactaaattataaggagataagcgaatga

SEQ ID NO: 1406 - DNA, 1662 bp, Staphylococcus capitis
atgaatattatcgatcaagtgaaacagacattaattgaagaaattgaagctagtatcaaaaaagcgggattagctgaagatattcccgaaataaaaattgaaatacctaaagatactaaaaatggtgattactcatctaatattgcgatggtattaactaaaattgctaaacgtaatccacgtgaaatagcacaagcgattgtagataatcttgatacaagtaaagcacacgttaaagaaattgatattgcaggcccaggttttattaacttttatttagataatcaatatcttactcaaattattccagaagcgattaataaaggcgatcaatttggctatgcagatcaatctaaaaatacaaacattttattagaatatgtgtctgcaaatccaactggtgatttacacattggtcatgctagaaatgctgctgtaggtgattcattagccaatattctaatcgccgcagggtacaatgtcactcgtgaatactatattaacgatgcagggaatcaaattactaatttagctcgttcaatagagacacgttattttgaagctctaggtgatacaagccatgaaatgccagaagatggatataatggtaaagacattattgaaattggtaaagatttggctaataagcatccagaaatcaaggattattcagatgaagaacgcctaaaaacatttagacaattaggtgtagattatgaaatggataagttaaagagagacttagctgattttaatgtacattttgataactggttcagtgaaacgtctttatatgaaaatggtgcaatcgataacacattagctaaaatgaaagaattaggttacacatatgaagctgatggtgcaacatggttacgtacaagtgattttaaagatgataaagaccgtgtattaattaaaaaggatggtaactacacttactttacacctgatacagcataccattacaacaaaattactcgtggaaatgatatcttaattgatttaatgggtgctgaccatcacggttatataaatcgtcttaaagcaagtcttgaaacatttggtgtagatagtgatcgtcttgaaattcaaattatgcaaatggtgcgtttaatgcaaaatggtgaagaagtgaaaatgagtaaacgtacaggcaatgcgattactttacgtgaaattatggatgaagtaggcattgatgcagcgcgttacttcttaacaatgcgtagtcctgactctcattttgattttgatcttgaacttgccaaggagcaatcacaagataacccaatttattatgctcagtatgctcatgcacgtatttgttcaatactaagacaagcgaaagagcaaggtgttgatatcacaacaaatgctaatttcgatacaattactaatgaaaaagcaatagacttattaaagaaagttgctgaattcgaaacaacaattgagagcgcagcagaacatcgtgcgcctcatcgtttaacaaattatattcaagatttagctgcagctttccataaattctataacgccgagaaagttttaactgatgatattgaaaagactaaagcattagtagctatgattgaagcagtaagaattacattacacaatgctttaacacttgttggcgttacagcacctgagtctatgtaa

SEQ ID NO: 1407 - DNA, 636 bp, Staphylococcus capitis
atgctatctacaatggaactgtatcgaattctatataaaaatatgggtgcacaacattggtggccagctcaaagtcctattgagatgatgctaggggctatacttgttcaaaatactaattggaaaaatgcagatatggcattaacacgtctcaaagaagagacgcaattcaatggtaaaaagatattaaatatgtcactcgaagatttgcaacaaacgattcgttcgagcggtttctataaaaataaaggtaaagcgattcacgctttaatgaattggttaaatcaacatgactttaattacaaagatatcgcacaatactatggtgataatttaagaaaggaattattaaatattcgtggtattggaagtgaaacggcagatgttttaattgtatatatttttaaagggatagaatttattccagacagttatactcgccgtatatatgctaagttaggctatactcagactgaaacctacgataagtttaagaagaccattcaattaccttctaatttcactaaccaagatgcgaatgaattccatgctttgctcgataattttggtaaaaattattttaacggtaaaggagaacatcgttatacatttttagattcattttttgaaaattaa

SEQ ID NO: 1408 - DNA, 756 bp, Staphylococcus capitis
atgaaagcgtattttagtcctaaagatctttgtgacattacaggagtgagtttacgtacacttcattattatcacgatatagaattattaatccctcatcatattgaagacaatggttatcgtctttatagtgtagaagatatttctaaactgcaatatatcttatttttaagggagcttgatttaacattaaaagaaattaatgattattttaaaagtgatataaatactaaaaacgaagtgttgcgtaagaattacgatgatgtaattaagaaaagagataagttgaatgtaatcattgaacatcttgactaccattttaaacaagagagcaatgaagaaattgaggtgacgaatatgaaagaatttgatttatatcaacaatatgaaaatgaagcggttttgaagtatggtgatactaagtactatcaatcttatgaggaacaacaacaagatatgaatgattctgagaaaaaagagaactataaaaagattaatgttgaattaaatacatttttcgatgagatgagtgatttattttctaaagatgtctcgattaaggaggcaagcactagaataaaaaaactagaagacatattgaagctacaagttcctaactgcgataaacaatttatgtcctatattgcaacaacatatgttgatgatgaacgatttgctaaaaatattaataaaaaccgttataaaggactaaatcgatatattgcaaatgccataaatgaatatataacgtactaa

SEQ ID NO: 1409 - DNA, 501 bp, Staphylococcus capitis
atgatcgaggcctataagttattctggctgaatttctttaaactaaaaggtcgcagtagaagacgcgatttttgctggccgatgttaattaacataatactttcgagtattctaggacttatgatttttggggttacacgcataattccatatagtgatgttgtttataatatagtcgcaactatcatcaatgtagttatccttattggtacgttcacagtttcaattagacgcttccatgacataggtaaaacaatgatcataccatgtgttttctttgttattagtttatatggatactatgttgagttaatgtatgacaatggtactgcaaactcatcttttgaaatacataatcaagttttaaatattatattaggtattatcgcgatactgtttactttattagtaatagtaattagtattatgagcctggtgtattgcgtcaaagatagccaaaaaggtacaaacaaatacggcccgaatccaaaagaacaataa

SEQ ID NO: 1410 - DNA, 501 bp, Staphylococcus capitis
atgattaaagcgtataagctattttggcaaaattattttaaactagaaggtcgctctcgaagacgtgatttttggtggccctttttcatcaatgctattattgaagttatagtcttaaatggcacaaaatttttagaaaattctatggttcacggtcatattatttcatcaattatttatcaagtcatttcactcattctatgtattggaacattttcattatctgtaagaagatttcatgatatcggaatgactaagaaattcccagtgttttatttaattttgaccttactaccttatttaaaaaatgtgatagaacctgttataaaccatacacatctagatcataatcacgtatttgtgatgattttaagtggtttattcatcacttactatatcatctccatcatcgctgcacttgtagctttagcatattgtgtagctgataatgaagatggttccaataaatatggaccgaatcctaaacctatttatgaataa

SEQ ID NO: 1411 - DNA, 897 bp, Staphylococcus capitis
atgagaaataaactatggatggttattctcgtgcttgctttatcattagcagcatgtagtcaaggctcaaatcaatcatcagatagcaattcaacatcgaaaaaagggaataataaagtaaaataccatagaattgtttctctaatgccaagtaatactgaaatcttatatcgacttggtttagggaataacattgttggtgtatcaacggttgatgattaccctaaagatgttaaaaaaggtaaaaaacaatttgatgcgatgaatttgaataaagaaaaattactcaaagctaaaccagatctgattttagcacatgagtcccaaaaaagttcttcaggaaaagtattaaactcacttaaaaaagatggggttaaagttgtttatgttaaagacgcccaatcaattaatgaaacatatgacacctttaaaactatcggtaaaattacaggacgtgagcatcaagctcaagatttagtagatgaaacgaaaaagaacgttgataaagtagttaattctgttcctaaacatcataaaaagcaaagtatatttatggaagtttcatctaaaccagatatttatacagcaggtaaaggcacattcttcgatgatatgttaaatcaactagacgcgaagaatagcttctcagatataaatggttggaaatcagtcagtaaagagagcatcattaagcataatccagatatattaatttctactgaaggtaaatcaaaatctgattatattaaaatgattaaaaaacgtggtggcttcgataagattaatgctgttaaaaatacacgaattgaatcagttaatggagacgagatttctcgaccaggtcctcgaattgatgaaggcctaaaagaattaagggatgtcatttataaaaaataa

SEQ ID NO: 1412 - DNA, 951 bp, Staphylococcus capitis
atgaaaagaattcgaagtatagtcatatggttaatcattctattaattagtgttttagtcagtttatgttgggacttaggaagccttaatgatgcatttaatcaaactattttattaaaggtaagacttcctagagttcttgaagctatgcttactggtgcgacactcactatagctgggcatatgtttcaaaccattttgaataatccattagctgatagttttacactaggcttagcaagtggtgcttctttaggctccggactggcactatttctcgggttaagttttctatgggtgccttttttctctatagcattcagtttgattacacttgtactcgtacttggcctaacagtgatattgtcacgtggttatcctatacgtgtgctcatcatattaggtttaatgattggtgccttattcaatgcacttctgtatatgttagttttaattaatccacggaaaatgaattcaatagctaattacttgttcggtggttttgcttcggcagagtaccacgatgtcattatcattgctttaacaatgatagttgctatggtcattttattttcaatgaaaaatggcattaaactactgcaagtcggtgagttaaaaagccaatctttaggtcttaatgttcaaaatgttatgttcattgtgttggcagtgtcatctatgataactgcagtagtagttgcatatgtagggattataggctttataggtatgatcgtacctcaattactaagacgtttttattggcaatatgagctaggaacgcagatggtacttaatcttattgtcggtagcacagtgatggtcgtggcagattttataggcggaacgatgatacaaccagttcaaatacctgcaagtattattatggcattattaggcgttccagttttattttatattctttttacacaaactaaggtattacgataa

SEQ ID NO: 1413 - DNA, 729 bp, Staphylococcus capitis
atggatttgagtcatattaaagcaatagtctttgatttagaaggaactttgttagatagagttaaatcacgtgagaaatttattgaagagcaatttgaacgttttcatgattatttcgttcatgttcaattagccgattttaagaataaatttatcgagcttgatgatgatgaagataatgataaacctgaattgtataaacaaattattaaacaatttcatattgatcgattaacttggaaagatttgtttcatgactttgagatgcatttttaccgttatgtctttccttattatgatacgttatataccttggaaaagttatcgagccatgattataagattggcgttatcgctaacgggaaatccaaaattaagcaatttagattacattctctaggtattatgcatgttattaattacctaacgacctcagaaactgttggatatcgcaaacctcatccaaaaatatttgaggatatgatagaacaactcgatgtagaacccagtgaaattatgtatgttggagacgacgcacttaacgatgttgcgcccgctcgagcaatgggtatggtaagtgtatggtataaacaagaggatgcggaattagaaccacttgaagaagaagtagattttacaattactacgatagaagaattgttaactattctacctgaaaattttgaaccagaaggagaagaacgcaatggcaatggatttatttactag

SEQ ID NO: 1414 - DNA, 807 bp, Staphylococcus capitis
atggcaatggatttatttactagtaaagatggaacgacaattcattataatacaatgggtgaaggctttcctgttgtactgattcatacagcttatgataattattcagtatttaatgatgtggctaaggcgttagcgaaatcttttcaagttgtgcttattgatttaagaggtcatggttattctgataagccaagaaatattgagtttcatgaattttctgatgatgtgatagcactcttagattatatttatattgatcatgcagcgtttgttggtcacgaaatgggagcaatagtagcttcagatatctctgtaagatatgaagactatgtatcttcaataatattagttaatccgacatctattgaaggagagctacccgaagaacgattattcagaaagtatgcacacacgattagaaactgggatgatgaaaagcaagacaagtttttaaataaacgtaaatattataaaccgcgtaaaatgaataaattcttaaagcatgttgaagatactaattcagtatctacgaaagaagaaacgcaagctgttgaagatgtatttaaaactgtagaaatctcagaggtatttaaacaagtccatgctcctacgttaattattgcaggagaatatggcgaaagaacaacaactttagaagcgaaagaagtcgctgacttaattgaacacagtcagttcaatgtgtacgctcaatcaagtttatatccatttgttgaagaacaagaacaattcatcactgaaattactccatttattaaagatcatttttcccataaaaaagaataa

SEQ ID NO: 1415 - DNA, 510 bp, Staphylococcus capitis
atgaaaaagctaatgacatcattacttgtttctggattagttttaacaggagtaagcgctggtcatcacgctgaagcagcatctggaaactcaatgcaaacagttcaacaaattactcaaggtgatcaatcattagaaaatgttaaaatcggcgattcaattaaaagcgtattaaataaatatagtcatccaatttattcatataatcaacaaggaacagaacattattatgagtttagaacacataaaggtgtcttacttgtaactgcagatggtaaaaaagatagaggtcatgtaactcgtgtgtctatgacttacaatcaagctaacggtccatcttataaatctgtaaaaaatgaatttggtaacaaagcggtaagtcgcgtacattataatagagtaactggtaactttggttacatccaaaatggtaaagctagttatcaatttagttcaaattcacctaaagataaaaatgtaaaactttatcgcattgatttatctaaataa

SEQ ID NO: 1416 - DNA, 717 bp, Staphylococcus capitis
atgcgtactaatgataaagtattgcttgaaaacattaatgattattttagccataaaggcatgtcaccaaatctaatagatgatattaaagaaaaattcaggtcagatatcaaaaaatcagaagaaaaagatcaagattatattgaatatagaggtaaatccccagcacaaattatattaacgattcaacgtaatctatttgctttacaactcaatcccgtcatcttttttatcattaattttatacttatttcttatttatatgataaacagtatgtacagttccaagcgattactggaataagtttattttattgtattgtgattttccctatcacgattattctctatactaggatagctaggaaaaattatctatatagtaataaatatgagatgtgggtaggcattgtgattgctatcatcgctttaattcttgtcattatgcaaggttttcattttaattgggcgattataccaatcaatatttatggacatcaatttgtattctttgttggaatcattttgggtctaattggtatattctttaagcgcttagaattttcaggaattggtttattattttgtcagaagacgatagatgctatgattacaaatcctgaaattgcacaatttttctcgttagcaatttggatattattagtggtactcattattttttatacaattaaactatcagcgagaacgagatcgtag

SEQ ID NO: 1417 - DNA, 795 bp, Staphylococcus capitis
atgaataaaattcaaacttgcaatcaaattgaacttgcttatagtgatgaaggagaaggcatccccattattttaattcatggattagacggtaactcagcaggctttcaggatttgaaaaatgaactcaagcaaacacatagagtgataacttatgatgtgagaggacatggtaaatcctcacgatcagaatcttatgatttaaaagatcatgttgaggacttaagtcatttaatggatgcattaaatgtgagttcagcacatattctaggacatgacatggggggcataattggaagagagttcactgaaacatatcagtacagaacaatttcactaacaataatctctgctaagagggaagatatcactcacggattcacaaaactcatggttgataatcaagaagaaattgctggttttaataaagcagaggcaatgattattttatttcctaaattatttaaacaacaagacaatactatgaagtggtatcaacgtcagaagttatatagtagaccgacacctgaagatagtgcaattgctgttagggcattattaaatcatgttgatatgattaaggacgttcatcataaagtaactgtgccaacacttttagttaatggtaaacatgatccattaatcatggataaaacacattttcgtattgatagttactttgaaaatattaaaaagtacatctttgatgaatcaggacatgcaccacatatagaagaaccagataagtttttagatatttacttagattttattaagttagaggaaaatgcataa

SEQ ID NO: 1418 - DNA, 375 bp, Staphylococcus capitis
atggctatttcaaaaattaatgattgctttgaattattagctatggtcacttatgctgacagattaaaaagtattattaagaaagaattctcaatcagttttgaagaattcgctgttttaacttatattagtcaaaataaagaggaagaatattatcttaaagatattattaaccacttaaattataaacagcctcaagtggtaaaagctgttaaaaacttatctcaagaggattacttcaataaaaaacgtaacgaacacgatgaaagaacagttttaatcttagttaactctaaacaacgtaaaaaaattgacgagctattaaaacgagttaacaaacgaatcactgaagcgaacgacgataacgaagtttaa

SEQ ID NO: 1419 - DNA, 957 bp, Staphylococcus capitis
atgaataataagcgcattattcttatactattaattctagttttagttcttacaagtttaggttttggttatcatacttattcgaaaatacgatcagatgataataatttaaagtctactcaaatcattaaagctcagcctaaacggttacttaccgcggatggcattcaaactcctttccaaagctactctatctacttcaatccttcacaaggacaaatcagccgcttcttagttaaacatcaagataaaatatccgccaaaagaccgatttttgaatattataattacgaaaaggaccaagaatttaaaacacttaaaggtgttcttaatcaaattcaactccccaatcatataccttcatatttaaaaaacaatcctttcttaacctcaccgttactgtattctcagcttcttcaaactcaaaattatattcatacaacccacttctctcctattaatggaagggtctctatcaccaatcgttacccttcaaaagcaactgataagataatgcaaattgatagcgaggaaaaggttattcatgctaatatatcagaatctgatataaatttattaaaaataaatcaaaatatttctgtaactactcgtgataaaattcaattcattagtaaagtgaaagaaattgcaacagtaccaactaaggtgaaaaataatacttcttattaccaagtagtattaactaccaaagctaagtatcctatcggcacacattttaaagtaactttaatgtctaatgatatcgagctaccacaaacaagtattatagataacaaatttattttagtaatgaataataaaaaaattgtaaaaagagaaataaaatataaaaaatcttctaaaagtgggtatatcactataacaagtggtttagctcttaatgagaatgtaattaagcatcctactaataaaatggtaagcgcttttagtcattaa

SEQ ID NO: 1420 - DNA, 930 bp, Staphylococcus capitis
atgatattcttatacctcttaggtatatttgtgggaatgttgcttcctattcaaacctcagttaactcaaggttaagtcaatttacacgttcatcattttacgcctcaaccatctcttttgcggtaggaacgttatgtttattaatccttaaccttattattaatccacatgtatttacaacctcattcttctcaggacagacatttaactatacatggtttgttggaggattactgggcgttatatttttaacaggaaacctattattattacctagattaggtgctgcgcttacagtagtcatcactgtaacaggacaaatacttatgggtgtagtcatagatacatttggattatttggtgcttcacaacaacaatttacattttttaaagcaattgggattatttttttaatcttcggtattcttttaatgaattacgtcccgaatcgtaaaatccatcataaaaccaattcaaacttcatcttatggttagcgattggactcgtatttggctcggcaccaccgatccaaactacaattaatagcgcacttgctcaacagacacattcttcaatctttgcgtctttagtatcatttacgataggtacgacagctttattcattttaactttactttttaatcgcactttaaaaattagaattacacatgatgtgcttggacgcattaagcctgtctactttatcggtggtatgttaggcatggcttttgttactgctaatattatccttatgccttttttaggtgctgcgctcacaacgattgtcgcaatgctaggccaaatgattatgggaattataatagaccattttggtttaatgggctctcctaaaaataaaattacagcacgtaaagtgtgtgggttaatatgtattgcaatcggaattattctattacgtttattttaa

SEQ ID NO: 1421 - DNA, 225 bp, Staphylococcus capitis
atgtcaaaaacgttagaactcatctttaaaacgagtttagacaagccagtaaaattacagttaacaaaatttgacgctgttttgacagaacaattagttaaagaaagtatgaatcaaattttagaattaggcattttaaaatcaaatgtaggtaaacctgtcaaagcttattcagctcaaatcattgataagaatacgactatccttttcgaagataaaaaataa

SEQ ID NO: 1422 - DNA, 207 bp, Staphylococcus capitis
atgaatgaaattaatcaagtgactgcactctttacacaagttaaacatgactctgaagggaaagtagtcgaacataaacgtcgtttctctaacttaaatccatctacgtctaatgatcaaataagaactttcagtaacattattgagcgtttaactggagaaaagtacgacaaagttgaagtcacaaagacagaagcattaatctaa

SEQ ID NO: 1423 - DNA, 558 bp, Staphylococcus capitis
atgaatcaagtagacccaattaaatataaagaagagattcatcaaatgtatcaagtattacaagcacggtcacagagggattatttgttttttaagttcgcaattcatacaggaattaaactgacagatttgttaaatatgaaagtaaagtaccttaaaacttctgaaatagggaatataaaaacatcttggataatagatgatgagccaactattaaaattaagttgccatctgaattgcgaaacgaattaaaactttacatagaggattgtaaattggaagatgaagaacttatttttcaatctacgaggacgcatcaatgtctttcaagacaacaagcttatagaataataaatcgtgctgctgaacaattaggtatgaaacatattggactgactacattaagaaagacgtttgcctatcatgcctatcaagcaggcatttcaatctcaattattcagaaatatttgggacatcaaacaactcaagaaactataaaatttattgggattcaagataaatcgattcatcaaactgtgattgcactcaacttataa

SEQ ID NO: 1424 - DNA, 2403 bp, Staphylococcus capitis
atgagtctgatgtaccttttgggcgtgctaatagttgtgatgattctagttttactcactttgagtcatcaaatacttaaaaaatatgctggttacttgtcgttactagcgcccatcatttcatctttttatttcattacacaaataccaaatgtctatcaccatcatttcacttctattcatattccatggatgtcttcaatagatatcaatttagatatgaaattagatggattaagtttaatgtttggtttgattatctctcttataggtgtaggtgtatttttctatgctacacaatacttatcacctcaaactgataatctgcctagattttttgtctatttattattatttatgtttagtatgattggcatcgttattgcgaataacaccatattaatgtatgttttctgggaattaacgagtgtgtcttctttcttgcttatctcttattggtataacaatggtaatagtcaactcggggctattcaatcatttatgattaccgtatttggtggattagcgttattaactggttttattatgttatacatcattaccggtacaaataatatctcagaaatactagctcaacgtcatgcgattgagaagcatccattgtatatcccaatgatgctcatgctattattgggagcatttacaaaatcagctcaatttccatttcatatatggttaccgaaagcgatggctgcacctacgccagtgagtgcatatcttcattcagcgactatggttaaagttggtatattcttactgtttaggtttacgccattattaggactaagtgatatatatgtatatattgttacgtttgtaggacttataaccatgctttttggttcgcttaccgcattacgacaatatgatattaaaggcattttagcttattctactatcagtcaactcggtatgattatgtctatggtaggtataggtgggggctatgcacaacatacctcagatcatttgtcagagttttacgcattagtcctttttgctggcttatttcatttgatgaaccatgctgtttttaaatgtgcattgttcatgggtgttggtattattgaccacgagtcaggtacgagagacattcgttcactcaatgggatgcgtcatgtctttcctaagatgcacattgttatgttgctagctgctctttctatggcaggggtcccatttttaaatggtttccttagtaaagaaatgttctttgattcacttgtaaaagctattgaactagatcagtttggaattagccttactatcatagttgttgcattaggtgtgatagcaagtatttttacttttacttatgcactttacatggttaaagaaacattttggggacaatttaatactgaaaagtttactaagaaaagtattcacgaaccatggttgtttagtttacctgctatgattcttatggtacttataccaattgtattctttatacctaacgttttcggacataatatacttatacctgcattaagatcggtatctggtgttggaactcaagtagacagcgtagcacctcacatttcacaatggcacggtatcaaccttccattaatattaagtgtcatcgttattgtgtcaggaattattttagcacttgctataaattggaaatcattgacacatcgaatgattaaacaagcttcaatcacagatacttatcgacgtgtttatagagagtttgaatcttattcaggttatggaataagaagcttaatgagtgctaaactcaattattatattatgattacgttactcatatttgtagcaattattgcatatggctatctttcggttggtttccctaaagttcatgatttacatgtttcatcttttggaccgctcgagattatcttatcaatcgttacagtaatcatcggtatttctcttatatttatacgtcaacgcttaacgatggttattttaaacggtattatcgggtttgcagtgacgctttacttcattgcaatgaaggcacctgatttagctctcacacaattagtggttgaaaccattacgacgatattgtttatcgtgagcttttcaagattaccaaatattccaagagcaaaagcaaacttgaagaaggagacgcttaaaattgtagtttcacttataatggctgtttctgttgtttctctaatttttatcgctcagcaagcggatggtatgccatcgatttcaaaattctatgaagatgcctataaattaacaggtggcaaaaatattgttaatgctatattaggtgatttcagagcgttagatactttatttgaaggattagtattaatcattgcaggtttaggtatctacacactacttaattacaaagataggaggggacaagatgaaagagaatga

SEQ ID NO: 1425 - DNA, 426 bp, Staphylococcus capitis
atgaaagagaatgatgtggtattaaaaacggtcactaagattgttgttttcattctattaacatttggattttatgttttctttgcaggacataataatccaggtggtggatttattggcggccttatctttagttcagcttttatccttatgttccttgcctttgatgttaaagaagtattgattagtttacctatagattttaagaaattaatgattattggatcattagtatctgtgtgtacggcagtagttcctatgttctttggtaaaccaatcttataccaaactgaagctaatgtggcctttccattattaggacatgtgcacgttacgactgtaacgttatttgaattaggcgtattacttacagtggtaggtgttattgtgacagttatgttgtcaataagtggtggtaagtcatga

SEQ ID NO: 1426 - DNA, 345 bp, Staphylococcus capitis
atgaacttgatacttttactagtgataggatttttagtatttataggaacgtacatgattctatccattaatttaatacgtattgttattggtatttctatttatactcatgcaggtaatttaattattatgagtatgggcaaatatggtccacatatgtctgaaccattaattcaaaataatcattcgaattttgtagatccattattacaagccattgtacttactgcgattgtaattggatttggtatgactgcattcttactcgtattaatttaccgaacatatcgcgtgacgaaagagtatgaaattagtgcattgaggggtgaagaagatgatgagtaa

SEQ ID NO: 1427 - DNA, 1500 bp, Staphylococcus capitis
atgatgagtaacttattgattatgccaatgcttcttccttttttatgtgctttgattctagtttttataaaaaataaaaatcaaacatcgaaaatactctcaattacgactatgattgtttcgactttaatttctttagcattgcttatctatgttgtgaaccataagccaatcacattagattttggtggttggaaagcaccatttggtattcaattccttggcgattcactaagcttactcatggttacagtatcgtcatttgttgtgacgctaattatggcttatggatttggtcgaggtgaaaagcgtgtaaatcttttccatttaccaacttttatcttattacttactgttggtgtaataggttcatttttaacctcagatttatttaacttatacgttatgtttgagattatgttactcgcgtcatttgtgcttgtaacattaggccaatcagttgaacagttacgtgctgccattatttatgtagtacttaacattattggctcatggttgtttttattaggtatcggtatgttatataagactgttggtaccttaaatttctctcatattgcatcacgcttgaaccatatggaaagtaatcaaactatcacgattatctcactcgtctttttagtcgcttttagttctaaagctgctttagtgatatttatgtggttgcctaaagcttatgctgtgctcaatacagaacttgcagctttatttgcagcgttgatgacaaaggtcggcgcatacgcgttaatccgcttcttcaccttattatttgatcatcatcctggtatcacacatccattactcgtttttatgtcatgtattacgatgctaatcggtgcatttggtgtaatcgcttataaagatattaagaaaattgctgcttatcaagttatattatcgattggttttattatcctaggattaggatctcatacacatgctggagtgaatggtgcaattttctatttatcaaatgatattatcgttaaaacgttacttttctttattataggtagtcttgtttatatttctggctttagaaattatcagtatttaagtggtttagccaaaagggaacccttctttggtgttgcatttattgtgatggtatttgcaataggtggtgtacctccgtttagtggtttcccaggtaaggtgcttatattccaaggtgcgattcaaaacggtaattatattggtcttgctttaatgattctgactagtcttctagcgatgtatagtctgtttagagtcatgtttgtaatgtactttggcgatactgatggtgaagaggtcaaattcaaagagattcctcctcatcgtaaaggtattcttggtattctagttgccgttgtacttgctatgggtattgctgcaccagttgtcttaaaagtgactgataatgctacaaacctcaatatgaaagaacatgttttccaagagaatgttaattcgcatttgaaggaggttgaaaaatag

SEQ ID NO: 1428 - DNA, 483 bp, Staphylococcus capitis
atgaaacaagtcgtacttaatattgtcatcgcgttcctttgggttttattccaagacgaggatgaatttaaatttacaaccttcttctcaggatttttaattggtttaattgtcatctatatccttcataggttctttggtgaagaattttatctcaaaaagatatgggtagcgattaaatttttagcaatatatctctatcaactattaacatcaagtattagtacgattaattatattctgtttaaaactaaagaaatgaatcctggtttactttcttatgagacttctctaaagaatgattgggcaattacatttttaactattttaatcattatcactccgggttcaacagtgattcgcatttctaaagatacgaataagttctttatccatagtattgatgtttctgaaaaagacaagcaaaatcttttaagaagtattaaacagtatgaagatttaattttggaggtgacacgatga

SEQ ID NO: 1429 - DNA, 303 bp, Staphylococcus capitis
atgataacgttaatcacacaatgtttaattataagtgcattaattatatttggtgttgctttactcgtgtgccttttcagattaattaaaggaccaacaacagctgatagagtggtctcatttgatgcgacaagtgcagttgtaatgtctatagttggtgtgttgagtgtcgtatataattcggtttcgttcctagactcaattatgctcattgccattatttcatttgttagttcggtatctatttctagatttatcggaggaggtcgagtctttaatggaaataacaaaagaaatcgttag

SEQ ID NO: 1430 - DNA, 471 bp, Staphylococcus capitis
atggaaataacaaaagaaatcgttagtctcatctcagcgatatttatatttttaggaagtatcattgcattgattagtgcgattggtattgtaaagttccaagacgtttttttacgtagtcacgcctctacaaagagttcaactttatcagtattattaactattattggtgtcttaatatattttacggtcaatcaaggattctttagcgttcgtttacttttatcattggttttcatcaaccttacttctcctgttggaatgcatttggtagcgcgtgctgcctatcgtaacggtgcgtatatgtaccgaaaagatgacgtccctaggcaatcttcaatattgttaagtcaaaatgagtttaattcacctgaagaattaaaatctcgtgcgaaactaagagaacaacgtagggaaaaactttattataaagaacgtgaaaaagagagaaaatttgacaatgagaattaa

SEQ ID NO: 1431 - DNA, 2040 bp, Staphylococcus capitis
ttggagatatttgaaactttacttatttttactacagtagttatcgtaagctcctttgtccatactttcataccaaagatacctcttgcgtttattcaaatcgttcttggaatgattttatacctcactccaattccagttgaatttaactttgactcagaactatttatggtcacattaattgccccattattatttgtagaaggggttaacgtttcaagagtacatttaagaaagtatattaaacctgtaatgatgatggctttaggtctcgttattacaacagtgattggtgtaggattgttcgtacattggatttggcccgaactaccgattggtgcagcctttgcaattgcagcaattctctgtcctacagatgctgtagcagttcaagcaatcactaacggtaaggtgttgcctaaaggtgcgatgacgattcttgaaggtgaatcattacttaatgatgcagccggtatcatttcatttaaaattgctgtaggcgtattagtcacaggtacgttttcacttttcgatgcggtacaacaatttttaattgcatctataggtggggcaattgtaggtttacttataggtatggcacttgttcgttttcgtttaactctaatgagacgaggcattgagaatattaatatgttcacatttatacagttattaacgccatttgtgacatatctcattgcagaactgtttcatgcgtcaggtattatcgcagctgtagtagccggactcgtccatggatttgaacgagatcgtatcgctcaaacacgtacacaattacaaatgagttataaccacacatggaatattctaggttatgttttaaatggttttgtcttttcaatattaggtttcttagtacctgaggttattgtgaagattattaagacagaaccacataatttactattcttagtagttatcactgtactagtcgctttagcggtatacctcttcagatttgtatgggtatatgtgctttatccttatttctatttatcagtcagtcctttccagaaaatgatatcaaaagacgatgacgataaagccccagagaaaaaacctaagagaagcttatatgcacttattatgacgctttgcggtgtacacgggacaatttcactagcaatcgcattaacattaccttattacttggcaaatcatcattcattccattatagaaatgatttattatttattgcgtcaggaatggtcatcattagcttggtcattgctcaagtattacttcctttagttacgcctaataaaccaaaagtgaaattaggtaatatgacattcaaagaagcaagagtatatattttggaacatgtgattgattatttaaatcagaaatctacatttgaaacaagttatcgttatggaaatgtgattaaagaatatcatgataaactcactttccttaaaacagttgaaaaggaagatgaaaactctaaagagttagaacgtcttcaaaaaattgcgtttaatgtagaaacaaaaacattagaacaacttgttgatgatggtgagattacagatagtgtacttgaaaactatatgcgctatgctgaacgtacacaagtctacaaacaagcgtcactatttagaaggattacagttgttttaagaggaatgttattgaaacgccgtgttaaaactaaaataaattctgcatcttctttaagtgttacagataacttacttgaattaggtaaaataaataaattagttcattacaatgtagtaagtagattgtctaaagaggcaacaacagataacaaactagagattggtatgatatgcgatggttatcttatgcgtatagataacttaactccgaataatttcttcaattctcaaagtgaagatacgattactagaattaagttgaatgctttaagagaacaacgtcgaattcttcgtgaattaatagaagatgaagaaattacagaaggtacagcattgaagcttagagaatctattaactatgatgaaatggttatcgttgatagtatgacatga

SEQ ID NO: 1432 - DNA, 930 bp, Staphylococcus capitis
gtgaagaagatttttgctttagcattaatatttatcatgattcttgccgcgtgtgggaatcaacataacaaggatcatagctctaccgaaggtaagttaaaagttgtaacaaccaactcaattttatatgacatggtcaaacatgtcggcggtgataaggtcgaagtccatagtattgtaccagtcggtcaagaccctcatgaatacgaagtaaaacccaaagacattaaagctttaactgacgcagatgttattttctataatgggttaaatcttgaaacaggaaatggttggtttgaaaaagcgctcaaacaagcaggcaaatctactaaagacaagagcgttgttgctacatctaaagatgttacacctatttacttaaacggtgaaaatggtaacaagaacaaacaagatccacatgcttggttaagtttagataacggtattaaatacgttaaaacaattcaacaaacgctaattcaacatgataaacaaaatcaatctacgtataaaaaccacggaaaaacttacttagctaaactcaaaaagttaaataaagagagtaaaaacaaattcaatgatattcctaaagtgcatcgagctatgatgactagtgaaggtgcatttaaatactttgctaaacaatttaaagtgaagccaggctatatttgggaaatcaatactgaaaagcaaggtacaccaggacaaatgaaacaagctattcgtttcgttaaagacaaccatctcaaacatctattagttgaaacaagtgtggataaaaaagccatgcaaagtttatcagaagagacaaataaggatatctatggagaagtatttacagattctataggtaaagaaggcactaaaggtgattcatactacaaaatgatgaaatccaacatcgagacaattcatggcagtatgaaataa

SEQ ID NO: 1433 - DNA, 837 bp, Staphylococcus capitis
atgttagacttctttaatcatttactcagttatcaatttttaaatcgtgcattaatcacttctatattagtagggattgtgtgcggtactgtaggaagtattattgtacttagaggcctgtctctaatgggagatgcaatgagccatgcggtgttaccaggcgttgcgctatctttcctattcaatattccaatgttcatcggtgcattagtaacaggtatgattgccagtctttttattggttttattacttctaaaagcaagacaaaaccagatgcagcgataggtattagttttactgcatttctagcaacaggagtcattattataagtttaatcaatagtacgacagatttataccatattttatttggtaatttactggctataaccaatcaatcattttggacaactatcattatcggaatgagtgtgctaacacttatagttgtattttatcgacctttaatgatatctacttttgacgcaacatttagccgtatgagcggtttaaacacaacactcatccattatttcgtcatgcttttactagcacttgtcacagttgcaagtattcaaacggtcggaatcatacttgtagtggctttacttatcactcctgcatcaactgcatttttgattagtaaacaattgtacagcatgatgattattgccagtcttattagtattatcagttcaattaccggactatattttagttatatatataacgtcccaagtggtgctacaatcgtgatttgtacatttactatttacgttataacgttagcaattacgagaatgaataacagacagaaaagaggcgctttaacgtga

SEQ ID NO: 1434 - DNA, 753 bp, Staphylococcus capitis
ttgctaaaaattgatcaattaaatttatttttagggaaaaagcatgtccttaaagacgtgtcattctcattacctatatgtggtgaaatcgtcggcatcgtaggtcccaatggagcaggtaaatcatcaatgctcaaagcttttatcggggaatttaaagcgacgggaactagattgttatacgatcgccctatacatactcaactcagatatattacttacattcctcaaaaagctcaattagatttagacttccctatcaaagtagaacaagtggtgctttcaggatgttatcaagacattgggtggtttaaacgtccagaaattactgagcgagcgaaactcaaccaattacttaaagatttagaattagatgatttgcgtcatagacaaatttcagaattaagtggtggtcaattacaacgtgtacttgttgcgagagcattaatgagcgagagtgatatctattgttttgacgagccttttgtaggtattgatatctacagcgaagaattaataatgaaaaaaattaagcatcttagacatttaggtaagttgatattaattgtacatcacgatttatcaaaagctgaggagtactttgaccgtattttattactcaatcaatccttaagatatataggaccaccaaaagaagctttaacttctgaacgattgaatgcaactttcatgaattttgataatgatttatcaccacttcaatcgtcacagttacaagggagtgcgtgttaa

SEQ ID NO: 1435 - DNA, 648 bp, Staphylococcus capitis
atgttaactgaagaaaaagaggattacttaaaagcaattttaacgaatgacggcgatgtatcctttgtatctaataaacaactatctcaatttctaaatattaaacccccatctgtcagtgaaatgataggacgcttggaaaaggaaggttatgtagaaactaaacattataaaggtgcacgtttaactaaagaaggtttagaccgaacacttgatattattaaacgtcatcgtttactagaattatttttaatagaaatattgcaatacaattgggaagaggtgcatcaagaggcagaaattcttgaacaccgaatttctgatttgtttgtggaacgcttagataaaacgttaaattttcctaaaacatgtcctcatggtggcgtgattccacgtgaccatcattataaagaactctatacaacgtctatcttagaattcgaacctggtgacaatgttatagtcagaagagtgcgcgataagacagacttacttgtatacctttcaagtaaagatatctatataggcaatacggtagaaatcgtttcgaaagatgatactaataaagtaattattattaaacgaaatgaaaatgtaactattttaagttatgaaaatgcaatgaatatttttgccgaaaaacaataa

SEQ ID NO: 1436 - DNA, 747 bp, Staphylococcus capitis
atgtcctatctagagaactttttcacaacagttattcatttaaatatttatctcatcattgccattggaataatatacatctttattcatcaaaacagacataacggtatcattcgatttctagatgtctatttgaactatataccagttttaactcatgagtttggtcatgtattatttaatcgtcttgcaggtggacgagctaaagatctagttatcgttacaagtcccactgaaagacaaacaacattacaacaaggctatgctatcactcaatctaaaggttatttgggtcaattcataaccacaattgggggttacttaatgccacccatcatgtttttaattggattagtggctgcgcattttgaacatccaagtatttttctagtcacatatctcttgatttttatttattttttaatattaacctctcgaaaactatcacctatttttgtcattctgttaatcagtatactcttatactttttagtccagcataaccatacaatgatggtgtatgacatcgtctctttaagttatcatcttattttaggcgttttactaggtgaaattattcaatcttcatggacaatatttaatcttaccttccaacgacctaagccaagttgggacggcagtgctttaactgatatcactaaagtacctacaatcatttatagtacgatatggattgccttcaacctctatacgatctatttactcattaaatacacgattttataa

SEQ ID NO: 1437 - DNA, 762 bp, Staphylococcus capitis
atgaataacgagcaatttaataacagtaaagtcaacgtgctgggcgtaaaattcaataatactacgatgttggaaatgattgagaatatcaaatcatttttcgaaaataaaactgaaagtaatttatttatagtaacggctaatcctgaaattgttgtttatgcaactgaacatccttcgtatatggatttaattaatagttcggattatgttgtagctgatggaactggagtggttaaagcatcaaagcgattaaatcaacctctgagacgtcgagtaccagggattgagttgcttgaagaatgtttgaaaatagctcatgcaaatcatcagcgtgtgtatttacttggttcaaaaaatgaaattatcgaagcggctgaacgtaaattacacttaaaatattctaatgtgacgttcgcttaccatcatggatatattaatctagaggatgaaacggtggtcaaaagaataactagttttaatcctgactacatttttgttggaatgggattcccgaaacaagaggaatggattcataaacataattccaaatttaatcaaactgttatgatgggcgtaggtggctcatttgaagttttaagtggggcgaaaaagcgtgccccaaaattgtttcaaaagctgaatattgaatgggtatatcgtttgcttatagattggaagcgtataggcagaatgatgagtataccaaaatttatgataaaagtatctaagcaaaaaagaaaaaacaaaactgataaataa

SEQ ID NO: 1438 - DNA, 1026 bp, Staphylococcus capitis
atgaaaattgtagcattattcccagaaactgaagaaggtttagacaatcaattattaaatacagataaagccatcggtcttagagatttcttaaaagattcagaccatgaattagttatcttgaaaaatggtgaagaagacttagataaacacttaagcgatatggatattgtgattagtgcaccattctatcctgcttatatgactaaagaaagaatcgagaaagcaccaaacttaaaattagcaatcactgcaggtgttggttctgatcatgttgatttagatgcagcaagtaaaaatgatgtcggtgtagtagaagtaacaggtagtaatactgtaagtgtagctgaacatgccgtaatggacttacttattgtattacgtaactttatggaaggacaccgtcaatcagtcgaaggagaatgggacttatctaaagtcggtaaccaagctcgcgaacttcaaaacaaaacaatcggtatctttggtttcggtcgtattggtcaattagttgctgaacgcttaaaaccatttaacgtaactatccaacactatgatccaatcaatcaaaaagataacgaaaactcaagattcgttgaattcgaagaacttgtgaaaacaagtgatgcaattacgattcatgcaccattaacaccttctactgataatttatttaatgaagatgtattaaataaaatgaaaaaaggtagttatttagttaatacagctcgtggtaaaatcgtcaacactcaagcattagtcaacgctgttaatagtggtcaaattcaaggttatgccggcgacgtatggtacccacaaccagcaccagctgaccatccttggagaacaatgcctagaaatggtatgactattcattattcaggtatgactttagaatctcaaaaacgtattgaagatggtgtcaaagatattctaaatcgtttctttaataatgaacctttccaagataaagatgttatcgtttcaagcggaaaaatttcaagctcaagctatactgctaaataa

SEQ ID NO: 1439 - DNA, 390 bp, Staphylococcus capitis
ttgtcacaactgaaacgtaaattaaagagggtgaaagagatagtagctaataagaaaacccaacaatttgcgaatttagtacgttcttaccgtaaatcatatattggtaaaggccccgaacaagttaaagtcttttttaaagataactgggcaatttgtcatatgacaggtagtttaagtaaagttgaaaacttttatttgagaaataaagattttcagagtatgcttaaatatggacgtactgaagaaattaaagaattatataaacaaaaacctccagttgaaatggaggaacttgttggagcaaatttcgtaaaactttttacagatgttaatttagaagacgacgaagttgtttcaatcttcgtttttgataaatcaattgaataa

SEQ ID NO: 1440 - DNA, 795 bp, Staphylococcus capitis
atgagcgtttcggtaaatattgaaaatgtaactaaagaataccgtatatatagaaataataaagatcgaattaaagatgctttaatccctaaaaataaaaataaaacatttttcgctttagatggtgtttcacttacagcacatgaaggcgacgtcataggtctagtaggaattaacggttccggaaagtctaccttaagtaacatgataggcggctcactttccccttcctctggagaaattgaacgacatggtgatgtcagtgtaattgcaattaatgcaggtttaaacggtcaactaacaggagtagaaaacattgaatttaaaatgttgtgtatggggtttaaacgtaaagaaatcaaagagttaatgcctaaaatcattgattttagtgaattaggtgaattcatctatcaaccagtgaaaaaatattccagtggtatgcgtgctaaattaggattttcaattaatgtaactgttaatccagacattttggttattgacgaagcgctttctgtaggagatcaaacatttactcaaaaatgtttagataaaatttatgaatttaaagaagcgaaaaaaactattttctttgttagccataatctccgccaagtcagagaattctgtacaaaaattgcttggattgaaggtggcaaattaaaagaatttggtgaacttgatgatgtattaccaaaatacgaagaattcttaaaggacttcaagaagaaatctaaagcacaacaaaaagcctttagaagcgaattagatgaatcacgttttgttattaaataa

SEQ ID NO: 1441 - DNA, 822 bp, Staphylococcus capitis
ttgggtttaatgtcagcagttggaactgttttaaaggaacacctcaaaaacttctatttaattcaaagactggcacaatttcaaattaaaatctcaaatcacagtaactatttaggaatggcatgggaaattttaaacccagcgctacaaattatggtttactggctagtttttggtttaggaattagaagtaatgcaccaatacatggtatcccatttgtattttggttgctagtgggaattagtatgtggtttttcattaaccaaggtgttcttgaaggtaccaaatcaatttcacaaaaatttaatcaagttgctaaaatgaattttccattatctattattcccacgtacattgtaactagcagattttacggtcatttaggattgttagcaattattatcatcgcatgtatgtttaaaggaattataccgagtattcatattgttcaattattaatttatgtaccttttgcatttttattaacttcatccgtagccttgttaacgtcaacgctaggaatacttgtaagggatacacaaatgataatgcaagcgctcatgagaatattattctatatgtctccaattttatgggtacctaaaaatcatggtgtgagtggtgttatacatcaaattatgatgttcaacccagtttattttattgccgaatcatatcgtgcggcaattttattccatcaatggtactttatcgatcattggaaattgatgttatataacatttgtattattattttgttctttgttattggctctattcttcataaacgttatagagatcattttgcagatttcttataa

SEQ ID NO: 1442 - DNA, 996 bp, Staphylococcus capitis
atgacctttaaacaagatgtgtttccaataattgaagcattaagtcaacagaagtacgatattacagttattggaaaaatgaaggatcaagcgcatttaaaaaacttgaaaaatataacattcatacctgcaggaaataaaaatgtgattagccatattaaggcattaagctcagctaaagtcattattattgacacgtattatcttatgatgggcggatatcataaaaagaaaggacaagctgtcattcaaacttggcatgcagcgggagcgctcaaagatttcggtttgaccgaccatcaggtggacgcgaataatcaaacaatggttaaacaatataagcgtgtttacgatgcaacagactattatttaataggtggagaagagatggctcagtgctttaaggaatcatttgaagcacgtcctgatcaaatgttaaagtttggacttcctagattagtaaaatatttaaatattgatatagaagaagcacaacgtagtttgaaagcgaagtatcatattaaagataaattagcggtatatgtgcctacgtatagggaatctaaaattgcaaataggactataaataaagagaagtttgaacaaaacctacctaattatacgttattaagccatttgcacccttcgattagagatcgacaatcatcacaagatatcgatatatcttctttaatgattatggcagacgtcattattagtgattatagttcgctaccaattgaagcaagtttgctcaataaacctaccttattctataactatgatgagaaagaatatgaaaatgttagaggattgaattcattttattatgagattccaaatgactataaatttactgatgaaaatagtttaattcaagcactaaaagagaatgatgtaccactacaatcattatttaatacttggcatcgatataatacgaaagaaagtttaaacgagttagtcaattttataaataagttggtgaaattatga

SEQ ID NO: 1443 - DNA, 1068 bp, Staphylococcus capitis
atgaaattagcaataattattccagtatataattctgaagatactatcaaacgagcaatcctttctgtggatagtaagtcagattatgaaattatctgcgtaaatgatggttcgaccgataatacaaaacgcgtgcttacagaacttcagaaagagcataaaaatattaaagtgattaatcaagataatcaaggtgcagcacgtagtagaaacgttggattagaggcaatgtcagatgacgttgaaggatttctatttttagatgctgatgacgagttcttacctagtagaattgatttaatggttgaagcatttcaaaaaaatgaagaaactgatgtagttataggacaaatgggcagaggtatcaatggtgattggaaagtgattccgacacatgatgatattgtattggatgagttagtctcgcttgatcgcaagcctgaaattttacagtcgataggtcctggcgctaaattatttagtgccaaatatgcaggattacgttttgatgaggatgtcgtattctgtgaagaacacacgtttattgtgagagcattttctaaagcaagagatattcaacttataccaaatattgtttatgtatataatgaaagagaagggtcagttacagctcaacgtgctgatacatttctcccttatatgaaggacgctttaaaagtgcgtcgacgtgtcatggagttattgttactcattgaggaaaagacatattacagttatcggatggataatcttatcgtaagttatttaatacaagcgcatttaatgaagaatagtcaaatgactcaatcgttcatggatagtgttacaacttatatgaaagctatgcaacatacccattactcagggaatgcaatgtttagaattgtaagagctgttgagcaaagtgcaacaaattggacgaaaacgttatatcaacaatggagaaagacattacaaggtgttggtataggtcgacctggttatttacgttttaaagtttcagtacttcctagacgtgcatcattttcagggaagcaatcattaaaacgcatgttaaataagaaataa

SEQ ID NO: 1444 - DNA, 399 bp, Staphylococcus capitis
atgaaacgagtaattacttatggtacatatgatttactacattatggtcatatcgaattactgagaagagcacgtgaaatgggcgattatcttatcgtggcgctctctacagatgaattcaaccaaataaaaaataaaaagtcgtactatgattatgagcaacgtaaaatgatgttagagtctattcgttatgtagatttagtaatccctgaagaaggatggggccaaaaagaaaaagatgttgatcgttttgaagttgatgtctttgttatgggtcacgattgggaaggcgaatttgatttcttgaaagataaatgcgaagtgatttatctaaatcgtacagaaggtatctcaacaactaagattaaacaagaattatatggaaaagatgctaaataa

SEQ ID NO: 1445 - DNA, 1728 bp, Staphylococcus capitis
atgaaacaacaaaaccctttatttttcttatttaagaggctttcatggccatatgggttaatcattgcagcggttattattacttcgttaggaagtttgagtgggctattagtgccattatttacaggacgaattgtagataaattctctgtaagtagtattaattggggcatgataggaatttttggcgcaattttcttagttaacgcgttactaagtggtgtaggactttatttacttagtaaaattggtgagaaaattatttatgccattcgttctatattatgggaacatatcatccaattaaaaatgccgttctttgataaaaacgaaagtggtcagttaatgagtcgtcttactgatgacacaaaggttattaatgaatttatatctcaaaaattgcctaatttattaccatcagtattaactttaataggttctttaataatgttatttataatggattggaaattaacattacttacatttattacgatacctatatttgtttttatcatgattccactaggtcgagtaatgcaaaagatttctacaaatacgcaatctgaaatcgctaattttagtggtttactcggtcgtgtgcttacggaaatgagattggttaaggtttctaatactgaaagattagagctagacaatgcacatgttaatttgaaaaagatttacaatcttggcttaaagcaggctaaaatttcagccattgtgcaaccaatttcaggtgtagttatgttacttacaattgcgattattttaggcttcggtgccctagaaattggtacaggtgctattacgccaggtacattaatcgctatgattttctatgttattcaactttcaatgcctttaattaatttatctacgttggttactgattataaaagagctgtcggtgcaagtcagcgtatacatgaaattatgcaagaaccaattgaaccaactgaagctttatctgaatctaaagatgaaatcgttgaagatggagagctaagctttgaaaatgtggattttaaatatgatgttaagaaaatcttgaacgatgttacgtttaatatacctcaaggcaaagtaagtgcctttgtgggaccttcaggttcaggtaaaagtacaattttcaatttaattgaacgtatgtatgatattgaaaatggagacattaaatataatcatcgcagtatatatgatatcccattgtctaaatggcgtaataagattggttacgttatgcaatctaactcaatgatgagtggttcaattcgagataacatattatatggtatcaataggaaagtaacagatgatgaattaattgaatatgctaaacttgcgaattgtcatgaattcatcatgcaatttgatgaaggctatgacactatggttggtgaaagaggccttaaattatctggtggtcaacgtcaacgtattgatattgcgagaagctttgttaagaacccagatattttactattagatgaggctactgccaatttagatagtgaaagtgaagttaaaattcaagaagcgcttgagacattaatggaaggtagaacaacagtagtcatcgctcatcgactttccactattaagaaagcaggacaaattatctttattgataaaggtcaagtcactggtaaaggtactcatggtgaattaatggcatctcatgaaaaatataaaaactttgtcacatctcaaaaattatcagactaa

SEQ ID NO: 1446 - DNA, 1230 bp, Staphylococcus capitis
atgtttttactaattaatatcattgggttaatcgtatttttgggtatagcggttatattttcaaggaatcgtaaaaatattcaatggaaatcgatactgattttagtcatcttgaatttgtttttagcatggttctttatttattttccatggggaagaaatggagtcaaaggtgcggcaaatgggatagcatgggtgatagaatctgcgcacaaaggaactggattcgcgtttgctagtttcactactggaaagcagatggatatggctattagcgcgttatttcctatcttattagttgtaccgttatttgatattttgatgtactttaatatacttccaaaaattattggaagtattggatggttacttgctaagattactcgtcaaccaaaatttgaatcattctttggtgtggaaatgatgttcttaggaaatactgaagccttagctgtttccaatgaacaactgaaacgtatgaatgaaatgcgtgtattaactttggctatgatgtcgatgagttccgtttcaggggctattgttggtgcttatgttcaaatgatacctggcgagctcgttttgacagctattcctctaaacataattaacgcgattatcgtgtcatctatactgaatccagtatctgttgaggaaaaagaagacgttatttatagcattaaagatcatcaagaagagcgccaaccattcttctctttcttaggagattcagttttagcagctggtaagctagtgcttattatcatcgcatttgtgattagtttcgtagcgttagctgatttaattgatcgctttattcatctaatcactgggttaattgcccatggttttggttggaaaggtagctttggattaaatcaaattttaggtgtatttatgtatccattcgctttattacttggattgccttggaatgaagcgtgggaagttgctcaacaaatggctaaaaaaattgttactaacgaatttgtagtaatgggtgaagtttctaagcaagtcaattcactttcaccacaccatagagcagtgatttcaacattcttagtatcatttgctaacttctcaactataggtatgattgtaggtacattaaaaggaattgttgataagaaaacatcagattttgtatccaaatacgtaccaatgatgttattggcaggtattttagtatcattactaactgcagcatttgttggattatttgcatggtaa

SEQ ID NO: 1447 - DNA, 834 bp, Staphylococcus capitis
atgaaaagaacaatcagagatatattattagttattgctggttcattcattttctcagcaggagttaatgcttttattatttctggtaacttaggtgagggaggagttaccggtatagcaattgtattatattacgcatttcatttatcacctgcaattacaaactttgtggttaatgctgtattaatcatcattggctataagtttttaagtaaacgtagtatgtatttaacagttgtagcaactattttaatgtctatctttttagatctaactgagtcatggcacgtgcatacaggtaatgtgattgttaacgcagtttttggtggtacgtgtgtcggtgtgggtatcggagtcatagtattagctggaggtacaactgctggtactgtcatattagctagaatcgtaaataaatatttagatatcagtactccatatgctttgcttttcttcgatttacttgtggtattaatttctttaactcaaatttcattagataaggctttagtaactattatttctttatatataggtactaaagtcatggaatatgtgatcgagggtttaaatacaaagaaagcaatgactattatttcgagtacgcccgatgaggtagctaaagccattgatgaacaagttggtagaggtttaacaatactcaatggtcatgggtattatacacgtgaagaaaaagacgtgttatatgtagttatctctaaaactcaggtctcacgtgctaaacgtattattagaaatattgatgaaaaagcatttttagttattcatgatgtaagagatgtgtatggtaatggtttcttactagatgaataa

SEQ ID NO: 1448 - DNA, 798 bp, Staphylococcus capitis
atgagtcgtttaaacggtgaacaagttaaaattggttacggtgatactacgattattaataatttagacgtagaggtcccagatggtaaagtgacttctataattggacctaatggttgtggcaaatctacattgcttaaagcgttatcacgcttgttgtctattaaagaaggtgcaattcatttagatggtaaaagtatccatgctcaatcaactaaagaaattgctaagaagattgcgatacttcctcaatcacctgaagttgctgacggtttaacggtaggtgaactcgtatcatatggacgttttccgcatcagaagggctttggccgtttaacagcagaagataaaaaagaaattgattgggcattatcagttactggtactagtgaattccgtcatcgttcaatcaatgatttaagtggtggacaaagacagcgtgtttggattgcaatggcattagcacaacgtacggatattatattcttagatgaacctacaacttatttagatatttgtcatcaattagaaatactagaacttgtacagaaattaaataaagaacaaggttgtacgattgtaatggtattgcatgatattaaccaagctattcgcttctcggatcatttaattgctatgaaagatggcaatattgtagcaaatggtacaactcaagaagtacttactaaagataatttagaaaaagtattcaatatcgatgtggtattagatgaagatcctcgtactggtaaacctctacttgttacttatgatttgtttagtaagacttactcgtaa

SEQ ID NO: 1449 - DNA, 942 bp, Staphylococcus capitis
gtgctaatactagcactatttctttctattttatttgggaaagcacatgttgatattcctaccatatttgatgcaattttcaattataatcctaaaaatcaaaatcataatatcataagtgaaattagaatacctagagatttaggtgcaattcttgtagggatggctttagctgtagctggtgctgttattcaaggtgtaactaagaatgggcttgctgatccaagtttaattggactaaactcaggtgcaacgtttggtttggcaatgacctatgctttttatcctgaggcaccatttttattattaatgatatctggatttttaggtgcacttttaggtggcttcatcgtgttaatgattgggcggtctaggcgtgatggatttaatcctatgcgtattatcttagctggtgcagctataagtgcgttattaactgcactaagtcaaggtgtcgctcttatatttaggttaaatcaatctctaactttttggagtgctgggggaatatcaggtacaacatggggacaacttatatggagtggcccaataattatcgttacgctaattattattttagttattagcaagcaacttactattttgaatttaggtgaatcacttgctaagggattaggccaaaatgtctctatgattcgcggactaagcttagttttatcaatgatattcgctggcgttgctgtggcaatggttggacaaattgcttttgtaggcttaatggtacctcacattgttcgctttattataggtacagattattcaaaagtgctcccactgactgcaatatttggtggtgtattagtattagttgctgacatgattgcaagactactaggcgaagccccggtaggagcaattatttcgtttattggcgtaccttactttttataccttgttaaaaaaggaggacgttcaatatga

SEQ ID NO: 1450 - DNA, 1017 bp, Staphylococcus capitis
atgattgatccgaatttaagacgtaaacaaatcattacttttatcgtatttgccatattactatttgcagcatgtacttggagtattgcttcaggggaatataaaatacctgtgccaaatttctttaaaactctaattggtcagggtgatgatacggactcgcttattttaatagatttccgacttcctcgcatgttgattacaattttagcaggtgcagcgctaagtatgagtggtgccgttgttcaaagtgttactaaaaatcctatagcagaacctggtattttaggaattaatgcaggcggggactttgcgatagcattatttgtaacaattggacaagttaaaccagataatttcgtttatgttttacctataattagtttagttggtggtgtcgctacagcattagttatatttatttttagtgtaaataaatatagtgggttaacccctgccagcatggtattaataggtgtaggtatgcaaacggcattatatggaggctctattaccctgatgtcaaagtttgatgaagatcaatcagaattcatggcaacttggtttgctggtaatatttggggagatgattggacatttgttcttgcatttattccttggatcatggttatcgtgccatatctgttatttaaatcaaatgaattaaatattattaatacacatgaacatgttgctaagggtttaggcgttaaagttgaacgtgagagaatagtgttattttttgtagcagttattttatcttcagtcgctgttgcggttgctggtgcaatttcatttattggtttgatgggaccacatatagccaaacgtatagtgggtcctagacatcaactttttttaccaattgccatattagttggtgcatttttacttgttttttccgatactttaggaaaggttattctccaaccgtctggcgttcctgcaggtatagtagttgctattataggggcaccctacttcttatacctaatgtatagaacaaaaagtgtatag

SEQ ID NO: 1451 - DNA, 969 bp, Staphylococcus capitis
atgaagaaattaataaaagatagacaacagtttttaagtgatatgttagatggcttaaaagtagcaaatcctgaattagatgtaattgaagatacagttgtagtacgaaaagataaaaaacaaaatggtgtagcacttgtatcaggaggtggaagcggtcatgaacctgcacatgctggttatgtcgcgcaaggtatgcttgatgctgcagtttgtggtgaagtttttacttctccaactccagacaaaattttagaagctattagggccgttcacactggtgatggtgttttactcattgttaaaaactatgctggtgatgtgatgaactttgaaatggcccaagaaatggctgaaatggaagatattcaagttgaaacagtaatagttagagatgatattgcgattagtacgccagaacaaagaagaggtgtagctggtacagttttaattcataagtatgcaggctttttatctgaaaaaggagtaccattaactgaaataaaagaaaaagtagagttaatgatgtctgaaataaaaacaattggtatggctttaacacctcctatggttccaaccacaggtcaatatgggtttgatattgatgacaatgaaatggagattggtatcggcatccatggtgaaaaaggtttgcatcgtgaagctatacaaccagtagatcaaattgtttcaacattagtagaagaattagataaagaaatatcaggagaagaatttatagtaatggttaatggtatgggtggcacaccactatctgaactcaatattgtaactaaatatctcaaagatttatttgataagaagcattatggggtaaaacattggtatgtaggtgattttatgacatcacttgatatgcaaggcttttctatcacattagttcctgctaatgaagagtggttaacagcatttttagcacctacaacaagtcgttattttaactcataa

SEQ ID NO: 1452 - DNA, 576 bp, Staphylococcus capitis
atgaatgtagaaaaaatgaaaactcaattattaagtttagcggatacttttaaagataaagaatcagaattgaccgatttagatagatcgataggtgacggtgaccatggcgtaaacatggaaagaggtttctctcatttgaaagataatatcgatgataaagatatggcttcattgtttaaatcaactggaatgacattgatgtctaacattggcggagcatccggaccattatatggctttagttttgtcaaaatgtctagtgttgttaaggatgaaatcgataaggataacctaaaagtattattaaaaacatttgcagatgcaatagctcaaagaggtaaagttgaattaaatgaaaagactatgtatgatgttgtcgaaagggcaagcgaagcgctacaacatgatgaaaaagtgaccttagataaattacaaggttatgctgacgatactaaagatatgacagcgacgaagggtagagctgcttattttaaagaggattctaaaggttacattgatccgggtgcacaaagtatggtttatatacttaatgctttaataggagatgagtaa

SEQ ID NO: 1453 - DNA, 378 bp, Staphylococcus capitis
atgcctacaatagtgttagtaagtcatagtgttgatatcgcaaacgggacgaaacaattgcttgaacaaatggtgagtgacgttgacgtcttagcatgtggtggcacagatgatggtggtataggtacttcttttaatagcatccaagatgcaatcaatcatttagaagacgatgcgttatgcttttttgatttaggatctgctgagatgaatttagacatggcaatagaaatgtatgaaggcgaccatcaagttttaaaagttaatgcgccactcgttgaaggtagttttactgcgtctgttaagctgtctactggtggtagtgttgaagaagcaattgaagaagtttatcgtacgtctttttcaagtgaaaattaa

SEQ ID NO: 1454 - DNA, 501 bp, Staphylococcus capitis
atgcaacaccttataaagagacatgtattgaatggcgaattcgagcagatacgacaattaatgtccgaaacagattttatggaatttgaagaggcatatatttctagcgctcatgaagtagagagtatgatgttttatacatgcattttagatttaattagaaatgaagaaatatctgaattgcatgatttagcattcttactacttgtttatccgatgagtgaatacgaaggtgctttagattctgcatactatcatgctgagtcttccataaaactcactaacggaaatgaagttaaaagtttactacaaatgctattgcttcacgcaattccagagcctgttatttctgataagaaagcatttgatgtagctaaacgtattcttaaacttgatcctaataataatgtagcacgtaatgtgcttaaagacactgcaaaacgtatggacaacattgttgtcgatattaatgaattaaacaaacatagagatgcacgttag

SEQ ID NO: 1455 - DNA, 1068 bp, Staphylococcus capitis
atggggctgaataaagaagcaataaaaataggatttgcttatgtcggcatcgttgtaggggcaggattctcaactggtcaagaagttatgcaattctttacaccttttggtttatggtcttatatcggtgttttaatctcaggtttcattctaggatttatcggtagacaagtagctaaaattggtacagccttcgaagctaccaatcatgaatctactttacaatatgtatttggtgagaaatttagtaaagtatttgactatattctagtcttcttcttgtttggtatcgctgtaacaatgattgccggttcaggatcaacgtttaaccaaagctttcatatacctacttggctaggcgccttgatcatgacaattgtaatttatttaacattattacttgattttaataagattgttagagctttagggattgttacaccatttctaattataatggttatccttattgcagtttattatttatttactggtgatatctcaattgcccaagtaaataatacagtaccagaaacaagtgcatggaaaggtatattctggggacttgtatacggaggtcttgcttttgcagttggctttagtacagtcgtttctattggtggcgatgcgtctaagcgtagagtttcaggtgctggtgcgatgttcggtggcgttatttataccatcttacttgcactaattaacttttcactacaaacagaatatccaaaaattaaaaacgcagatattcctacattagacttagccaactcaatcaatccatggattggtttagtattaactgttattatgttagctgtaatgtataacactattttaggactttgttattcattcgcggcacgttttactgaaccatatagcaagaaatatcatatctttatcattattatgatgattgcagcttatgttttaagtttcgtaggattcgcagatttaattaacgtgttatataaatttatgggcgttgttggtatgtttatcgttgtagcagtactaatcaagtacttcaaacgtaaaaatgatgacaagaaacacattgcataa

SEQ ID NO: 1456 - DNA, 1050 bp, Staphylococcus capitis
atgaaagaaaaatataaatggttgttgataacgttattcatcgtcataatcattgcaatcgtcttgggttttcttttgaaaaatcactatgataaaggacaggaaaaacaacaaggtagagagcatgttcaaattaataataagagcgtgaaattatttcaaaatatttcttatggcgaaggactacctaatagtaaattagatattattacgccttctgatatgagtaaagataccaaattgccagtaattttttggatgcatggtggtggttttatagcaggtgataagcaatataaaaatccacttctgtctaaaatagctgaacaaggatatattgtagtaaatgtgaattatgcgttagctccacaatataagtatccaacaccgctagagcaaatgaatgaggcagttaaatttataaagcagaataaacacgaactacccattgatttcaaccaagttgttattggtggtgattcagcaggagctcaattaacgagtcagtacgttgcaatgcaaactaataaaagtttacgcaaagaaatgaatttcaaacaacaattcaagccatcacaaatcaaagcagctatattctttggtggtttctatgatatgaaaacagtgaaggcaacagaatttccaagaattcaattatttatgaaaagctatacaggtatgaataactgggaaactaattttaagaatttatctcaaatgtcgacgataaatcaagtcactaaacaatatccaccaacttacttatcagttggagatgctgatccattttatagtcaaaatgaagaattctataaagcacttaaatcagaaaatgtacctgtagatacgctattttatgatggaacacatcatttacatcatcaatatcagtttcatttagataaaccagaatcaaaagagaatattaaaaaagtattgttatttttaagtagaaatacttcatcttccggcgttgaaagtggagaatcaacagatgtgaaatccggtaatcaaacaaataatagtgtatcgctatatccatttgaataa

SEQ ID NO: 1457 - DNA, 507 bp, Staphylococcus capitis
atggcccacgtaattcgtgagattagtataaaagacgttgaaaactttatagatttgttaagcaaaatttatgatgaatcagattttacgttttataaccctggtgagtattcaccaagcattgcttctgttagtcaaagtttagaaagttacatcacaacaccttcaaaagcaatttttgtagcagaaagtgacgaacaactcgttggttacgcatttgtgaatacagagactttcgaacgtacacaacatgaggctgtagtctatcttggtgtaaaaaagtattatcaaaaacatggtgttggtcaagcgctcatcaattcaatcgaagcttggtcacttaatcataatattagacgcatagaagctacagttgtcactgaaaattcacgagctattgaactttttaaaggtacaggtttcactatcgaaggtgaacttaaagataaactttttataaatggtcgttatttcaatgagtacgtaatggctaaaatattaaattaa

SEQ ID NO: 1458 - DNA, 924 bp, Staphylococcus capitis
atgaagcctaaagttttgcttgcaggtggaaccggctatatcggtaaatatttgagtagagtaatagaaaaagatgctgagctttacgcattatctaaatatcctaaacctgataaaggatctatagaagagattacatggttgaagagtgatatttttaattatgaaaatgtagttcaatctatggcaggcatggatgtagctgtgttttatttagatccaactaaaaactctgcaaaactaactcaagcaaccgctcgtgatttaaatttaatagctgcagataactttggtagagcagcagcaataaatcaaattaaaaaattaatttatatacctggaagtcgtcacgacaatgaaacgatggaaagattaggcgcttatggtgctcctgtagaacgtacaaatgtagaagtgaaacgtccgcatattaatgttgaattacaaacttccaaatatgatgatgttcgtacagcgatgaaaatggtcctgccgaaaaagtggactttgaatcaacttgtagattactatagtcaatggttagatgaaactaaaggtacgtttgtacataccaaaaaagaagatgaagattatattatttatcgtaaaaatagtagaaaacctttagcaatttttaagaaaaaacagactgccgaagatatcattacgttacatcttgttggtggtaagttagccaaacccaatcttaaaaagcaaggtaagttagaatttagacttcttaaaggaacgtctttagtgatggttcacttatatgattatatacctaaattattctggccgatttattactttattcaagcacctattcaaggtttacttatgcgagggtttgagattgattgcaggattaagcattttcaaggacgtgttcaatcaggtgagaaatttaaatatactaaataa

SEQ ID NO: 1459 - DNA, 675 bp, Staphylococcus capitis
atgcaaatactattggtcgaagatgacaatacgctatttcaagaattaaaaaaagaattagagcaatgggatttcaacgtagtaggtgtggaagattttggtaatgtaatggacacttttgagagatttaatccagaaatcgttattctagacgttcaactccctaaatatgacgggttttattggtgtagaaaaatgagacaagaatcaaatgttcctatcttattcctctcatcaagagataatccaatggatcaagttatgagtatggaactcggtgcagatgattacatgcaaaaacctttctatactaatgtacttattgcgaagttacaagctatttatagacgtgtctatgaatttggcgtcgaagagaaacgcactttaaattggcaagatactgtagtggatttatcaaaagatagcattcaaaaagccgacaaaacaatcttcttatctaagacagagatgattattttagagatgcttattaataaaaagaatcaaattgtgacacgagatacgttgattacagcactatgggatgatgaagcgtttgtgagtgataatacacttaccgttaacgtgaatcgccttagaaaaaaattggcagaaattggtatggatgatgcgatagagacgaaagtcggtaaaggatatatggctcatgaataa

SEQ ID NO: 1460 - DNA, 960 bp, Staphylococcus capitis
atgttgggtatcgcctacattgattatgatatttcagttgagagtgtaggctatattgttgtgctcaatctaggattaagtgtccttttcttaatatttactttcgtaaaggaagtccgcttgtcaaagcacttttataaaaacaaagaaatagaggaaatcaaacataaagatttagcggaaacgccatttcaacaactaacaattgattacttatatcgtcatatcacagcacaaaaagatcaggtcgttgagcaacaattacaaattaataaccatgaacaaacaatcacagagtttgtacatgatattaaaacacctgtgacagcaatgaaattattaatcgatcaagaaaccgatgaacaacgtaaaaaagcgttattatttgagtggtcgagaattaatgagatgttagataagcaattatatttaacgcgtttagaatcaaagaatcatgatatgtacttcgatcatgtggagttaaaacgtatggtgattgatgaaatacaattaacacgtcatatcagtcaagcgaaagggataggattcgatctagactttgaagatgtcgataaagtgtttacagatgtgaaatggtgcagaatgatgattagacaaattttatctaattcattgaaatatagtgataatactacaattgaattatcaagttatatgaaaaatggtcacgttgttctaaaaattaaagaccatggaagaggaataagtaagaaagacttacctcgtatattcgatagaggattcacatctactcttaatcgaaatgaaacagcttcttcggggatggggttatatttagtgaatagtgttaaagatcaattgagcattggcgtgaaggttaagtctgtagtaggcgaaggcactacattttatttaattttccctcaacaaaatgaaattgtagagcgcatgtctaaagtgacaagattgtcattttaa

SEQ ID NO: 1461 - DNA, 762 bp, Staphylococcus capitis
ttgactatattagaagttaaacaattgtcaaaaatatatggaagtaaaaatgtagctcaagaagtattaaaagatattaatttgagtgtagatgaaggcgaattcatctcaattatgggaccatctggttcagggaagacaacattgttaaatgtcctaagctcaattgattatatgacaaaaggttcaattacattgaatggtaaacaattagaaagattatctaataagcaactttctgaaataagaaaaaaagatattggttttatcttccaagattataatatcctacatactttaacggtaaaagagaatattatgctacctttatctgttcaaaaagttggaaaagaagaaatggctagacgttataatcgaattgttgaagcgttaaatattagtgatattagtgataaatatccatccgagttatctggcggccaacgtcaacgtacttctgcagcaagagcattcattaatttaccttcaattatatttgctgatgaaccaacaggagctttggattctaaaagtactcaagacctactcaaaagattgacctatatgaatgaaagatttcaaacaacgattattatggttacgcatgatccagttgcagcaagtttctcaaatagagtcgttatgctaaaagatggacaaatttttactgaaatatatcaaggtgatgatgataaacaaactttttataaagaaattatcagaacacaaagtgtacttggtggagtaaattatgagttttaa

SEQ ID NO: 1462 - DNA, 1578 bp, Staphylococcus capitis
atgcttgagcaattaatgacatttgtaataacagtaattattggtattgctgtaggtatttttggttcgaaaatacttttaatgattgtgcttcgattactgggcataaatattagtgtgtctattatttttaattttcatgcagtgttagagactcttttactcattttggtagcgtatatacttattattattcaaagttacatttttatacgtaaacgttcgattcatgagcttgcacatgattttactaaaaaagaagtaaatgatactaaaattacattgagtgaagttatcttaggtttacttgggattattatgatttgtgttggatactttttatcaactaaattagttgaaaatgttgattcaattttacaacctttcgttattctatttttaactgttttaggatcatactttttctttagaagtactgtatctttaattttagaaactatacaatactttagaaatggcaatgtcagtgtgacagatgtcatgtttacatcatctatcatttaccgtatcagaaaaaatgctttttcattaacggtgatggcagttgtgtcggctattacagtttctgtgctatgttttgcggctttaagtagaagtactttaacgaatgaagtcttactaagttcacctcatgacgtcactttgaaaagtcaaaagcaggcaaatcagttagcatatgaattaaacaatcgtaacgttgaacattactataattataaagaagttgtctatgctcatttgtataaagatcatatgtttacagaaggtatttcaaggccaagtgtgattgctgtaacaagtgataaatacatccctaatgttaatattggtagtggtcaaacagatatcatagtccctagaggttcaattaaagatgtagttaaagttgatcgtaaaggttcaactcttataggtacaaaaaataattatgttaaagtaaaactcagaaaagcaattaataaagtttactttatgtctagtgtagatttaggtggagcaacactcgtgttaaatgatgaggattatcagagattgagagaacacgctaaaggaaaacatattgtatctcaatatgggtttgatataaaacacaaaaaggacttacctgaattggagaaaatcgtccaaagtattagtaaagatattgaaacacgtagtgaagctgcaagtgaaatatcgagtttaactggcgtactattatttgtaacatcattcctaggaataacgtttttaattgctgctggctgtattatatatattaaacaaattgatgaaactgaagatgagttagaaaactattctatattgagaaaacttggttttacgcatcaagatatggcaaaagggttgaagttaaaagtcatttttaatttcggtttacctttgattattgcgttattacatggttattttgcgtcgattgcctacatgcatttaatgggtgtaactaatcaattacctatatttattgttatggctttatatacaggtatttacgcagtgttcgcgattataggctataatcattctaagcgaacaattagacattcaatttaa

SEQ ID NO: 1463 - DNA, 618 bp, Staphylococcus capitis
atgtttagtaagaaaaaggataagttcatggttcaattagaagaaatggtattcaacctagatcgtgcagcaattgaattcggaaaaatggatttcaacacacatttagatttgaaagcttattctgataatattaaaacgtatgagtcacatggtgacgagttgatgcaccaagttattactgacttgaatcaaacgtttattacaccaatcgaacgtgaagatatcctatctttatgtaatgcaatcgacgatgttttagatgcgatggaagagacatctgctatgtttgaaatgtattcaattgaatatacagatgaatacatggctgaatttgttgaaaatattcaaaaagcagttgctgaaatgaagttagcagtaggattattagtagacaaaaaattatctcacatgcgtattcattctattaatattaaagaatttgaaacaaattgtgacggaatcttaagacagtcaatgaaacacatctttaacagtgaaacagatccaatcacattaattaaaataaaagatatttatcaaagtatggaagaaattgctgataaatgccaaacagttgctaataactttgaaactataattatgaaaaatagctaa

SEQ ID NO: 1464 - DNA, 1011 bp, Staphylococcus capitis
atgtcatatattttaatcgtcacgatagctatagttatattttcattagtatttgactttatcaatggtttccatgatactgccaacgctgtagcaactgctgtttctacaagagctttaactcctagatctgctattttattagcagcagtaatgaactttattggtgccttaacatttactggggtagccggaacaattacaaaggatattgttgatccatttaaattacaacatggtctagttgttgttttagcagcaattattgcagcaattatttggaacttagtaacttggttatatggtattccaagttcttcatcacatgcattaattgggtcaattgctggtgcggctatagcttctcaaggttcatttgcagtactacattatcaaggattcacgaagataattattgtattaattatttcaccaatcattgcattttgtgttggttttattatgtattctatcgtgaaagtcgtatttaaaaacgcaaatttaacacgtgcaaatcgtaactttagatttttccaaatctttactgcagcattacaatcattctcacatggtacgaacgatgctcagaaatcaatggggattatcactttagcattaatcgttgcgaatcttcagactggttcaagtgtagaacctcagttatgggttaaaattgcttgtgccactgcaatgggtctgggtacagcagtaggtggttggaaaatcatcaaaactgttggtggtaacattatgaaaattcgtccggctaacggagcagcagcagatctttcttctgcattaacaattttcgtagcgtcatcactacacttcccgttatcaacaactcacgttgtctcttcatcaatccttggtgtaggcgcttctaaccgcgctaaaggtgtaaaatggagtacagctcaacgaatggttattacttgggtaattacgttaccaatttcagcattattggctggcattgtgtactttatcatgcatctatttttaaaataa

SEQ ID NO: 1465 - DNA, 810 bp, Staphylococcus capitis
ttgaaaaagttagcctttgcagtaacagccgcttcaggtgcagccgcagtactttcacatcatgatgctgaagcttcaacccagcataaagttaaatcaggagaatctttatggagtattgctcaaaaatataatacttcagtagaaaacattaaacaaaataataatttaaataataacatggtgttccctggacaagttattaatgtaggtggaagtgcttcacaaagctctaattcaaacgcttcttctaacacaggttcagcttctacacacactgtaaaagctggagaatcattaaacattatcgccaataaatatggtgtttcagttaacgctttaatgaaagcaaacaatttaaatggttatttaattacacctggccaaacattaaaagtacctaatggtggatcaggcgctggtgcagctggtacagctactccatctacaggaaatgattacaactcaccttcatttaaccaccaaaacttatatactgaaggtcaatgtacttggtacgtgttcgataaacgtgcacaagctggtaaaccaattagcacatattggtcagatgctaaatattgggcagcaaacgcagcaaatgatggttatcaagtagataataacccaactgtaggtgctattatgcaaagcactccaggaccatacggtcatgttgcttatgttgaacgagttaatggagacggaagtattctaatctcagaaatgaactatactaatggaccatacaactctgattatcgtacaattccagcttcagaagtatcactttacgcttatattcattaa

SEQ ID NO: 1466 - DNA, 660 bp, Staphylococcus capitis
atgtcccaatcgactcaaagtgcaaacaaatcacaaaatcactctaaagataagcaccaatcccatgcttacggtaaggtatggctgttctttatgtactattggattatttttggaataggttgttacttcggtcaatacttacctatgtcttggagaaaacctctatctatagcgttatttgttattttactggctacattatttataaaacgggcgcgtaaatatggtctcgtcatctcgcatatatacgctattattgtcggactactttcatatgcgatgtttactgcatatctacaaaatttaggtgcagaagtattttataaaaatattttacttgcaataggtgcatttatagcgtttggtattgtagggtatttcttaattaatgacgcatcaagtatgggaaaatatttatttgttactttaatagcattaattattgctagtttaataggattatttattcataaccctatattccatactgtaatcacagttattagcttgttattgttcctattatatacactttatgatttcaataggatgaaaagaggtcagttttcaccacgagaaatgggctttaacctatttatcaatttattaaatataatagaagatatactaagattagctaatcgtttcaaaaattaa

SEQ ID NO: 1467 - DNA, 2064 bp, Staphylococcus capitis
atgcatcttcaacaattcagaaagcaaagaacgattaataatgaattatatattgttaataatatggatgtttttggaatcaatgacaatggaactacattagaaatgtacatttctagtgattggtttgcagaattaggatatgcattttttgattaccactacactgctgagttgattaaatctacaaatgaaattaaatatttgatggctcaacttgcattaaattatattgatgggaacactgaaaaagaatatgaacttattaataaaattgttgaaatgcttgctcaggaagcgagtatagataaaaaaatagccgaagatcaatacatttatgccttttatggtgacttaaaagatgaattagattacatatacaatcatatgagtgaaaggttaactttaagagatatctcgaaccaactctacatatcaaaatctaatctgtcttctcaatttcacactctaatgggaatggggtttaaaaaatacgttgatacattgaaaattagtaaatctatagaaatgttattaaccacgaataaaacgattagtcaaattagtgatgcactaggatttagtaacgcctcgacttattctaaattattcaagaattatctaagtgtgacacctaatgaatatcggactatgaaaaaatatgataaatataatggttgtacagatgaaacggtgccagaaaacaaaaaaaggccattaaaaaaactcatccgttcagttatacctaacgatgtttcagatatatatgatgaaattagaattgataattcacaaattgtaaatgcttctcctttttattcagtcatccaaattcatactattgaagaaatgaagttgctatttttagaaggactttatcagaaaatgggttatgaagggtctaatattatcttctactttatgccttatttatatgagtatggcaaattattaacacaaaatgaaaaaaattatattagccaaactattattgaaaatgatttacatatagctttcaatgttaatgaaattgaacatataaatgacttaatagagagttttaaaacaagtcttaagcaattggacaagaaaaatcacaattctaattatgagattcaatttattttcaatttaaatgataaagatatacgtagtgtatatagagatattttaaaaatgcagaatacacacataaattatactatcggtttagatattagttgtatggtcgacgatccagctcaatttaaaactttagaagcgcaaattaaaagactaaaatttgattatctctatatagacaatgcacaattgacatctccttatttaatggatagcaatgaaggtcttctattgaaaaatgttctacagttgaaacacttaagtgtaaatttaaatcaatttgattttagtaaagaaaacctcatctttttaaacttagttaatcaccaactgttaaataatgaagagattgatttaagtcatagtgcaccacttttatatctgtctgttattaaattaaaagagcatttttcagggtacggcttaaatttattttctcatccagatttatttaattctgttcatttatttgatgaaaatggttttaaaacaacatatgggttaatatttaatgatttaagttggatgattaatcaaaacaaagttaaaaatgggttctataacattattgatagtagcgatagatatctcctttatttatatgattggcgagtagttgaaagcgaatcaagcatagacaactttaataatattgatatttacattaatttttgtgaagaagaacttaaagatgaatatatatgtatgattgtaaaagttgataatgagagtgggaacattaatcatattattccacctaatttacggaatgaatatcaatggtctactaaatttttaatcaaagtagaagataattttagacctaatattgaaatttttgagcatgattttacagaatcgtcattaaagctaagcttgaagtacaattcggcttatcttgtaaaaatctataaaaaaaataacaaaataaaaaaggcgtaa

SEQ ID NO: 1468 - DNA, 360 bp, Staphylococcus capitis
ttgaatgaacagaagctagaaaaactactaggattttacaaacaatataaagcattatctgaatatatagataaagaatataagttgacattaaatgatcttgctgtactagacttagctagaaagtattgttcggatgaacaaatacttatgcaatcatttttaaaaatagctataagtgaattagaattaagtagaacaaagttactagtatcaattcgaagattaatagataaagagaaattaagcaaagtaagatcaactagagatgaaagaaaaatttttctatatatgagtgaagaaaacttggaaatatttaatgctttatttgatgacgttgaaaactttttaaatatctaa

SEQ ID NO: 1469 - DNA, 717 bp, Staphylococcus capitis
atgggacgtaaatggaacaacattaaagagaaaaaggcccaaaaagataaaaatacgagtagaatttatgccaaattcggcaaagaaatatatgtagcagcaaaatctggagaacctaatccagaatctaaccaagcactaagattagtattggaacgtgctaaaacatattcagtacctaatcacattattgatagagctattgataaagctaaaggtgctggtgaggaaaattacgatcatttaagatatgaaggctttggaccaagtggttcaatgttaattgttgatgccttaacaaataatgtgaatcgtacagcttcagatgtgcgtgcagccttcggtaaaaatggcggaaatatgggtgtttctggttcagtagcttacatgtttgatcatacagcgactttcggtgtagaaggtaaatctgcagatgaaatcttagaaacattaatggaacaagatgttgatgtgagagatgtcattgatgaagatggattaacaattgtttatgcagaacctgatcaatttgctcaagttcaagatgctttacgtgaatctggggttgaggattttaaagtagcagaatttgaaatgttgcctcaaacagatattgagttatctgaagaagatcaagccacatttgagaagttagtggacgcacttgaagatttagaagatgttcaaaacgtattccacaatgtagatttaaaataa

SEQ ID NO: 1470 - DNA, 468 bp, Staphylococcus capitis
atgaaaacttcaaaagagtggattcaagaacttaaattaatagctcatcctgaaggcggttattatagagaaacactacgtgaagatacgcttaatagagcaccttatagtagtatatatttcctcttaacacatgacaatatttctcattttcaccgaattgacgcagatgaagtatggtatcatcatgccggagaaacattaactattcacatgattacaccacaaggtaagtatcgtagtgtgaaattaggtcaaaatatatccgctggagatgtattacaatattgtgttcctaaaggtacaatatttgcatcttctatagatgataatgagggttatagccttgtcggatgcatgtgtcaacctgccttcgaatttgaacatttcgaattgttgaaacaagaccaattgttaaagcattatcccgacttagaaaatattataagaaaatacgctgtattgtaa

SEQ ID NO: 1471 - DNA, 636 bp, Staphylococcus capitis
gtgaaagtaaaatatatagacaaacgtcactggcgtcgcctggtagagagagagtatacagaggttaaagttaataataatagatttaaaggtattatcggcttggtcacgatgaaaaaggttcgtgagcctttagaggtgacggtagttggacaaaacataatagttgcagatgacaattatagatggttgcaaatactaccagaaaaaaagcgatatagtattacagtcatgtttgatgataaaggtaatccgctagaatattattttgatattaatattaaaaatatcactcaaaagggaaatgcacgtacgttagatttatgtttagatgtgctggtgttacctactggggaatatgaacttgtagacgaagatgatttgatgtatgccttgcaaaataagcaaatttctaagaaacaatatcatgaggcttatattattgctcatcaattaatgattgaaatagaagagaacttttcagaggttcaagacaaggtcatgcattgttacaataaaatttatcataaatctctaagaaataagcataaacgtccttttaaacccaaaaataagcataaacgtccttttaaacccaaaaataagcataaacatcaccgacgtaaagcaaagtaa

SEQ ID NO: 1472 - DNA, 855 bp, Staphylococcus capitis
atgaaaattgatgattatcgtttactcatcactctagatgaaacaaaaacgttacgtaaagcggcagagatattatatatttcacaaccagctgtaactcaacgtttaaaagcgattgagggttcgtttggagtagaaatatttattcgtacaaaaaaacaattgatcactacaactgaaggcgctatgattattgaccatgcgcgtgatatgttgaaacgtgaacgtttattcttcgataaaatgcaggcacatatcggagaggtgaatggtacgatttcaataggatgttcgtctttaatcggccaaacgttattacccgaagtattgagtttatacaatacacagtttcctaacgtagaaatccaagttcaagtaggatctactgaacagattaaagcaaatcatcgagattatcacgtcatgattaccagagggaataaagtcatgaatctatctaatacacacctatttaatgatgaccactactttatttatcccaaagatcgacgtgaggatgttacaaagttaccatttattgaatttcaagcagatcctatttatattaatcaaattaagcaatggtacaatgataatttaggtcaagattatcatgcaacgataacggtggaccaagttgcaacttgtaaggaaatgcttttaagtggtgtgggggtaacgattttacctgaaattatgatgaagcatatcgataaaaatatgtttgaatttgagaaggttagtattgatgaagaacctctcatacgctcaacttatatgagttatgatggaagtatgttgcaactgcctcaagtagattcatttgtaaatctaatgttgaattttattcgataa

SEQ ID NO: 1473 - DNA, 1158 bp, Staphylococcus capitis
atgatgctactcggcatgggtatagcagtgactgtaccatacctcgtcttattcgctacaaaagatttaggaatgacaacaactcaatatggtttattattagcattagctgcagttagtcaattcgtagtgaattcaattattgctaggttttctgatacacataatgttaataggaaagtccttattattagtgcactattcatgggtgccgtaagcttttctatttatttttatgttcatcaaatctggttatttatagttctatatgcaattttccaaggtttatttgctccagcaatgccgcaattatatgcttctgcaagagagtcaattaatatctcaagttcgcgagatcgtgcgaagtttgcaaataccgtgttacgttccatgttttcattaggatttttatttggtccttttatagggtcacaattaatcgaattaaatggatattctgggttatttggtggaacggtagctattctattgttcaccttaattctacaagtctttttctatcagaatttaccagttgaataccaagtctcatcgcaacatcatgttgagaaatccgctccaaatatgtttaaagataaagcattatttattccgtttatcgcgtttattcttttacatattggacaatggatgtacacgatgaatatgccattattcgtcacaaattatctaagagaacgtgatagttatgtaggatatttagcgagtttatgtgctggtcttgaagtgcctttcatggttatattaggtattatatcagccaaatttccaacacgaactttactactttttggttcgctctttggcggcgcattttattttagcattggtgtatttaaaaacttttacatgatgttagctggtcaagttttcttagcaattttcttagctatactattaggattaggaattagttactttcaagatattttacctgatttcccgggttatgcctctacgttatttgcgaatgcaatggttataggtcaattatgtggaaatttattaggtggcgttatgagccattgggttggtttggaaaatgtcttttttgtatcagcgacgtcaattctaattggtatgatacttattttctttacaaaagatcaaaaaataactgaagaagatatggagtag

SEQ ID NO: 1474 - DNA, 489 bp, Staphylococcus capitis
atgacagcagttttatggataattattatcctcatgtttgtcttagcatttgtaggcttaattaagccgattattccatcaatgctagtcatgtggataggttttttaatttatcaaataggttttaacgatggccgtttatcatggatattttacgtagctatgattttatttactttatttattctcgtggctgatttcatgatgaataaatactttgttaatcgatttggtggaagtaaagtgggcgagtatactgcgcttgtaggtgttatcgttgggtgtttcgtatttccaccatttggcataatattagttcctttaattgcagtatttgttgtggaattattaaatggttttgattttaagaaagctttaaaggtgagtttaggctctgttgtagcttttctagctagtacagtagctcaagcaatcattatggtcattatggtaatctggttctttgtagatgtgttcttaattagttaa

SEQ ID NO: 1475 - DNA, 690 bp, Staphylococcus capitis
atgaaatctacagcacaattaactaaggagaataatgttaaatctttacgacttaacaacaccgatcgtgaaatatttgagaattacatgacgtatattcgcgctgacttaagcgtgaatcctcatgattcagaacttatgttaaatcgcattttgaaacatttgattcgtgctgaagataaaggcatgctagcgatggagttctttgatcatgatcctaaagcacatgctaaaaaagaaattaaagcgctacccaatgaaaccattaagaacatttttaagtatatatatcataattttatatttttaataggcatgttttgcttcttaaagggatttattggcttttttattggaggagatagtaactacttgtatctatatactttcccaataactgtaatcgtaggtctctttataatattcttatttatatggatgagttttaggacaattcaattacaatgctttaataattcacattgggtttggtggttaacatatggcgttatagctttgctattaattaccctgttttatgtattttttattcctcagtcatttttagcatttgggccttatattaatgtaagtaattggacgtttattattattgcaattttaattacgcctattgcgttttatgttgaccatcatttttataatagagactctaacacacgcatgtaa

SEQ ID NO: 1476 - DNA, 456 bp, Staphylococcus capitis
atgaagaaaatgacattggaagatgagagttggattaacgaaatagctagaatacatgaacatttaatctcagaaaatgaatttaattatcaagtgacttcaacatcaatggcattaagatatgaaatgattatttcaagactaaaatatgcgaatgatattattttaataaatgaacatgcgggtagtcttaaaggatttatttgggcgcattatgaaccgcagctcaaaatagtacaaattgaagtactatatgtaaaaccagactttagaagacaaggaattgcttcaaagttaaaacgagatattgagcagtgggcgaattcaatggatgctataagtattgaaagtacagttaataaagaaaacaacgacatggtaaaattaaatgaaaatttaggctatcaaacgtcgcatctaaaaatgtctaaaaaattaaagggaaaaaatgaataa

SEQ ID NO: 1477 - DNA, 438 bp, Staphylococcus capitis
atgaaaaaatggttcactttactcttagcatcaactttaatgttaacagcatgtggtaaaagtaacgagaaagcttctttagaaaaaagcattgaccaattagagaaagaaaataaagatttaaagaaacagaaaaaagatttagaaaaccaaaaaaacaaacttaaagatcagcaagataatcttcaaaaagatatcaacgaattgccggctgaagattcgtctagtaactcatctgaaaaagattcatctaattcaagtgaagataaaaattcagaagattcttcaacgactaattcagaacaatcaacaaattctacaaaatcgaagcaatctaaccaaggacaaacgcctaacaaagagacacaaaaaagtgactctacaagtaagaataacgattctaaaactacttccaatacacaaaactcagatcaataa

SEQ ID NO: 1478 - DNA, 297 bp, Staphylococcus capitis
atgcacgaacaagattttaatattttagaagaacaaaatattacgttacctgaattgggcagagaattagaaaatattactggacgtactattattgattcaactagtgaaattaaacgtgtgattgcacatttaccaaactttgaatctgatacagacacattcgttgcaacatatcgtttaaaccatcaaaatgattttattgatgcaacatttactgcacctaaagaacagcgtgatcgtttaaaagaaattcctgttcacgtaaaattaattagttatatttctaaagcataa

SEQ ID NO: 1479 - DNA, 561 bp, Staphylococcus capitis
atgggaacttacattgaaactgaacgtttgaagttgcgtgattgggaagaaaaggatttattaccatttcagaaaatgaatgcaaatcagcaagtccgtaggtattttccaagtttattaagttaccgtcgttcagaacttgatatgaaaaaaatggatgaaattatcaaagataatggaatcggcctttttgcggttgaattaaaggaaacaggtgaatggttagggtttataggagtaaactacatccccgaagacagcaaatatccttttaaagaactacctttttatgaaattggttggcgattaattcctgaagtttggggtaacggattagctactgaaggtgcacaggctgtattgtcatacgcaaaagaaaaaggcattactgaattatatagttttacatctgaaacaaatctaccttcaagaaaggtaatggagaaaataggaatgaccttcttagataacttcgaatttccaaacctaagcaaataccatcccctcaaacgccatgttagatattacatagaactacttccttcacaaagtgaaggttag

SEQ ID NO: 1480 - DNA, 570 bp, Staphylococcus capitis
atgattaaaagaattgcagtttattgtggagcaagcaaaggtaaagatccttcatatgtaaaagaagcttatgagttaggaaagtatatggcagaacaaggctacgaacttgtatttggagctggatcagtaggaataatgggtgctattcaagatggtgtcctagatcacggcggtaaagctattggtgttatgcctaggatgttagatgagcgagaaatcacgagtcaaaaagtaagtgaacttattttagtggattcaatgcatgaaagaaagaataaaatgacagaattagcagatgcctttgttatggctcctggaggtgctggttctcttgaagaatttttcgaaatgtatagctgggcgcaaattggtattcatcaaaaacctataggtgtctttaatttaaatggcttctttgagcctttacaagcactcattgaccatatgataaaagaaggctttattgataaaaaatatcaaaaattagcaccattatttgatactaaagaagcgctgttagaaggtctcaataattacaaaccacttggcgtacgtacatacgattaa

SEQ ID NO: 1481 - DNA, 447 bp, Staphylococcus capitis
atggtcaaagtaatcatagatggagatgcttgtcctgttgttaattcagtgattgaattaactaaagggacaggcatttttgttaacgttttaagaagttttagtcacttttctcatcaaattcagcctgaacatgtaaaaactgtgtatgttgacgatgggacagatgctgttgattataaaattgtacaattagctagaaaggaagatattgtcattactcaagattatggcctagctagtttacttatagacaaagtacatattgtaatgcatcataaaggaagtatatatcgtgctgataatattcaaactctattagaccaacgttatcttaatgcacaaattagaaagcaaggtggccgacataaaggtcctccgccttttactaagaatgacagattaaaatttgaacaaacatttacgaatgttattaaacaactttag

SEQ ID NO: 1482 - DNA, 687 bp, Staphylococcus capitis
atggacaaaaagagactcattaagactttaatcaatgtattacctattgttattgtaccgttagtcgttgaacgtaaacgtattaaagaacatcctgatgtacgtaaagctactgatgctacaactaaagctacatcaaaagctacttcaactatttcaaacaaggcttcagatgttaaagaatatgtgggcgataaaaaacaagaatttgataacaaacgtgaattgaagaaaatcgccaaagaaaacgaccctgcttacatcgagaaaaaaggcgaaaagctagctaaacaaaatcgtaaagaagcagaaaaaatgaataaaaaacttcagaaaaatattgagaaacgtcataaagaagaagaaaagcaacgtgaagaaaataaaaagcaacgtattaaagatatgaaaaaatctcaaaagtacgaagaaaaagtaggtcttactccaggcaagttggacgataaaactgagaaaaaaggcgaaaaacttgaaaaagataatcgtaaagatgtaaaaaaattagataaaaagcttcaaaaaaatattgaaaaacgtcacaaacaagaagaaaaacaacaagaagcagagaaaaaggctagaaaaaaagaatttaaaaaatatgatgattacgtggctggcagcgttgtaaaacaaaataaagaatctgataacactcaaggttag

SEQ ID NO: 1483 - DNA, 873 bp, Staphylococcus capitis
atgtttttacttgaattgataaaaggcatcattttaggtatcgtcgaaggacttactgagttcgcccctgtatcttctacaggacatatgatactagttgatgatatgtggttaaagtccactaaatttttaggtgaacaatctgcgtttaccttcaaagttgttatacaacttgggtctgtctttgcagcggcatgggtatttcgtgatcgtttcttagaaatattacatataggtcatcataaacccgaaaatgaaggcagtgttcaacgacgttcccaacctaagcgtttgaacttattgcatgtattagtaggtatgattccagcgggtattttagggttcttatttgatgatttaattgaaaaatatttattcagtgttcctactgtaatgattggcttattcattggtgcaatctacatgattttagctgataaatattctgagaaggttcaacaccctcaaacagtagatcaaattaattatttccaagcatttgtcattggtatctcgcaagctatagcaatgtggccaggtttcagtagatctggttctacgatttcaactggtgtatttatgaaattaaatcataaagcagcatcagattttacatttataatgtcagtaccaattatgcttgcagcaagtggtttatctttactaaaacactatgagtatattcacttagctcatgtacctttctatttactaggattcttagcagcatttatagttggtttaattgctattaagacattcttacatttaataaataaagttaaattaattccatttgcgatttaccgaatcgtattagttgtaattattgcaatcctttactttggttttggcattggcaaaggaatttga

SEQ ID NO: 1484 - DNA, 1629 bp, Staphylococcus capitis
gtgaaaaaactaacaaatttattattcaaatataaaatatatcccgcactcatgttaatcatgagcgtttttttatctatatcggtagttattcaaaatgtttctattgccaaattactaaatcatatgttgtaccatcataagcattcacttataggactttttatactgattttagttattcttctagcacgtgcaactttcaatatgttgaatcaacgtatcggtgatcatatggctactaaagtgaaatatgatttaagacaacaagtgataaataaaaatagtacacgagcaattggagaacaaatgaatattttaacagaaagtattgatggtattgcaccattctttcaaagttatttgccacaagtatttaaatcaatgatgattccagtcgcgattatagtcgctatgtgttatgtacacttatcaactgcaataattatgatggttacagctccatttattcctatgttttatatcatttttggtttgaaaacaagagatgagtcaaaggaccaaatgacatatttaaatcaatttagtcaaaggtttttaaacactgccaaaggtttaattacgcttaaattattaaatcaaactaagaatactgaagcgcgcctttatgaagatagtactaaatttagagatttaactatgaaaattttaaaaagtgctttcttatcaggattaatgcttgaatttattagtatgttaggtattggtcttgtggcgcttgaagcggcgttaagtctagtcgtattcaataaaattaacttcattacagcggctattgcaatcattctagctcctgaattttataatgctattaaagatttaggacaagcgttccatactggtaaacaaagtgaaggttcgagtgatgttgttttcgagttcttagactctgaaaataaaccaccacacccacatccaaatatagaggcttatcaaaaatcacaggtcaaagtagaagacgtgtcatatcagtactcaaatagtaatcagaacgctcttactcatattaatatggtgatacattcaggtgataaaattgcaattgttggttcaagtggtgcaggtaaaactacgttagctcatattctaagtcaaattaaaacgccaacagaaggcagtgtatcatttaataatgaagatacacgtatcggatttctgagccaaaatccttatatttttacagattccattaagaataatatagcgatgtttaataatgaaatttctgataaaactattattcaagttttagaagaagtcggtctaaaagataaagtgttatctctgaaagatactatttatacaccaattggagaaggtggcgaaatgctatctggtggccaaatgagacgaatagagttgtgtcggttattagtgatgaatccagatttagttatatttgatgagccggctattggtctagacattgaaacagaacgtacaatccaaaatgtaattcaaaatcattttaaagatactacgatgatcattattgctcatcgtgattctacaattaacaaagctcaacgtcgtatttatctagaagatgggcatcttataaaagatgacacgacgatatcagtatcgcaaagtgaggtggatgaataa

SEQ ID NO: 1485 - DNA, 1692 bp, Staphylococcus capitis
atgaaatcacaaattcattttcgaaaagataaagatttacttctagctattttggttggggtagtaggtggacttgtggcgttagcaatgttctttttaagtggttatatggtgacacaaagtgcattaggcgcacccttatatgcattaatggttctagtggtttctgtaaaaatgtttggcttcctaagagcgattacacgatatattgagagattgttatcacatagaacgacttttactatgctaagagatgtaagagtacagtttcttaaaaaattaattccagcagtacctgatatctatcggaaatttaattctagcgacttaatttctcgtatggtaagccgagtagaggcgttacaaaatatttatttaagagtttattatcccccaatagtgataggtttaactgcaatcgtgtctgtaattacatttattttcatttcatcgatgcattcatttcttattacgttaagtatgatcctcactctttgtatagttccatggctaagtgctaaaaaagcacgaacactcaaaagacaggtagctctacatcaaagtcactttctacagcgtttttatgattataaagaaggtgatgatgaattaagacgctttcgccaaagagatgaatttaaaacagatgtcttacaacgtttgaaacaatatgacactatgcaatcaaaagaacgtcgttttctatctttatatgattatatgttaaatattatagcgatgatttcaatatttcttagtttagttattggcgtgcaacagattcaatctggacatttggatgtcgtttatttaactagtattgttctaatgatattaactttatttgaacaggcagtaccaatgagtaatgttgcatattataaagctgatactgatcaagcgcttgatgaaataaatgatgttatcagtgtccctcaatctaatgagttacattcattgaatcatgcagatacgacaacgccattgtttgaaataaatgatgtcacctttggttattggaaccaacaaacaccagtgctcaacaatattgatttaactattcaagaaggtgagaaagtagctatcattggtccgtcaggttccgggaaaagtactttactacaagtcatgttaggtctatatcatgttgatcaaggtactgtaaaattaaaacaccaaatagttactgatattaatgaggaagacaagtattataagatgaatggtatgttacagtctcaacatatatttgatgggacggtacgagataatttattttcagaaaaagaggatgctatattaaaacaagctcttcaatctgtaggacttgggtacctggatctagaaagaaatgtaacattagatggagaaaatttatctggtggcgaaaaacaaaggttgagcttagctagacttttactcagagattcagctgatatatggattttagatgaaccaacgactgcattagatttagaaaatactactaaaacgatgaatttaattgaagcatcttcaaaaacgttagttattgccacacatgatttagatgtgcttccacgttttgataaaattatagttatgattgatggagaaattaaagaaagtggttcttatgaaagtctattagaaggtaatggctatttatctcagatgattgagatcaaccatagttctaaaaatgtacattaa

SEQ ID NO: 1486 - DNA, 441 bp, Staphylococcus capitis
atgtctgatcaacataatttaaaagagcagctatgctttagtttgtacaatgctcaaagacaagttaatcgctactactctaacaaagtctttaaaaagtacaacctaacttacccacaatttcttgtattaacgattttatgggacgagtcacctgttaatgtcaaaaaagtcgttacagaattagcactagatacagggactgtatcaccattacttaaacgaatggaacaagttgatttaattaaacgcgaacgttctgaagtggatcaacgtgaagtatttattcacttaacagataagagcgaaacaattagacctgaattaagcacagcatcggagaaagttgcaacagcttcatctttatctaaagaagaagtcaaagaacttaatcgcttattaggtaaagtcatcgatgcatttactgaaacgaaagaataa

SEQ ID NO: 1487 - DNA, 927 bp, Staphylococcus capitis
atgagaaataataaagatgaaaaaataacaatttctatcattagcggatttttaggtagtggtaaaactactttactgacacattatattagtgaaatattaaaaactgatgagaaagttaaagttattatgaatgaatttggctcattagacgttgatggtaatcatttaagtaatatcgtagatgtacgttcaatattgaatggctgtgtttgttgtgatttaaaaatagatttagtgaatcaaattgaatcacttgtacaaggtaatgaaacggatcatatcattattgaagctacaggtatcgcacatcctattgaaattataatggcctgccaagacccacgaattgtaaagtatgtacgccaaccacaagtcattggtgtcgttgatgcagagcgctttataaatagaatgcagtattcggattcaacgatgagattaatggaagaacagcttgaagtgagtcatatattaattgtgaacaaaacagatttgattagcgaagacaaacagcaacaattaaaagatgaattaaatctaatcaatgcacaggttccaattattttaacaagttatggaaaggtaaacatcgatgaaatatcacaatttcgtgacgatctcgtaacgacacacacacattcacatcatcatggtataaatagtatgcaatatacgtttagtggaccaattgatcggcaacttttttatcaatttattttacgcttacctgataacgttttacgtttgaaaggatacgttcaattccgtgatacaccaaatgaaacttatgaattccagtatgcatatggtatgccagattatggagttattgataaagatttgcctctaaccattgtaattattggagagcaattagacgttaataggctaaaaaataagctcgatatgatacaattttcataa

SEQ ID NO: 1488 - DNA, 285 bp, Staphylococcus capitis
atgaataatgaagataaacgtgaacaacaaattaaatttgagaaaaacttaatcacatttccttatttaggatttgctatagttgtgttgttatttaatattttttatccagatattaaagtatctatggctctatttggattattctttgcatataatttaggactactatttattgctttcatcagacatttcaaacgcacgttaattttaactttagtattaactgttctaagtggtgcagctttcttcacattattatatgtgtttggtttaagacattaa

SEQ ID NO: 1489 - DNA, 942 bp, Staphylococcus capitis
atgaatactagaagaaaagtttcaatcattggagcaggaaacactggatcaactttagcttttgtattggctcaaaaggaattagcagatattgtaatgattgatcgtccgcaatcagagggatttgttaaaggaaaagcattggatattttagaaagtggacctatttttggatttgatacaaacgttcaaggttctgttgaaattgaagatattcaagattcagatatcgtcgtgatgactgcaggaataccacgaaaacctggaatgacaagagatgatttagtccaaacaaatgaagaaatagtttatcaaacatctcttaatatagcgaagtacgcacctaatgctacgattattgtattaaccaacccagtagatgctatgccttatactgcattaaaagcctcaggttttccaaaagaacgtgtaattggacaatctggtgttcttgatacagctcgctatcaaagttttattgctgacgaattaaatgtttcagtaaaggatattaatggtcttgtgcttggaggacatggagatacaatggtgccacttgtggaatcaactcaagttaatggcgtaccagtcaaagatttaattgcggaagatgttttagatcgtattgtaaagcgaacaagaaaaggcggagctgaaattgtagaattattaggtaaaggttcagcatattatgcaccagctacggctatatatgaaatgatagaagctattttaaaggatcaaaaacgcttgttgccaagcattgcatatttagagggtgaatatggattctcagatatttgtttaggtgttccaactattcttagcaagaagggtatagaaaaaattgttgaagtcaatttaaatgacaaagaactagaacaattaaaatattcagctgagtcagtcgaaaatgtgaaaaatgcattaaaaaataaatag

SEQ ID NO: 1490 - DNA, 1557 bp, Staphylococcus capitis
atgactaaagcgaaaccacaaacacattcacaaaatcagaatcaaaacactcaaagtaacaagggttataaacctatatggattattataagttttgctttactgattggaatcttactattaccaacgccttctggtttacctattatggcgaaagcagcgttagcaatattagcatttgctgtgattatgtgggtgacagaagcggtttcgtatccagtatctgccacactcatattaggtttaattattttattactgggatttagccctgttcagaacttatctgaaaagttggggaatcctaaaagtggagatgctattttaaaaggaagcgaattattaggtacaaacaacgcgcttactcatgcttttagtggattttcaacatctgcagttgcactggtagctgctgcattattccttgcctcagctatgcaagaaaccaatttacataaacgtttagcattaatagttctttcaatagttggaaataaaacccggaatattgttatcggtgcgatagtagtatctattgttttagctttcttcgtaccttcagctaccgctcgtgctggcgctgtagtacctattttattaggaatgattgcagcttttaaaatgagcaaggagagtaagcttgcttctctactagttattactgcagtacaagcagtatccatatggaatattggtataaaaactgccgctgctcagaacattgtagctattaattttatcaatcaaaatttagggcatgatgtttcttggggagagtggtttttatatgcagcaccatggtctattttaatgtctgtagcgttatatttcattatgattaaagtaatgcctccagaaagagattcaatagaaggtggaaaggaattaatcaagaaagaattaaatgaactaggtcctgtgagtgctagagagtggcgtttaatcgctatttcaattttattactcttcttttggtctactgaaaagttattacatccgattgattcagcatcaattacgttaattgcattagggattatgttaatgcctaaaatcggggttattacttggaaaggtgttgaaaagaaaattccttggggtaccattatagtctttggtgtaggaatttctcttggtaatgttttattaaaaactggtgcggcacaatggttaagtgaccaaacatttgggttaatggggcttaaaggattaccaattattgcaacaattgctttaatcacattatttaacatattaattcacttagggtttgccagtgcgacaagtctatcatctgctttaataccagtattcatttcattaacatcaacacttcatttaggcgatcatgcaattggctttgtgttaattcaacaatttgtaattagttttggtttcttgttacctgtaagtgctccgcaaaatatgcttgcatacggtaccggaacatttacagtcaaagatttcttgaaaacgggggtacctttaacgattattggttacattctagtaatagtgtttagcttaacctactggaaatggttgggcttagtttaa

SEQ ID NO: 1491 - DNA, 1374 bp, Staphylococcus capitis
atggcattaggagtcatcttaaatagagtctttagaacggataacaatcctttatttgaatatgtctatcaaaatatagaagatatagatcaatgctattacattattcctaaagaagattttggtaatgaagcaaaaatgaagcgtaattattattatggaacattacaaaaatttgttcatgcgctctatgaaaacgatattcaaccatttctaatggattatgatgaattggttgatttctttaaagaaaaaggaatcaatgaagtggttattgctggcgatataatgagttatcacaaggaagagtatgacattttacatcagagagaaaattttaaaaaagaagatatatcggtaacaacaataagagcaaatcattattttaaaccaagtaaaacacgaaataataaaggtgaaccttataaagtatttacgagtttttataaaaaatggcgcctttatttaatgaaaagaacagtttataattatgatattaaagatttagctaaagtaggggttaaatcaaaacaaaaattaaaaggggactatagtcaaagtggtataagtgaggaaactgcccagtacaaatggtctgattttctagataaagacatagaagattacgattcaaatcgtgaatacttgcctgaagtccttacgagtcaattaagtatatatttagcatatggagtgctcgatattattcagatatttaatgacttactagatggttatgataaagatgaacaaaattatgaagcatttattcgtgaattaatttttagagagttttattatgtcttgatgactcaatatcctaagacagcacatattgcatttaaagaaaaatatcaaaatttgaattggtcttataatgaagataattttgatttatggagaaaaggtatgacaggatttccgattattgatgctgcaatgggagaacttaacactacaggatatatgcataaccgaatgagaatggttgtgtcacaatttcttacaaaagatttatttattgattggacgtggggcgaagagtattttagacaaaagctaatcgattatgatgctgcttcaaatgtgcatggttggcaatggtctgcttcaacaggaacagatgctgtgccatattttagaatgtttaatccagtgcgacaaagcgaacgttttgataaaaaggcattatatattaaaaaatttataccgacacttaatgatgttgatgctaaatatttacacgatacctataaacatgagcgccaaattaaagaacaaggtattgagttaggaaaagattacccaaaacaaatggtaaatcacagtgagagccgagatcatgtaatgtcggaatttaaagcaatggaataa

SEQ ID NO: 1492 - DNA, 279 bp, Staphylococcus capitis
atgatattcagtattatattattaatcgtcattctcatcattttacagctcattattggtcatttctggcacgacgttggatttaattatagtaaaagtattcaactcatgtttttaccattaggtataggactatttatcatgcagattgcttactatgaaagacattatccaaattgggatgttcctttcaaagttaagcttagactcaaatatatgtatattattactttctttgaatatgtagcagtttatatttgtctttttagattaagctaa

SEQ ID NO: 1493 - DNA, 618 bp, Staphylococcus capitis
atgcaaccacgttacattgcaaggatatactttataattttatttattatttctcttgctgaaacaagagtttttaatttcatgacattaaatttatttttagcctatgtgccctttgaactttgcttacttttaaaattatttaaaccaaagaaagcattcgaatggccattatttattgtctttggattgatatttttacttttagtacctaatacgttttatatgattacagatttaatacatttgaaccaatttcaatttaattttcttgtagggttgaatctcactgaatgggtatactttacttacctcatgttaggcgttttcttagcgatatatgttatgattttaatctttatggaaataggacatttaacttctcacttatggttaaatcgtacacttatcattgtacttatgttcttaaatggattaggcatatatatcggccgatttttaagacttcatacggtttatttaattgatgaacctttaaagatttttacccaagtactctctgtgtttaatattaaaacgttcatgtttgtacttttaatggtaatcatgcaaagtacgattgttctatttgtaaaaggggtgagactacaaaaatga

SEQ ID NO: 1494 - DNA, 1170 bp, Staphylococcus capitis
atgagaaagcaattatttacattgtactttaatatatttctaattttcttaggaattggccttgttatcccagtattaccagtttatttaaaagatttaggtttaaaagggagcgatttaggagtattagttgccgcatttgcactgtcacaaatggttatttctccatttggaggtactttggcggataaattaggcaagaaactcatcatttgcataggccttgttttattttcaatttcagaatttatgtttgctgctggacagacttttactattcttatgatttcacgtgtgttaggtggatttagtgcaggaatggtaatgccaggcgtcacaggcatgattgctgatatttctaaaggcgcagataaagctaagaatttcgggtatatgtcagccattattaattctggctttatattaggacctgggtttggtggatttctagctgaaatctcacatagattgccgttctattttgcaggatctttaggagctatcgcgtttacaatgtctctcgttttaattcataatcctaaaaaagaaacgacagatggctttcatcaatatcaacctgaattatttactaaaatcaattggaaagtgttcattacacccgttatattaacgttagttttggcatttggtttgtcagcttttgaaacattattctcattatacacttctgagaaagccaattattcacctaaagatatctcaattgcgattacgggtgggggcatctttggtgctgtattccaagttttcttctttgataaatttatgaagtatatgactgaacttaattttatagcaagctccttactctattcagcaatagttcttgtgatgttgatactagccaatggttactggacaattatggtaattagtttcattgtatttataggttttgatatgattcgtccagctttaacgaattatttctcaaatattgcaggtgatcgccaaggatttgctggaggtcttaattccacttttaccagtatgggtaattttattggacctttagtagcaggagccttattcgatgtaaacttagagtttccattatatatggctatagcagtttctttaagtggtattgtaattatctttattgaaaagtggctaagaactaggcgtaagcaatcacaatcttcataa

SEQ ID NO: 1495 - DNA, 120 bp, Staphylococcus capitis
atgcagagtgaatcacctaaagctaaatattcattctcagatgctaatggtaaacaacacacaaatatttcagtagatgaagatggccatgtaaataatgaacaatctcattcgagataa

SEQ ID NO: 1496 - DNA, 483 bp, Staphylococcus capitis
atggctaaaactaaaaaaacaaatgcgatgcgtatgcttgatcgcgcaaaaattaattatgagatgaatacgtacgaagtctcggataaacatcaacatggtgaacaaattgctaaattggttggtgcaaatgttgaagaagtctataaaacacttgtgcttgaaaacgcgaatcatgaccactacgtctttgtaattccagtcaatgcgtcattagatatgaaggaagcggctcatgtagtaaacgagaaaaaacttcacttaatgccattagagcaactaaaacaagttactggctatgtaagaggtggttgctcacctataggtatgaaacatttatttccaactactattgatgtttctgccaaaaatttagacaaactatatgttagtggtggtcaacgtggtatgcaaatcatcatccaagtagacgatcttatagagataactcaagcgcaagtggcacatattacacataaataa

SEQ ID NO: 1497 - DNA, 759 bp, Staphylococcus capitis
gtgatttcagaaaaacgtcacgatttgatattgcaagaattagctaaaaaagacttcttaacactccaagaattaatagatagaacagggtgtagtgcttcaacgatcagaagagatctatccaaactacaaaagataggtaaattgcaacgtgttcatggcggggcaacccttaatcaaaatcgtgtagtagaacctggattgactgagaaattgacacagaacctacgagaaaagcaagaaattggtaaacgtgccgctcaagaaatccaagacaacgaatgcattttcttagatgcaggttcatctactttggaaatgattcaatatatcgatgcgagagatatcattgttgtcacgaatgggatgacacatgtggaacagttattaaagaatgggataaacactttaatgattggtggacaagtgaaagaaacaacaatggcaactgtaggtgcaaatgcattggaaacgttaagaagatattgctttgatcgtgcattcatcggaatgaacggtatggattcgaagtatggttttacaacaccagatgaacaagaagctttaattaaagagacggcaatgaaattatctagtgagaaatatgtacttgtcgatcaaacgaaatttaaccaagtttattttgcaagagtaccattactagatggaactaaaatcattacttcacagaaggcgctaaaaaataaagtcactgaagcgtacaccaatcaatatcattttttaggaggacaatcatga

SEQ ID NO: 1498 - DNA, 921 bp, Staphylococcus capitis
atgatatatacagttacatttaatccctcaattgattacatcatgtttacagatggtttcgaattaaaaggattaaatagagcaaaagaaacgtataaatttgcaggtggtaaagggataaatgtttcaagagtactaaaaactctagatgttgattcaactgcacttggttttgctggtggttttccaggaaaatttatatcaaaaactttagaagaaagtaaaattcatacagattttattgaagtagatgaggatactcgtattaatgtaaaactcaaatctggtcaagagactgaaataaatgctccaggtcctaaggtgacacaagagcaatttcaagctctgataactcaaatcaaaaatacaactagtgaagatacagttattgtagctggtagtgttcctaatagtattccaagtgatgcttatgctcaaattgctgagataactaaaaacacaggcgctaagcttgtagtagatgctgaaaaagatttagttgatactgtattaccgtaccgaccactatttattaaaccaaataaagatgagcttgaagtaatgtttaatacgactgtatcaagtgatcatgatgttgttaaatacggtaaagaaattcttaaaaaaggtgcacaatccgtgatcatttctctaggtggcgacggtgcgatttatgtggacgaacaccaaagtattaaagctgagaatccacaaggtaaagtcattaatactgtaggctctggagatagtactgttgctggaatggtagcaggcttagaatcaggattgtctatccaagatgcttttaaacaagcagtggcttcaggaacagcaactgcgtttgaagaagatttagcaactagggatgctatagaaaaaattaaatctcaagttacggtttctgtacttgatggggagtga

SEQ ID NO: 1499 - DNA, 1983 bp, Staphylococcus capitis
atgagaatcacagaattattaactaaagatacaattgcaatggatttatctgcatcagataaaaatggggttatagatgaattagtcaatcaattagataaagcaggaaaacttagtgatgttgcttcatttaaagaggctattcataaccgtgaatcacaaagtacaacgggaattggtgaaggtattgcgattcctcacgcaaaagttgcagctgtaaaatctcctgcaatcgcatttggtaaatctaaagaaggtgtagattatcaaagtttagatatgcaacctgcacatttattctttatgattgctgctccagaaggtggcgcacaaactcatttagatgcacttgctaaactttcaggcattttaatggatgaaaatgtacgtgagaagttaattaatgctgaatctcctgaaaaggtattacaaattatagatgaagctgatgatgaagctactaaagaggaagaagcagaagcgcaagaaaatgaagcaaatgcttcaggtgctgtggcaagtacctcagcaagtgagcatgctaatgatagtaatgagccatatgttctagctgtaactgcttgtccaacgggtattgcacatacgtatatggctagagatgctttgaaaaaacaagctgaaaaaatgaatgttaaaattaaagtagaaactaatggttcaagtggtgtgaaaaaccatttaactgaacaagatattgaacgtgcaactggtattatagttgcggcagatgttcatgtagagactgatcgctttaatggtaagaatgttgttgaagtgccagtggcagatggaataaaacgtcctgaggaattaattaacactgcattagacactagtcgcaaaccatttgttgctcgtggcgatagtgcaaaagagaatgacgataaaaacgaagagaaacttagccctggtaaagcattctataaacacttaatgaatggtgtttctaatatgttaccacttgtaattgctggtggtattttaatggcgatagtattcttattcgggccaaattcatttaatcctaaaagttctgagcacaatgcgtttgcagaacaattatggaacattggtaaaaatagtgccttcgcattaattattccagttttagcaggtttcatctctcgtagtatttcagataaaccaggttttgctgccggtttagttggtggtatgctagcaatttcaggtggttcaggatttatcggtggtattattgcaggtttcttagcgggttacttaactcaaggaataaaatatattacacgtaaattaccgcaagcagtagaagggttaaaaccaactttaatctatccagtgctttcagtaacaattactggtcttttaatggtttatgtctttaatcctccagcttcatggcttaatcatttattattaaatggtttaaatagtttatcaggttcaaacatcatgttattaggactagttgtaggtgcgatgatggcaattgatatgggtggaccattcaataaagctgcatacgtattcgctactgcagcattaactgaaggaaatgctgcgccaattacagcagctatgattggtggtatgattccgccactagctattgctacaacaatgttagtctttagaaagaaatttacgaaagaacaaagaggttcaatcgttccgaactatgtaatgggattatcatttataactgaaggtgcaattccgtttgctgcagctgatccgttacgtgtgattccatcaatgatggtcggttcaggagttgcaggtgcaattgcactaggtctaggctctcgaattaacgcaccacatggtggtattatcgtaattcttgcaactgacttcagtcatgtcttacaaactatacttgcattagttgtaggtacgttagtttcagcactattatacggtttcttaaaaccaaaagttactaaaaatgaaatccaagcatctaaagctatggatgaataa

SEQ ID NO: 1500 - DNA, 1182 bp, Staphylococcus capitis
atgtcagaatatgtaataacgaatgggaaaatatacacagaggaacaaacgattgacaaaggtttcgttcacattaaagaaggcaaaatcttaagcgtcgggtccgggcattttcaagaggaagaaacagatactaatgaatcaattcaatatatcgatgctaagggacaacatattttaccaggatttatagatatacatatacatggtggatatggcgaagatgcaatggatgcctcatatgacggacttaaacatttagcagaatcactactatctgaaggtaccacttccttcttagcgacaacaatgactcaatctacagagaatattaaccgagctttgaaaaatattgtgacttataaagcacatcaagacattgctaacgcagcagaaatagctggagttcatttagaaggaccatttatttcagaacataaagtaggagcgcaacatcctaaatatgttcagcgtccttccgccgatcaaatttacgctttccaaaaagtggcagatggtttaattaaaatcattacatttgccccagaggttgaaggagcacaagaaacgttaaaggccttaaaggataatattatattttctattggtcatactgtagcgacgttcgatgaggctaatgaagctgttatgagtggcgctaaacacgtgacccacttatataatgctgctactggatttgctcatcgtgatccaggtgtttttggtgctgcgtggttaaataaaaatttgaaaactgaaatgattgttgatggtgtacattcacatcctgcttctatcgctcttgcttaccaacttaaaggtaataagaattgctatctaattactgatgcgatgcgagcaaaaggtatgccggagggtgaatatgatttaggaggtcaaaacgttattgtaaaagataaagaagcacgtttagaaagtggcgcgcttgctggcagtatcttaagaatgaatgacggcctacgaaatttgattaattttacaggagacagtttagaacgtttatggcgcgtaactagtttaaatcaagctattgctttaggcatagacgatgttaaaggaagcattgagatgggtaaagatgcagatattgttatattagacgatgagtgcaatgtaaaaacaacaattaaaaacggtgtgccacatcattttggaaagtaa

SEQ ID NO: 1501 - DNA, 1311 bp, Staphylococcus capitis
ttgattgcattaactacggtattcgttggatctgaattcgcacttgttaaagtgagatcgacgcgaattgaacaattagttgaagaaggaaatagaagcgcaaaaatagtcaaaaaaatgatagctaacttagattattacctatctgcatgtcagttaggtatcacagttacatcattaggtttaggttggttaggggaacccacttttgaaaagttattacatcctctattcgacttattgcatttacctgatgcattaactacgacaatttcatttgttatatcatttattgctgtgacttatttacacgtggtattaggtgaattagcacctaaatcatttgcgattcaacatactgaacaactcgcattactttattcaagaccgctttattacttcggtaatatcatgaaaccattaatttggttaatgaatggttcggcacgtgtgattgtaagaatgtttggtttcgatccagacgctcaatcggatgcgatgtcagaggaagaaattaaaattattataaataacagttataacggcggagaaatcaatcaaacagagcttgcatatatgcagaatatcttttcatttgacgaacgccatgcaaaagatatcatggtaccacgtacgcaaatggttacactcaatgaaccatttaacgtggatgagttacttgaaacgataaaagaacatcaatttacccgttatcctatcactgaagatggggataaagaccatgtaaaaggatttataaacgttaaagaatttttaacagaatatgcttcaggtaaaccgattaaaattgcaaactacattcatgagttgccaatgatttcagaaactactcgcataagtgatgcgcttataagaatgcaaagagaacatgtgcatattagtttaatcattgacgaatatggtggcacagctggtatcttgactatggaagatattctagaagaaatcgttggtgaaattcgtgatgagtttgatgatgatgaagtgaatgacatcgttaaattggacgattcaacatatcagattaatggtcgtgtactattagatgatcttaatgaacaatatggtatcgaatttgaagattctgaagacatagatacaattggtggttggcttcaatcacgcaatacgaatttacaaaaagatgattatgttgatactgagtatgatcgttgggttattactgaaatcgacaatcatcaaattatttggatcaatttaaaatatgaatttaataatcatcgaccatctgtagatgaagaagatgaaagtgaaaattctgattcataa

SEQ ID NO: 1502 - DNA, 840 bp, Staphylococcus capitis
atggtaaatgatacacaagttttaaataatggatatccaatgccttcaattggtttaggtgtttataaaattactgatgaagatatggaaaatgtagtgaatactgctatagaaacaggttatcgtgcttttgatactgcatatttttatggaaatgaagtagcattaggtaaagctttacagaattcaggagtagatagagaagatttatttattacatctaaattatggaatgattatcaaggatatgacaatacgattgaatattttaatcagtccttagaaaacttaggtttagactatattgatctatttctaattcactggccatgcgaaaaagatggtttgtacatagaatcttataaagccttagaaaaactatatgaagaaggtaaaattaaagctattggagtttgcaactttaaaaagcttcatttggaaaagttaatgaaggaaacggaagtagttcctcaagttaaccaaatagaattacatccttatttcaaccaggaagacgttcaagcattttgtgatgaccatgacattaaggtaactgcatggatgcctctaatgagaaatagaggtttattagatgatccgacaatagtagatatagcgaaacgttatgataaaacgcctgctcaaattgttttacgctggcatttagcacataatcgaatgattatacctaaatctaagacaccagaacgaattgaagaaaactttgatatattggattttaacttagaactcacagatgttgcggaaattgatagtttaaataaaggtgcacgtcaaggtaaagaccccgatgaggtgagtataggagatttgaaatag

SEQ ID NO: 1503 - DNA, 1110 bp, Staphylococcus capitis
atgaaagtcagagtcatcgttccttgttataacgaaggcgaagtcgtattaaaaacttatgacaaattgactgaaattatgtcgaaggatagttcagttaaaaactatgaatacgatttattatttattgatgatggtagcaaggacactacgattgaccatttacaaaatcttgctgcttacgatagccatgttaagtttctatcatttagtagaaatttcggaaaagaagctgcaatgattgctggttatcaaaatagcactgatcatgatgctgtagtgatgattgatggcgatttacaacatcctcctgaatatatacctcaaatggttgaaggatatttagagggatatgatcaagttattgctaaaagagaccgtaaaggtgaaaacttcgctcgcaaatctatgtctcgtttttattataaaatgatcaatacttttgtagaggatattcaatttgaggatggtgtgggtgactttagattactaagccaacgtgcggtgcaagccttaacatcacttgatgagtataatcgtttttcgaaaggattatttgagtggataggttataatactaagatattcacttatgaaaatgtgacacgtgaagcaggcgaatcgaagtggacattcagaaaactattaaattatggtattgatggtttgatttcatttaataataagccattgcgtatgatgatttatttaggaatgtttactttctcaattagtattttatatatcgtctatttatttattaatattttaatttcaggtattaacatacctggttatttcacaactattgctgcgatcctcctattaggggggatacaacttatatctattggcgtgataggtgaatatatcggtcgtatatactatgaagttaaacatagaccgaaatatattgtacaagcgactaatcttaaacctattgataatgaatctagtcagaaacaaacacataataaagttgaaacaccacaatataaaaatagagatgactattataaattgagtacttatcgtagggaaagtgcgcaagttaagtctaaaacccaagctagtcagcaacaagatcgttataaagaacatgtttattaa

SEQ ID NO: 1504 - DNA, 1050 bp, Staphylococcus capitis
atgttctctattcgtagccaaatcgctatcggcgttatttccagtgtactcttaacaaccattatactggtcattgcgtataaacttatgtggttcaatggtcacatgaccttaagcttaagcattacgacaatgattacaagttgtttaacactattaatatgcagtatctttattaatcctttaatccagaaaattaaacaattcaacattaagacgaaacagttcgtcaacggtgagcatttaatagatgatgatactttccaatcacccagagaaattagagaattaaatgactcattcaataaaatggcagatgaaatcactaaacaaatggacatgattaaaaatgaacaacaggaaaaaactgaaattattcaaaatcttgcccatgatttaaagacaccacttgcaggaattatttcatatactgaaggtttacgtgatggagtcatccaagaacatcaagaagtacatgcagcctatgagacgttaattaaacaggccaaccgtctatccaccttatttgatgatatgacacatgtgatatcacttaacacaggtcgttcctatccattagaattaattcaattggatcagttacttgtaaatatattacaaacctacgaacaacgtattaaacttgaacatcgatcattggaagttaatttctgtagtcgtattgacgctttttatcaatatcgtcctcctttagagcgtattttgactaatttattagataacgcattaaaattttctaattatggaagtcgaattgatattattatttctgaaaatgctaataaagatagcattaatatagctattaaagatgaaggcattggtattatgcatgaacttcaatctcgcatctttgaaagaacatttagagtagaagattcaagaaatacgaaaacaggtggttcgggactaggattatacattgccagtgaacttgcacaacaaatcgatgcctcaatatcagtagaaagtgaacttaatgtgggaacaactatgatgcttacattaaaaaagtttaacttttcgtaa

SEQ ID NO: 1505 - DNA, 690 bp, Staphylococcus capitis
atgacccacttactaatcgtatatgatgagcaagatattgtagatatttgtcagacttattttgaatatgaaggttatcaagtaacaacgacaacaaatggtagagaagccatcaaattgctgtcatcagaaatcgatgtcatgattttagatattatgatgcctgaagtttcaggttacgatattgtaaaagaaatgaaagcacagcaacttgatattccttttatttacttaacagctaagacacaagaacacgacacaatttacgctttaacattaggcgctgatgattatgttaagaaaccattcagccctagagaactagtattacggacaaataatttacttgcacgtattagtaaatatcaatctaatcatcagaccgagcaacttgaatttaacggtctcattttgaaaaatcaaagtaaaacattaaccataaatagcgaagaaattcctatgcgtattaaagagtttgaattattatggtaccttgcctctcgtgaaaatgaagtcatttccaagtcagaacttttagaaaatgtttggggatatgattactacgaggatgcaaatactgttaatgttcatatccatcgcatacgagaaaaattagagaaacatcatttcatctcatatacaataacaacggtatgggggttaggatataaatttgaaaggagccgataa

SEQ ID NO: 1506 - DNA, 474 bp, Staphylococcus capitis
atgaacaagttaagtttattaataatttttatcattcgcgtaggttctggaattgtcattttccggcaaggtttggagaagtttacaggcgatttcacacttaatggtctagtacctgtcattcgcgataatacagattctccgcaatggtataaatggtttttcgaaaatattgtctcccattccacaggtttatttaacttcattatctcgttaggagaaatggcaatcggtctaggtttaatcttaggcgttttggcttatactgcaagtttctttggtgcctttgttatgataaattatatcttagcagatatgatttttacgtaccctttacaattagcattctttataatcttattaatgagtcactcactaattaataagatttcacttaaagaagttatcactcaattaagagtacgtaacaaccgaggtgaagacaagcatgacccacttactaatcgtatatga

SEQ ID NO: 1507 - DNA, 438 bp, Staphylococcus capitis
atgaataccaaatatttattagcagtaagcgcaattgtgacatcccttactttaggagcttgtggaaattctaattcaaataatgaacatgctcacgacaaagataaacaacaagaagaaagcaaagttaaaactgataaatcaaaaaaattatctggtacatttaaatctaaaaatggcgaaaaggtcgaaggtacagcaaaaattgaaaatggcaaattgatgcttaaagactataagtcatctaaaggaccagacctatatgtatacttaacgaaagatggcaatattaaatcaggaaagaaaatttcaacagtggattacaacaaatctcaacaaacatttaatttaaaaaacattgatttaaataaatacaacgaagtaacaatttattgtgaaaaggctcatgtcattttcggtggcgcaaaattaaaataa

SEQ ID NO: 1508 - DNA, 600 bp, Staphylococcus capitis
atgattatatttatattaattaatattgccgttgtcatactcgttaccggtttagacttatatcggcatcaatacaaacaacttaagtttagctccatattattatcaatatcaatcaactgtgtgattgatatatttgtgattgataagtttaatttcataactttattcactacaattttatttttagtatggacatttttacagatatatttaaatcacaaattatatccatttttgataaaagaacaaaaatttatcgctactatatttgccatagtcatcagtttagctcaatttatcactgatatttctagtgaacaatctgtatacatgtctttaccttatttagccccagcgatatttattattggcgctgtattactatttgtaggaacctttaagttatctgaaatcgaacacctgtctttattgcgaaaagttaaaagacctatcaccactggtacaattattataattttatcattgactttaatgatgattttgacaccattttggtatgtatttgtgattatttacttcctattcatagcatatattttgtggcaaggtatcttttttgtgaaaggaaacttataa

SEQ ID NO: 1509 - DNA, 714 bp, Staphylococcus capitis
atggctaagattcctgttttagaagtatttggacctacgattcaaggcgaaggtcgtgtaattggccgtaaaacgatgtttgtgcgtacagctggttgtgattatcgttgtagttggtgcgactcagcatttacctgggatgatagtgctaaggaagatatccgtctacttacggctgaagaaatctatgaagaattactcgaagtaggtggcaaccattttaatcatgtcactatctcaggaggtaatccagccctaattaaaggaattcaagatttagtagatttgtttgaagagaaaaatatttatacagcattagaaacacaaggaagtaaattccaaccctggatgactcaaattaatgatttaaccattagtcctaaaccacctagttcaatgatgaaaccaaatttaaatacattagattcagttattgatcaatgtgtacatgacacacttaatttaaaagttgttatatttaatgaagaagattatgaatttgcaacaatgattcaccatcgttacccttcaattccattttaccttcaagtgggtaatccctatttagaagatgaagtcgaaaaccatactgataaattattagaaagatatgaagaactagtagacagagtgatggaaagtgatgagatgaaccatgtttatgtacttccacaattacatacattattgtggagtaataaaaaaggagtttaa

SEQ ID NO: 1510 - DNA, 420 bp, Staphylococcus capitis
atgttacaacaaatctatccaagtgtagagcacccctaccaattcgaattaaataaagactttaatttttctgctgcacattatatcccctgtgaagatgctggtaaatgtatgaggacacatggtcatacgtatttcgtaaacataactatagctggggatgaattagatcataatggtttccttgtaaactttgccgatttgaaaaagttaatccacaatcaattcgatcatcatttattaaatgatttagaaccatttaaaggcaaaaatccatctacagaaattgtcgcacaaacaatttatactatggtaaaagactacttgagtaaacgtgataatcagcctaaatgtgttcaagtattcttacgtgaaacaccaacaagctatgtagtttatagaccaaaggatgctcagtaa

SEQ ID NO: 1511 - DNA, 666 bp, Staphylococcus capitis
atgactaaaagtaccttagacaaagctatcgtagtatttagtggtggtcaagacagtacgacttgtttattttatgcaaaaaaacattttaaagaagtagaacttgtcacatttaactatggtcaaagacacgatactgaaattgaagtcgctaaaaaaattgcaaatgaacaaaatttaaaacatcatatcttagatatgtctcttttatctcaactcacacctaatgcattaacacaacatgatttagagattgaagaaaatgatgatggtatacctaatacatttgttcctgcacgtaatttattgtttttatcatttgccggagccttagcttaccaacttaatgctaaacacatcatcactggcgtatgcgaaactgacttttcaggatacccagattgcagagacagtttcattaaatcaatgaatgtgacattgagcctttcaatggataaagattttgtcattcatactccattaatgtggctagataaagctcaaacatgggaattaagtgatgaattaggtgtattagattatgtacgccataatacactaacgtgttataacggtgttatcggagatggatgtggagagtgtcctgcttgcaagttaagagcacgtggtttacatcattatttagaaagtaaaggagtcgagtaa

SEQ ID NO: 1512 - DNA, 588 bp, Staphylococcus capitis
atgattgtaatgatagataaccatgattcttttacttataatttaatagattatcttaaagttcaaacgactgatgaggttaaagttatatcagttgatgaagtatcaattacaaagcttaaaaagttgagtcctaaagctattattatttcacctgggcccggtaaaccaagtgattatccggtactttcaaccattatttctcattatgaccaacttattccaattcttggcgtttgtttaggcttccaactcattgttgaatattatggtggtcgtattattcatagccctaaacctatacatggtcataccactactctacgccataccaatgaaggtattttcaaaggacttcctcaagagtttaacgtgatgagatatcactcattaatggtagattcagaatacataccaaacactttaaaggtcactgcgactaatgacgagaatgttattatggcagttcaacatcaatatttatccatttacggtgtgcaataccacccagaatctattttaagtgaatatggtcatgaccaacttaaattatttttaaatgaggcaggcgttgaatatgcatgttga

SEQ ID NO: 1513 - DNA, 1155 bp, Staphylococcus capitis
atgcatgttgaattcaattaccgatattttgaagatgaagaaagttgtacggattatcatattctgatggaagaatatctagattctaagattgcatacagtgttgaggaagtggggaatgttattcattttgctgaaaatgaacagcaaaaaggttactatgtcgcagtatatatagcgtatgaagcggctccctattttaataagcatatgtgtgtaaatacaacaggggaagcaaagattttagcagctgcatattctttcaagtgtggtcgagatgtagagagaaatcgtcgtcatgatggtgctcatacaaataatgctttatcgaatcattttaaattcatagaaagtgatgaagcaatgattgacaaaataaagcacattcaaaaagccatagtagatggccatacatatcaagttaactacactacgcgattaatttcagatattcagttacctattaaagcactatatgacaaactgaataatcaacaaaatggtagttatacagctctaatcgatacaccagatataaaagtagcgtctatttctccagagttgttctttcaaaaaggaaaatttaaaggtaagagcaacatcattgttagtaaacctatgaaaggaactatgcccagaggtcgaactatagaggaagacgaaacattatataataaattaatacattctgataaagatagagccgaaaatgtcatgatagtagatttgttaagaaatgatatttctcgaatttcacaaagtggcacagttaatgtatacaaaccatttatgattgagcgttataacacagtatttcaaatgacgagcatggttactggacagctggagtcagaaatgaagctcataaatattttaactgctttatttccttgtggatcaattacaggcgcacctaaattaagtaccatgaaatatattgaacaattagaatcatcccctcgctcaatatattgtggaacgataggtatgttactaccagaaggacgtatgatttttaatattccaatacgtacgattgaatatagaaatcaaagtgcaatctatggcgttggcgctggtattactattgattctatccctgaaaatgaagttcaaggatttcacgacaaaactaaaatcttggagaatttgtaa

SEQ ID NO: 1514 - DNA, 609 bp, Staphylococcus capitis
atgcaattatttgaaacaatgaaacttgaagatggttgtatatatagagaagtttatcatttaaaaagaattacagaatcaagcaaagagttaaaatttaattttgatcaacagcaatggtatgagttaactcaaatgataaagacgacatatccaaatggcaaatatcgtttgaagttaactttagaacaaaatgggcaattaaattatgtactcgcacctttagcagataagacattttttacagcaaaaatggttcaaagatctcatctagtaaaagaatcgattatcgttaataaaacttctgaacgtcattatctagaacatagtcatgaaacagatttaatacttttatatgatgaaaatggaaaaattttggaatttgacattggcaacattatgatcgaggaaggaaatgaatggtacacaccatgttataacgatgactttctacgaggttgtatgcgtcaatcacttattgatcaaggtaaattaaaaacgaagaatatagatatagatgattttagaaagaaattacaaagaaaacaaattaatgtctatttaatcaatagtctacgagaggttgccgatgtcaaaatttatctataa

SEQ ID NO: 1515 - DNA, 711 bp, Staphylococcus capitis
atgaaaatatacagtcaaggcgaccaagctattgttgtatctattgaaaaagatgtatctcaaaaccttacagaggatttattagcattaagatcatatttaattgataaagcatatccatttattactgaaattgtacctacagaatctgatttgatgatttgctatgatgctagagacatgattaaacatcacaatattcaatcaccatttttatatatgaaagctttaattgattcaatacaaatggaaattaaccaccatgagggtgaacaacaacttattgaggtacccatcgtatatggtgatgaatttggtccagacctccctgaattattgaagcatcttaaacttaaattatcggactttatacaattacataccggtgcgaactactttgtttcaatgatgggatattctcctggatttccatatttaacgggtatgcataaaaagttacatgttaatcatacgagtaaacacaaaaaatttatcccagctggttcagttattcttgaggggaaaaaatgtggaattgtaactactgatacgtataacgattggttggtcataggatatacaccacttaaattattctttcctaatcaagaagattttacgttatttaaattaggggacaatgtaactttcaaagcgaaagagaaaaacgatatagagctaggagattttaaacatgtcaatcataattga

SEQ ID NO: 1516 - DNA, 1005 bp, Staphylococcus capitis
atgtcaatcataattgaaaatagtgggctatttagtagttttcaagattttgggcgagatggttatgaacatgacggcgtaatacctggtggggctttagatgatttagctcatgaaattgcaaaccgacttgtagccaatgacaaaaatgaagctacgcttgaaatgacacataaaatggcaacgattcgttttactgaacctgcgttgattgctttaactggtggtaatttcaaagccgaaactcaaaatataaaagtataccctaataaattatatcttatagaaaaaggggaagtacttaaatttaaagaaacaagtcgcacctcacgtgtatatctagcaattggtggaggatttaagttagatagatggcttgattctacgtctacagattttaatgttaaaataggtggttttagagggaggaaattggaaaacggggatgaagtagaattaaaacgcgactattctaaacgtcatattaaattatttgaaaacttagctaaaacacggacaacggattggggaatagatggatatgcactatcctttaactacatttcagacgtatttcatgtagttaagaacaaaggtaccgaggattttaagaaggatgctattcaacgttttacgttaactgattataaagtatctagtaaaacgaatagagtaggaatgttattagatggtcagaaaatcaaagcctattatgatgatatgccggcacatcaatcagttaaaaaaggaacaatacaagttaaaagagatggtacacctatcgtcttattaaatgatcactatacattaggaagttatcctcaaattggaacaatagcaagttatcatttaacaaagttagctcaaaaacctcaagggtctaaattaaaattccaatttatagatattgaaacagcggagaagaatttgattaagtatagtaactggttaaaccagctgtttcatggtattgagtatcgtatgcaacttgaaatgatgaaatag

SEQ ID NO: 1517 - DNA, 1941 bp, Staphylococcus capitis
atgagtttacccaaaaagaaaattagtctttttgcgttcttcttattaacggtattcacgattaccttgaagacgtatttttcatattatgttgatttttctttaggtgttaagggattagttcaaaacttaatattacttatgaatccttatagtttaattgcactaactttgagtgtgttcttattctttaaaggtaagaaagctttctggttcatgtttattgggggattcctattaacgtttctactttatgcaaacgttgtgtacttccgatttttctcagactttttaacatttagcacattgaaccaagcaggtaacgttgaatcaatgggtggcgctgtcggagcatcatttaaatggtacgacttcgtttatttcattgatacgattatttaccttattattttaatttttaaacgtaattggttggatacaagagcatttagtaagaaatttgttccagttgtaatggcagcttcagtggcattattctttttaaacttagcatttgcagaaacagatagacctgaattattaactagaacatttgaccataaatatcttgttaaatacttaggtccttataactttactgtttatgatggcgtgaaaacaatccaaaacaatcaacaaaaggcacttgcttctgaagatgatttaaccaaagttttaaattatacaaagcaaaagcgcactgaaccaaatcaagagtattatggtgtagcgaaaaagaaaaatattattaaaatacacttggaaagtttccaaactttcttaattaacaaaaaggtaaacggtaaagaagttaccccattcttgaataaattatcaagtggtaaacaagactttacttatttccctaacttcttccatcaaactggacaaggtaaaacatccgatgctgagtttactatggataatagtttatatggattaccacaaggttctgcatattcacttaaaggcgataacacttatcaatcattaccagctattttagaccaaaaagaaggttacacttcaaacgttatgcacggtgactataaaacattctggaaccgtgaccaagtgtacaaacattttggtattgataagttctatgatgcaacatattttgatatgtctgatgataatattgttaaccttggtcttaaagataaaccgttctttaaagcatcagctgactatcaatctaaaatgaaaaaaccgttctactctcatatgattacattaacgaaccactatccattcacattggatgaaaaagatgcatcaattgataaacctaacacaggtgacacaacagtagacggttatattcaaacagcacattatcttgaccaagctttagaagagtacattactgatcttaagaaaaaaggtctttacgataattcagttattatgatttacggtgaccactatggtatctctgaaaatcataacaacgctatggaaaaactattaggtgagaaaatcactccagctaaatttactgatttaaaccgtactggtttctggttgaaaatacctggtaaatcaggtggtgtaaataaagagtatgctggccaaatggacgttatgccaacaattctgcacctagtaggtatcgacagtaagaactacttaatgtttggtacagacatgttctctaaacaacataatgatgttgtaccatttagaaacggtgactttattactaaagattataaatacgtaaatggtaagctttactcaaataaagataatgaattactaacgaagaaacctaaggacttcgacaagaataagaaacaagttgagaaagatcttgaaatgagtgatagcgttcttaacggtgacttattcagattctacaaaaatcctgacttcaagaaaattaacccatctaagtatgaatacaaaacaggtcctaaaggtaacgagaaaaaataa

SEQ ID NO: 1518 - DNA, 816 bp, Staphylococcus capitis
atggcacaattctttgaaaatctgccaccatatattcaagcactcacagctggtatcatcacgtggttattaactgcgcttggtgcggcagctgtttttgtgtttaagaaggtaaatgataaagttttaaactcaatgcaaggttttgcagcaggtattatgatagcggcaagtttttggtccttattagaacctgctattgaatcgagtaaaggaagttcggttccatggcttcctgctgcaataggttttattcttggaggcttctttattcgagcattagattatgttattcctcatattcatcaaaatgctcaagataaaaatcaacagcgtgaaggtgtgaaaacatcactcggtaaaaatacattacttgtattagcaattacgctacacaatattcccgagggattatcaattggtgtagcgtttggaggcgttgtctcaggtaatggacaagccactttcttaggtgcaataggtcttgctataggtattggtattcaaaatattcctgaaggtgctgcattatccatgccaatcagagctgcaggtgcttctcgattgaaatctttcaattatgggcaagcttcagctattgttgagcctatttttgcaacaattggtgcagctgctatcttagttgtaaatcccgttttaccttatgcattagcctttgccgctggtgcgatgatctttgtcgtcgttgaagaacttatcccagattctcaatcaagtaataatactgatttagctacaatgagcttaatgattgggtttacgattatgatgatacttgatgttgctctgggttag

SEQ ID NO: 1519 - DNA, 1884 bp, Staphylococcus capitis
atggaagcatataaaattgaacatttaaataaatcctatgcagataaagtcatattcgacaatttaaatttatctatctcagaacatgaaagaattggtcttgtaggaattaatggtacagggaagagtacattactcaaggttatcggtggcatagatgaagattttactgcagatattattcaccctaatcaatatcgaatacgttattcatctcagaagcaagatttagatggagatatgacagtatttgaagcagtattaagttcggacacacctacattaagtattattaaagcatacgaaagtgctgtaaatgcttatgcagctgatcaaagtgaaacaaaattaaatactatgatgcgtgcgcaagaagcaatggataggaatgaagcgtgggactataatgctgaaattaaaacgatattatcaaaattaggcattaatgatactaataaatatgttcgagagctttcaggtggtcaacaaaaacgcgttgttctagctaagacgcttattgaacaaccagatttattgctacttgatgagcccacaaaccatttagattttgagtccattaactggttaattaattatgtaaaacaatacccgcatactgttttatttgtaactcacgatcgttatttcctaaatgaagtatctactcgtatcattgaattagatagagggaagttaaatgcatacccaggtaattacgaagattacatagcaatgcgtgctgaaaatgagataattgaacaaaagcaacagcaaaagcaaaaagcactatataaacaagaattagcttggatgcgagcgggagctaaggcgagaacaacaaaacaacaagcacgtattaaccgatttaatgatcttgaatcagaagtaaagagtcaccattctcaagataaaggagaattgaaccttgcatattctaggcttggtaaacaagtttatgaattagatcatgtaacgaagtcgattaaagacagagtattatttaaagatattactgaaattattcaaagtgggcaacgcataggcgttgtagggcctaatggcgcaggtaaaacaacattactaaatatactaagtaatgaggaccatgactttgatggagagttaaagattgggcagactgttaaggtagcctattttaaacaaacagaggaaacgttaaatcgcgacattagaatgattgattatttacgtgaagaaagtgaagtggctaaagagaaagatggaacttcgatttctgtcactcaattattagagcgattcctatttccaagttctactcatggtaagaaaatttataaactatccggtggagaacaaaaaagactttatttattacgtctattagtacataaacctaatgtacttttactagatgagccaacaaacgatttagatactgaaacgctcactattttagaggattatatcgatgatttcggtggttctgtaataactgttagtcacgatcgatattttcttaacaaagttgcacaagagtattggtatattcatgatggttacatggaaaaaatcaaaggtacatttgaagattatgaggcttataagaaagaacaagataggcaaacatcattagctaaacaatctgcacaacaatctaaacaacaggcgcaaacaagaaagaaatcagggttatcttataaagaaaaattagaatacgaaacaattatgacacgtattgaagagacggaagaaagattggaagtcattgatgaagaaatggtagccgccagtgcggattatggcaaaatcaaagaactaaatgaagaaaaagaacaacttgaacaaacatatgaagcagacatcacaagatggagtgaacttgaggaaataaaagaacaataa

SEQ ID NO: 1520 - DNA, 1779 bp, Staphylococcus capitis
atgcaagaaactttatcgcattattttggttacgaaacatttcgacctggacaaaaggagattataaccaaaatattagaccatcgcaatacgcttggagttcttccaaccggtggcggtaaatcaatatgctatcaagtaccaggactaatgcttggaggcacgacgattgttataagtccacttatttcattaatgaaagaccaagttgatcagctcaaagcgatgggcatcaaagctgcttatttaaacagtagtctgactcagaagcaacaaaaagaggttgaacaagaacttaagcagggtgacattcaattcttatatgtagcacctgagagatttgagaactcttatttcttaaatttacttcgaaaagttaatattcatttagttgcatttgatgaagcacattgtatttctaaatggggtcatgattttagaccaagttatcaaagtgttattcacagagtattttctttacctcaagatttcacgattgtagcgttaacagctaccgctacggctgaagttcaacaggacattatggaaaagttaaacatcggcaaaaatgacgaaattaagacgagcacgaaacgtcgcaatttaattttcagagtgaacccaacgtaccaacgtcaaaaatttgtagtggactacgtgactagtcatgaaggacaagcaggtattatttattgttcaactcgtaaacaggttgaagagttaaatgaagctttagaaaatgaaaacgttaaaagtacaatttatcatgctggtctcacaaataaagaacgtgaagaagcgcaaaacgattttctatacgatcgtgtagaagtggttgtcgcaacaaatgcctttggaatgggaatagacaaatcaaatgtgcgctatgttgttcattataatatgcctggagatatagaatcttattatcaagaagctggacgtgctggtcgtgatggtttaaaaagtgaatgtatcctattatttagtgaacgagataagggcttacatgagtattttattattgtttcacaagcagatgaagattataaggataaaatgggtgaaaaactcactaaaatgcttcaatatacaaagactaagaaatgtctcgaggcaacgattgtgcattactttgaaccaaatgaaaatttagaagaatgcgatcaatgcagtaactgtatacaagaaaataaaacatatgatatgacacgtgaagctaaaatgataataagttgtatagctagaatgaaacaacaagagagctatagcgttattattcaagtattaagaggcgaaattacagattatataaaatacaatgattacgatcaacttacaactcatgggttgatgaaaaactacactacatctgaattagcgcatttaattgacgagttacgttttaaaggttatctcaatgaaaatgatgaaatcctcatatgtgataattcagttaaagatttacttaatgatagtacgaaagtttatactacgccgtttaaacaaaaaagcaaagaaaaggtttatatcaatacggtcgaaggtgtcgatcgcgcactttatagtgaacttgttgaagtacgtaaacaacttagtgataaattagatatccctccagtgaatattttttctgattatacacttgaagaatttgcgaaacgtaaaccagaaactaaacaagaaatgatttcaatagatggagtaggaagctataaattgaagcattactgtccaaagtttttagaaaaaatacagacctataaaacaagtatataa

SEQ ID NO: 1521 - DNA, 978 bp, Staphylococcus capitis
gtgattaaatttaagaatgttacgaaacgatatgggaataatacagcagtagataatgtaagttttaatatcaaagaaggggaatttttcgtgttaattggaccatcagggtgtggaaaaacgacaacacttaaaatgattaatcgcttaattccattaagtgaaggatatatttattttaaagataaacctattagtgattaccctgtatatgaaatgcgttgggacattggatacgtcttacaacaaattgctttatttccacatatgactataaaagagaatgttgcacaagtacctcaaatgaagaaatggaaagataaagatatcgatcaacgtgtagacgaattattaaatatggttggtttaaagcctgaaaaatttaaaaaccgaaaacctgatgaattgtcaggtggacagcgccaacgagtaggagtggtaagagctttagcagcagatcctcctgttattattatggatgaaccatttagtgccttagatcctataagtagagaaaaattacaagatgatttaattgagctacaaactaaaattaaaaagactattgtctttgttacacatgatattcaagaagcaatgaaattgggagatagaatttgcctattaaatgatggtcatgttgaacaaattgatacaccacaaggtttcaaagatcatcctcaaactgactttgtaaaacaatttatgggaagtcaccttgaacaacaatctcaaaacagactgactaatataaaaattaaagaattaaatatacatcgtcctttagaaggaatgtcagatacatcaagttatcctgaagtgaatgagaatcagaaagtagaggacatttatcatcttctagcacaaacagatgctgttattgttaatgatagtaacaatcaaaatcagtatttactaaaacgtgaagacatcttcaactatttagctgaaagaaaggagaacgtcacacatgcatga

SEQ ID NO: 1522 - DNA, 1515 bp, Staphylococcus capitis
atgcatgagtttctaaatacgttaagtgatagaaaaggacaacttctttctacgattattgaacacatccaaatttcatttatcgcattattaattgcaactattattgcagtacctttaggaatactattaacgaaaactaaaaaaatatcagagattgtaatgaatatcgctgcggtattacaaactatcccttctctagcattattaggtctgatgataccaatatttgggattggacgagtgcctgcaatcattgctttagttgtatatgcattactgcctatattgcgtaatacatacactggtatagaagaagtagatccatctttagttgaagcggctaaaggtattggcatgaaaccaattagaagacttacgaaggtagagctacctattgcgatgcctgttattatggcaggtatacgtactgcaatggtattaattatcggaactgctactttagcagcacttattggtgctggtggtttaggggatcttattttactaggtatagatcgtaatgatagttcacttattttaattggtgcgattccagcagcgttattagctattattttcgatttaatattaagatatatggagaagctttcatataagaaaataataattactcttggtgcaattgtactagttattttattagcaattgtaattccactgtttgcacaaaagggtgataagattacacttgcgggtaaattaggttcagaaccttcagttattactaacatgtataaaatcttaattgaagatgaaacagatgacactgttgatgttaaagatgggatgggtaaaacatcgttcttatttaatgccttgaaatctgatgatatagatggttatttagagtttacgggtactgtgttaggtgagcttactaaagaagacttaaaatctaaaaaagaaccagcagtatatcaacaggcaaagacaagcttagagaagaaagatcacatgacgatgcttaaaccaatgaaatataataatacgtatgcgttagcagttaaacgagactttgcaaagaaaaataatattaagacgatcggcgatttacaaaaggttgaagataaacttaaaccaggatttacattagaatttaacgatcgtcctgatggttttaaagccgttaaaaaggcttataatcttaatatttctaatgtgaaaacaatggaaccaaagctgcgttatacagctgttgaaaaaggagacattaatttaatcgatgcgtattcaacagatgctgaattaaaacaatataatatggttgtgttgaaagacgataaacacgtattcccaccttaccaaggtgcaccaatgtttaaagaaaaattccttaaagaacatcctgaagttaagaaaccactgaataaattagctggaaaaattacagatgaacaaatgcaagaaatgaactacaaagtaacagttaaaaagcaagatccttataaagtagccaaagattatttgaaaaaagaagggttaattaaataa

SEQ ID NO: 1523 - DNA, 1056 bp, Staphylococcus capitis
atgaaaagtcagttaaatcaattatgtgcatatgaacctggtctttctccagaagcattaaaaaaagagtatggtattgagggtgaattattcaaattagcatcaaatgaaaatttatatggacctacgccaaaagccaaagaagcaatcaagcaacatttagatgagctatattattatcccgaaagtggctcaccaagtctaagaaaagctattagtaaacatttaaatgtcgacgaatcacgtattttatttggggccggccttgatgaagtaatattaatgatttcaagagcggtgttaacacctggagataaaattgtgacgagtgaagctacttttggacagtactatcataatgctatcgtcgagtcagccgaggttgttcaagttccacttaaagagggtgggtttgatctagaaggtatcctacaaagtattgatgatcatacagctctagtttggttatgtaatcctaataacccaactggtacatattttgatcaagaaacgctaaatgatttcttggaacgtgtgccgagtcatattccggtattaattgatgaagcgtatgttgaatttgtaactgcaccagattttcctaacactttagagttacaagaaacatttgagaatgcttttttactgcgcacattttctaaagcttatggcttggctggattaagagtaggttacgtagttgcttcttctgatgctattgaaaagtggaacatcattagaccaccattcaacgttactagaatctcagaatatgcagcaattgctgcactagaagaccaagcgtatttgaaagaaattactcataaaaatgctatagaacgtgagaaattttatcaaattcctcaaagtaagcactttttaccaagtcaaactaatttcatctttgtaaaaaccaacaatagtaaagcgttatatgatgagttactaaaggtaggatgtattactagaccttttccggatggtgtaagaattacgattggatttcctgaacaaaataagaagatgttagaagtattaaaagacttcaattattaa

SEQ ID NO: 1524 - DNA, 534 bp, Staphylococcus capitis
atgtctcgaaagaaaatagctatagatatggatgaagtcttagctgatacgctaggtgaaattattgatgcagtaaatgagagagcaaatcttgggatttccatcgaatctttaaatggtaaaaaattaaaacatatgatgcctgaacatgaaggattagtgactgaaatattaagagagccaggtttctttagacgtttgaaagtgatgccacacgctcaagacgtagttgaaaaattaaatcatcattatgacgtatatatagctacagcagcaatggatgtgccaacatcatttcatgataaatatgaatggttattagaattcttcccattcttaaacccacaacactttgtattttgtgggagaaaaaatattgtgaatgctgattatttaatagatgataatccaaagcaacttgagatttttgaaggtaaatcaattatgtttacagcatctcataatataaatgatgatagatttgaccgtgtaagtggttggaaagacgttgaagattatttcttaggtaactag

SEQ ID NO: 1525 - DNA, 927 bp, Staphylococcus capitis
atggaaaataaatataaccatggtgtcttgttttatcatgaacatagtggcttaaaagatatatatgaaggacttggtgaggtgactaaatcacttagttcaatgtgtaagcacttatcaattcagttaagtgaaaacgaaggcgacattatcaaatactgtgaatctattaagaatgataaatatggttcagaaatagatatattatttattttaggtggagatggtactgttaatgaactggtaaacggtgtcatgcaacacgatttacaattaccagtgggtattatcccaggtggaacatttaatgacttcactaaaacattaaacttagactctaactttaaaaatgcaagttcccaattactttcagcacaagttggttcatatgatgtaatgaaagttaatgatacatttgtccttaactttgttggtttagggctaatagttcaaaatgctgagaatgtccaagaaggttctaaggatgtttttggcaagctaagttatattggatcaacagtaaaaacactaatgaatcctagtaaattcaactttaagctcaacgttgatggaagagaagaaactggtaatacctctatgcttcttatagctaatggcccaaatatcggtggcggacgcgttcctttaactgacctctctcctcaagatggaaaagttgatacgtttatattcgatgatcaaagttttagtattttaaatgatatttttaagaaaagagatagtatgaattggaatgaaattactgagggcatagaccatattccaggtcaacatatttctctatccactgaacctaatatgaaagtcgatatagatggtgagattagtttagaaacacctattgaaattgaagttttacctaaagcaatacaacttcttacttttccagaatttggtaaatcataa

SEQ ID NO: 1526 - DNA, 1506 bp, Staphylococcus capitis
atgacaacgaataattcccatgagcaagcagttcaagaaatacctcaacatggattctttgggcatcctcgaggtttaggcgtactctttttcgtagagttttgggagcgttttagctactacggcatgagagcgatgcttattttttatatgtattttgcgatacaagatcatggacttggaatcgataaaactacggcaatgtctatcatgtctgtatacggggctttaatatatatgtcttctattccaggaggttggattgcggacagaattacagggacacgtggtgcaactttaataggtgcagttttaataattatcggacatatctgtttaagtttaccatttgcaatgtttggcctattcgcttctatgttctttattattgttggttcaggtttaatgaagccaaatatttcaaatattgtaggtcgtttgtatccacaaaatgacgtgagaatggacgcaggatttgtaatcttctatatgtctgttaactttggcgcacttgtttcacctattattttgcaacacttcattaatgttaaaaacttccatggcggattcttaattgctgctattggtatggcattaggtttagtttggtacgtattatttaatcgcaaaaatttaggtagtgtaggcatgaaacaaacaaatccactatcaccaactgaaaagaaaaaatacagtataattatagcgatgattacagtagttatagcgatagtagttatcatttcttacataactcatacattatcattcgatttagttagtaattcagtactcgttttaggtattgcattaccaataatctatttcactactatgattcgtagtaaagaagtaactgatattgaacgttcacgtgtaaaagcttttattcctttatttattttaggtatgcttttctgggcaatacaagaacaaggctctaacgtattaaatatttatggtatagagcattcagatatgaaattaaatttatttggttggaaaacaaacttcggtgaagccatcttccaatcaataaatcctttgtttatcttattatttgcaccagtcgtatctgcagtttggcaaaaattaggtaaacgtcaacctagcctaccaatgaaatttgttataggcgctttaatggctggcgcatcatatattatgatgggtattattggtaatatttacggaaacacgcatttctcagtaaactgggtaattctctcatacatcatatgtgtcgttggtgagttgtgtctttctcctactggtaatagtgcagcagtaaaattagcaccgaaagcattcaatgctcaaatgatgagtttatggttattaacaaacgcatctgctcaagcatttaatggtacattagttaaattaatagatccattgggtcaaacgaattacttcattttcttaggtgttactacagctataattacatttattattcttgctttcagtcctaaaattataaaagcgatgaaaggcattcgttaa

SEQ ID NO: 1527 - DNA, 501 bp, Staphylococcus capitis
atggcacaaggacgtcaaaaagatgaacttcaagatattactttactaggaaatcaaaacaatacgtatgattttaattacagaccagatgttctagaaacctttgataacaagcatcaaggtcgtgactacttcgtcaaatttaattgtccagagtttacatcgttatgtcctattacaggccaaccagattttgcaacaatttatatttcatatatccctaatgtcaaaatggttgaatctaaatcattgaaactatatttatttagctttagaaaccatggtgacttccacgaagattgtatgaatataattatgaatgatttgattgaacttatggatcctcattatattgaagtttggggtaaattcacacctagaggtggcatctcaattgacccatatacaaactatggccgtcctaattctaaatatgaaaagatggctgaacatcgtttgatgaatcacgatatgtatcctgaaaagattgataatcgataa

SEQ ID NO: 1528 - DNA, 867 bp, Staphylococcus capitis
ttgaatccaaaagtaaaaggtattattgctatcttaatttctgctattggatttagttttatgtctgtattcttcagacttgctggagacttacctgtcttccaaaaatctttagctagaaatttagtagctatgtttatacctctattttttatcataaaatataagcaacctatatttggtaaactgagtagccaacctttattgatttcacgttctacactaggtctcataggagtattactgaatatatacgctattgaccatatggtacttagtgatgccgatacactaatgaaattgaatcctttctggacaattctcctaagtttaatctttttacatgagaaggttcgtaaatatcaaatatcagcgatgattatcgctatattaggtatgttactcattgttaaacctgaattttcatcatcagtgattccatcaatagccggcttattttcaggtatatttgctgcgtcagcttacacatgtgttcgtgcacttagtacacgtgaaaaaccttatacaattgtattctatttctcattattctcagttgttgtcttaataccattctcaattttcacatttgaacctatgacaactgtccaagttttatacttgcttggtgcaggtttatctgcagctgttggacaaataggtatcacacttgcatatagctttgcgcctgctaaagacatttcaatcttcacatatgcttctataatattcacagcattatttggtttcatcttattcggagaaacaccagatatgttagctactttaggttatgttgttattattagcgcaagttactatatgtttgaaaaggcacgacgagaatcaaatataaaagaaagttaa

SEQ ID NO: 1529 - DNA, 399 bp, Staphylococcus capitis
atgaaagtagtatatttctcattttctggaaatgttagacgttttataaagcgagcagaaattgatgacacgttagaaattactcaagacaattgtacggaaccagtaaatgaaccatatatcttagttactggcactattggatttggagaagtgccacaacctgttcaatcttttttagaagttaatcacgctcaattacaagcggtagctgcaagcggaaatcgtaattgggggcaaaattttgctaaagcaggccgtacaatctcagaggactatgatgttcctctacttatgaaatttgaagtacaaggtacgaacaatgatgtaattgaatttaaggataaggtgggtaatttcaatgaaaaccatgaacgagaagaaatacaatcatattga

SEQ ID NO: 1530 - DNA, 2106 bp, Staphylococcus capitis
atgaaaaccatgaacgagaagaaatacaatcatattgaactaaataatgaagtaacgaagcggaaagataatggtttctttgatttagagaaggatcaggaagcattaaaagtttatcttgaagaaatccacgataaaacaatttatttcgatgatgaaattgaacgtttacattaccttgtggataatgacttttatttcaatgtatttgagaaatactctgaagaagaattacgagaaattactgaatatgctaagtcaatctattttcaattcgctagctacatgtctgcaagtaagttctataaggactatgctttaaaaacaaacgataaaagtcaatttttagaagactataatcaacatgttgcaattgttgccctttatttagctaatggtgatactaaacaagcaaaacaatttatttcttctatggttgaacaacgttatcaaccagcaacgcctactttcttaaacgcaggtcgtgcacgtcgcggtgagctcgtttcatgtttcttattagaagttgatgatagtttaaattctattaactttattgattcaacagcgaagcaactaagtaaaattggtggcggtgtcgctattaatttatcaaaattacgtgcccgtggagaggcaatcaaaggtattaaaggtgttgctaaaggtgtattaccagtagctaaagcacttgaaggtggatttagttatgccgatcaattaggtcaaagacctggtgcaggtgctgtatatttaaatattttccattatgatgtggaagaatttttagatactaaaaaggtcaatgctgatgaagatttacgtttatctacaatttcaacaggtcttattgttccttctaagttctttgatttagctaaagaaggtaaagacttctatatgttcgccccacatactgtaaaacaagagtatggtgtgacattagatgatattgatttagagaaatattatgatgatatggttgctaatcctaacattgataagaagaaaaaagatgcacgtgaaatgttaaatataattgcacaaactcaactacaatctggttatccgtatttaatgtttaaagataatgcaaataaagtacatgccaactccgatattggtcaaattaaaatgagtaatttatgtacagaaattttccaattacaagagacatctattatcaatgactatggtacacaagatgagattaaacgtgatatttcttgtaatcttggctctctaaacattgttaatgttatggaatcaggtaaattcagagattctgttcacactggtatggatgcacttactgtagtgagtgatgaagctaatatacaaaatgctccaggtgttaaaaaagctaatagtgagttgcactcagtaggtctaggtgtaatgaaccttcatggatatttagcaaaaaataaaatcggttatgagtctgaagaggcgaaagactttgctaatatattcttcatgatgatgaactattattctatagaacgttcaatggaaatagctaaagaacgcggagaaagctatcaagattttgaccaatcagattatgctaatggcaaatactttgaattctatacttcacaagaatttgagccacaatttgaaaaagttcgccagctattcgatggtttagatattccaacatcagaagattggaaagctctacaaaaagaagtagaacaatatggtctttatcatgcttaccgtttagctattgcacctactcaaagtatttcatatgtgcaaaatgcaacaagctctgtaatgcctattgtagatcaaattgagcgtcgtacttatggaaatgctgaaacattttatccaatgcctttcctatcacctgaaacaatgtggtattacaaatcagcatttaatactgatcaaatgaaattaatcgatttagtttcaacaatacaaacacatgtagaccaaggtatttcaacaattctatatgtaaattcagaaatttctacacgtgaactttcaagattatatgtttacgcacactataaaggactaaaatcactttattatacacgtaacaaattacttagtgtagaagaatgtacaagctgtgcaatctaa

SEQ ID NO: 1531 - DNA, 969 bp, Staphylococcus capitis
atgaaagcggtcaactggaacacccaagaagatatgacgaatatgttttggcgtcaaaacatctcacaaatgtgggtcgaaacagagtttaaagtttcaaaagatatagcaagttggaaaacattgacagattctgaaaaagaaacatttaaaaaggctttagcaggattaacagggctagatactcatcaagcagacgatggaatgcctttgattatgttacatacgactgatttaagaaaaaaagctgtatactcatttatggctatgatggaacaaattcacgctaaaagttattctcatatcttcacaacattacttccgtctagtgaaacgaactatttgttagacacatgggtaattgaagaacctcatttaaaatataaatcagataaaattatcgacaactatcataagctttggggaaaagaagcatcaatttttgatcaatatatcgcaagagtatcaagtgtattcttagaaacgttcttattttactctggtttctactatccgctataccttgctggtcaaggtaaaatgacgacttctggtgaaattattcgtaaaatcttattagatgaatcaattcacggtgttttcactggtttagatgctcaaagcttacgcaatgagctgtcagagagtgaaaagcaaaaagcagatcaagaaatgtataagttattaaacgaactttatgataatgaagtatcttatacacacttattatatgatgatattggtttaactgaagatgtacttaactatgttcgttataatggtaataaggctttatctaacttaggttttgaaccttattttgaagaacgtgaatttaatccaattatcgagaatgctttagatacatctactaagaaccatgacttcttctcagtaaaaggtgacggctatacgttagcattaaatgttgaagcgttacgagatgaagactttgtattcgatgaataa

SEQ ID NO: 1532 - DNA, 315 bp, Staphylococcus capitis
atgcctaatattcacggttcagtcattgataaagagacaagatgtactcactatcactcttttttagatgttattgcaattaaatttaaatgttgtgacaaatattatccttgttataaatgtcatgatgaacatgaatcacattctatacaaagatggactgagaaagaatttgatagaaaagttattatgtgtggtgtgtgcaaccatgaaatgagtattcacgactacatgatggttgaagtgtgtcctaaatgcaaagcacattttaatagtagatgtaaatttcactatcatttgtattttgaaatataa

SEQ ID NO: 1533 - DNA, 933 bp, Staphylococcus capitis
atgtacaaaccgttgaataaaagtgacatcttaaatgatttaaagtcgattattcccgacaatataattaaagttgatgaacctctcaaacgttatacatatactgaaactggcggagaggcagatttctatttatccccaacaaaaaatgaagaagtgcaagcaattgtagcttacgcttataataataatattcctgttacatatttaggtaatggttcaaatattatcatacgtgaaggtggaataagaggcatcgttctaagtctactatcattagatcatattgatgtttctgacgatgcgattatcgctggtagtggcgctgcaatcattgatgtttcaagagttgcacgagatcatgttcttactggtttagagtttgcatgtggtattccaggttcaatcggtggtgctgtatttatgaatgctggtgcatatggcggtgaagttaaagattgtatcgactatgcgctatgcgttaatgagaaaggtgatttaatcaagttaactaatgaagaattagagctagattacagaaatagtattgttcaaaagaaacatcttgttgtacttgaagcagcgttcactttaatgccaggtcatttagatgaaattcaagctaaaatggatgatttaactgaaagaagagaatcaaaacaaccattagaatacccttcttgtggaagtgtattccaaagacctcctggccatttcgctggtaaattaattcaagactctgatttacaaggtcatcgcatcggtggcgtagaagtatctaaaaaacatgctggctttatggttaatgtagataaaggtacggcaacagattacgaagatttaattcaccacgtacaaagaactgttaaagataaatttgatgtagaattaaatacagaagtacgtattattggagaacaccctaaaagttaa

SEQ ID NO: 1534 - DNA, 519 bp, Staphylococcus capitis
atgtatacttatgttcaacctttagtcaaagaggacttaaatgaatcgttcgctaaagaataccaaaacgtcaaaaatatattgtttaatttattagattcaccagttaaatacactcaacatattggtggcacgcgtcattttaattatgctacagaacccatattggatgtacttgtaggagtcaataatttacacgatattactgctctagatgaaaaacgtttgaattatgctggtttttaccgacttcaccattcctataagaaaaaagtagtgatggctcgattcaataatcttagtgaacttaagcaagaagtaagattacatattatacagttagatacccctctttttgaacagtatcaaaaggttgaccaattattaacacaagataagaaaatttctcaattattttccacgaaaaaacaaaatatattgaaacatgtgcgagccattcgtatgtatgaaaatcaaaaacaaagtatatttgaggatttaagtagagactcaaattaa

SEQ ID NO: 1535 - DNA, 891 bp, Staphylococcus capitis
atgaaaaaattactatttattgcaacaattgtcatatttataaccacgctaacagcctgtggaaataaaactaacaaagattttaatgattttgacaataaactcagtgatgttaagaaaaagcaaaaaaacgttgaagaagttatagataaaatacatttaaaagagttagataacttaagtaaaacggatacgacagataaaaacaaaaaagaatttattgcacttcaaaaagatattaataactatctcatgccggaatttaagaaatataaaaaggctgctaatcaattacctgcaaatacaaatgatgttaaaaatctacgtaactcgtatttagatactgttaaagagaaagaaacttcaattaatgatttaaaatcatttgttgatttatgtaatcgttctatcaaagataatgaagatatactagattatacgaaacttttcgaaaaaaatagatcagaggtagaatccgatattaataaagctactaataaaagtgatgctgatcagttaacatctaaattagaagaaaataataagcaactcaaatctacagctaagaaatatctcaattcttctactacaaattcagattcagctaaaaaagcaatcaatgatcatatttcaccattgattgataaacaaattaaagatattaaccaaactaatatttcagaccaacacgtagataatgctaggaaaaatgcaattgaaatgtactacagtttacaaaattactatgacacacgagtagacactatcgaaattagtgaaaaattatctaaaattgatgtggataaattaccaaaagagggtaaagatatttcaagcaaggataaagaatttaacaagcaatactatgagtttaaagaaaatgtaaaatag

SEQ ID NO: 1536 - DNA, 321 bp, Staphylococcus capitis
atggctattaagctgagttcaattgaccagtttgaacaagtcttagaagagaataaatatgtttttgtattaaaacatagtgaaacttgtccaatttctgcaaatgcgtatgatcaatttaataaatttttatatgaaagagatattgatggttactatttaatcgttcaacaggagcgtaaattatcggactatattgcagaaaaaacgaatgtgaagcatgaatctccacaagccttttactttgtaaatggtgagatgaagtggaatgctgatcacgatgatattaacgtttctcaacttgcacaagctgaggaataa

SEQ ID NO: 1537 - DNA, 1119 bp, Staphylococcus capitis
atgaaggttttagtagccatggatgagttcaatggaattatttccagttatcaagcgaataggtacgttgaagaagcggtagcaagtcaaattgaacatgcagatattgtacaggttccattatttaatggaagacatgaattaatggattctgtatttctatggcagtctggaaataaatatcgtgttaaagctcatgatgccgatatgaatgacgtagaagcgatgtacggccaaactgatagtggaatgactgttattgaggggaatttattcttaaacggtgaaaagccgattgatcagcgttctagttatggtttaggtgaagtattaaaagcagcactggataatcaagcgaaacatatcgttatatctctaggaggtattggtagctttgatgcaggtgccggtatgttacaagcgcttggtgcaaaattctatgatgatgaagcaaacattgtagatgtgagtgagggtgcatataaaattaaatatattagacgcattgatttatctgatgtacatcctcagcttgctaatgccaaattacaattaatgtccgatttttcaagtcgattgtatggtaagcaaagtgagattatgcaaacgtatcaaacgtttcaattaaatcaaagcgaagctgctgaaattgataatttagtttggtattttagtgaactatttaaaagtgaactcaaattagcaattggccctatagaacgtggcggtgctgggggaggcattgctgcagtgttaaaaggcttatatcaagctgaaatattaacaagtcacgaacttgttaatcaaattacacacttagaagatttaattgagcaagccgacttaattatttttggggaaggactcaaagaaaaagatcaaattctagagacaactactttgcgtattgctgatttaactcaaaaatatcataaacctgccatcgcaatttgtgccacaagtgataagtttgatttgtttgaatcgcaaggtgtgactgcaatgtttaacacatttatagatatgcctgaaacgtatacagattttagaatgggcattcaaatacgccattacacagttcaagctcttaaattacttaaaacgagtcttaatcaataa

SEQ ID NO: 1538 - DNA, 1227 bp, Staphylococcus capitis
atgaaagaacaaattattaaccgattaacaagatatgtaaaaatcgatacgcaatcagatccaaactctcaatcaacaccgtccacagataaacagtgggatttattacgtttattggaaaatgaacttcaagcatttgggttatctactgatattgatgaatatggatatctattcgctactttagaaagcaatgtagatgatgaggtgccaacagtaggtttcttggcccatgtcgatacatcaccagatttcaacgcaacaaatgttcaaccacaaattatagacaactacgatgggcaagcgctccagttaggagatactcatcgtgtgctaaatccaagtgttttccctgagttaaaccaagttgtaggacatacattaatggttacagacggtacatcattacttggcgctgacgataaagcaggtgttgtcgaaattatggaaggtattaaatacttaattgatcaccctgaaattaagcatggtcgtattcgagtcggtttcacacccgatgaggaaattggtagaggacctcacaagtttgacgttgctcgttttaatgctgacttcgcatacacaatggatggaagccaattgggtgaacttcaatttgaaagtttcaatgcggcggaagctacagttacttgtcacggcgtgaatgttcaccctggttccgctaaaaacgcaatggtgaatgcaattaatttaggccaacaatttaatagtcttctaccacctagcgaagtgcctgaacgtactgaaggatatgaaggattttatcatttaatgagtttcgagggtaacgttgaaaaagcaacgctccaatatatcattcgtgatcatgataaaaagcagttcgacttacgaaaaaaacgcatgatggaaattcgtgatgacatcaatactcactatgaggatttccctgtaaaagtcgatgttcatgaccaatattataatatggcagaaaaaattaaacccttacaacacattattgatatccctaaacgtgtatttgctaaacttgatattgaacctaatactgaacctattcgtggtggcacagacggttcacaattatcatttatggggttacctacacctaatattttcacaggatgtggtaacttccacggcccattcgaatatgcatcaatagatgttatggaaaaagcagttcaagttgtcgtaggtatcgctgaagaagttgctaaaaaagaataa

SEQ ID NO: 1539 - DNA, 495 bp, Staphylococcus capitis
atgttattttatttattccattttacaattagtttcatttccacagtccttttttcaattatatttaatgcgcccaaaaagttacttgtagcctgtggtttcgtaggtgcagtagcttggacaatttatcaattcacagttgggatggacttaggaaaagtaggcgcttctttcctaggaagtttaattttaggtttaatgagtcatactatgagcagacgatataaacgacctgttatcatctttatcgttccaggaatcattcctttagtaccaggaggagctgcatacgaagcgactcgctacttagtctctaataattatacttatgcagtaaatacatttttagaggtcactttaatttcgggcgccatcgctttcggtatacttgtgtctgaaatcatctattatatttacactcgtattaaacagtattatggtaaaatcaaaggtaaaacttatagaaaatcgtataatatgaataatagagtttaa

SEQ ID NO: 1540 - DNA, 762 bp, Staphylococcus capitis
atgtcggattccatcacgataatagatgaaaataaagttatcgatgtagtattaattgcaggtagaatcttacttgaagcgggcgctgaaacgtatcgtgttgaagatacaatgaaccgtattgcacatagttatggtttgcatgatacatatagttttgttacatctactgcgattatattttcacttaatgatcgcactagtacacgattaatacgtattcgtgaacgtacaacagatttggagaaaatcgctcttaccaatagcttatctcgtaaaatttctaacaatcaacttacgattgatgaagctaaaacagaattaattcaccttagacgtgcatctctacagtattcattctttatgaattttcttgctgcatttatagcttgtggcttcttcttatttatgtttggaggtaccgcttctgacttttggattgcgtgtttagctggaggtgcagcatttttaacttttagttttgtacaaaaatacattcaaattaaattcttctcagagtttgtagcctcagcagtagttatcagtatcgctgcaattttcaccaaaattggaatcactaaaaatcaagatattattactattgcaagtgttatgcccttagttcctggtatccttataaccaatgccattcgtgatttattagcaggagaattgttagctggtatgtcacgtggcgttgaagctgcgcttaccgcctttgcaataggtgcgggtgtcgcaattgtattactactattataa

SEQ ID NO: 1541 - DNA, 1071 bp, Staphylococcus capitis
atgtttgaagcaatcatttacaacatatctgtcatggtcgcaggtatttatctatttcacagattacagtattcagaaaataaaaaaatggtattttcaaaagaatacgtgacagttttaatgacactcgtttctctactcttagctgcatatcctattccatttaagagcgaatatctcgttcatttaactttcgtgcctttattatttttagggcgctatacaaatatgatatatacactggcttccgcattcattgttgcattagttgatgtattaatatttggaaattcaattatttatggcattactttagtcgtaattgctggtgttgtaagtgctgtaggtccatttttaaaacaaaatgatattgtttctttactaattttaaatttcattagcattatcattttattaatattagcatttgcaagtccaatttatgacttaatagaaatattagtacttattcctatttctttaattattactattgcttctgccattacattcgtagatatttggcatttcttctcattagttaaccgttatgaaaatgaggacaaatacgattaccttacaggtttaggaaatgtaaaagaatttgatagacatttaaatgaagtttcacgtattgctgaagaaaaaaatcaaagtctagctttactcttaatcgatattgatggatttaaagatgtaaacgatatttattcacaccaatcgggtgatgctgtacttaaacaaatgtcacagctattaaaaaattatgtaccaaatcaatttaaaatcttcagaaacggtggagaagaattctcagttgtcattagaaattactcgctagatcaaagcgtaaaattagctgaaaatattcgttctggtgtagagaagtcttctttccatcttccagataaggaagttatcaaactttccgtttcaatcggggtcggatacttaacccaagatgatcgtaaatcacaacgtaaagtatttaaagatgccgacgatatggttcatgttgctaaaagtgaaggacgtaataaagtgatgtttaaccctattgttaaactataa

SEQ ID NO: 1542 - DNA, 1086 bp, Staphylococcus capitis
atgtatactttactactcatagcatttaccatgatagtcagtttaataattacgcccattatcattgcagtatcaaagaaattagacttggtagatcgtcctaactttagaaaggtgcataccaaaccgatttcggtaatgggtggtacagtcatattattctcttttttaataggtatttggttagggcatcctattgagagagaagtgaagcctcttattttaggtgccatcataatgtaccttgtaggacttattgatgacatatatgatttgaaaccatacattaaacttacggggcaaatagtagctgcgttagttgtcacattatatggcattactatagatttcatttcattacctatggggccgacgattcattttggatttttaagtataccgataacagttatttggattgttgcgataacgaatgccatcaatcttattgatggtcttgatggtttagcatcaggagtctctgcaattggattaatgactatcgggtttatcgctattttacaagcgaatatctttattattatgatatgttgcgtgctattaggttcgctcattggatttttattttataatttccatccagctaaaatatttttaggtgacagtggggcgctcatgataggttttatcataggattcttatcattacttggttttaaaaatattacatttattgcgttattcttcccaattgtcattctagcggtgcctttcattgacacattgtttgcgatgattcgtcgaatgaagaaaggtcaacatatcatgcaagctgataaatctcatttacaccataagttattagctttgggatattcacatagacaaaccgtactacttatttattcaattgcaatcatgtttagtttatcaagtgtgattctttacttatcacaaccacttggtgcactcatgatgtttatcctcattatatttacaatcgaattaattgtagaatttactggtttgattgatgataattctcgtccaattttaaatttaattactcgaaaaggggaccacaagcaacatcgttatgatgagcaacagccccctagacactaa

SEQ ID NO: 1543 - DNA, 639 bp, Staphylococcus capitis
atggtaaaaccgataattactatcaaagaagaacatcaaattgaaaatgtcattaataaatctcgctttatcgcacatattagacccgttcaaaacgaggaggaggcaaaagcatttattaatgaaatcaaatcctctcataaagatgcaactcacaattgttcagcctatactgttggccctgaaatgaacatccaaaaagcgaatgacgatggtgagccgagtggtactgctggtgtaccaatgctagaaattttaaaaaaattagagattcatgacgcatgtgtagtagtcacacgttatttcggaggtattaaattaggtggtggcggtcttatccgtgcttatagcggtgctgttagagatgtgatatacgatattggacgagtagaactaagagaagctgtacctgtaacagtcactataagttatgatttaactggaaaatttgaatacgagctcgcttcaacaccttatatgctaagaaatcaattttataccgacaaagtgagctatcaaatagatgttgtaaaagaggattacgatgaatttatccaatttcttaaccgtattacagctagtaattatgatttagaagaagattttaaattattacctttcgatatctcaacgacttaa

SEQ ID NO: 1544 - DNA, 867 bp, Staphylococcus capitis
atgaaggttgcagtaatggccgattcaacaggctatttaccacaagaaatcattgataaatataatataccgattgctccattaagtgtgacatttgatgatgggcatacatttacagagaatgaccaattttcaatagatgatttttataagaagatggcttcatctaaaactatacctacaacaagtcagcccgctattggtgaatggttgaaaaactatgaaaaacttagagatgaaggatacacagatatcattgtaattaacttatcaagtggtattagtggaagttatcaatctgctacacaagccggagaaatggttgatggtgttaacgtgcatacatttgatagccgtctcgctgcaatgattgaaggtagctttgtgatctatgcaattcaactagtagaaaaaggttacacagctaaagaaattattaatgaactaactgatgtaagagaacatataggcgcatatcttatagttgatgatcttaagaatctacaaaaaagtgggcgtattacaggtgctcaagcttgggtaggtacgctattaaaaatgaaacctgtacttcgctttgaagaagatggtaaaattcatccacatgaaaaagtgcgtacgaaaaaacgcgcatttaaatctttagaatcaaatgtctttgaattaattaaagacttggatgaagtaactgtatttgtcatcgatggggataaaaaagaagatggacaagcatttttacaacaacttaaagaagactaccctaatgtgaatattcaatactccgaattcggtccagttattgcatctcatttaggttctggtggtttaggtttaggttacttccctagaaaaattgaaattaattaa

SEQ ID NO: 1545 - DNA, 1293 bp, Staphylococcus capitis
atgattaaacattacggtgaacttatctttccatcaattcagttaaatgatgaaaaagttgctcgtatcacgaaaggcattattaaaaaagaaggacattattactgtattcaatgtggtaatgaggataatagttatatgtcaaagtactattctccctttttggacaaagaaattatttactgtaggcgatgtattcaattgggaaggatagatagcatcacagactatagaattaccgaaagtacacaattagctactgaaggagagtttgaattaccatttacattgtcaaagcaacaacaatatgcatctgacgctatcattaaagctataaaaaattctgaaaatctcttattatatgcagtgacaggtgcaggtaaaacagaaatgatgtttgatggaattagcttagcacggcaacttggacacaatgtggcaatattatctcctagagtagatgtagttattgaaattagtcatcgcatcaaagaggcttttaaaaacgaagaaatagatattttgcaccagaaacaatctcaaaagtataatgggcattttgttatcgcaacagtgcatcaattatatagattcaaacaacactttgacactatttttattgatgaagtcgatgcctttccattatctatggatcccaacctctcattagcaatcgataccgcttctaaaacaattcattctcatatttatatgacagcaacaccaccacgtcaacttattaaacaaatgtcttctaataaaataattaaacttccagctcgatttcatagacaaccactacccgtacctcgctttaaatatttcaaattaaactcaactcgagtgcaaccccaattcattcaccttttgcaaacgcaaattaaacaacaacggtatactttggtattttttaatcacattgaaactatgaaaaatgcatatctaaggtatcgatctcatattcctaatctcatctgtgtttatagtgaagacgtatatagatttgaaaaggtagaagcacttcgccgtggtgagcactcaatcgtttttacaacaactatactggaaagaggatttaccatggcgaggttagacgttattgtcataaatgcagaaacattctctaaagcggctttaatacaaatcgccggacgtgtagggcgtaaaatagaagaaccaaatggacttgtactatttcttcatgagggtgtcagtctatcaatgatgagtgctaaaaaagatattacagagatgaatcgtttaggttataaaagagggtggctagatgcgtag

SEQ ID NO: 1546 - DNA, 702 bp, Staphylococcus capitis
atgcgtagatgtatacaatgtatgacaccattgaaagaaattattcatgtatataatatttttaaaccgcccacaccattttgtgaacgatgcgaacaattgtggaataacataagaataactcatctcgatgaaagatgttctagatgtcttaatataaaaacttctgattcaaatgactgtctggattgtcaattcttggaaaaggaattcaaattgatggatcaaagggaattcaaattgatggatcaattgtattgtcaatatcgttaccaaggagtaatgaaagacgtgttacaacaatataaattcatgagagactatgaactttctaatgtgttatctcaaaaactgcaattacctcaaacagattatgattatattgttccgattccatcgccatttcaacgtgatgttgaacggacatttaatcctgtagctacagttttagataaaatgggggttgattatgtgaatattttaggaacaaatatacgcccaaaacagtctgagttaggtaaattagaacgtgccaatgctccaaatccgttctacgtaaaggaagaagacattgacatagagggtaaagtaatactactcattgatgatatttatacaactggattaacaatacatcatgcagggtgtaaattattatcgttaaatgtcagaaaattcaaagtgtttgcgtttgcacgataa

SEQ ID NO: 1547 - DNA, 576 bp, Staphylococcus capitis
atgattagatttgaaattcatggagataacctcactatcacagatgcaattcgcaactatattgaggacaaaattggtaagttggagcgttattttaataatgtgccaaacgcagtagcacatgttaaagttaaaacttattctaattcagctactaaaattgaagttactattccgttgaaagatgtgacattaagagctgaagaaagacatgatgatttatatgctggcattgatttaatcactggtaaattagaacgacaagtacgaaaatataaaactcgtgtaaatcgtaaacatagagatcgtggagatcaagaagtatttgtggcagaagtacaagaagcatcacctggggaagtaagtggtgctgaagaatctgtaagcgatagcgaaattgaaattatccgttcaaaacaatttagtttaaaaccaatggactcagaagaagcggtattacaaatgaacttattaggacatgatttcttcatctttacagatagagagacagatgggacaagcattgtttacagacgtaaagacggtaaatacggattaatcgaaacaactgaataa

SEQ ID NO: 1548 - DNA, 777 bp, Staphylococcus capitis
atgccaaaaataacaattcttttttctacgtgtatgatgttgatgtcaatgttgctcttttatacacccgttagtcatgcccaaagtctatcctcaaaacaaactatggtgaatcagcaaaatcaaaataatactactacacaattctcgggaaatactgataatgcgaagaaagctactacagatgatgaaccgtcgtttgaaaactctaaagtaaatcaatatattatccaacatcatcttcaacattctcacgttgtcaatgatccacgtatgaacactcttccaaaattggaatataaggaaggtacttatattggtgttgtaatccatgaggtaggggaagaccatcgatctttacaaaaatgggttgataacatgtatgcaacatacaatacagcatttgtacacgcattcgttgataataatgaaatacatcttactgcaccttcaaaatattatgtatggggggctggacctaaagcgaatccatacttctatcaaattgaacttgtaagaatgtataacttcgtagattttgcgaaatcagtgaataaccaagcatggcttgcagcatttatgttaaaacaaaatggaataactccaacacttgctgacacaaatgaaggaaaaggttctgttatcagtcataacgcggtaagcagatactggggcgggacagatcatgttgatccatatgagtattacgcaagatggggttacgatatgcaacaaatgtatgaattaattaaatactactatgataatatggcgtaa

SEQ ID NO: 1549 - DNA, 2535 bp, Staphylococcus capitis
atgggatttttatcgaaaattgttgacggcaataaaaaagaaacgaaacgcttaggtaaacttgcagataaagtactcgcgttagaggaagatactgcattattaactgatgaagaaattcgtgaaaaaactaaagcgttccaaaaagaattatccgaaattgatgatgtaaaaaaacaaaatgattatttagataaaattttacctgaagcatatgcacttgtacgtgaaggctctaagcgtgtatttaacatgataccttatagagtacaagttatgggtggtatcgcgattcataaaggcgatatcgctgaaatgagaacaggtgaaggtaaaactttaacagcgacaatgccaacttatttaaatgcgctggccggtcgtggcgttcacgtgattacagtcaatgagtatttatcaagttttcaaagtgaagagatggctcaattatataatttcttaggtttatctgttggacttaacttaaatagtaagtctactgaagaaaagcgtgaagcatatgcacaagatattacttatagtactaataatgaacttggcttcgattacttaagagataatatggtgaattatgctgaagaaagagttatgcgtccattacattttgcaattattgatgaggtcgattctattttaattgatgaggcgagaacacctttaattatttctggtgaagctgaaaaatctacatcattatacactcaagctaatgtattcgctaagatgctcaaagcagaagatgactataattatgatgaaaaaacaaaagccgttcatctaactgaacaaggtgctgacaaagctgagcgtatgtttaaagtagacaatttatacgacgttcaaaacgttgaaatcattagtcatattaatactgcattaagagctcatgtaacgttacaacgcgatgtggattatatggttgttgatggcgaagtacttattgtggaccaatttacaggacgtacgatgcctggacgtcgtttttctgaaggattgcaccaagctatcgaagctaaagaaggtgttacgattcaaaatgaatctaagactatggcatctattacattccaaaattacttcagaatgtataacaaattagctggaatgactggtactgcaaaaactgaagaagaagaattccgcaacatatataatatgacagtaactcaaattcctacgaataaacctgtccaacgtgttgataaggcagatttaatttatattagtcaaaagggtaaatttgacgcagtagttgaagacgtagttgagaagcataaaaaaggacaacctatcttattaggtaccgtggcagtagaaacatcagaatacatttctaatttacttaaaaaacgtggtatccgacatgatgtattaaatgcgaaaaaccatgaacgcgaagcggacatcattgcaaacgctggtcaaaaaggtgctgtaaccattgcgacaaacatggctggtcgtggtacagacatcaaacttggcgatggtgttgaagaacttggtggactcgctgttataggtactgaacgtcatgaatctcgtcgaattgatgaccagttacgtggtcgttcaggacgtcaaggtgatagaggtgacagtcgtttctatctatcacttcaagacgaattaatggttcgttttggttcagaacgtttacaaaaaatgatgaatagacttggtatggacgattcaactccgatagagtctaaaatggtttcaagagctgttgaatctgctcaaaaacgtgtagaaggtaacaactttgatgcgcgtaaacgtatccttgaatacgatgaggtgttacgtaaacaacgtgaaattatttataatgaacgtaacgaaattatagataatgaagatagctctcaagtagtcaatgctatgttacgttcaacattacaacgttcaattaactattatgttaatgaagatgatgataatcctgattatgcaccgtttataaactatgtgaatgatgtctttttacaagaaggagacttagcggagtctgaaatcaatggtaaggattctgaagacatctttgaagttgtttgggcgaaaatagaaaaagcttatgagcgtcagaaagaaaaattaggcgatcaaatgagtgaatttgaacgaatgattttattacgttctatcgatagtcactggacagatcatatcgatacaatggatcaattacgtcaaggtattcacttgcgttcatatgcacaacaaaaccctcttcgcgattatcaaaacgaaggccatgaactgtttgatattatgatgcaaaatattgaagaagatacttgtaaatatatcttaaaatcagtagtacagtttgaagatgatattgaacgtgaaaaaacaaaagatttaggtgagggtaaacatctaactgctgaagatggtaaagaaaaagtaaaatctcaacccattgtaaaaggtgatcaagtagggcgaaacgacccatgtccatgtggcagtggtaaaaagtacaaaaattgccatggacaagcataa

SEQ ID NO: 1550 - DNA, 999 bp, Staphylococcus capitis
atggcagatccaaacttctggaatgatcaaaataaagctcaagaaattatagataaaaataacgctttaaagtcgatagtgaatgggtatcacaatttagccaatgaagttgatgatatgagtgcaactagagaattgttacaagaagaatatgatgaagatatgaaagaagaacttgagaatactgtcattcaatttaaagataaaatggatcaatttgaattgcaattacttctggatgggccacatgatgcaaataatgccatacttgaacttcatccaggcgccggaggaactgaatcacaagattgggcgagtatgttactaagaatgtatcaacgttattgtgaacaaaatggcttcaatgttgagacggtggactatttaccgggtgacgaagcaggcgtaaaaagcgtaacgctattgattaaaggtcataatgcttatggttacttaaaagcagaaaaaggcgtgcaccgattagtcagaatctcaccatttgattcctcgggtagacgacatacgtcgtttgcctcttgtgacgtgattccagatttcaataatgatgaaattgaaatagaaattaatccggatgatataacggttgatacctttagagcttcaggagctggtggtcagcatattaacaaaacagaatcagcgatcagaattactcaccatcctacaggtattgtagtcaataaccaaaatgaacgttcgcaaattaagaaccgagaagcagcaatgaaaatgttaaaatctaagttataccaactaaaattagatgaacaagaacgtgaaatggctgaaattcgtggtgaacaaaaagaaattgggtggggaagtcaaatacgatcttatgttttccatccttattcaatggttaaagaccatcgtacaaatgaagaaactggtaaggttgatgcagtcatggatggcgatattgggccatttatagaagcttatttaagaaaagaaatggacaatgaagaagtttaa

SEQ ID NO: 1551 - DNA, 780 bp, Staphylococcus capitis
atgaaaaaaacgctaactgtaactttaagttcgattgcagcattttttgcaatcaacactgcagctaacgctcaagaatcagaggcgtctcaacaggacgtaaattcaccagacgttgttacaacgaatcaatctaatttaggaacatatatagttaaagcaggagattgtttatataatatcgcagtagaacacggcatcactttagaacaattatatacattaaacccaggaatccaaccgcttattttccctggtgataaaatagttgtttcagagagtggcgttaatccatcacaatttgaaagtgaagaaatctctattccgcaaactacatttgagtcaacttcaactgatgaatcaggtgttacttatgaaaattatgaaacaccaatcaatttttctcaaacttcttatgatggtttaagaagtatttcgaatgcaggtaacctatatactgatggacaatgcacttactatgcatttaatcgtcgtgctgaattaggaaaaccaattggtagtttatggggcaatgctagcaactgggcagcatctgctagccaagctggattcaatgtaaataacacacctgaagtaggagctatattccaaagcgctcctggacaaaatggtgctggtgcgtatggacatgtaggcgttgttgagtcagtaaatcctaatggtacattaactgtttctgaaatgaactggaacggtggcgtaaacgttaaatcatatagaacaatttataatccaggttcttacaattatattcactaa

SEQ ID NO: 1552 - DNA, 642 bp, Staphylococcus capitis
atgggtgtacatcaatattttaaaagactttctgatttagaaaaattaataagactaccgggtaagtttaaatatttcgaacataatgtcgctgcccactcatttaaagtgactaaaattgcccagtatttagcaactgttgaagaatattatggaaatgaaatcaattggaaaagtctatatgagaaggcgttaaatcacgatttcgcggaagtttttaccggtgacattaaaacccctgttaaatatgcaagcagagaattaaagaaactattctcccaagtagaggaagaaatggtagatacattcataaaagaggagattcctgaacaatatcaaaaagtatacagagaacgactacaagaaggtaaagatgattctttagaaggtcaaattctctcagtggcagacaaaattgatttattatatgaaacttttggagaaattcaaaaacgtaacccagaacctttattctttgaaatttatgaaatgagtctagagacaattattcaatttgatcatttaaattcagtaaaagacttcatagataatgttattcctgaaatgcttacagaaaacttcattccaagaactgagttacgtgaaacgactatgacaatcttaaatagaagaaatgggtga

SEQ ID NO: 1553 - DNA, 237 bp, Staphylococcus capitis
atgatttggtatgcatgtgccgccttttttccttgtatattagtggtattatttagtgttgtcactagaagtaaatggataggtacattattaacgctaatattaataggtacttcgatttataaaggtttttttcataacgaatggattatatttatagatgtagtgagtcttctagcaggttatttaatcattgataaattgaaatttcataagaatcaagatgattctagttag

SEQ ID NO: 1554 - DNA, 1986 bp, Staphylococcus capitis
atggttgaacatgttccatttaagttgaattctgaatttgaaccacagggggatcaacctcaagcgatacaaaaaattgttgatggtgtgaataatggaaaacgtcatcaaactttacttggtgcgacaggaacaggtaaaacattcactatgagtaacgtcatcaaagaagtcggtaaacctacattgattattgcacacaataagacattagctgggcaactttatagtgagtttaaagaattcttccctgaaaatagagtagaatattttgtaagttattacgattattatcaaccagaagcttatgttccatcaactgatactttcatagaaaaggacgcctccatcaatgatgaaattgaccaattacgtcattcggctacaagtgcgttatttgaacgcgatgatgtaataattattgctagtgtaagttgtatttatggtttaggtaatccggaagaatataaagacttagtagttagcgttagagttggaatggaaatggatcgcagtgaattgctacgaaaattagtagatgttcaatatacacgtaatgatattgatttccaacgtggtacttttagagtgcgtggagatgttgtagagatttttcctgcatctagagaagaaatgtgtattagagtagagttctttggagatgaaattgatcgcatcagagagatcaattatttaactggtgaagtgatacgtgaacgtgaacattttgctattttcccagcctctcacttcgtaactcgtgaagaaaagatgaaagttgcaattgaacgaattgagaaagaattagaagaaagacttaaagaattacgcgatgaaaataaattattagaagctcagcgacttgaacagcgcacgaattatgatctcgaaatgatgcgtgaaatgggcttctgttcaggtattgagaattattctgttcaccttacattaagacctttaggctctacaccttttacattgcttgactattttggagatgattggcttgtaatgattgatgaatcacacgttactttaccacaaattcgtggtatgtataacggtgacagagctcgtaaacaggtgcttgtagatcatgggttccgtttaccaagtgcacttgataatagacctctaaaatttgaagagttcgaagataaaactaaacaacttgtatatgtttctgctacacctggaccttatgaattagaacatactgatgaaatggttgaacagattattcgtccaactggcttactcgatcctaaaatcgacgttagaccaactgaaaatcaaattgatgatttactcagtgagattcaagaacggatagatagagatgaacgtgtgttagtaacaacattaactaaaaaaatgagtgaagatttaaccacatatatgaaagaagcgggtattaaagttaactatttacactctgagattaaaacattagaacgtatcgaaattattcgggatttgcgtatgggaacttatgacgctattgtagggattaacctgttgagagagggtattgatatacctgaagtgtctctagtagttatacttgatgctgataaagaaggatttctacgatcagatcgttctttaattcaaacaataggtcgtgctgcacgtaatgataaaggtgaagttattatgtatgcagataaaattactgattcaatgcaatatgcaattgatgaaacgcaaagacgtcgagatattcaaacggcgcataataaggaacacggtataactcctaaaacgattaataagaaaatacatgatgttattagtgctacagtagaaagtgatgaaactaatgatcagaaacaaacagaactacctaagaaaatgactaaaaaagaaagacaaaaaactattgaaaatatagaaaaagaaatgaaaaaagcagctaaagatttagacttcgagaaagcaacagaattaagagatatgttatttgaattaaaagcagaagggtga

SEQ ID NO: 1555 - DNA, 2835 bp, Staphylococcus capitis
atgaaaggaccgtcaatagtcgttaaaggcgcacgtgcacataatttaaaaggagtagatattgagctacccaaaaataaacttattgtcatgactggactttcaggctctggtaagtcttctttggcatttgatacgatttatgcagaaggacaaagacgatatgtggagtctctaagtgcatatgcacgtcagtttttaggacaaatggataagccagatgttgatacaattgaaggtttatcacctgccatttctattgatcaaaagacaactagtaaaaatccacgatcaactgttgcaactgtaactgaaatctatgactatatacgtctgctttatgcacgcgtaggtaaaccttattgtccgcaccatggaatagaaatagaatctcaaactgttcaacaaatggtggatagaattctagaacttgaagaacgtacaaaaatccaactacttgcacctgtagtgtctcatagaaaaggaacacacgaaaaattaattgaagatataggtaaaaagggttatgtacgcttacgtgtcgacggagagattgtagatgtcaatgaagtgcccgaacttgataagaataaaaatcatactattgaagtagttgtcgaccgcttagtcgttaaagatggaattgagacgcgtttagcagattcaattgaaacgtctttagaactagcggaaggtaacttaactgttgatgtcattgatggtgatgaactaaaattttctgaaaatcatgcatgtcctatttgtggattctcaattggtgagttagagccaagaatgttcagtttcaatagtccatttggtgcatgcccaacatgtgatggtcttggtcaaaaactaacagtagacatggatttagttgttcctgataaagataaatcattaaatgaaggtgcaattgaaccatgggagcctacaagttcggacttctatccaacattgttaaaacgcgtatgtgaagtctataagatcaacatggataaaccatataaaaagctgacagatagacaaaagaatatcttgatgcacggttctggagataaagaaattgagtttactttcactcaacgtaatgggggcacacgtaaacgcaaaatggtattcgaaggggttattcctaatatcaatcgacgctaccatgagtctccttctgagtatacccgtgaaatgatgagcaagtacatgacagaacttccatgtgaaacgtgtcatggtaaacgtttgagccaagaagctttatctgtctatgttggcggttttaatattggtgaagtcgtgcaatactccattaaaaatgctttgaattattatgaaaagattgaattaagtgagcaagacagagcgatagcaaaccaaatccttaaggaaattatttcaagattatctttcttaaataacgtaggtttggaatatcttactttaaatcgttcatctggtactttatcaggtggggaagcacaacgtattcgtcttgctactcaaataggttcaagactaacaggagtattgtatgtattagatgaaccttcaattgggctacatcaaagagataatgatcgcctaattagtacattaaaagaaatgagagatttaggaaatacgttaattgttgttgaacacgatgatgatacgatgagagcagcagattatttagtagatgtaggtccaggtgcagggaatcatggtggagaaattgtttcaagtggtacacctgctaaagtaatgaaagataaaaaatcattaactggacaatatcttagtggcaaaaaacgtattgatgtacccgaacatagacgagaagtaactaataagaaaattagcataaaaggtgctagaagcaataatcttaaaaacgtcgatgttgaatttcctttatcagtaatgactgttgttactggagtgtctggttctggtaaaagttcattagttaatgaaattttatataaatcacttgcccaaaaaattaataaatctaaaataaaacctggagattttgacacaattgatggtattgatcacctcgataagattattgatattgatcaatctccaattggtagaactccacgttcaaatccagccacttatacaggcgttttcgatgatattagagatgtctttgctcaaacgaatgaagctaaaatacgtggttatcaaaaaggtagatttagtttcaatgttaaaggcggacgttgtgaagcttgtaaaggtgacggtatcattaaaatagaaatgcattttttaccagacgtttatgtaccatgtgaagtgtgtgatggtaaacgttataatcgagaaaccttggaagtaacttataaaggtaaaaatattgccgatgtattagaaatgactgttgaagaagcaacacatttcttcgaaaatattccaaaaattaatcgaaagcttcaaacacttgttgatgtcggcttaggttatattactttaggacaacaggcgacaactctttcaggtggtgaagctcaacgtgtaaaattagcctctgaattgcataagcgttccacaggacgttctatttatatccttgatgaacctacaacggggctgcacgttgatgatattagccgtttgttaaaagttttaaatcgattagtagaaaacggtgatacagttgtgattattgaacacaacttagatgtaattaaaactgcagatcacattattgatcttggacctgaaggtggcgaaggcgggggtactatagttggtactggtactccggaagaaattgctgaaaataatgactcttatactggaacatatttaaaacctgttttagaaagagacagtatagaataa

SEQ ID NO: 1556 - DNA, 933 bp, Staphylococcus capitis
atgttaacaacaaaaagactggttaatacacttaatctagatttaatcgctggggaaaaaggcttagatagaccaataaaaaatacggatatatcacgtcctggtctagaaatggcaggctatttctctcactatgcttcagatagaattcaattgttaggaactactgaactatctttctataatctacttcctgatgatgagaaagaaggaagaatgagaaaattatgtcgacctgaaactccagcaattattgtgacgcgaggattggagccccctgaagaattaatttctgcagcaaaagaactaaatacacctattattattgctaaagatgctacgacaagtttgatgagtcgtttgactacatttttagagcatgaattagctaaaaccacatctttacatggagtactcgtcgatgtttatggagtaggtgtattaattacaggtgattcaggtataggtaaaagtgagactgcattagaattagttaaacgtggtcacagacttgtcgctgatgataatgttgaaattaaagaaatcactaaagacgaattaataggcaaaccacctaaattgattgagcatttacttgagattcgaggactgggaattattaatgttatgactctatttggtgcagggtctattttgactgagaaacaaattcgtttaaatattaatttagagaattggaataaagataaattatatgatcgagttggacttaatgaggaaactttgaaaatcctcgatactgaaattactaaaaaaacaattcctgtaagacctggacgaaatgttgccgtaattattgaagttgcagcgatgaattatcgattaaatataatgggaattaatacagctgaagagtttagtgagcgtttaaatgaagaaatcgttcgcaatagtcataaaagtgaggagtag

SEQ ID NO: 1557 - DNA, 837 bp, Staphylococcus capitis
atgggtttaactctaggatacattgatccaattgcttttagtattggacctatacatgttcgttggtatggaattattatcgcatgtggtatattactgggttattttattgcacaagctgcactaaaaaatgttggcttacataaagatacattaatagatattatattctatagtgctatatttggttttattgtggcacgtttatacttcgtgattttccaatggccatattacatgcaaaatccaggtgaaataccgaagatatggcatggaggtatagcaatccacggtggtttaattggtggatttattacaggtgttatcgtatgtaggtctaaaaatctacacccgttacaaatcggtgatattgtagcgccaggtattatattagctcaaggtataggtagatggggtaattttatgaatcatgaagcccatggtggacctgtatcgaaggcgtttttagaacacttacatttaccggattttatcattagaaatatgtatatcgatggtcagtattatcatcctacatttttatatgaatctgcgtgggatgttctcggttttataattctaattaatttgaggaaacatctaaaaataggggaaacgttctttatttatcttatttggtattcaattggccgattcttcgttgaaggactgcgaactgatagtttaatgcttacaagtcatattagagttgcacaactcgtatcagtcattcttatcgttgttagcattattcttattgtatatagaagagttaagtatcaaccttcaacttttaaaaattctggaccacttcaatggccaggtaaaagggcgtag

SEQ ID NO: 1558 - DNA, 498 bp, Staphylococcus capitis
atggtgagacgattaaacaaacaaaaacgtttctccataaaccctctgtggcaagtttataaaatagtgagatttcctaaggtttttaaacaaactattattattgaaatttctcgttttataccaagcatgcgtctaaaacgctctatttatcgcaagtttttaaaaatggctataggtcagaatacagcatttgcatataaagttttacctgacttgttttatccagagttaatttctgttggcaacaatagtgttattggttataatacaacaatattaacgcatgaagtacttattgatgaatggcgacaaggtagagtcaccattgggcattatacattgattggtgcgaatgtaacgattttaccaggagttagaataggaaaccatgtaaaagtcggagctggtacggtcatcactaaagatatacctgattatagctttgtatttggtaatcctatgcatataaaagttgatagaggaggtgacaattaa

SEQ ID NO: 1559 - DNA, 1440 bp, Staphylococcus capitis
atggcacgtgaagacaataagataataccaatgattttcgacgaaactttttaccgcaaaatggctatacaaaaatggcaacaacaagattataataaagcagcaaattactatagcaaagtgctcgaattgtcacctgaagattatgatattcaattacattatgcacaatgtttaacgaaaataaatttaggtagaaaagcagagcaaatattttacgaaaatattgtaaatgattttcatgttgcagatagtttctatgagttaagtcaattaaatatagagttgaatgaaccaaacaaggcattcttgtttggtattaattatgtacttttaacagatgatcaggactttagagaagtactagaaaagacattcgaagtgacctatacaagtgaacataaaattgaattagaagcacaattatttgctacacaattattattccaatttttattttcacaaggacgactgaatgacgcgcgagcatatattctaagtcaagatgagcatattcaatcccatcgtgttatacgtaatctgcttgcgatgtgctatctttatttaagtgaatatgaaacagctaaagagatgtttgaagcgttattgagtgaagataattcagatgttcatgccttatgtcattatacacttttactttataacacaaatgaaatggagaaatataagaggtatcttaaaatattaaacaaagttgtacctatgaatgatgatgaaagttttaaactaggaattgtattaagttatttaaaacagtatcaagcatctcaaaatttactttatcctctatataaaaagggtaagtttttatccattcaaatgtataatgcattgagctttaatttttattacctcggaaataaagatgaaagtgtagaattatggaataaattactacagatatctaaagtagatgttggttatgcgccatgggtgcttgaggaaagtaaatctgtttttaaccaacgcattcttccactattattggatgacgatagtcattatagactatatggaatctttttattaaatcaactcaatggtaaagaaattcttatgacagaagagatttggtcaatcttagaatcaatgaatgattatgaaaaattatatctaacgtatctggtacaaggattaacattaaataaattagattttattcacagaggtatgttgaaattatatgaaatggattattttaaaaacgatacctcactatttattgactggattgatcaagctgaagcgattatctctgaaaaagttgatttagcagaggtagacagatatttagctgcatttgtatatatgcactataaatataccaatcacgctatgactaaaaaacaaattattgattcttttgaagtcacacgatataaattagataaaaccattgcttttattttgagcatataa

SEQ ID NO: 1560 - DNA, 942 bp, Staphylococcus capitis
atgactgaagtagattttgacgtagccattatcggcgcaggtcctgccggtatgacagcagcagtttatgcatctcgtgcaaatttaaaaacagttatgattgaacgtggtatgccaggtggtcaaatggccaacactgaagaggtagagaactttccaggatttgaaatgattacgggtccagatttatctacgaaaatgtttgaacacgcgaaaaaatttggagcagagtatcaatatggagatattaaatctgtagaagataaaggtgactacaaagtaattaacttaggtaataaagaaattacggctcatgcagtgattatctcaactggtgcagaatataaaaaaattggtgtgcctggggaacaagaacttggtggacgtggtgtaagttactgtgctgtgtgtgatggtgccttctttaaaaataaacgattatttgttattggtggtggcgactcagcagttgaagaaggaacattcttaactaaattcgctgataaagtaacaatcgttcatagaagagatgaattacgtgcgcagaatattttacaagaacgtgctttcaaaaatgaaaaagttgatttcatttggagtcatactttaaaaacaatcaacgaaaaagatggcaaagtaggatcagtaactttagaatctactaaagatggttcggaagaaacgtacgatgctgatggagttttcatttacattggaatgaaacctttaacagcaccatttactaatttaggaatcacaaatgaaacaggatatattgtcactaaagctgatatgagtacgaatgtccctggaatctttgcagctggtgatgttcgtgataaaggattacgtcaaattgtaactgcaacgggagacggtagtattgcagctcaaagtgcagcagattatatcacagagcttaaagataaattagaagcttaa

SEQ ID NO: 1561 - DNA, 912 bp, Staphylococcus capitis
gtgaaaaatagcgaaaatgaaattgttaaaagtgaattattagttgttacaggcatgtcaggagcgggtaaatcactagtgatacaaagtcttgaagatatggggttcttctgcgtagataatttaccaccagttttattacccaaatttgtagaactcatggaacaaggaaatccttctttacaaaaggtggcaattgccattgatttaagagggaaggagttatttaaatctttaattaaagaaattgatatcattaaaagtcgtaatgatgttatcgtagacgtcatgtttttagaggctaaaacagaaaaacttatttctcgttataaagaatcaagaagagcacatccattgaatgaaaatggacaacgttctcttattgaagcaattaatgaggagagagaacatctttctgaaattagaagcattgcaaactttgttatcgatacgacgctattaaaacctaaggaattaaagcatcggatcgctaaattttatttagatgataattttgaaacgtttacgattaatgttaccagttttggtttcaaacatgggattcaaatggatgctgatttagtattcgatgtaagatttttaccaaatccatactatgtagaagaactacgcccgctgactggtcttgatgatctggtctataactatgtaatgaaatggaaagaaactgagattttctttgataaattaacagacctcttaaagtatatgattccaggttataaaaaagaaggaaagtcacagcttgttattgctataggatgtacaggcggtcaacaccgatcagttgctttagcaaaacgtttaggcgaatatcttgatgaggtttttgattacaatgtctatgtgcatcacagagatgctcatattgaaagtggagagaaaaaatga

SEQ ID NO: 1562 - DNA, 996 bp, Staphylococcus capitis
atgaaacaaatgaaagtagtacttatcggaggaggaacaggcttatctgttctagcaagaggattaagagaattccctatagatattactgctattgttactgtcgctgataacggcggaagcacagggaagattagagatgttatggatatacctgctccaggtgatatacgtaatgttatcgcagcgcttagtgattcagaatcaacgttaactcaactttttcaataccgttttgatgaaaataaagtcgacggccactcactagggaatttggttattgcagggatgacaagtataactaatgatttcggtcatgcgataaaagaacttagtaaagttctcaatatcaaagggcaagttataccatcaacaaacacaagtgttcaattgaatgcggtcatggaagacggagaaattgttcgtggagaaaccaacatacctaaaacaaataaaaaaatagatcgcgtctttttagaacccggggatgttgaacctatggaagaagcggttgaggctctagaacatgcagatttaatcgttcttgggcctggttcgttatatacaagtgttatctctaatttatgtgttaaagggatttctgaagcattacttcgctctaatgcaccaaaactttatgtttctaacgtaatgactcaaccaggagaaacagataattacggtgttaaagaacatatagatgcaatttgccaacaagtcggtgaagattttatcgactttgtgatatgcagtaatgaaaattatagcaaagacgttttacgtaaatatgaagaaaaaaattcaaaaccagtagaagttcataaagaagagctaaaaaacaaaggtataagagttttaacagcttcaaatttaattgaaatttctgacgaacacttcgtacgccataatactaaaattttatcaggtatgatttatgagcttgcactagaattaacaagcacaattcagtttaaccctaatgataaacataaatag

SEQ ID NO: 1563 - DNA, 945 bp, Staphylococcus capitis
atgagctttgcatcagacatgaaaaatgaattaacacgtattgaagttgatgaagcaaatgctaaagcagagctcagtgcattaattcgtatgaatggcgcacttagtttatctaatcaacaatttgtaattaacgtacagactgaaaatgcaacgacagcacgacgaatatactctcttattaaacgaatttttaatgtagaagttgaaatattggttcgaaaaaagatgaaactaaaaaagaacaacatctatatttgtcgtacaaaaatgttagcgaaagaaatcttaaatgatcttggaatacttaaagagggcatctttacccatgaaattgatcctgacatgattaaagatgacgaaatgagacgaagttatttaagaggagcctttcttgctggtggctcagtaaataatcctgaaacatcttcttatcatctcgaaatcttctcgcaatatgaaagtcactcagaaggtttgactaaattaatgaatagttatgaattaaatgcaaagcatcttgaacgtaaaaaaggtagtattgcttatctaaaagaggctgaaaaaatttcggattttcttagtttaataggtggttatcaagcgttactgaaatttgaagatgtgcgcattgttagagatatgaggaattctgtgaatcggttagtaaactgtgaaacagcgaatctaaataaaacagtgagcgcagccatgagacaagttgagagcatacaacttattgatcaagaaattggtttggataacttaccagaccgattgagagaggtagctaaattacgagttgaacatcaagagatatcattgaaagaattaggtgaaatgatttcaactgggccaatatctaagtcaggtatgaaccatcgactaagaaaacttaatgaacttgcagataaaatacgtaatggagaacaaatcgaaatgtaa

SEQ ID NO: 1564 - DNA, 588 bp, Staphylococcus capitis
atgaatttaattcctacagttattgaaacaacaaatcgtggtgaacgcgcatatgatatttattcccgtttattaaaagaccgtattatcatgttaggttctcaaattgatgataatgtagctaattcaattgtatctcaattattattcttacaagctcaagactctgaaaaagacatctacttatatatcaattcaccaggtggtagtgttacagcaggttttgctatttacgatacaattcaacatattaaaccagatgttcaaacaatttgtattggtatggcagcatctatgggatcattcttattagcagcaggagctaaaggtaaacgttttgcattaccaaatgctgaagttatgattcaccaacctttaggtggtgcacaaggtcaagcgactgaaatcgaaattgctgcaaaccatatcttaaaaactcgtgaaaaattaaatcgtattttagctgagcgtacaggtcaatcaattgagaaaattcaacaagatactgatcgtgataacttcttaactgctgaagaagcaaaagaatatggtttaatcgatgaagtcatggagccagaaagtaaataa

SEQ ID NO: 1565 - DNA, 183 bp, Staphylococcus capitis
atgaaagacaatcaattaacttatattttgttaattattgctagtattttattaatattgaatggaatatttgcatttgatcacacaattgcaatgatattaatgtcattactctttacaattgtaggtttaacattattcattgtagtttttcgattacttataaaagacaagaagcactaa

SEQ ID NO: 1566 - DNA, 900 bp, Staphylococcus capitis
atgaaacaatacttaattactggtggaactggaatggtaggttcacatttagtaaaggaaattaaaaaaacggatgcacatattactattttaacccgacaagataaaacatctaatgaatctaaaattacttacgtcaattggtcaaaagaaggctggcaaaatgacgttcctgatatagatgtagttatcaatttagcaggtgcaacgctcaataaacgctggactaaatcacataaacaagtcatgatggttagtcgtattcagtctacacaagctttatatgagttatttgaaagccgtactcaaaaaccaaaagttttatttaacgcgagtgctatgggatattatcctcctgatttatattatagttatacagaattatatcaaactttaccttttgattttctatcagatattgtttaccaatgggaacgtttcgttaataaatttaaagatttcggaacacgagtagtcttaggaagatttggacttattctctctgatactggtggagcgttacaaactatggaattaccgtaccgtttttatgtaggtggtaaattaggttcaggtcaacaatggtattcttggattcacatagatgatttaatcagaggtattatatttactatagataataaagatgcacacggtcctttcaatttaacagcacccatccctgaaagacaaaacttatttggatatactttagctagagcaatgcataaacctcatgaaacttgggcgccaaaattagcaatgcgtttagttcttggagaaatgtcaacagttgttttagacactcaaaaggttttaccaaataagttacacgcacttggctttgagtttaagtttaacaatttaaagaatgcgttagatgatttagttaaagcctaa

SEQ ID NO: 1567 - DNA, 174 bp, Staphylococcus capitis
atgtatgactttaataatgagaattcacaaaataaaaaatctcacaataatttgaaatacatgatgattaaaaatgataattatgaagacagtaagtcaaatcatattgctggatttataatcacattattaattatagccctcattgtaataattaaatggttacttgggtaa

SEQ ID NO: 1568 - DNA, 780 bp, Staphylococcus capitis
atgagtggtttggcaaaaataattagtaccatcatagtattacttttattaattggcttagcatttggaatattctcttttgtagacagttctaaaaaagctaatgagcgtcttaacagtgataaaactgaacaaaatgataagaagaaagatgacaagaaagataaagatcaagataaagacaaagataaaaataaggataatgacaaagacaaatctaaagatactaaagtaaacaaaacacaacaagctccgcaacaaacacaacagactcaacaaacgcgtcaaacacaacaaacacaagagacacaacaaacaaagcagtcaacacaacaagctccaagcacatctgagaagacacaacagacaccaactcaacaaagaaacactcaagaaaagcaaaaaactaaacaacaaaaggcagaaccacgctcatcacaacaaactcaagaagcacaaacagatgagaagacaactgagcagtctaagtcagaaagtaaaaatgataataaaactcaagaacaacctagttcagaagagaaatcatcatctcaacagcctagttcacaacaatcaagttcacaacaaccaagttctcaacaggataatagaaaacaacaatcgcaatcaaatagtaatactagcaatagtagtaatcaatctgttcaaaaaaacacgagtcaaactcaacaatctagtaatcaaagcagtagcactcaggaacgttcaagtaatcaaagctcatctaataatagctcacaaaattcaaaagaagattaa

SEQ ID NO: 1569 - DNA, 255 bp, Staphylococcus capitis
atgacaaatgagaataataaagattcaaacgaaaaagtagaagtgatagacccaagcaatatgcgctataaagatgatgaatattttaaatcaaatcaacataccaatgaagattatcaatttgaggatgaaagaataattaagaaaacatattcttatggatgtacgcatacaggttgtggatgtactatagggtgtttttcaatcatgttcatctcctttttattatcttggttagtatattggttattctaa

SEQ ID NO: 1570 - DNA, 1014 bp, Staphylococcus capitis
gtgaaagacttaataaaagttcagcaaaagctcatacctgaccttgttgacaagatgtatcgacgtttttcgattttaactactatctctcaaaaccaaccagtgggtagaagaagtttaagtgaacacatggacatgactgaaagggtcttaagatctgaaacagacatgttgaaaaagcaagaattaattaaagttaaatcaaccggtatggaaatcactcatgaaggtactgaagtgttatcgcaactcagtgattacttcaatgtttatagtgatgaccacagaatggctagagcgattaaagaaaagttcaacattaaagatgttcatgtcattccaggtgattcagattcgaatcaaacagttaaaagagaaataggaagacaggctggtcagttactagaaagtattttatatgaagatgcaattgtttctgtaactggaggatccacgatggcatacgtaagtgaatctattcatttactaccatttaatgttttctttgttccagctcgaggtggactaggtgaaaatatggtctaccaagcaaatactatttcttctagtatggctcaacaagctggtggatactacacaacattgtatgtaccagataatgtgagtgaatctacatatgacactttgatgttagagccatcagtgattcatacgttagataaaattaaacaagcaaatgttacaattcacggtattggtgatgcgctgaagatggcgcatcgacgtcaatcaccaaaagaagtgattgataaacttcaacatcatcaagccgttggagaagcttttggatattattttgatgctcaaggcaatgtggttcataaagttaaaacgattgggctacaattagaagaccttgagagtaaagattttatctttgctgtagcaggtggacaatctaaaggagaagcaattaaagcttatctctctattgctccagacaatactgtattaatcacagacgaaactgcagcgaaagttattttacaatag

SEQ ID NO: 1571 - DNA, 1011 bp, Staphylococcus capitis
atggcaattaaagtagcaattaatggttttggtagaattggtcgtttagcattcagaagaatccaagatgtagaaggtcttgaagtagtagcagttaacgacttaacagatgacgaaatgttagctcacttattaaaatacgacactatgcaaggtcgcttcactggagaagttgaagttatcgatggtggattccgtgttaacggtaaagaaattaaatcattcgatgaaccagatgcaagcaaattaccttggggagacctagacatcgacgtagtattagaatgtactggtttctacactgataaagataaagcacaagctcacatcgatgcaggtgctaaaaaagtattaatctctgctccagctactggtgatttaaaaacaatcgtattcaacactaaccatgatgaattagatggttctgaaacagttgtatcaggtgcttcatgtactactaactcattagcaccagttgcaaaagttttaaatgatgagtttggtttagtagaaggtttaatgactactatccatgcttatactggtgaccaaaatactcaagatgctcctcacagaaaaggcgacaaacgtcgtgctcgtgcagcagcagaaaacattatccctaactctacaggtgctgctaaagcaatcggtaaagttattccagaaatcgacggtaaattagacggtggagctcaacgtgttccagttactacaggttcattaactgaattaactgtagtattagataaacaagatgtaacagctgatcaagtaaatgaagcaatgaaacaagcttctgacgaatcatttggttacactgaagatgaaatcgtatcttctgacgttgtaggtatgacttacggttcattattcgatgctactcaaactcgtgtaatgactgttggtgaccgccaattagttaaagttgcagcttggtacgacaatgaaatgtcttatacttctcaattagttcgtacattagctcacttagctgaactttctaaataa

SEQ ID NO: 1572 - DNA, 1191 bp, Staphylococcus capitis
atggctaaaaaaatcgtttcagatttagatttaaaaggtaaagtagttctcgaacgtgcagactttaatgttccgttgaaagatggagaaatcactaatgataaccgcattgttcaagcgttgccaacgattaaatacattattgaacaaggtggtaaattagtattattctctcacttaggtaaagtgaaagaagaaagtgataaagaaggtttatctttaaaaccagtagcagatgatttatctaaaaaattaggtaaggaagttactttcgtacctgaaacacgtggagaaaaacttgaaactgctatcaaaaatttaaatgaaggcgatgtattattagttgagaatactcgttttgaagatattgatggtaagaaagaatctaaaaatgatcctgaattaggcaaatattgggcatcattaggtgatgtattcgttaacgatgcatttggtacagctcaccgtgaacacgcatctaacgtaggtatttctactcatttagaaacagcagctggttatttaatggaaaaagaaattaaatttattggtggagttgttaacgacccacacaaaccagttgtagctatcctaggtggtgccaaagtttcagataaaattaatgtcatcaaaaacttagttaatatcgctgataaaattttaattggtggcggtatggcttatacattcatgaaagcgcaaggtaaagaaattggtctttcgttattagaagaagacaaaattgacttcgctaaagatttattagaaaacaatggcgatcaaattgtcttaccagtagattgtaaggtagctaaagaattctctaatgacgcgaaaatcactgaagtttcaattgatgatatcccagctgatcaagaagcaatggatattggtcctaaaactgttgaactatttaataaagaattacaaggtgcacatacagtagtatggaatggacctatgggtgtatttgaatttagtaactttgcaaaaggtacgatcggtgtatgtgaatcaatcgctaacttaaaagatgctactactattatcggtgggggtgattctgcagcagcagctatctcactaggtttcgaagatgactttactcatatttctactggtggcggtgcatcattagaatatttagaaggaaaagaattaccaggtattaaagcaattaacgataaataa

SEQ ID NO: 1573 - DNA, 762 bp, Staphylococcus capitis
atgagaacaccaattatagccggaaactggaaaatgaataaaacagttcaagaagctaaagatttcataaatgaattaccaacattacctgatcctaaagaagtagaatcagtaatttgtgcaccaacaatccaattagatgctttagtaactgctgttaaagaaggtaaagcacaaggattaaaaatcggtgctcaaaacgcatacttcgaagacagtggcgcatacactggtgaaacatcacctgtagctttagctgacttaggtgttaaatatgtcgtgattggtcactcagaacgtcgtgattatttccacgaaactgatgaagaagtaaataaaaaggctcacgcaatctttaatcatggtatgacaccaattatttgtgttggtgaatcagatgaagaacgtgaagcaggtaaagcaaatgaagtagtaggtaatcaagttaaaaaagctgttgaaggcttatctgaagatcaacttaaagaagtagttattgcttatgaaccaatttgggcaatcggcactggtaaatcttctacttcagaagatgctaatgaaatgtgcgcgcacgttcgtaaaacattagctgacttatcaagccaagatgttgctgaagcaacacgtattcaatatggtggtagtgttaaatcaaataatattaaagaatatatggctcaatcagatattgatggtgcattagtaggtggcgcatcattaaaagttgaagatttcgtacaattattggaaggtgcaaaataa

SEQ ID NO: 1574 - DNA, 1518 bp, Staphylococcus capitis
atggctaaaaaaccaactgccttaatcattttagatggttttgcaaatcgtgaaagtgaacatggtaacgctgtaaaattagcaaacaagcctaattttgatcgctattatgataaatacccaactacacaaattgaagcgagtggtttggatgtaggtcttccagaaggacaaatgggtaactcggaagtaggtcacatgaatattggtgcaggtcgcattgtttatcaaagtttaactcgtattaataaatctatcgaagatggggatttctttgaaaacgatgtattaaataacgcagttaaacatgtaaaagataataattcagcactacatgtatttggtctattatctgatggcggtgttcacagtcactataaacatttatttgcaatcttagaattagctaaaaaacaaggtgtagataaagtttatgttcatgctttcttagatggacgtgacgtagatcaaaaatctgcactaaaatatattgaagaaactgaagctaaattcaaagaattaggcgttggccaattcgcttcagtatcaggacgttattatgcgatggaccgcgataaacgttgggatcgtgaacaaaaagcttataatgctatccgtaacttcgaaggtccgacttatgcttcagccaaagaaggtgtggaagctaattacaacaatgatgttactgacgaattcgttgaaccatttatcattgataatcaaaataatggtgtcaatgatggtgacgcagttgtgttctataacttccgtcctgatagagcagctcaactttcagaaattttcactaatcaagcatttgatggtttcgaagttgaacaagttaaagatttattctatgcaacattcactaaatataacgatgatgtagacgctgaaatcgtttttgaaaaagttgatttacacaatacaatcggggaagttgctcaaaataataacttaaaacaactacgtattgctgaaactgaaaagtatccacatgtaacttactttatgagcggtggtcgtaacgatgaattcgaaggagagcgtcgtagattaatcgattctcctaaagttgcgacatatgatttaaaaccagaaatgagtgcttatgaagttaaagatgctcttttagaggaattagataaaggcgatttagatttaattctattaaactttgctaatcctgacatggtaggacatagtggtatgcttgaacctacaattaaggcaattgaagctgtagatgaatgtctaggcgaagttgttgataagatccttgaaatggacggtcatgctatcatcactgctgaccatggtaactctgatcaagtgttaacagatgatgatgaaccaatgactacgcacactacaaatccagttccagtaattgtaactaaagaaggcgtaactttacgtgaaacaggacgtttaggagatttagctcctacactattagacttgttaaatgtagaacaaccttctgatatgactggtgaatcattaattaatcactaa

SEQ ID NO: 1575 - DNA, 1305 bp, Staphylococcus capitis
atgccaattattacagatgtttacgctcgcgaagtcttagactcacgtggtaatccaacagttgaagttgaagtacttactgaaagtggtgctttcggtcgtgcattagtaccatcaggtgcttctactggtgaacacgaagcagttgaattacgtgatggagacaaatcacgttatttaggaaaaggtgtgactaaagcagtagaaaacgttaatgaaatcatcgcaccagaaattgttgaaggtgaattttcagtattagatcaagtatctatcgacaaaatgatgattcaattagacggtacaaataataaaggtaaattaggcgctaatgctattttaggtgtttcaatcgcagtagcacgtgcagcagctgacttattaggtcaacctttatataaatatttaggtggattcaatggtaaacaattaccagttccaatgatgaacatcgttaacggtggttcacactctgatgcaccaatcgctttccaagagtttatgattttaccagttggtgctgaatcatttaaagaatcattacgttggggtgctgaaatcttccacaacttaaaatctatccttagtgaacgcggtttagaaactgcagttggtgacgaaggtggattcgctcctaaatttgaaggtactgaagatgctgttgaaacaatcatcaaagctatcgaaaaagctggttataaaccaggtgaagatgtattcttaggatttgactgtgcttcttcagaattctatgaaaatggtgtatatgattacactaaattcgaaggtgaacacggtgctaaacgtagcgcagcagaacaagttgactacttagaagaattaattggtaaatatccaatcatcactatcgaagatggtatggatgaaaacgattgggaaggttggaagcaattaactgatcgtatcggtgataaagtacaattagtaggtgacgatttattcgttacaaatacagaaatcttatcaagaggtattgaccaaggtattggtaactctatcttaattaaagttaaccaaatcggtactttaactgaaacatttgaagcaattgaaatggctcaaaaagctggttacacagctgtagtttcacaccgttcaggtgaaactgaagatactactattgctgacattgcagttgctactaacgcaggtcaaattaaaactggttcattatcaagaactgaccgtattgctaagtataatcaattattacgtattgaagatgaattatacgaaacagctaaatttgatggaattaaatctttctacaatttagacaaataa

SEQ ID NO: 1576 - DNA, 468 bp, Staphylococcus capitis
atggaagatataacagattcaaatgttagagaaaaaagatctggccgcttaatagcaatgagttctttattattttgtattttattaatcattcatcattttgtagttttagatgtaacaaccgctaaatcattgctatctttagctggtcaaaagacttctgacactgcagtacataatattctaaatagtgatagatatacaggcgtaatgtacattcttgcatacttagcaggagtcgtggcactttggaatcgccatccatatttatggtggtttatgtttgctgtatatgtttctaatgcattattcacacttgttaatttatacatgtttgttcaagccattttggatgttaaaaatgttgtcgcagttttacctatactcattgttgtaattggctctattattttagcgatttatatgttagttgtttcgatagctagaaaaagtacttttaatagatag

SEQ ID NO: 1577 - DNA, 234 bp, Staphylococcus capitis
atgcatacattaatcatcgttttattaattatagattgtattgcattagtgactgttgtattactccaagaaggtaaaagtaatggactttcaggtgctattagtggtggcgcggaacagttatttggtaaacaaaaacaacgtggcgtcgatttattcttgcatagattaacaattattttagctattattttcttcgtacttatgttctgtatcagttacttaggtatgtaa

SEQ ID NO: 1578 - DNA, 741 bp, Staphylococcus capitis
atgcaaattaaactaccaagaccattcttttttgaagaaggaaaacgagctgtgttattattacacggtttcactggcaactcagctgatgtgagacaattaggtcgttatcttcagaaaaagggttatacatcttatgcacctcaatatgaagggcatgcagcaccgccggaggaaattttaaaatctagcccatatgtatggtttaaggatgttttagatggttatgactacctggttgaacaaggctatgatgaaatagcagtagcaggtttatcactaggtggggtcttcgcattgaaattaagcttaaatcgtgatgtgaagggtattataacgatgtgtgctcctatggatggcaagacggaagacactatttatgatggattccttgattatgctcgtaattttaaaaaatatgaaggcaaagatcaggaaacgattgataaagaaatgaaagacttccatcctactgagacgcttaaagaacttagtgaaactttacttcgtggtaaagaacaagtagacgaggttattgagcctattcttgttatacaagcagaacaagataaaatgattgatcctcaatcagcgaattatatatatgaacatgttgattctgatgaaaaggatatcaaatggtatcatgaatcaggacatgtaattacaattgataaagaaaaagaacaagtttttgaagatgtatatcaatttttagaatcattagattggacagaataa

SEQ ID NO: 1579 - DNA, 2379 bp, Staphylococcus capitis
atgaatttaaagcaatccatcgaagaaataattaaacaacctgactatgaacccatgtcagtgtcagattttcaagatgcgttaggtttaaatagtgccgactcatttagagatttaattaaggtgctcgttgaactagaacaaacgggtttaatcgaacgaactaagacagatagatatcaaaggaaagaatcaagtaagtccaattctaaattaatcaaaggaactttaagtcagaataaaaaaggattcgcttttcttcgaccagaagatgatgaaatggaagatgtcttcattcctccaactaaaattaatcgagcgctagatggcgatacagtaattgtagaacttcaaaaatctagaggagaacataaaggtaaagttgaaggtgaagttaaatcaattgagaaacattctgtcactcaagtggtaggaacatatagtgaagcaaaacatttcggttttgttattccagatgataaacgaattatgcaagatatcttcattcctaaaggtcaaagtttaggtgctgtagatggacataaagtactcgttcagattactaaatatgctgatggtacagacaacccagaaggtcatatttcagcaatactaggtcataaaaatgatccaggtgtagatattttatctatcatttaccaacatgggatagaaattgagtttccagataacgtgcttaaagaagcggaagatgttcctgaagaaattgaaccatctgaaattgaaggtcgtcgtgatttaagaagtgatttaacaataactatagatggtgcagatgctaaagacttggatgatgccatagcagttaagaaattaaagaatggtaatactgaattgactgtaagtatcgcagatgtaagttactatgtgaaggaagattcagctttagataaggaagcatatgatagagcgacaagcatttatttagtagaccgagtgattccaatgattcctcatcgtttaagtaatggtatatgttcattgaatccggaagtcgaccgcttaacgttaagttgtcgtatggaaattaatgcacgtggcgaagtcgttaatcatgaaatatttgatagcatgattcattctaattatcgtatgacttatgatgctgtaaataaaattattacagatcaagatcctcaagttcgtgcacaatataaagatttgacgccgatgcttgatttagcgcaagatttatctaatcgtttaatccaaatgcgacgtcgtcgtggtgaaattgactttgatattaatgaagctaaagtgctagtaaatgaagaaggtattcctacagatgttcaaatgcgtgaacgtggtgaaggtgaacgtttaattgaatcattcatgctagctgctaatgaaacagtggcagagcatttcaataaaatggaagtaccatttatctatcgagtacatgagcaacctaagtcagatcgcttaagacaattcttcgactttattactaatttcggtattatgattaaaggtactggtgaagatattcatcctacaactttacaaaacattcaagaagaagttgaaggtcgaccagagcaaatggttatttcgacaatgatgttgcgttcaatgcaacaagcgcattatgacgatgtaaaccttggacatttcggcttatctgccgagtattatacgcactttacatctccaattcgtcgttatcctgatttaacggtgcatagattaattcgtaaatatttaatagagaactctatggataaaaaggaattacgacattgggaagatacgttgccagaacttgctgaacacacgtctcaacgcgagcgtcgtgctatagaggcagaacgtgatacagatgaattgaagaaagctgaatatatgattcaacatattggcgatgaatttgaaggtatcattagttcagttgctaactttggtatgtttattgaattgcctaatacaattgaaggtatggttcatattgctaatatgactgatgattactataattttgatgaacgccaaatggctcttataggtgaacgccaagcgaaggtgttccgcattggtgatgaagtgaaagtcaaagtcactcatgttaatgtagacgaacgcatgattgattttcaaattgtgggtatgcctttacctaaaaatgataaatcccaacgtccagcacgtggtaaaacaattcaagcaaaaacacgtggtaagtcattagataagtctaaagatgacaataatggcaaaggcaataaaaagaaacgcaagcaacgtaaaggtaagaatgcacgtaaaaaagataaacaaggtaaaacaaatcataaaccattctataaagataaaagcgtgaaaaagaaatcacgccgtaagaaaaaatag

SEQ ID NO: 1580 - DNA, 471 bp, Staphylococcus capitis
atggctaagaaaaaaactaaatcaccaggtactttagcggagaatcgtaaagcaagacatgattataacattgaagatacggttgaagcgggtattgcactgcaaggtaccgaaatcaagtctatacgacgtggaagtgcaaacttgaaagatagttatgctcaagttaaacgtggtgaaatgtatttaaataatatgcatattgctccatatgaagaaggtaatagatttaatcatgatcctttacgttctcgtaaattattattgcataagcgtgaaattattaaattaggagaacgtacacgagaaattggctattctctaatcccattaaaactttatttaaagcatggacaatgtaaagttttattaggcgttgcacgaggtaagaaaattcacgataaacgtcaagctttaaaagataaagcgatgaaacgtgatgtcgatcgtgcgataaaagcccgttattaa

SEQ ID NO: 1581 - DNA, 927 bp, Staphylococcus capitis
atggacgagttggaaggtataggacaaattaataaattaccttttgataggttagctcaggaatatttagattggtattctgcacgtcgaaaggcttcaagtgttaaatccttaaagacacatttaaataatcatctaatacctcattttaattcaattgatgtcttcaatcttacgacacaagatgttatgaaatttcaaaacaagaaattgaaagaaggtcattcaggggaatatcttaaaaaaatgcatgtgtttttagtatccttacttaaccacgctatgaagtaccatgatttaacatcaaacgttgcctcattagttggtaactttgaaattgaatcaaacaaacgccttaattattggacgctagatcaatttaaccaattctatgaagtgctacctactattgaacaaaaattatttttcaaattattgttttacagtggggctagaaaaggcgaaatacgagcattgacgtggcaagatgtaaactttgatgataactatatccacataaataaaacggactatcacggcgatgtgacagtccctaaaacaaaagcagccatacgtgatatttacttacccactcacatgatggacgacttaaaagaatatttaaattggtatcaaaataataacatatataaaagtgaatatgtgctattcggtacatttttcaaagcatttagcgagtcaaaaatagatcgttggtttactaacgcctataagttacttccgaatgactttcctaaaattgtaattcatgaaatacgccatagccatgcgtcacttttaattaatcacggtgctagtttaatggttatcgctcaaaggttaggccattcttcaatagaagaagtaagcacacgttatggacatttatatcctagtacacaaaaagaaatagttaaatatttatga

SEQ ID NO: 1582 - DNA, 783 bp, Staphylococcus capitis
atgattaaattcaacttaaaaaaagtgatgaaacaaaaaaaccttaatataagccagttaaatgaaatgacaggcatatcaaggaactcattaagccttttaatcaatggtaaaagtcagggagtacaatttgaaacaattgaaaaaataactagagcattaaatattggaatcgaagaattgtttgaaaaaagctttaatgacataaaaattgtatttggaaatctatataatataactaaaaatcagatgcatacatatcaagaaggaagagtaaatgctgaatcgaaggaatttattccttttggagaagagaaaaaagtagaatccagctacacttttgtaggtattggcttagaatacattattgatgatactgaactagaagaaactataccattcaatttttctttggagtttaacactgataacgttttgcatttaaatattctgttcgaaaatagtaactttaaaaacgattttatttacttgttagataatgtaaagaattttgaaaatttagtactgacatacattactttaaaagtactagaaaacttaaaacaaagtgtattaaaaaaaataaaaaataatttcaaaattgacaataaaaaaatcaatgttacatatgacttgagcgaaaattctattttattaccattgaacgatgctttaactgttgattacgaagttctaactcatgaaataaaaaaaacaaatgataaatctctatatactgttacttatgataatgggatatattttgaatacaaaagcaggtga

SEQ ID NO: 1583 - DNA, 219 bp, Staphylococcus capitis
atggcaagtgtaaattatccgatgttatacatcgcaagaaaagaaaagggagatactcaaaagaaagtggctcagaaattagggataagtccacagcggtaccagttgaaagaagggggcaaagcgtatttcacattaccagaggctaaaattttgagtgaaatgtatggaatgtcaattgatgatttgtttagtaagaacattaaagtagattcgtag

SEQ ID NO: 1584 - DNA, 201 bp, Staphylococcus capitis
atgaaacaacaagtagtaattacaaaaagcgtcgttggttggtttaatgtgaaggacgttgaagggaatttacttttaaatattgcacctgatgcatttaagaagcactttcctgaagttagtcctaacatctcaattgcatgtatgcagttagatattaatagaatcgtcgaacttaaagataagaaagtgagtgtatag

SEQ ID NO: 1585 - DNA, 204 bp, Staphylococcus capitis
atggaacaagaacaaaaagatgttattcaagaaatttataacacgttggaatctgtttctaaagatgaaagaacagaatataaccacactattaaagatggtgaaaatgaatggactgaaacagttgatcgtgaggaacacttgcaagcaataatcgagtggacattacaacaaattgaaaataattttgatggagagaaataa

SEQ ID NO: 1586 - DNA, 339 bp, Staphylococcus capitis
atgaatattgatattttcgaagcttatgcagatgcaatggaatcgagttgcgaacttcatagattgatcggtgaatttgatagaatcgcagagttaacaggctatttaatcgaaaaagctaaagcgtatagagaagaaggagatattaaaggtgctgaagctattgaacaaattgtattagatgatctagtgagtgactttaatattgcgcacgataagtttgatgaagagagaaaaaactggaaacagaaagtgaagaaattaaaaaatgtatgtactttttacggttttttagtaccttcattaaaaaatgaaaaagtaataaaactctacaaatag

SEQ ID NO: 1587 - DNA, 207 bp, Staphylococcus capitis
atgactgctaaattagatatgaataaacaaaatatcatgcatgctatcaactggattattaaaaatgaagaagaaattatatttgaaagtcaaagtcagttaagtttcttcagtcgtgaagatttggagaaagtagactactgcaaacgcactttagaaagtttaattgaagctaaagcaatttataataagcaaaaaattagttaa

SEQ ID NO: 1588 - DNA, 261 bp, Staphylococcus capitis
atgaaactgtttaaaaagaaatatgatcataaaaaagtgaaccgtgtgaaagatatagtcttatatacatcatatacgtttgaagctaaaacatacaataaagcaattgaactattaaagaacaataacaaaaaagaagcaattgaacttatgtatgaaagattagtagaggctcaaaagaatgagtatgaaatgagattacaaatagaaaaagcgtcatctgatatgaatagtttggcgactaaatcagataacgcataa

SEQ ID NO: 1589 - DNA, 873 bp, Staphylococcus capitis
ttgaacaaaattcaattagataatgacactcaagtaagtgttgtttggtataaaaatgtaagttcgaaatcatttaaaaatttctatacgcctaaatggagtgaattagtaaatcttttatctgatccagtagtaagctcagacaaatattttaggggttcagtagtttatggtgatatttctaatggtgtagatgatgaaggtgtagagtatgagaaatacagaaatgataacaatgttttatatagagatgtacttgtacttgattatgatgatgaagatgatttaagcatgctacacaagtcaattaaaagtgaattagaaggctttgcatggttttggcatacaacattcagacacacaaatgaaagtcctagaatacgcttgtatatgccactaagcgagcgtataaatgcaaacgaataccgtgcatatgtaagaacgatagcacaaaaaattgcatgtaaaattgattctgggagttatgagccatcacgagcaatggcactaccagtaataaagacagaaaagcatccttttgagtttcaatataacgatgctgcaatattagacaagtcaacacttaaagagtgggctaaattatttaatattactattcaaacgacatcaaagcctaaatttgaaaaaagagattcgagccactggggtagaattgcttacggtgtagaagatggtgggcgtaatacagctttaacaagtatcttaggtcatttatttagtaaaagagtagatgaacacttaatatatgcttttgcgttagcatggaatgaattatgtaatccaccaatgaaaagaagtagagttgaatcaactttcaaatcagttagaaaaatacacaataataacaactaa

SEQ ID NO: 1590 - DNA, 1494 bp, Staphylococcus capitis
atggcaaatattcaacctaataaagaaattattcaagatataaatagcagtcagaatatagaaaatattgaagaacgattgaaaagattaggtaatgaagaacgtcaaaacttactagcactctgggaagaagatggtaaaaacggtaagaagcctagtatgatcggaactaatagatgtgcatatatacttatggaagaaattagctttgttttatttgatgaagaagaaaatactaaattagctatgtaccaagagaatagaggcatttacactcaaaaagcctcaatgattaaacgtgttatctcttatttagaacctaagtttaatagtaataaagcttatgatgtgatatatcacattaaaaacagagcaataatcaaagataaaactaactcacctaatttaattccagtaaacaatggtatttacaacaaaaagacaaagcagcttgaaccatttacaccagaatatgtatttaccgcaaaaatagatactaattatattgatagtcctacaaaaccagtctttgaaaattgggatgtagataattggtttgatgaattagcatgtaatgataaacaagtatcacatttactatggcaagttattaatgatagcttaaatggtaattacacaagaaaacaggctatttttatggttggtgatggtaacaatggtaagggaacttttcaagaattactaacttatttaattggaaaaaataatatagctaaattaaaagtgaatgagttcgatcaaagatttaaattaggaacgttggaaggtaaaactgccgttattggtgatgatgtgccagtaggtgtatatattgatgatggttcaaactttaaaagtgtagtaactggtgattatgtatcagttgaattaaagaaccagcaaccttatacagcacaatttagatgtagtgtcattcaatcatcaaacggtatgccacgttttaaagataaaacagatgcaattttcaaaagaattgttattgtaccttttgatgctgattttaaaggatcaaatgagaacagaaagattaaggatgaatatattaaaaataaacaggtacttgaatatatactttatcatgcaattaacatggactttgaaaaatttgatgttccagatgtatctaagcaaagattagatgtttataaacaagaaactaatccagtatatgaatttaaaattaatatttttgacaattggaatcttagaaaaatacccaaatatattgtttatggtatgtacaaagaattttgtaaagaaaatggatataatttcttatctaaaattaaatttcataaagagtttaaagattatttaagcgaagattggaaaacagatgcagttgatagatttaactgggaggatttaattgatgaaataggtgatttagataattataaatcagaaataaaattccctgattctcacaaaccatatcgagcgtatgaaaatcgaagtttgaaagcaatttaa

SEQ ID NO: 1591 - DNA, 345 bp, Staphylococcus capitis
ttgcttgatctaaaaaataaaataactaaatatatatctactaataatggtacatcatttgtcgaaatagaaaatatatttgaagaaaacaattatgagtacaatggcaatgttgcattttgtaatagagaaaacacaaatataattttttggactggttggaagcaagaagctataaatataatggtagaactattgaatgataaaaagatagtaatggaaccgtgcgaactattgatttacttagttgatggtaaaagattgaaattaccaatattaaataaaccatctgatgcaaaagaactatgttggttaccagtatcgtttaaaattaagggagtgtaa

SEQ ID NO: 1592 - DNA, 645 bp, Staphylococcus capitis
atgaacgttgaaattatagcaaatgaatttgaaactagagcagcaacattattaagatattttactggactacatgaaagtagtcataaaatgcctattgcatttaagatatacaatgatccttttaatattgtgtatctaataagtaaaggtaagatgtatgctcatgtattgataaaagattgtgaagtgagaaaaacttttgaaatcgcctcagtaaagcatactgagaagctcatagaaagcattgagggctattatactggttatgatttacatgatggcacacacgacactataagcgatatgatggatagtttcatgtttgataatgattactttatgtatggactagaaacttttgcagaaagcaataacagtgacatgtttgactatatgagtagagatttcaatatagatgaacttgaaggcgttcaatctagtaatgcagatgttatagataatatggaggcattgtatcagttagctactggaattaatgaaccagcaccagaactagttgagggtttgaaaatcattactgagtttatccagaatgagaaggcgaatgaagatgatagtaaagcattgattaagcgactgaatgaactgaaacagtcttattatgatggagtgaaagcgtaa

SEQ ID NO: 1593 - DNA, 333 bp, Staphylococcus capitis
atgacaataacaattgaaaaagaattaacgaacgatcatattagagtattagacgtattacgcaacactaagcacgagattatcactaagcaaaatatatttaatcaattgaatatggaatttaaccgaagcaacgacagatggttaagaaatacgattaatagtttagtagttgattatggttatccaatcggatacagctataaaaaagatgcaagaggttatttcatggttaaatctgaggaacggaaagaattagccttaagaagtatcaagcgtcatatcgaaggtagtttaaagcgatatgaggcattaaagaaaactgagatttaa

SEQ ID NO: 1594 - DNA, 753 bp, Staphylococcus capitis
gtgagtgctgcaactgaaatcattaaagaacgtgttagcgattatgaattatgcactagatttaatacttactacattcaaacaagaatagcactcatagaaagtgatattgaggatatgtatgacagaaccacacctagtttatgtagtgatacagtatcggaaagtatttactatgagagttattccgttgaaaatctagcaatcgctatattagaagaacgtcagaagttggaacggtataaacgtaaaagtcaaagagatttgaacgccttttatactgttctagggcgtttctcaactcaagaacaaaagtatattagaaactatattaagacacgctcagaggcttatatggacgtgatagagcgttttaaaatcgaattacatgattatattcaaactaacagaaatacacgtaataagggcatagaacacgattattcatatatcagtgataaacgtcagaaggtgcaggtgtaccctcataagttgacgctgaaccaagagaaagcactcaaagaaaaagaagatggtgctactgaaaagaatatgaatattgatgaatttgtagccaagttgaatgaacttgatgaaaaagcatttaaggaatttatctataaccgaaatgaaaataatattaactttgagaaaatcataatcttgttgcaaactatcccgaaatgtttacccgaaaaagaaatagctaagccatacaactacataaaagcagtaggcttaaaaacaaattga

SEQ ID NO: 1595 - DNA, 588 bp, Staphylococcus capitis
ttgaaaactgcaaaatattttgatgaatacaacgaatatgtaataggtcaaagagagaatatcaataaacttgaaaaggaacgtcaggaactcacacaacgaattaaagaggataaagttaaatataaagaactaattgcaaactcacaagatgatgaggctgataaactttataccacatttgatagtaatgagaagaaactgaaagcattagagaaacgcttatcaactaaaaaagaagtgtttgatgaggctagacgtaaaaaggctattgaactaattaaacatcaagcagatttacctcatttgtaccaagaggataaagaacgcatattagcaaaattcaagccaatcattgaagagtataacaaaataataaatgaaatagcagcattaaatgatgaatatgaaatagaatttgatagatttgttcgagtttatgacaaagaaaactttgaaaaggatagggaagtaagggaagaaataaaaaactatttcagtcctaataagtattcaaattatgtgagtggagacgaactaccgttcattgatataagaaataaaatgaaatttagaggtgctaaataa

SEQ ID NO: 1596 - DNA, 210 bp, Staphylococcus capitis
atggctagaaaatataatttagataaagttagtaattatcttttaacggaaacaaaattatctgctgacgaatgtcacaaagtattagatgtagtagaagaacaattctcccaaaatattcgacaacagaaaaaagatgaattggcccaaaaatcacaaagagacagaagacttcagaaaatgttcgaagaaaatagaattgttaaataa

SEQ ID NO: 1597 - DNA, 438 bp, Staphylococcus capitis
atgaaccttaaaagagtgaaatacccactaatctatcatgaaaataaaatatctgagtacacattgctaacggaatataatcctaagtttatcaatactaaaattaaggctatcactatgcaaatagagatgatgtatcacttaaacatctcccacatgactactactgaagttcacggcgttataactatctcatatcccttagagaagttagcaattactattatagaagaaaaggaaaaattaaagtatttcaaaacgaaatctaatagcaatatgcagcagttaaaacaggtaattaagcgatatacaccaggcgaacaaaaggaaatcatgtattatatgcagtccaatggttcgacaatagattatgccctcatagaacgcctacaacgtgatttatacaagctaagacagaaagtaagtgtaaaggcatga

SEQ ID NO: 1598 - DNA, 330 bp, Staphylococcus capitis
atgagttacgacagagaggctattaaacagtttatacgtgactactcaaaagagaaccatgatactacatataatgatgaaaatatcaatgtagatgatttcttttcactgagtgatgaagccgaacctttttcactaaatgagaatactagtaatcaagcattctttaatgaactagatcaacttatttatgcagtaggaactagaagggaatactacatatttttcttactatgtgaaggaaaatcaatgaatgaaatagcaaagatattcaatttaagtagggaaagaatacgtcaaatattgaatgatttattagataaattatag

SEQ ID NO: 1599 - DNA, 570 bp, Staphylococcus capitis
ttgagtacattaaatcctagacaagagaagtttgtcgctgaatacttaaaaacgttaaatgtaacacaaagtgcaattaaagctggatatagtcctcatactgcaagtgaacaggggagtagattgcttaaaaataagaaggtaacaaaatatattgatgagcaacgtaagagggtaattgatgagggtgtactatctgctaacgaattacttcatatcttaagtaatgcagcagtaggtgatgagagtgaagtgagagaggttgtcgttaaacgtggtgagtttcaacgcaatcccgatactgacagaatgaacctagtttataacgaacatgtagaaatggtagaagtacctatcaaacctagtgaccgtttacgtgctagagatatgttaggtaagtatcacaagttatttactgataaaaaagaactatcttatgacacaccagtatttattaatgtaggtgaatgggacggcgatgaagaagaacaacagcaattaattgattctgtaggagaggaacaccctaatagacctatattagtagacaatatacctacaaaggattaa

SEQ ID NO: 1600 - DNA, 363 bp, Staphylococcus capitis
atgagattaagaaaagccactataaattatttagagagcgaatttatatattataaacacttaagcagagatatagaacgtattagaaatagtaaggtatacccctcacagtacgataagcaaaaagcattgaaagatagacgattgaaacagttaacgagaattaaggaggcaatagagtatgtatatgcaacgagtaatgaagatagtcaaagattgattgataggtattattttaacaatattgataatttaaatttaacaggtgcagcacttatgattaatattagtaaatcaactgcatacaatttaagaaacaatatactactacgtttatctgatgaattaggattattacattga

SEQ ID NO: 1601 - DNA, 759 bp, Staphylococcus capitis
atgaataatattggaatagtattaactataatagggacttttttaactgtatttaataccatttctgcaattaggtggagaagaaggaattataattatcgcaaacaaatagatcattataaaaatgaactcgaagaatcaaatcagaaatatatcaaaaatttaaacaataaaaaagaactgacagaatttattaataattttgttaaattaagttattctacaataatgtcatgtgtcagttttttatatacactagattttattactaaaagtcttaccaaaaacaatgaatatataagtcatgaaaaactagaaggattattacaaaaacattttaatataaagaaagatatcaatattttgaaaactgacacaacacaattatatttacattcatctgacaaaaatgaaattgcattaataggtggtacttttaatgaaatttattttttaaatgagtttattgaagttcaattaatgaaacattataaaaaagaaaaaataaataatagaaagattagtaaagatatacaaagagcactattatctagtgaagatgttttgaaaataatgaataaattagattctatgttagttaataaaataaacatattatactcagataatgaaggtgatggaacaatgacatttgttactggcacagaatattttaaatggtattttcctgaatatccagatgaaataaaaaccttgaaaatagaagatgtaaaaaaatatacgtttacagataaataa

SEQ ID NO: 1602 - DNA, 432 bp, Staphylococcus capitis
atgtcattaactagaagaaaaattgagaaaaaagattatcataaggtattagatatttgggagaagtctgtaattagcactcatgattttttaaaagaaaaagatagattagagttaaaaactgaaataccgaattatttaaataatgttgaagcttatttttggtgtgatgacgatgaaattattggattttcaggtacaaacgaccaaaatctagaaatgttgttcatagatcctaagtattttagaaagggctatggaactcaaatacttcaaactctaattcgtgaagaccaagtaagatatgtagaagttaataaagagaattataacgcggttaagttctatcaaaagaatggttttgaaaaatataaagaatctctaaaagatcaacaaggaagagattatcctatatattatcttaagttataa

SEQ ID NO: 1603 - DNA, 573 bp, Staphylococcus capitis
atgaagaaattttttgccgtattattatcaagctttttagtgctaagtgcatgtagtcatagtgatcattcagataaaaaagattcagataaaaacagttcaaaaacggaatctaaaaagtcggataaaaaagattcaaaaggtgataaaaaagttaataacgctaaagataacattaaagacagtaaattaggtaagaaaagcaaagataaaagttcaaaaagtaaggattcaaaacctaaaaataaacaaactaatcaacaatcatctaatagcgcatcacaagcaaacaatacttcaactcaacctcaaaataataatgctaataacgctaacaatactaacggcaataaccaaaattcttataacaatcaagctaattcacaaaaccaacaacaaaaccaacaacaaaatcaaactaacaatacacaacaaaataattcccaaagacaacaaccatcacagaataatcaacaacaatattcaactggcaacaaccaatctgcaaataatagccaaagcatgaataactcacaaggacaaacaaatactaatacccaaagaggattttag

SEQ ID NO: 1604 - DNA, 201 bp, Staphylococcus capitis
atgaataacggtacagttaaatggtttaattcagaaaaaggctttggattcatcgaaagagaaaatggcggggacgtattcgttcatttctcagcaatcgtagaagacggttataagtctttagaagaaggtcaaaacgttgaattcgacattgttgaaggcgaacgtggtgaacaagcagcgaacgttgttaaaatgtaa

SEQ ID NO: 1605 - DNA, 735 bp, Staphylococcus capitis
atgcataaagcaaaaatgatattgaatgaagtaccaacgatgttgaagtcattgaagaacattttcaatattatcaatgggaataaagattactataatccaaaaattgatatgaaaaaagaagatgataatcttaatgggaaaaaaattatctttttagggtcttctataacttatggtgcggcttcgaaaggaatctcttttgttgaatatctcacaacagaatatgaagtaaaaggaatcaaagaggctaaatcaggcacaacattagctgggaaaaatgtaaatagttatttaaatcgactcagaaagttaaattttgtgaatactaaaattgatgctgttgtaatacagttatctacgaatgatgcaagatttggttatgaaattggtgaaatgagtcagtcttttgaccttgaaagttttgatactgagacgacattaggtgcgattgaatatattattaagtatgttcatactaaatggcattgtccaatcatcttttatacctgtattagagaaaatgatctaacttataagcagttagttaatcatctttatccacttaaaacaaaatgggatatacatattattgatatttttaataatgatgaaattaataaattagctgaaagtgataaagaaatgatggcagatgattcacatccaaccaaaaaaggttaccgttatttatatacacctatcttagtaaaacaattagatgagatattataa

SEQ ID NO: 1606 - DNA, 225 bp, Staphylococcus capitis
atggataattggaaaattgataatcattcaaatcgcaaatttttaattcaaaaaaatgagggtgaattatcaattgtagaaccattagataatggtgcatttaaaatacttgctgaaattaacttatctaatgaaaatgatgtgaatatttatgacagtcatttatatgtttcagtaagcctagaacaagaagaaatttgtatatttgataacaacaatacgtaa

SEQ ID NO: 1607 - DNA, 285 bp, Staphylococcus capitis
atggatgaattaactaaagaacaaaaatatacagtcgcaaagttttataaattatatatggaacgttcaaatgaaggattatctgaagaacaatctaacgacttcaaagattctataactactcaagatgattatttctgtggccgtgaatatgaagattttattcataactgtaaagtacttatagaagatggctatcttgaaggtgatattgaagatcaaacgatttataatattaaattaactaccaaagcttttacagaaattgaaaaaagctttggttag

SEQ ID NO: 1608 - DNA, 747 bp, Staphylococcus capitis
atgagcaataaaggcagtctatattccatactttattatttagctatagcgttaattgtcatcactatcatagtagtggttttgattttctataacactagaaaatcagcttctaaaccttcaagcgatcgctatagtgattttgaagaattaaaaaagaataccactaaaaacaaggattggagaattgtgacgaaacatagaaaggataataatattttacttacagccattcacggtggtggaatagaaccaggtacaacagaacttgcaagacgtgtatcgaacgtaggtaaatataacttttattcttttgaaggtttacgtaaacataataatgatcaacttcacgtgacttcaacaaattacgatgaaccgaaattaattaatatgttagaaaaatcgaatgagacaatttcaattcatggttcttctggagatgaccctatcgtgtatataggtggaaaagatactaaaatggcaaaagcgattgcgaaggcattacgtaagaaagattttaccgttaaagagagtccgaaagaaattaatgcgcaatctgatgataattttgtaaataaaaatgatacagattcaggagtacaactcgaattgaccactgcacagcgcgaggaatttttcaaacatcataaattagataaaacaacgcgaggtaatcctaaaaaatatactagagatttttataagtttgcgaacgctgtagaaaaaggtataaaaaaagcaaaataa

SEQ ID NO: 1609 - DNA, 606 bp, Staphylococcus capitis
gtggaggacattcagattaaaagtgctcaatcaagtgacaaagaaggaggaagattaactcatttagccattgatgaaatggcacaagttattttaggagagacatcgaatgaacgattaaataaacagttacagcaattatggcaaaagaagggtaaccgatttagtcatgatatttcttatgtagcaaaagaagagggacaagttttaggtgctataacttgtacctcattagtcaaattagaaaaatcaatgtttcaaactgtgcttgaaatcatcaaaatgaaaaaattgaaatcattaaaaattattttatccaatttcaaaaagatatattctctaattacaatggatgaaggagagaaagatgaatttcatgtgagtatgcttgcaactctcccgaaagccagaggtaagggcgttggtacgaaattattaaaatttgctgaacgtcttgctatcaatgatggttttgacaaaatttcattaacagtagttcaagataataagaaagctctaagcgtctataaaaaattcggtttttcgattgtaggagaaatcaatcaatcgccattttatttatttaagatgagaaagaatctttag

SEQ ID NO: 1610 - DNA, 234 bp, Staphylococcus capitis
atggataaagaattattaagaagatatttgaatgatgatagttttaaagcagtcgcggtggtcgttggaaataagaaaatcgtattggagaatgatattcacgtcgattatgaaaatgagattatcatctatccgcttaagaattgcacacgaattatcccatttagctctatttcttatttagaccttttagatagaaatgagcaattcgttaactattttaaagaagtttaa

SEQ ID NO: 1611 - DNA, 585 bp, Staphylococcus capitis
atgaaaactaaatataaacttaccattctatttataactttggttatagtacttttaattttattttcaataaacgtcttcaataaagataaagaatcttatgaaagcatagacactaaagaatttaaacttaaaccgggcgacattatcattactaaaggccctgtattattcgggttcttcggccattcaagtatagccatagatgaagatactgtgcttcaaattgaaggccctggtgatcaacctataaccgaatcatttgaatcatatcaacggcgtttcggtactggaaaagacgattggataaaagtgtatcgtagtgtaaaaccagatgctggtcaaaaagcagcaaattgggtaaaacgtaattacgaaaatagtgatagccgatatctcgttacgctaaatttgaaaagtcaaaaattcacttattgcactaaaataatttatcaagcttacaaatacggtgtagataaaaatgctgtaagtgatcatggattatacatcatttcaccatatgcattaaaagataattttacacatgactatcgtttaaagttagttaaaaatattaaaaattaa

SEQ ID NO: 1612 - DNA, 144 bp, Staphylococcus capitis
atggtaagtttatatttagttttcatttatagtgaaaactccttcattaaatatactaaattaattattatattaaatgactctatatgtaaaataaacttcattttcaaaaataaaaaagctaagtcaaaattaatgacttag

SEQ ID NO: 1613 - DNA, 186 bp, Staphylococcus capitis
gtgagtttgcattttcaaatattgttatggctagcaattatatttattgtcgctggagctattattttaacaattatgcttaagactaagaaagaagaaagaaaagaatcttatttaggatttactgtaatattcttgatttttggatttgctatgcttatatacacactcattttcggattgtaa

SEQ ID NO: 1614 - DNA, 204 bp, Staphylococcus capitis
atgactttttatgattttattttaggttttataaatgatgatacacctttaggtagtttagcaaattatattttagatgatattcattttccccgtgaagaaaaaaacaataaagccattcgtgcatacgtgcttgatcactatagagaccatcagttaattgaaagtacgaatagagcaattagtttatataaattaatttga

SEQ ID NO: 1615 - DNA, 237 bp, Staphylococcus capitis
atggatagtcataatcaatgcaattatgtaaatcctaattcagtttcgttagactgggaatgttttattattagtaaaactgatatgttattagatggcgttccaaaagaattgattaatgaatggttagacaaagatcttattgaacctttttctataagaaataacgaagttaatttcaagactaaagatgtatgggaagcgcttaatactcataattggtattactcaaattaa

SEQ ID NO: 1616 - DNA, 585 bp, Staphylococcus capitis
atgactaaaacattatatttaatgagacatggtcaaacagttttcaatttaaaaggaagaattcaaggtgcgagtgattcgccattaacaacattaggggttaggcaggctcagtctgctaaaggttattttgaaaagcatcatattacatttgatacaatagtatcgtcatcacaagaacgtgcctgtgaaactcttgaaaatgcagtgcctaaccaaaattataaaagattaaaaggtattaaagaatggggttttggtttatttgaaggagagagtattgagttattaaaggcaattaaaaagcctgagaatttatatggtgattatgtagtaccctttggtggtgaatcaaaatctgaggttgaatccagagtttatgaaacacttgaggatgtcgtcgctaatcaaactaatcaaacagctttgtcagtaagccatggtagtacgatcggtttatttattagaaaggtgttaggtaatcaagagggtagtacttatgatatcggtaattgtcatatcttaaaatttgaatatgatgataatcaatttaaattcatagaaatcattgatcctacaaactaa

SEQ ID NO: 1617 - DNA, 618 bp, Staphylococcus capitis
atgagcgaagcagtaatacacggttttctcttagctatagggttaatcttacccttaggcgcacaaaatgttttcgtttttaatcaaggagcaaatcaatctaagctaattaaagccttcccagcagttattacagcaggaatatgtgattctatactaattagcttagcggttatcggtgtttctttagtattaatgtcactacctcttttacaaatcgtaatctacattattggacttatttttctgctttatatggcatggacgctttggaatgaaacgcccgatcctattaaacaagaaggtggactatctacaacaaaacaaataagttttgctttatctgtctctttattaaatccacatgcaattatggatactattggcgttataggtacaagtgcgtccgcttacgaaggaaataacaaattcgcttttactttaacatgtatatttgtttcatggatttggtttatcttcttagctttattaggtaaatcagtgggaagaatcgataaatcaggtaaattattagttgtgataaacaagttatcttgcattatcattatagctgttgcaattttaatcattaaaaaattgtgtcaacttcttttttag

SEQ ID NO: 1618 - DNA, 507 bp, Staphylococcus capitis
atgaaaaatatccgtgtattaaatactgatgatttagaatcttataaagaattaatgtcaaacggctatcataattatgcttgggatcaatattatttagaacatgttactgaagaatgtctaaactctattctctcggaagaaacaaagtatttaaacgttttcggcgcatttgataacaatcatcttgttgcaacatgtacgttaaagcaaataaaatttgttgaaaagcgtcataaagccgttttagagaataattttgttaaagataatgatgaaattattaatagagagctcattaatcacataattgaattcgctaaaacacaaggtattgaaatgttgatgaccacaatcgcttcaaataacataagtgctaaaatatttttcagttctctcgggtttgaaaatttagcctttgaaaaaaatgctagtaaaattggggatgaatatttagatgagaattggctcatttactatacttctgacattccatcgaattcttaa

SEQ ID NO: 1619 - DNA, 423 bp, Staphylococcus capitis
atggcagttcaatatgaaactaaagctacaaacgttggtggacgtaaaggacatgtacacactgacgataacgcaataaatgttgatgtattaccaccacaacaagctgatggaaatgctacaaatcctgaacaattatttgcagcaggttacgcttcatgctttaatggtgcttttgatcttattttaaaacaaaacaaagtacgtgatgctgaaccagaagttactctaacagtacgtttagaggacgatccaaacgctgagagtcctaaattgagtgtagatattgatgcaaaagttaaaaatgttttatctcaagaagatgctgaaaaatatttacaagatgcacatgaattctgtccatattcaaaagcaactcgcggtaacattgatgtaaatctaaaagtagaagttattgattaa

SEQ ID NO: 1620 - DNA, 720 bp, Staphylococcus capitis
atgacgcaagtagatgttgcagtaaccatttcgccagaagaaacaataacgcaattgtgcttagatgaattaataaaatataaagactatatagatatcgtagaactacgaatagatcagtgggagaactttgttattaaaaatgttgatactgtgattcaacagttaagaggattgaatttggattttaagattttagtgacttatcgtacctctaaacaaggtggtaaaggaaatgttgaagaaacaacttatatagatattcttaagctattgattgaatatgcccaatttgaattacttgatattgaatggagtggatctataaatacagatcaatatgctcaattaatcactgatgctcaagaaaagaatttaaacgtagtgttatcgcatcataattttgaagaaacaccatcattagaagagattaaatttatatattacaaaatgcaaaaattagcaccacaatatttaaaacttgcagtaatgccaaacaataaagaagatgtactacatttattagaggcgatgagtgtgacttctgataatacaccttataaagttatcggaatatctatgtctcatctaggattagtaagtcgtgttgcacaaggggtgtttgggggatcaatttcatacggttgcttaggtgagccacaagctcctggtcaaattcatgttaaagctctgaaacaacagcttgaattttatcaatga

SEQ ID NO: 1621 - DNA, 543 bp, Staphylococcus capitis
gtggaattacaagaagctatatctaatagaagaagtataaaaaaatttaaacatgatatggtgattgacgataaggcattatatgatgctatcgaaaaagctaccgacgctccaaatcatggaatgcgtgaaccttggagagtcgttcatgtttcaaaagacaaattaggtgattttagtcatgacattactcgatttgcatttccagatcatcccgaaaaaagagaagatcattataatgctgtaacaaatttaggtggtttattattactcattttgaaaaatgatcctagacaaagacaaaacagagaaaatcactttgcatttggagcatttgctcaaaatttaatgttgttactttacgaagcgggaattggcacatgttggaaaacacctcactatatttttgaacctaaagtacgtagagctttagatattcaagatgatgaaattttagctggtttcatgtatctaacggatttagaagttgagccaactaaagctaaacgtaaaaataaaaatttaatcactaagtttgagtaa

SEQ ID NO: 1622 - DNA, 324 bp, Staphylococcus capitis
atgcaaggtattcataaaacagaagactttaattctacaatcaatagtaaagaaccagttattatcaaattcgaagcagattggtgtccagattgtaaagcaatggatatgtggattgaccctattacagaaaaatataataactatcattggtatgtagtagatcgtgatgagttagaagatgttactactgaaaatgatgttatgggtataccaagcatcttaattttccaaaatggcgaaaaattagcgcatttacattcggctaatgcgaaatcaccagaacaagtcgaatctttcctagatgaaaacttaaatcaataa

SEQ ID NO: 1623 - DNA, 354 bp, Staphylococcus capitis
atgattaaattttatcaatattcaaattgtacgacttgtaagaaagccgctaaatttttaaatgaatatggtgtgagctatgaacctattgatatcgtacaacacacacctactaaaaaagaatttgaagatatcattgaaaaaacaggtgttgaagtaaataaactatttaacactcatggcgctaaatatcgtgaacttaatttgaaagataaacttaaagacatgtcagatgatgaaaaattagatttattagcatctgatggaatgttggtaaaacgtccattagctatctctggagaaaaaatcactttaggatttaaagaagatcagtataaagatacttggttatag

SEQ ID NO: 1624 - DNA, 381 bp, Staphylococcus capitis
gtggcagtaccgagcgaatttaaatattctaaagaacatgaatgggttaaagtagaagataatgtagctactattggtatcacagaatatgctcaaaatgaattaggtgatatcgtatttgttgaattacctgaaacagatgaagatttaaatgaaggcgatacttttggtagtgttgaatcagttaaaactgtatcagaattatatgcgcctatctcaggtaaaatcgtcgaagttaacgacgaattagaagatagtcctgaatttgttaacgaatcaccatatgaaaaagcatggatggtaaaagtagagattagtgatcaaagtcaattagatcaattattatcagcagagcaatattctgagatgattggtgaatag

SEQ ID NO: 1625 - DNA, 387 bp, Staphylococcus capitis
atgactattgtgaataaagttatcattgttgaaggtaagtcggataagaaacgagtgcaacaagttattgcagaaccagtaagtattatttgtacccatgggaccatgagtatagataaaatcgatgatatgatagaatcactttatggcaaacaagtttatgttcttgcagattctgatgatgaaggagaaaaaattagaaaatggtttaagcgatatttaagcgaaagtgaacatatatatgttgataaaacatattgtgaagtagctaaatgtcctaaaaactatttagctaatgttttaaatagatacggattcgcagtgcgaaaagagaagaatctaatgcctaatttaaacactgaaaggttagttttagttaatgagtag

SEQ ID NO: 1626 - DNA, 297 bp, Staphylococcus capitis
atgagtagtacaatcgatctcgaagatataacagaaaactataatgaagataaacatcttatatttggatatacacctatgtgtgggacatgtaaagtctcagaaagaatgttagatattgctaatgatatattacagctgcctattaagaaggtagatttaaattttcatccggattttagtaaagaaaaagaaataatgtcagttcctgttctattggtaatgaataaggacaaagaagaaaatagaatctatgcatttcaatcagttccttatttgttagaaaatttaaaataa

SEQ ID NO: 1627 - DNA, 1026 bp, Staphylococcus capitis
gtgattgagttaaatcaaatagttaaacgatatcatactaagaacaaagatgttcttgcagttgatcacgttgatttaaatattgaatcaggctcaatttttggcgttattggtttctctggtgctggtaaaagtacactaattagaatgttcaacaacttggaatctccaacttcaggagatgtaataattgacggggacaatattagtaaattatctaaatcagagctacgaaaaaaacgacaaaaagtaagtatgattttccaacatttcaacttattatggtcaagaaccgttttaaaaaatatcacatttccacttgaaatcgcaggagtcccaagtggtaaagcgaagcaaaaagcactcgaattagtagaattggtaggtttgaaaggacgagaaagtgcttatccatcagagttatctgggggacaaaaacaaagagtaggtattgctagagcattagcaaatgatcctgatgttttactttgtgatgaagctacaagtgctttagaccctcaaacaactgacgaaattttggacctattacttaaagtaagagaacagcaaaatctaactatcgttttaattactcatgaaatgcacgtaattagacgtatatgtgatgaagttgctgtaatggaaagcggtaaagtaatagagcaaggtaaagtaagtgaagtgtttgagaatcctcaacacgcggttacaaaacgctttgttaaagacgatttaaatgatgattttgaagattctttagatgaattagaaccattagcgagtgactcttacatagtgagattgaactttactggtgataatgcaactgaacctattgtttcgtatatcacgaaaacacataatattgacgttaatattctggaagctgacatcaagaatactagaaatggttctataggattcttagtgatacatattccacacattaataatgatagctttgaacattttaaaaatgatcttcatgagcaacatgtgaatgtggaggtgttgagacatgggtaa

SEQ ID NO: 1628 - DNA, 696 bp, Staphylococcus capitis
atgggtaagtcttatggcgaaatttttcatgaaatgtttacaatgcctaatgttcaatggccagatgtatggcaagctattttagaaacgctgtatatgacaattgtttctactatttttgcctttatatttggtttgattttaggtgtgttacttttcctatctgcgaagagtcattcaccagcagctcgaattttctatacaattgtctcatttatagtgaacttatttagagccattccgttcattattttaattttattactcataccatttacgagtgtcatcttaggtactattagtggaccgacaggagcattacctgcacttataattggtgcagctccattctatgctcgtttagtagaaattgcatttaaagaaattgataaaggtgtaattgaagcggcttggtcaatgggagctaacacatggactgttgtacgcaaagtactacttcctgaagcgatgccagctttagtctcaggtattactgtaaccgctattgctttagttggttcaactgccatagcaggtgtaatcggggcaggtggtttaggtaacttagcatacttaacaggatttactaggaatcaaaatgatgtcatattagtttcaactgtattcattttaattattgtatttataattcaattccttggggattggcttacaaataaaattgataaacgctaa

SEQ ID NO: 1629 - DNA, 813 bp, Staphylococcus capitis
atgaaaaaaattttaggtattattttagttttggcattaacagttgctttagctgcttgtggtagcggtggtgacaaagagaaaacaatcacagtaggtgcttctccagcccctcacgctgaaattttagaaaaagctaaaccattacttgagaaaaaaggttatgacttaaagattaaaacaattaacgattacactacacctaataaattattagataaaggtgaaatcgacgcaaacttcttccaacatacaccatacttgaaaactgaaagtaaagaaaaaggatacaaaattgaatctgctggagatgtagaattagaacctatggcagtttactctaaaaaatataaaagtttgaaagatttacctaaaggtgcaacggtctacgtttcaaataatcctgctgaacaaggacgtttcttaaaattctttgtggatgaaggcttaattaaacttaaaaaaggcgttaagattgaagacgctaaatttagtgatatcgaagagaataaaaaagatatcaaatttaataacaaacaatcagccgaatacttaccaaaaatttaccaaaatcaaaaagctgatgcagtcatcatcaattctaactacgcaattgaccaaaaattaagtcctaaaaaagactcaattgccttagagaaagccaaagataatccttatgctaacttaattgcagttaaaaaaggacataaagatgataagaaaattaaagctttaatggaagttcttcaatctaaagaaatcagagattatatcgataaaaaatatgatggtgcagtcgtaccagctaagtaa

SEQ ID NO: 1630 - DNA, 156 bp, Staphylococcus capitis
atgaaatttgtcaatattacatctatgactgaaggtggacttaataagaaagttaatcgttttttagaacaaaatccaaatatagaagtcttaaaatttgattatcaaatgggatacggtggtctcggtgtaggtattctttatagagtagtataa

SEQ ID NO: 1631 - DNA, 189 bp, Staphylococcus capitis
atggctgaagataataaatttgaacaagctaaaggtaatattaaagaaacagtaggtaacgctacagataataaaaatttagaacaagaaggcaaagaagataaaacttcaggtaaagctaaagaagttgttgataacgctaaagaaaaagctaacgatgtaattgataaatttaaaggcgacaaataa

SEQ ID NO: 1632 - DNA, 858 bp, Staphylococcus capitis
atgaacaacttcaaatggacgaatattcttaaaggttttggcatgggtacaagtgatttaattcctggtgtaagtggtggaacaatagctttactgctaggtatctatgatgattttattagttctgtaagcggactgttctcgaaacgtttttggccgagttttaaatttttacttcctattttattaggaatgggtttagccatcgctttattaagcaacttattcaactatttattaagctatcacgaaattccaactatgttctttttcacaggattgattattggaatcattccatacttactaaaaacttctaactttaaacaaacctttaaaaccaagcactatctaatgattttaattggaattattattttggtcatcattacacttcttaataatggtgataaacattctggcgaaacattaactctatcttttggtcttattattaaatattttatagctggtatgttcgcctcaagtgcaatgttattacccggaatctctggatcttttatgttattagtatttggtgcctatgggacggtaatgttttcaatctctgagctagtgaaattaaatttcacagcattacctattttaatcatcgttggattaggtattttgacaggatttatgctgtctagccgtatgattcagtacttcctacatcatcacacaacgatgacgttcgcattgattattggatttataattggttcaatttatgcagttttcccaggctttcctgaaaatggtctagtttggataatctcatttttaacaataattataggctttattgttagttttaccttaggactaattacagcaaaatcagataatcaataa

SEQ ID NO: 1633 - DNA, 762 bp, Staphylococcus capitis
atgtcatcaacattagaaatcaaagacctacatgtgtctattgaggataaagaaattttaaaaggtataaacttaactgtaaatacaggagaaatacacgcaattatgggccctaacggcactggtaaatcaacattatcatctgcaatcatgggacacccaagttatgaagtgacacaaggggaagtattattagacggcgttaatattttagaattagaagttgatgaaagagctaaagcaggtttattcctagcaatgcaatatccttcagaaatcactggtgttacaaatgctgatttcatgcgttctgctattaatgctaaacgtgaagaaggacaagaaattaatttaatgcaatttatcaagaaattggataaagagatggatttcttagatattgatcaagatatggctcaacgttacttaaacgaaggtttctctggtggggagaaaaaacgtaacgaaattctacaattaatgatgttagaaccgaaattcgctattctagatgaaattgattctggtttagatattgatgctttaaaagttgtatctaaaggaattaatcaaatgcgtggtgaagactttggtgcattaatgattacgcactatcaacgtttattaaactacatcacacctgataaagtgcatgttatgtatggtggtaaagtagttaaatctggtggcccagagctagctaaacgccttgaagaagaaggttatgaatgggttaaagaagaatttggtgcagctgaatag

SEQ ID NO: 1634 - DNA, 1308 bp, Staphylococcus capitis
atgacaactgaaactttgaacatttctgaagaacaacttgttgattattcaaaagcgcacaatgaaccttcttggatgacagaattacgtaaaaaagcgttgaaattaacagaaactttagaaatgccaaaacctgataaaacaaaattacgaaaatggaattttgatacatttaaacaacatgaaacaaaaggcagtgcatatgaaaaccttagcgaattaccagaatcagtaaaacaaattatcgatgttgaaaactctgaaaatttagtgattcaacacaataacgatttagcttatagtcaagtgtcagaccaagctaaaaaagatggtgtcattattgaaggtttatcagaagcattggtgaatcacagtgaattagttcaaaaatacttcatgactaaagctgtagatattgatgaacatcgtttaacagcgctacacactgcattaatgaatggtggtatatttgtatatgtacctaagaatgttgtagttgaacatccaattcaatacgttgtacttcatgacgacgataatgcaagtttctataatcacgttattcttgttactgaagaaagtgcagaagtaacttatgtagagaattatttatctaatgcaaatggtgaagataatcaaattaatattgtttcagaagtgattgcaggagctaattctaatgtcacttatggctctgtagattacttagataaaggttttaccggtcacattattcgtcgtggtacaactgaagcagatgcctctattaattgggcattaggcttaatgaatgaaggtagtcaaattattgataatactactaacttaattggtgatcgttcaacaagtgaattgaaatcagttgtagttggaacaggtgaccaaaaaattaatttaacatctaaaattgttcagtatggtaaagaaactgacggttatatcttaaaacatggcgtaatgacagaaaatgcatcttcagtgtttaatggtattggttatattaaacacggtggtactaaatctatcgctaatcaagaatctcgtgtactaatgctatctgaaaatgcacgtggtgacgctaaccctatcttattaattgatgaagacgatgttgaagcaggtcacgctgcgtcagtaggtcgagttgaccctgagcaactttattacttaatgagtcgcggtatttcaagaactgaagctgaacgtttagttatacatggtttcttagacccagtagttcgtgaattaccaattgaagacgttaaacgtcaattaagagaagttattgaacgtaaagtttctaaataa

SEQ ID NO: 1635 - DNA, 1242 bp, Staphylococcus capitis
gtggccgaaaaaacttttaatgtgaacaatgtcattaaagatttcccgattcttgaacaacaagttaacggaaagcgcttagcgtatcttgattcaactgctacaagtcaaacgcctgttcaagtgttaaatgtattagatgattattatagacgttataactctaacgtccaccgtggtgttcacactttaggatcactagcaacagatggctatgaaagtgctcgtgaaactgttcgtcgatttattaatgctaaatattttgaagaaattattttcactagagggacaactgcatcaatcaatattgttgcacgtagttatggtgacgctaacgtcgaagaaggcgatgaaatagttgtgactgagatggaacatcacgcgaatattgttccatggcagcaattagctaagcgtaaaaatgcatcactaaaatttatcccaatgactaatgaaggcgaacttagagtagatgacattaaagaaacaataaatgaaaaaactaagattgtagctattgcacatgtatcaaacgtcttaggtacaattaatgatgttaaaacgattgcagacatcgcacatgaacatggtgctattattagtgttgatggcgctcaagccgcaccacatatggccttggatatgcaagatattgatgctgatttttatagttttagtggacataagatgttaggacctacaggtattggtgttttatatggtaaacgtcaattacttaaagatatggaacctgtagaattcggtggagatatgattgattttgttagtaaatacgatgctacttgggccgatttaccaacgaaatttgaagctggaacacctcttattgcacaagctattggtttaggtgaagcgattcgttacattgaagaccttggctttgatgctatacacaagcatgagaaagagctgactgaatatgcatacgatcaaatgtctgcaattgaaggtttagaaatatgtggaccacctaaagatcgtcgagcaggtgtgattactttcaatctttcagatattcaccctcatgatgttgcgacagcagttgatactgaaggtgtggctgtccgagctggacatcactgtgcacaaccactaatgaaatggcttaatgtatcctcaactgcacgagcaagtttctatgtttacaacactaaagaggatattgatcagttagttcaagcattgaaacaaacgaaggagtttttctcttatgaattttaa

SEQ ID NO: 1636 - DNA, 465 bp, Staphylococcus capitis
atgaattttaataatttagatcaactatatcgatctgtaattatggatcattataagaaccctagaaataaaggtgttttagataacggctcaatgacagtggatatgaataaccctacatgtggtgaccgtattcgtctaacattcgatattcaagacggtataattaatgatgcaaagttcgaaggagaaggttgctcaatttctatgtcaagtgcatcaatgatgacagaagcggtaaaaggtcattctcttgctgaagctatgcaaatgagccaagaattcactaagatgatgctcggtgaagactatgaaattacggaagagatgggtgacattgaagcattacaaggtgtatctcaattcccagcacgtatcaaatgtgcaactcttgcttggaaagctctagaaaaaggtacagttgaaaaagaaggtaaagcagaaggcacaactgaagaagaataa

SEQ ID NO: 1637 - DNA, 1398 bp, Staphylococcus capitis
atggctaaaaaagcacctgatgttggagattataaatatggtttccacgaagaggatgtgtccattttcagatcagagcgaggtttaacagaaaatatcgttactgaaatttctaagatgaaagaagaaccgcaatggatgttagatttccgtcttaaagcattgaaattattctataaaatgcctatgccacaatggggtggagacttatcagaattagactttgatgatattacttattatgttaaaccatcagagcatacagaacgttcttgggatgaagttcctgaagaaattaaacgtacgtttgacaaattaggtattcctgaagctgaacaaaaatatttagctggtgtatctgcacaatatgaatcagaagttgtttatcacaacatggagaaagaattagaagaaaaaggaattatcttcaaagatactgatagtgcattacgtgaaaatgaagatttattcagagaatactttgcatctgttgtacctgctgcagataataaattcgcggcattaaattcagcagtatggtcaggtggatcatttatctatgtaccgaaaaacgttaaattagatacacctttacaagcatacttccgtattaactctgaaaatatgggtcaatttgagcgtactttaattattgcggatgaaggtgcatcagtaaactatgttgaaggttgtactgcaccagtttattcaacaagctcattacattcggctgttgttgagattatagtgcataaagatgcgcatgttcgttacacaactattcaaaactgggcaaacaatgtctataacttagttactaaacgtacttttgttcatgaaaatggtaacatggaatgggtagacggtaacttaggttctaagttaacaatgaaataccctaactgtgtattactaggtgaaggtgctaaaggtagtacattatcaattgctttcgctggtaaaggtcaagttcaagatgccggtgctaaaatgattcataaagctcctaatacatcttcaactatcgtttctaaatccatctctaaaaatggtggtaaagttatttatcgtggtatcgttcacttcggacgcaaagctaaaggtgcacgttcaaatattgaatgtgatacgttaatcttagataatgaatctacgtctgatacaattccatataatgaagtatttaatgacaatatttcattagaacacgaagctaaagtgtctaaagtgtcagaagaacaattattctatcttatgagtcgtggtatttctgaagaagaagccactgaaatgattgttatgggcttcattgaaccattcactaaagaattaccaatggaatatgcagtagaaatgaaccgattaatcaaattcgaaatggaaggttcaatcggctaa

SEQ ID NO: 1638 - DNA, 1026 bp, Staphylococcus capitis
atgattgtctcgattatcattttatttttagtttcgtttttcttctctggaagtgaaacggcattaactgctgctaatcgtactaagtttcaaactgctgcgaagaatggtgacagaaaagctaaaggactttcaaaattattagataaacccaatgaatttattacgactattcttatagttaataacgtagcaaatattattttacctattctagtagctattttagctattcgaaagggagtcaatattgtcgttgcttctgtaattataattatattaattattttaatttcagaggttattccgaaatcaattgctgcgacatttccagatcaaatttcacgtttggtttatccaattatcaatattttagttattattttaaagcctatcacattcgtattgaataaaatgacagacggtattaatcatttgttttctcgaggaaaacctgtggaaaagcgtttttcaaaagaagaaatacgtacattattaaatattgcaggacgagaaggtgcatttaatgaagttgaaaatgcacgtttgcaaaatgtgatggactttgaaaaattaaagataactgatgtagatacaacaccacgcgtgaaggtagtggcattttcaaaagaagtcacttatgatgaagcatatgaaacagttatgaatgaaccttatacaaggtatccggtgtatgatgaagatattgatgatattatcggtgtatttcattcaaaatatttattagcatggagtaagcataaagacgataaaattacgaattatgtatcgagcccactatttgtaaacgagcacaatcgagcggaatgggtgcttcgtaaaatgactgtgacgcgtaagcatttagcgattgtgttggatgaatatggtggtaccgatgcgattgtgtcacatgaagacttaattgaagaattactaggcatggaaattgaggatgaaatggatcaagaagaagaagaaaaattaaaaaatcaaagacttcctcaaagtatgaaaggccgataa

SEQ ID NO: 1639 - DNA, 1071 bp, Staphylococcus capitis
atgatgtggaatgaaaatggaatgacgaaagtattgggcatacaatatcctatcattcaagcaggaatggctggtagtacgacgcctcacctagtctcaactattagtgaacgtggtggtttaggcacaattggtgcaggttattttaatgctgaaaagttggaaaatgaaatgttagaagtgcaacgattgactgataaaccttttggcgtgaatctctttgttcctagtaaaaatcgttatctaccagaccaaattaatcatatgaatgcttggttgaaaccatatagacgtgcatttaatttagaggaacctgttgtcaatgtcacagaggatatacagtttaaacaagcgattgatttaattattaagtatcgtgtgcctgtatgttgtttcacattcggtattcctgatgaagaaacaattcaaaaacttaaagaagcaaatgtcactttagtcggtacagctacaagtgttgatgaagcaattgaaaatgagcgttcaggaatggatatcattgtcgcacaaggcagtgaagcaggtggacacaggggttcatttttaaatcatggcgatgatgagcctatgataggaacaatgtcgcttgtacctcaagtggtagataatgtgacggtaccggtggtagctgcaggcggaattatggacggtagaggtttgcttgcgagcatgatgcttggcgcacaaggtgtgcaaatgggtacagcattcctgatttctgatgaaagtgctgcgagtgatttattaaaaaatgctattctaggaagcaaggaaacagacactgtagttactaaagtatttagtggtaagtatgcacgagggattcataatgagtttattgatgaaatgaatcagtttgatggcgaaattcctgattatccaattcaaaatcaactgactaatagtatcagaaaagctgcagctcaagatggtaatagagaacttacacatatgtggagtggacaatcttcacgtcttgctgagaaaatgcatgctgcaatgataatggatagagtcatatcgcaagtgaataagaaattacaacttatatag

SEQ ID NO: 1640 - DNA, 849 bp, Staphylococcus capitis
atgatagaaataggtcttactggttggggagaccatgatacattatatgaggatttagaccgcaaaagtgacaagttaaagacttacgctagtcattttcccatagtggaattagatgcctcatattatgcaattcaaccagaacgaaacataatgaaatggataaatgaaacgcctaaacgttttcaatttattgtaaaaatacaccaagcattaacccttcatgcagattataaagaatatgcggaaacacgtagtgaattatttgaacaatttaaagagatgcttgagcctcttaaagagcataataaacttgcgatggtcctagttcaatttccaccatggtttgattgcaacgctcaaaatattaactacattttatatgtaagaaagcaattagaggaagttcctatgtgcgtggagttccgacatcaatcttggttcgatgatcgttttaaagagcaaactttatcatttttaacagatcatcaaattatacattctgttgttgatgaacctcaagtaaaagaaggtagtattcctctcgttaacagaattacaaaccaagtagcttttgtacgttatcatggccgtaatcgtcatggatggacgaaaaaagatatgacagatcaagaatggcgagatgttagatatttgtatgattataatgaagaagaacttgaagatttagcacaaaaggttaaaatcctaaatcaaaaagctaaaaaagtttatgtaatttttaataataattctggtggacatgcagctcaaaatgctaaaacatatcaagacatactaggtattgattatgaaggtttagctccacaacaattaaaattattttaa

SEQ ID NO: 1641 - DNA, 828 bp, Staphylococcus capitis
atgttattaactattattttacttgttttaataagtggactctcagcaatcttagggtcaattgtaggtataggaggcggcataattattgtgccgacgcttgtatatttaggagtaaatcatcatatacttcatggcatcactccacagattgctattggtacatcttcagttatccttatcgttacaggattatcatcttcattaggttatttaaaaacgaaacaagttgatataaaaaacggttctatttttctttttggcttattaccaggatcgctcataggttcatttttgagtcaatttttaactttagattcatttaacttatactttggtatttttatgatttgtgtagcaatattgcttatggtgcgtcataaaattaaacctttcaaaatatttgataaaccacaatatgaacgtacatatgttgatgcagagggtaaaacctatcattacagtgtgccaccattctttgcatttgtcgcaactttatttataggtatacttaccggtttatttggtataggtggaggagctctaatgactccattaatgctcattgtatttagatttccaccacatgttgctgtaggaacaagtatgatgatgattttcttttcaagtgtaatgagttctattggacacattgtacaaggtcatgttgcttggggttattcagtggcattgattatttctagtattattggagcgcaaattggagttaaagtgaatcgttcacttaaatcagatactgtagtcatgctactaagaacagtcatgttattattaggcgcatatttaataattaaatctctcttgtaa

SEQ ID NO: 1642 - DNA, 1320 bp, Staphylococcus capitis
atggaattaacaatttatcatacaaacgatattcacagtcacttaaatgaatatgcccgtattcaatcttatatggctagccatcgaccacaacttcaacatccctccctttatttagatattggtgatcatgtagatttatcagcccctgtcacagaagcaacgattggtaaaaagaatattgaattacttaatcaagcacattgtgatattgcgacgattggtaataacgaaggtatgacgatttctcatgaagcactacaaaatttatacactgacgcgaattttaaagtcatatgtgcaaatgtgtttgatgagaaaggatatttacctaatcatataacgtcttcatatattaaagaaattgaaggtagtcgtatattatttatggctgcaacagcaccattcactcctttttacagagcactggattgggttgtgactgatccattagcggcaattaaagatgaaattgaagctcataagggtcaatttgatattttaattgttatgagccatgtgggtgttttctttgatgagaaattatgccaagaaattcctgaaattgatgtcattttcgggagtcatacacaccattactttgaaaatggtgaatttaacaatggcgtacttatggccgcagctgggaaatatggtcatttcttaggagaagtcaacctaaccatcgaacatggtaaagtctctgataaaaaagcgaaattacatcctctcgatgcgttaccacaagttgaaacgcactttgaagaagaaggtaaagctttattaagtgagcctgtcattgaccatcatgttaaattactgaaaaaaacggatgtcattaccgaaacttcttacttattagcagagagtgtttatgaatttacgcatgcagattgtgcattagtgaatgctgggttaattgtgaatagtatagaggctgataaagtcacggaatatgatattcatcgtatgttaccgcatccgattaacttagtgagggttcgtttaaccggtgacgaattaattaaagtcattcaaaagagccaaaaacaggaatacatgcatgaacatgctcaaggcttaggttttagaggtgacattttcggtggttatattctttataatctaggattcatagaatctgaaaatagatacttcataaatggtgaagaaattcaaacagatcatcaatacacgttaggtactgtcgatatgtatacatttggtagatatttcccaattttaaaaggcttgccaacagattatatcatgccagaatttttaagagacattttcaaggaaaagttgcttagattttaa

SEQ ID NO: 1643 - DNA, 918 bp, Staphylococcus capitis
atggcgactaaaaatgaagaaattttgcgtaaaccagattggttgaagattaagcttaacacgaacgaaaactatactggtctcaaaaagatgatgcgtgagaaaaatttacacacagtttgtgaagaagcaaagtgtccaaacatacacgaatgttggggagctagacgtacagctacgtttatgattctaggggctgtttgtacaagagcttgtcgattctgtgcggttaaaactggtttgccgaatgaattagatttaaatgaaccagaacgtgtcgctgaatcagtagagttaatgaacttaaaacatgtggttattactgcagttgctcgtgacgatttaagagaccaaggctcaaatgtctacgctgaaacagtgcgtaaagttagagaaagaaacccatttacaacgattgagattttaccatcggatatgggtggagattatgaagcgcttgaaaccttaatggcttcaagaccagacattttaaatcataatattgaaacagttcgtcgcttaacgcctagagtacgtgcccgtgctacgtacgatcgtacgttagaatttctacgtcgttctaaagaactacaacctgatattccaacgaaatctagtcttatggtcggcttaggggaaacaatggaagaaatttatgaaacaatggatgatttacgtgcaaatgatgtagacatccttacaataggacaatacttacaaccttctcgtaaacatcttaaagttgagaaatattatacaccattagaatttggtaaaatgagaaaagttgctatggataaaggcttcaaacattgccaagcaggtccacttgtacgtagttcatatcacgcagatgaacaagttaacgaagcagctaaagaaagacaacgccaaggtgaagaacaattaagtaaataa

SEQ ID NO: 1644 - DNA, 390 bp, Staphylococcus capitis
atgattaaagtagaagaacaatactttgaattaattgaagaatatagagattgtttcaatgaggaaacatttgcagcgagatactcagatattttaaataagtatgattatgtagttggtgattttggttatgatcaattacgtttaaaaggtttttataaagatagtaataagaaagctgagataagtaaacggttttcaagtattcaagattacatactagaatactgtaattttggttgcccatattttgtagtacgacatatacccgaaaatgaactagtagacgaagtagaggatgaagcggatcttatagataaacttcatgatgttaaaatacaacctaccattcaagatactgagaaaacacaagatactgaagataaataa

SEQ ID NO: 1645 - DNA, 267 bp, Staphylococcus capitis
atgattgatatgtacttatatgatgacgaagaacaaagccaagttcagttcgtagggtttgttggagaacacagtcgttatgatttaatgctcgttcaaactgacagacactatgggaaaacactcgtattaaatatgcaaacaaataaattcggaattataggaacagatgatattgaagaagaaggctatattgcacatatacttggtgtcacaaaagaagaaggcgatgaaattattggatacttgaacgaagtgattcattaa

SEQ ID NO: 1646 - DNA, 435 bp, Staphylococcus capitis
atgtatttcgtagataaagaaaaattgacacagaaattgacctatttacaaggtttgacagaggattatgataaaaataaagaaaatcattatgcgtatgaacgtattgctcaaatgttaatcgaatcatcagtagatattggaaatatgattatagatgggtttattttaagagatccaggtaactataaagacgtgattgatattctagaattagaaaatgtaatttctaaggaaactcaaacccatattaatgacactgtagatgtcagaaaacaatttgcacacaattatacagaattaaatgtaaaagaaatcatgcctttatttgataaatcattgccatattataaggaatttatcaaagaggttgcacaatttcttgaaagtgagaacgttccaattactgcatttggaaaaggggagaaccaatag

SEQ ID NO: 1647 - DNA, 780 bp, Staphylococcus capitis
gtgaagaattataaagcctatttaatcgatttagatggtacgatgtacaaaggtacagatgaaatcgatggagcggcacaatttatagattatttgaatcgcaatgaaataccacatttatatgttacaaacaactcaacgaagacgccggaccaagttgttgacaaacttcgtgaaatgaaaattgatgcgaaacctgaggaaattgtgacttcagcacttgctactgctgactttatttcagaagaacacccaaatgcatcagtttacatgcttggtggtaatggcttgaaaacagctttaactgaagcaggattaactgtaaaagctgatgaacatgtagattatgtggtgattggtttagatgaagaagttacatatgagaaacttgcagtagccacattaggagttaggaatggtgctaaattcctctctactaatcctgacgtctccattcctaaggaaagagggttcttacctggaaatggcgctattacaagtgttgttagtgtttctactggggtacaaccacaatttattggtaaacctgaaacgataattatggataaagctctagaaatactaggtttaaataaagaggatgtagccatggtaggagacttgtatgatacagatattatgtcaggtattaatgtaggcattgatacgattcacgttcaaacaggcgtatctacttacgaagaaattcaaactaaagaagtaccacccacacattctttcgcagatttaaatgttgctatcactgaacttgaaaagtaa

SEQ ID NO: 1648 - DNA, 969 bp, Staphylococcus capitis
atgaacaaaatactaattactcgaaagattcctcaaaaatttattgaacaattagaacaaatcggcgatgtcgtcatgtgggataaagaattaacaccaatgcctagagaaacatttttaagtgaagttaaagacgctactgcctgttttattactttaagtgaaagcgtagacgaagaagtattgacagaagcgtctgaccttaaaattattgcaaatatggctgtaggttatgacaacatagatgtcgtcagagcgaatgatcatgacattactgtaactaacacacctgatgtattaactgaaacgactgctgaattaggttttacacttatgttaacagttgctagacgcattattgaagcggaaagatatgtgcaagagggtcaatggcaaagctgggggccttatttactttccggaaaagatgttcacggttcgacagtaggtatatatggtatgggcggtattggtagagcgtttgcacgtcgtttaaaaggttttaatactcgtattttatatcacaaccgtactcagaatccagaagctgaaaaagagttagatgcgacgtacgtttcgtttgaaactttattaaaagaaagtgactttgtcatttgtacagcaccgttaacaccacaaactgagaatcaatttgattcaaaagcattcaatttgatgaagaatgatgccattttcattaatatcggacgaggtgccattgttgatgaaactgcattggttgaagcgctacgaaatcatactattttaggttgtggacttgatgtattgcgtcaagaacctatcgatgtgaatcatcctctattgaaacttgataacgcggtgattgtacctcatattggaagcgcatcacgtctcacaagagatcgaatggtacaactttgtgttaataatattttagctgttttaaatcatcaactacctatcactccggtaaaagttaataactaa

SEQ ID NO: 1649 - DNA, 150 bp, Staphylococcus capitis
atgaaaactaaaagtaaagaacctaataagtattatgaaaaaatgaagccttacttacttacattattatatttagctatatttatagctttatacttaatatatggtagtggcgatacacataataacttcatttataatgaattttaa

SEQ ID NO: 1650 - DNA, 1458 bp, Staphylococcus capitis
atggcagaaattattaatacgttaaatcatttcgctaaagaacagccagataagatagctgttagacatatagaagatgtcttgacttataaagaattagatgaagcttcaagtaagttagcacatcaattacaagatggtaaaaaaccaatggtattatatggacacatgtctccgtatatgattgtcgggatgttaggagcaattaaagcgggttgtggttatgtacctatcgatacatcagtaccagaagaacgtgtaaaaatgattatcgaaaaagttcaaccagaatttatttttaacacttcagatgaaactttagagcaatctatcggaaaagaaatttctattaaagatattcaagactcacaagatcctgttatttttgatagtcaaatgaaatataacgatgttgtgtatactatctttacatctggttcgacaggagaacctaaaggggttcaaatcgaatatgcaagtctcgttgaatttgccgagtggatggtatcactgaatggagctggacaaggtcaagaatggctaaaccaagcaccattctcatttgatttatcggtcatggcgatatatccatgcttaacgtccggtggtactcttaatttagtggataaagatatgattaaaaaacctaaactgttaaatgagatgttaatgaacacaccaattaatgtttgggtatctactccttcatttatcgaaatgtgtttattattaccaaatcttaatgagaagcaatataatagtttaaatcatttcttcttctgcggggaaattctacctcatagaacagctaaagctttagtaagtagatatccaagtgccacaatttacaacacgtatggacctacagaagctacagtggctgtaacaagtattcaaatcactcaagaggtattagagcaatataatcctctaccagtaggcgtatcacgaccaggtacaacattatcaactactgatgaaggtgagcttgttattgaaggacaaagtgtgagtttaggttatcttaagaatgaggagaagactacagcggttttcaactttgaagatggtaccagaacttatcacactggagataaggctaaagaagaagatggattatgttttattcaaggacgtatcgatttccaaattaagttaaacggttatcgaatggaattagaagaaattgaaacgcaattacgtcaatcacaatatgtaagagaagcaattgtcgtaccagtttataaaaatggtaaagttgtacatcttatcggtgctgttgtaccttatgatagagttgaagacaacttagaaatgacaacgaatatcaaacatgaacttaaatcacgcttaccagagtatatgattccgagaaagttcgaatggatggaacaattaccacttacttcaaatggtaaattagatcgtaagaagattgcagaggtagttaacggatga

SEQ ID NO: 1651 - DNA, 1215 bp, Staphylococcus capitis
atgattccatatggaacgtttaccttcttcttaattgcttttattgtgcttataccagttataatactcggatttttaggtaagcgtagttatatttataacggtataagtaccgccattatgattgtacttatcttttcttcagataaacacaatcttcttggtcaaaagtatttaagtgtgcacttgttaagttttattatttatgtaatttggcaagtcgcattaatcatgttctattataagtctcgtcaaaagaataatacatttgctaaatttactactgtcatggtgttatctatcctaccattagcgattgtgaagattcttcaaagttcatggttaggcggacatcagattcattttcatgaaagtaaattaatcgaatttgtcggattcttaggtatatcctacgtaacatttaaaagtgttcaacttattatggaaattagagatggttcaattaaagagatcaaagtttggaagttaattcaatttatttcattcttcccaacaatttcttctggaccaattgatcgttataaacgttttgttaaagacgataagaaggtgcctacaggtggagagtatagagagcttgttcttaaagccatccacatgattatgttagggttcttgtataaatatattattgcgtactttattcaagtgtatgcagttaacccattacaaatgaacttacacggtttcacacatatgtggctttatatgtatgcatacagcttatacttattctttgactttgcaggatatagcttgtttgcgattgcagtaagttatttatatggaattaaaacaccaccgaactttaatcaaccatttaaagctaaaaatattaaagatttctggaacagatggcatatgactttatcgttctggtttagagattgcatttacatgagatcattattctatatgtctcgtaagaagttattaaaaagtcaatttgcaatgtctaatatggcattcttcttaaacttctttattatgggcatatggcatggtcttgaagtatattacattgtttatggtttataccatgcggcattgttcatagggtatggttattatgaacgctggcgtaaaaaacatccaccacgttggcaaaatggatttactacagcattgagtattatcattactttccattttgtaacatttggattcttaattttctcaggtaaatttatttaa

SEQ ID NO: 1652 - DNA, 237 bp, Staphylococcus capitis
atggaatttagagatcaagttttagacttattagcagaagtagctgaaaatgatattgtaaaagaaaacccagatgtagaaatttttgaagaaggtattattgattctttccaaactgtaggtttacttttagaaattcaaaataaattagatattgaagtatctattatggattttgatagagatgagtgggcaactcctaataaaattgtagaagctttagaagagttacgatga

SEQ ID NO: 1653 - DNA, 1242 bp, Staphylococcus capitis
atgaaatttaaacctttcttacctatcttaattagtggtgtgatattcgttatcttcgtcctattgccagcaagctggtttacgggcttagtaacggataaaacgctagctgataatagaatttctttaacagatcaagtattaaaaggcacgctcattcaaaataaactatttgagtcagataagtattatccaatatatggttcaagtgaacttggtaaagatgatccttttaatccaggtattgcattgaataaacataattcaagcaaacaaacgtttttactcgggactggaggatcaacggatttgattaatgcagttgaattggcatcacaatacgataatctcaaagggaagaaattaacatttattatttctcctcaatggtttaccaatcacggtttaacaaatcaaaactttgatgctcgtatgtcacaaactcagatcaaccagatgttcaatcaaaaaaatatgcctgctgacttaaagaaactttatgctcaacgattattacaatttccgcatgctcacaataaatcatatttaagagagcaagcgaaacatccaggggaagtttcaggtaactatatttctgcatttaaagaaaaccaacttataaaaattgaagcaattaaatctctattctcatttaaaaagcctccattagcacatgttaaacctgctactgaagaagatgcatcttggaatgagatgaaagataaggctatagatattgggaaggctaatactaaaactaacaaatttgatattagagacccatactggaagttaattaaagagaataaacgtaaaataaaacgtgattatgaatttaatattgattctccagaattccaagacttacaattattagtgcaaactctgcatgaagcaggtgcagatgtacagtacgtaagtattccatcaaatggtagatggtatgatcatatcggtatagataaagatagacgtgagtctatttataaaaaaatccattctactgtagtagataatggtggtaaaatttatgatatgacaaataaagattatgagaaatatgtaattagtgatgctgttcatattggatggaaaggttgggtgtatgtagaccaacaaattgctaaacatatggatggtaaagatcctaaaaatcataaagttgattactccaagaatcagccaccaaaaaaagaccacaaagcccatgaccatcacgaaaagaagcatcatgatgaataa

SEQ ID NO: 1654 - DNA, 243 bp, Staphylococcus capitis
atgcctactgaaaacgcaacgatgttcgatcaagtagctgaagtcattgaacgcttacgtccatttttattacgcgacggcggtgactgtacacttgttgacgtcgaagatggtattgttaaattacaattacacggtgcttgtggtacatgcccaagttctacaatcactttaaaggccggaattgaacgtgcactacatgaagaagttcctggtgttatcgaggtagaacaagtattctaa

SEQ ID NO: 1655 - DNA, 321 bp, Staphylococcus capitis
atgactaaaataagtgttgtggtttatggagctgatgtaatttgtgcaagttgtgttaacgcaccaacatcgaaagatacatatgaatggcttcaacctttgctaaaacggaagtttccagaacatcattttgaatttacatatattgacattaatcgagatacagagaatttaacagatcatgacgaacagtttattgaaagaattcaagaagacgaattgttttatccattagtaacgatgaacgatgagtatgttgctgacggttacattcaaatgaaaccagttgtacgctttatagaaacgcattttgaagcgtag

SEQ ID NO: 1656 - DNA, 1065 bp, Staphylococcus capitis
atgaaaaacttagttttactaggcgggggttatggtaatatgcgaattatgtcacgtatcttaccaaattcaattcccgaggggtatcaagtgacgttagtcgatcgaatgcctttccatggattaaaacctgaattctatgcactagcagcaggtacaaaatcagacaaagacgtacgtatgcaatttccagataataaacaaattaatacagtatatggtgaaatcaatgatattaatttagaggaacaaatcatttctgtaggcaattctaaaatcgactacgacgaactcattatagggcttggttgtgaagataaataccataatgttcctggcgctgaagaatatacacatagcattcaaacattatctaaatcacgtgaaacctttcatagtatcagtgaattacctaccggtgcgcgtgtaggaattgtaggagctggacttagtggtatcgaattagcaagtgaattacgtgaaagtcgttcagatttagagattcttctatacgatagaggccctcgtattttaagaaatttccctgaaaagctaagtaaatacatatcaaagtggttttctaaacacgacgttactgtagtaccaaattcagttattgatcgcgttgaacccggtaagatatataataacggtcaacctgaagatattgatttagtagtttggacagcaggaatacaacctgttgaagttgtacgtaacttaccaatcgatttaagcaatacaggacgtgtcattcttaatcaataccatcaagttccaacttataaaaatgtgtatgtagtaggagattgtgcagatcttcctcatgcacctagtgcacaattagccgagctacaaggtgatcaaattgccgatgtactcaaaaaacaatggaataatgaatcactaccagataagatgcctgaaattaaaatccaaggcttcttaggttctcttggagataaacaaggtttcgcatatataatggatcgtacagtcactggtcgtttagcttcaattttaaaatctggtgtgctttggctttataaatatcataatggttaa

SEQ ID NO: 1657 - DNA, 213 bp, Staphylococcus capitis
atggcaaagggcggagatatcgtctatgaaaaattggaaaatgatccagacgtagatgtattagaatacggatgcttgcaaaattgtggcatgtgctctagtgggttgtatgtacttgtcgatggtgatattgttgaaggtgattcgccagaggatttattaaacaatatttataaacacattgaagaaaacgatattacaaatatgttttaa

SEQ ID NO: 1658 - DNA, 360 bp, Staphylococcus capitis
atgccaacagtaatcttaactgaagcagctgcatatgaagtaaaagatatgttagaaagtaatgatatggcagatggctatttaaaaattaaagtgaatggtggcggttgtacagggctcacatatggaatgtctgccgaagaagcccctggtgagaacgatgaagtattagaatactttggacttaaagtacttgttgataaatatgatgcaccagttttaaatggtacaacaattgatttcaaacaatcacttatgggcggtggcttccaaatagataacccaaatgcaatagcatcctgtggttgtggaagctcattcaaaacggctaaagtatcaggtaaccctgaacaatgctaa

SEQ ID NO: 1659 - DNA, 1209 bp, Staphylococcus capitis
atggctcaagatcgtaagaaagtgctagttttaggtgccggttatgctggtttacaaacagttactaaattacaaaaagaaatttctgcagacgaagcagaaattactttaattaataagaatgaatatcactatgaatcaacttggttacatgaagcttctgctggtacaatcaattatgaagatttattatatccagttgaaagtgctgtaaaacaagataaagttaacttcgtagttgctgaagtaacaaaaattgaccgcaatgctaaacgcgtcgaaactgacaagggagtatatgactacgatatcttagtagtagctttaggtttcgtaagtgaaacatttggcattgaaggtatgaaagactatgcttttcaaatcgagaacgtattaacttctcgtaaattatctcgtcacattgaagataaatttgctaattacgcagcttctaaagaaaaagatgataaagatttatcaatcttagtaggtggggctggcttcactggaattgaattcttaggtgaattaacagatagaattccagaattatgcagtaaatatggtatcgatcaaagtaaagttaaattaacttgcgttgaagcggcaccaaaaatgttaccaatgttctctgatgaacttgtaaactacgcggttaattacttagaagaccgtggtgtagaattcaaaattgccactccaattgttgcttgtaacgaaaaaggtttcgttgtagaagtagatggagaaaaacaacaattagaagctggtacttcagtatggactgctggtgtacgcggtagtaagttaatggaagaatcatttgaaggtgttaaacgtggtcgtatcattaataagcaagatttaactatcgaaggtcacgatgatatttttgttattggtgattgttcagcattcattccagctggtgaagagcgtccattaccaacaactgcacaaattgctatgcaacaaggtgaacatgttgccaaaaatatcaaacatatcttaaatggtgaatctaaagaagacttccaatacgtaaatcgtggtacagtatgctcattaggtgctcatgatggtgtaggtatcgtttacggtagagatattactggtaaaaaagctgcattaatgaaaaaagttattgatacacgtgccgtattcaaactcggtggtatcggcttagcattcaaaaaaggtaaattctaa

SEQ ID NO: 1660 - DNA, 1482 bp, Staphylococcus capitis
atgaacatttacatcaatgaaaaatctaacacatatattgaaacgctcatcgtgggattaccagaacacattaatcaattaagagacattaaatataagaatcaatcaattattgaacaacttgagacgttgaagcaacatcatattattggaagctcggttggaaagatatcttccactttgctttacataaatgatcagccaaagcgcttgttaacagtgggattaggtaatcttaaagagctttcttatcagcgattattaaaagtttggggatatacgtttcagtatttaaaacaagaacatattaatgaagctgaagttcttatagatacatttatgtctaaacataatgatgtagtagaggtggctaaaactctcggattgcagagtgaacaatccatttatcaatttgataattataaatcagataaaaaagcgccttatcaaccatctatttatatacaaactgaacatgatgagattgcttctgatattaatgaaggtcaacaactagggatgtctattaatttagcacgtgagctaagtcaaatgcctcctaacatattaacaccacaatattttgctgaagaaattgagggtcattttaaagataaaaaggtatcagtagatattaaagatgcggaaacaattgtatcagagggctttgggcttttacatgcagtcggaaaaggttcggtgaatggtcctcgtttaataacaataacttacaatggcggaaagtcgaatgatgcacccattgctttagtaggtaaaggtattacatatgactcaggtggatatagcattaaatctaaaatcggtatgcagacgatgaaattcgatatgtgtggggccgcaaacgttgttggaatgatagatattatcgagagattaaaattgccagttaatgtagtgggagttattgcttcagctgagaatatgattaatgaaaagtctatgaaaccagatgatgtttttacctcactcagcggcgaaactgttgaaatgttaaatagtgatgctgaaggacgtatggtgctaggtgatgccgttacatatgctacgcaatttcaaccacaacttattatggatttcgccactttaactggtgcagcaattgtggcacttggagaggataaagcagctgcttttcactctcacgctaaaaatgaaatcaacagtctgttagatatagctaaatcagtagatgaaaaagtgtttgaattacctatcacagatactgaaaagcagttaattagaaattcagacatagcagacttagtcaatcatacgaatggacaaggtaaagcattatttgcagcagcatttattacgcattttagtggtcagacaccccatatccattttgatattgcaggaccagctacgattaataaatcaacttttaaaggtccaaaagggccaacaggttatatgattcctacagtagtagaatggttgaaacaacaataccagtaa

SEQ ID NO: 1661 - DNA, 1317 bp, Staphylococcus capitis
atgatcaatgcagttgttatagcagttatattaatgatcgtcttatgtttatgtagactcaatgtagtcattagtttatttataagtgcactcataggtggtttaatttctggtatgagtgtagagaaagtcatcagtgtttttgggaagaatattaccgatggagcagaggttgctttaagctacgctttactaggtggttttgcagcactcatttcttatagcgggattactgattatctcgttggaaaaattattgaaggcatccattcagaaaatagcagactttcacgtataaaagtaaaagttattattattcttgctttattagcaatgagtattatgagccaaaatcttattccagtacatatagcttttattccaatagttattcctccattaattagtttattcaatgatttaaaaattgatagacgactcattggtttagtaatcggatttggtttatgctggccttacgttttacttccatatggctttggtcaaatcttccatcaaatcattcaaagtggtttccaaaaagcgcatcacccaattgaattcagtatgatttggaaggcgatgttaattccttcaatgggatatattgtaggacttatattagggtttatcgtgtatcgtaaaccaagaaactacgtacaacgtaatgttgatgaacgtgaaacagtcactgaattaaagccttatgttttaattgtgacaatcattgcgattttagcgacatttattgtccaaacttttacagattcaatgatttttggtgcgcttgcaggtgtgctcgtcttctttatttctagagtttataagtggtacgaactagatgaacagtttgttgatggtattaaaattatggcgtatattggggtagtaatactgacagctaacggctttgcaggggttatgaatgcaacgggtgatattgatacattggttaaagatttaacaagtatcactggtgatcataaattaattagtattattgtcatgtatattattggtcttattgttactttgggtatcggttcttcatttgcaacgataccaattatcgcatcattatttataccattcggcgcatctattggtcttgatactatggcgcttatcgccttaattggtacggcaagtgctcttggtgattcaggttcaccagcgagtgattctactttaggcccaacggcaggactcaatatcgatggacagcacgatcatatacgagatacgtgtattccgaacttcttgttttataatatacctctaattatttttggtacgattgcagctatggtactataa

SEQ ID NO: 1662 - DNA, 348 bp, Staphylococcus capitis
atgcatgttgaagaagaggatgaaggtgttgtaataatttcaatgcctgttacagacaaggttaaacaaccattcggatatttacatgggggtgcaagtctcgccttaggtgaaacagcatgttctttgggtgctgctaatttaatagatacaactcaatatattcctcttggcttagaaatgaatgctaaccacatacattcaacaaaagagggacatgtcacagcaattgctaagatcatacatcaaggtcgtacaacacaagtatggaatgttgaaatcaaaaatgactcgaatcaattaattagtattatgcgtggcactattgctatcaaatcaatcaaataa

SEQ ID NO: 1663 - DNA, 1161 bp, Staphylococcus capitis
atgcattggactattattggtggcggaattcaaggtacaactgtagcaattaaactaagaaatgaaggaataagtagcaatcaactaactattattgatccttatccttccctatgtgaacaattcaacgagtataccaaacgtataagtatgcctttcttaagatcgccatttgtgcatcatatacatccccaaccttttcatttaaaacaatatgctaaattaaatcaatatacttcggcatattacggcccatataaacgtcctcaaagagatatgtttatgcatcatattcatgatttagtacatcaatacgatttaaataaaagtcatattcaaagcattgcttctaaaattatgagtaatcaacaaggtaaatggcaaattgaattacataacggggagtcaatccttaccgattgcgtagttattgcaaatggatgtaatcatcaaccatttataccttcgcaatttattagtaaacctaaagtgactcatatatttgataagaattatgatcaaacaattgaagaaaaagctaatcatattgttggttcagggatttcagcagcacatttaacgttaaaattaattaatcgtcaagaaaataataataaattacatttatggcttaataaaaacattgaaatacatgattttgatgcagatcctgggtggttgggcccaaaacgcatgaatcacttgctagcaatatcttcaccagaagcgcgtttaaacgtcattaatgaagaacgtcataagggctcaatgcctatggagttatttttacgattgaagaaacaagaacaagcgggtcggttaatgattcatcattcacctatagatgaaatcaatgataagactatcacttccaatggttgtcattataaatatcatcatattttacttgccactggctttgttaataaaatctgtaatcaacctttgattcaacatcttatctatgatgaacaagccccattaaattcgtgtggctatccttcattaagtgatgaacttgaatggctacctcaattgtttgttgtggggggacttgctgatttagaattgggaccctttgcgagaaatatcatgggtggaaaagaaggtgctgagagaattagtaaagcattacatcgtttaaataaaaagatatcataa

SEQ ID NO: 1664 - DNA, 357 bp, Staphylococcus capitis
atgataacaacgatcatcattagtattgccgtaatctttgtcatgttaggtgctttgattagtgcctttgcagcgataggcttaatcagactaaaagatgtttactcacgtgcccatgctgctggtaaagcagcaacacttggggcgatgtttctactctttggtgccttcctgtatttcatcggcactgaaggctacgtcaatatgcaattaatcatcggcattatcttcgttttcataactggtccactttctagtcacatgattatgaaagcagcctacaatattcaaacaccttacagtaaagatacaaaagttgatgaaattaaagaagatatgaatgatacaaaattatag

SEQ ID NO: 1665 - DNA, 294 bp, Staphylococcus capitis
atgacacataatattttcattattattgcattaattattgttgtagcttcaatgttagccatgttagtacgtgtcattctgggcccttctttagccgatcgtgttgttgcacttgatgctattggactacagttgatggctgtgattgccctatttagtattttattaaatattaaatacatgcttgtagttattttaatggtaggtatactagctttcttaggtactgcagttttttctaaatttatggatgaaggtaaggtgattaaacatgataacaacgatcatcattag

SEQ ID NO: 1666 - DNA, 483 bp, Staphylococcus capitis
atggccgcacaatttatcgtcaatttattggtcgctatcatttggttatttgtaactgatagttacacgttaaataactttgttctaggatttctatttggtcttatacttgtttacctcctacatcgggtaatgccaggtcgcttttatttagtaaggatttatcgcattattgtattaattcttacatttttaagtgaactgattaaagcgaatttcgatgttctgaaaatcatcctcaaaccaaatatcacgaataaaccaggttttttcgtgtatgaaacagatcttaagacagactggcaaattgtcttactttcaaatcttattacgttaaccccaggaactgtggtattaggcattagtgatgatcgtaggaaaatatacattcatgcgattgactttagtactaaagaggaagaagttgaaagtataaaaacttcattagaaaaggtagtaagaaaggtgggtgaaaacgaatga

SEQ ID NO: 1667 - DNA, 1497 bp, Staphylococcus capitis
atgacggaaagtaacttgctcgttttaacacttgtgatacctattttgactgcaatcttgcttatctttatcggaaagcgtccgctaattaaacgttacgtggcacttgctggatcaatattgacattgattgtagctctttttaatttaaaaaatgtattacattcaggacctttaaaagtagatttaggttcatggaaagcgccatacagcattgtctttgtattagatgtttttagtgctttacttattatcacaagtattattataacggttatagtaattttatattcctatcgttctataggcattgaaagagaacgatattattactacttttcaattatgtttatgttaatcggtattatcggcgctttcactactggtgatatctttaatatgttcgtgttctttgaagtcttcctaatgtcttcttattgtttactagtcgttagaacgacaaaaattcaacttcaagaaacgattaaatacgttctagttaatgttgtttcttcttcattctttgttatgggtgtagcgatactttattcagtagttggaacacttaacttggcgcatattagtgaaagattatctagtttatcagttcatgatagtggcttagtcaatatcgtattcatcttatttatctttgtctttgcaactaaagctggcgtcttccctatgtacgtatggttgccaggcgcatattacgcaccacctgtagccattatcacattctttggagccctgcttactaaagtgggcgtctacgctatagctagaacgctcagcttattctttaatagtacggttagcttttcacactacgtcattctattcttagctttacttacaatcatcttcggatgtgtaggtgccatagcttattatgatactaaaaaaatcattctatataacattatgattgcagttggtgtcatcttagtcggtgtatcaatgatgaatgaaagtggcatgatgggtgctatttactacactattcacgatatgctagtgaaagcttcactattcttacttataggcgttatgtataagataactaagtcaacagacttgcgacatttcggtggtctaatcaagagctatcctgtattaggatggacattctttattgctgcactcagtctagcaggcataccaccattgagtggtttctatgggaagttttatattgtacaggccacttttgaaaagggattctacctaagcggtatcattgtcttattatcaagcttaatcgttctatattcagtcatacgtatctttctcaaaggtttcttcggtgaagcaaaaggttatgatatgacacgcaaagtgaacgtcaattacttaacaactatcgccgttatttcaactattattacagtattattcggcttgtccgctgacttactgttccctatagttaaagaaggttctgaaactttcactgatccaaatatctatattcacaacgttttaggaggtaagtaa

SEQ ID NO: 1668 - DNA, 348 bp, Staphylococcus capitis
gtggaaattatcatgatatttgttagtggtattctcacagcaataagtgtctatctcgttttgtctaaaagtttgatacgaattattatggggactactttactaacacacgcagcaaatttatttttaattactatgggtggattgaaacatggtactgttcctatctatgaaaaaggaacagccagctatgttgatcctatacctcaagcactaatccttactgcaatagttatcgcatttgctacaacagcattcttcctagtacttgcatttagaacttataaggaacttggaacagataatgttgagcgtatgaaaggagcacctgaagatgacggaaagtaa

SEQ ID NO: 1669 - DNA, 429 bp, Staphylococcus capitis
atgaatagacaaaagaataacttaatgtttcaatacgccgctgttgtcattttcttcatggtcatcgtcttcggtttctcattatttctagcaggtcactatacacccgggggtggcttcgttggaggtttattgtttgcgagtgcgctattagtcattacaatcgcattcgatgtaaaaacaatgcgtaaaatttttcctctggacttcaaagttttaattggcataggcctactgttttgcgtaggtacacccattgcaagctggtttatgtctaaaaactttttcacacatgtcacttttgatataccgcttcccctactagaacccatgcatatgacaacggcaatgttctttgattttggggtactttgtgcagtagtaggaactgtaatgactattattatttcgattggagagaacgaatag

SEQ ID NO: 1670 - DNA, 2052 bp, Staphylococcus capitis
atgggtgcaatgctaggagttgtactttcagataatttaattattttatatttattttgggagttaacttcattttcaagttttttacttatctcattttggaaagagaaaaaagcatcaatttatggtgcgcaaaaatcactaattattaccgttttaggcggattaagcttattaggaggaattatcctattatcgttagccgcccatacattcagcattcaaacgatgattgaaaaagtaagtgacatacaaaatagtcctttctttatcttggcaatggtattagtcatgattggcgcgtttactaaatcagctcaagtaccattttacatttggctacctgatgcaatggaagcacctacaccagtaagtgcttaccttcattcagctacaatggttaaagctggactgtatttaatagcaagaatgacgcccatctttgctatatctgaaggttgggtatggacaatcactttagtaggattagtcacacttttttgggcttcattaaatgccacaaaacaacaagatttaaaaggcattttggcattttcaactgtatctcaacttggaatgattatgtccatgttaggtataggtgcagtgagctatcactacaatggtactgatagccaagtttatgttgcaggtttcattgctgccattttccatttaatcaaccatgcaacatttaaaggtgcattattcatgattactggtggtgttgatcactctacaggtactcgagatgtaagaaaattaggtggattacttacaatcatgcctatatcatttactatcacagttattactgcattaagtatggctggagttccaccatttaacggcttcttatcaaaagaaaaatttttagaagcaatgattgatgtgacacatgcgaatttaatgagcctcagtactttaggctttatattcccaatcatagcgattgtaggtagtattttcactttcgtgtattcaattaaatttattatgcatatattctttggtaaatataagcgtgaaagtttaccacaatctgcacatgaatcatcaattttaatgcttttatctccaattattttaactcttttagttattgtatttggacttttcccaagcactttaacgcaatctattatcgagcctgcaactcaatcagtgagtcaatctacaggaataactgcagagttccatcttttccatggaattacaccagcatttatttcaacaatagctatatatattataggtatattacttatcattacatttagctattgggtgcgattattagaagctcaacctaatcaacttaaatttaatcattggtacgatactatgggacgcaagattccaggttattctgaaaatatgaccaatagctatgttactggtttctctagaaataacttagtcattatattcggtattttaatactacttacagtagtgactttaatcagcgttccatttagtattaattttaaaaatgtaagtcagttcagaatttttgaaggtggcattgtactattcttactcgttgcctcacttttaattatatttgctaaatcacgactctttagcattattatgctaagtgctgtaggttatgcaatttcagtattatttatattctttaaagcacctgacctagctttaactcagtttgttgttgaatctatttctacggctttattcttattatgtttctatcatttgccaaatttaaatcgttataatgagtcgccagcgttcaaaattaacaatgcaatgatttctgctggtgttggtttagtagtcattattctaggtttaatcggatatggaaacagacatttttcttcaattacaaaatactaccaagaccatgtatatgatttagctcatggtaaaaatatggtaaacgttatacttgtcgacttccgtggcatggatactttatttgagtcatccgtactaggtatagctggtttaggtgtttatacgatgattaaacttcgacttaaacaaagaaatcaatcaagcgaggtgaatgaccatgaatag

SEQ ID NO: 1671 - DNA, 381 bp, Staphylococcus capitis
atgttatatcgattttctcacaagactggtagttatggtgtaactattagagaagagaatgacgatcaagttttagtacaagttgaacaagtcattaaacaccctaaacaaggtgatttacataatcctaacgaaactaaaggtgtcttctttcatgagcgtaaggctttaagccactttgaaaaacgatatgcaaaacgttcacagctacgagaattcaatgtagaagaaatgaattacgaggattcacttcaacaagctattacagatttagaacatcaattaaaggatgatgattctgaacatgcacgtctctcacttaaaaatttaaatgaacttaaagaggattattcaattcaatataaaagagaatttgtctaa

SEQ ID NO: 1672 - DNA, 594 bp, Staphylococcus capitis
atggcgaactatcctcagttaaatacagagattcaagataacgaaattaaagtcgttatgcatacaaataagggagatatgacttttaaacttttcccaaacattgcccctaaaacagttgaaaattttgtgacacattctaagaacggatattatgatggcgtgacattccatagagtaatcaatgattttatggttcaaggtggcgacccaactgctactggtatgggcggtgaaagtatctatggtggagcattcgaagatgaattctctttagaagctttcaatttatacggtgcactttcaatggcaaacgctggaccaaatactaatggttctcaattctttgtagtccaaatgaaagaagttcctgaaaatatgctaaatcaattacttgatggtggctggcctcaacctatagttgaagcttatggtgaaaagggtggtacaccttggttagaccaaaaacacacagtatttggtcaattgattgatggggaatctactttagaagatatcgctaatactaaagtaggcgctcaagataaaccagtttatgacgtggttatcgaatctatcgacgttgaagaataa

SEQ ID NO: 1673 - DNA, 381 bp, Staphylococcus capitis
ttgaataatcactataaagtaggtcaacatatcaaggtacgtgtgactggtattcaaccgtatggcgcatttgttgagacccctgaccatactgaaggactaatccatatctctgaaatcatggatgactatgtccataacttgaagaaatttctatctgagggacaaattgtaaaagctaaaattttatccatcgatgatgaaggaaaattaaacttgtctttaaaagataatgattactttaaaaattatgaacgtaaaaaagaaaaacagtcagtcttagatgaaataagagagacggaaaagtatgggtttcaaacacttgaagaacgcttaccggtctggatcaaacagtctaaacgtgccattcgtaacgactga

SEQ ID NO: 1674 - DNA, 1128 bp, Staphylococcus capitis
atgaataataaatataaatctttattcgaaccactcgtgttacctaatggtgtagaattgagaaatcgttttgttttagctccattaactcatatttcatcgaatgatgatggaacgatttctgatgtagaaattccatatattgaaaaacgttctaaagatgtaggacttgctattaatgctgcaagtaatgttaatgatgttgggaaagctttcccaggacagccctcagtagctcatgattctgacattgaaggcctaaaagaacttgcaaaagcaatgaagaaaaatggtgcgaaagcaatagtacaaattcaccatggtggtgctcaagctttacctaatctaacaccacaaggtgatgttgtcgcacctagtcctattacactcaagagttttggtcagcaagaacctcacgaagcgcgtgagatgacttctgacgaaatagaacaaacgattaaagattttggagaagcaacaagaagagtgattgaggcaggttttgatggtgtagaaatccatggcgcgaatcattaccttatccaccaatttgtgtcaccttattataatagaagaaacgatgtttgggcagataatcttaaattcccaatgtcagttatagaagaagttgttaaagctaaaaaagaatatgctaatgatgacttcatagtgggttatagattgtcacctgaagaagcagaatctccaggtatatcaatggaaattactgaacaacttatcaatcaaattgcgaatcaaccgttagattatattcatatttctctcatggacgttaattctgaaacacgagatggtaaatacaaaggtgaaaatcgtcttaaactgattcatcattggattaatggtcgtatgcctcttattggtattggatcaatatttacacctgaagatgcgttaaatgccattgacaatgtcggtgtagaacttgttgcgttaggtcgtgaaattcttcttgattatgactttgtcggcaaaattaaaaatggacaagaagatgaaattattagtgagtatgatccgaatagagaagatcgtcatgagttaccaccaaatttatggaaacaatttgatgaaggattctatccattgcctcgtaaagataaataa

SEQ ID NO: 1675 - DNA, 1191 bp, Staphylococcus capitis
atgactaaatctgaacaaattattgaattgactaaccactatggtgcacataactatgtaccacttccaatcgttatttcggaagcggaaggtgtatgggttaaagatccagaaggaaatcaatatatggacatgctttcagcttattctgcggtaaatcagggacaccgtcatcctaaaattattcaagctttgaaagaacaagcagataaagtgactttagtttctcgcgcatttcatagtgataacttaggggaatggtatgagaaaatttgcaaattggctggtaaagataaagcattacctatgaatactggtgctgaagcagtcgaaactgcattaaaagcagctcgacgttgggcttatgatgttaaagggattgaacctaaccaagccgaaatcatagcgtttaatggtaacttccatggtcgtacaatggctccagtatcactttcatcagaagctgaatatcaacgcggttatggtcctttactagatggtttccataaagttgattttggtgatgttgataagttgaaagaggcaattaatgagaacactgcagcgattttagttgaacctattcaaggggaagctggtattaatgtaccaccagaaggttatcttagagagattagagaattatgtgatgaacacaatattttatttattgcagatgaaatccaagcaggtctaggtcgttctggtaaactatttgctacagattgggataatgttaaaccagatgtctacattttaggaaaggctttaggcggaggcgtgttaccaatttctgtagttttggcagataatgaggtgcttgatgtatttacaccaggatcacacggttcaacatttggaggtaatccgcttgcttgtgcagtttctattgcagcattagatgtaattatagatgaagacttgccgggccgttcattagaactaggtgaatacttcaagggtgagcttcaaaaaattgaacatccttcaattaaggaagttcgcggaagaggtttattcattggtatagagcttaatgaaagtgctagaccatattgtgaagccttaaaagaaaaaggtttattatgtaaagaaacgcatgatacagtaattagatttgcaccaccattagttatcactaaagaggaattagacctagcattagataaaattagaagtgtatttgagtaa

SEQ ID NO: 1676 - DNA, 1245 bp, Staphylococcus capitis
atgactgagaataataatttagtgacttccactcaagggattattaaagaagcattacacaaattgggatttgacgatggaatgtacgatcttattaaagaaccattaagatttttacaagttcgcattccagttcgcatggatgatggtacagttaaaacttttactggatatcgtgcacagcataatgacgccgttggacctactaaaggtggggtacgtttccacccagaagttgatgaagaagaagttaaagcgttatcaatgtggatgacgttaaaatgcggtatcgttaacttaccgtatggtggtggtaaaggtggtatcgtttgtgacccacgtcaaatgagtattcatgaggttgaacgattatctcgtgggtatgtaagagctatttctcaattcgttggaccaaataaggatattccagcaccagacgtatttactaactcacagatcatggcatggatgatggatgagtatagtgcactagataaatttaactcaccaggtttcatcactggtaaacctatcgttttaggtggttcagaaggtcgagaccgttcaacagctttaggtgttgttattgcaattgaacaagcagccaaacgtagaggtatgaatgttaaagacgctagagtagttattcaaggttttggtaatgctggtagtttcttagctaaatttttatatgacttaggtgccaaagtagttggtattagtgatgcttatggtgcattacatgaccctaatggtttagatatagattatctattagatcgtcgtgatagtttcggtacagtgactaacttatttgaagaaacaatctctaaccaagaattatttgaattagattgtgatattttagtacctgctgcaatctctaatcaaattacagaagataatgcgcatgatattaaagctgacattgttgttgaggcggctaatggtccaacaactccagaagctacacgtattttaactgaaagaggtattttacttgttccagacgtattagcaagtgctgggggagtgacagtatcttatttcgagtgggtacaaaataaccaaggttactactggacagaagaagaagttaatgaaaaattacgtgaaaaattagtcactgcatttgatacaatttatgaattagctcaaaacagaaaaattgatatgagacttgccgcgtatattgtaggtattaaacgtacagcagaagctgctcgttatcgtggttgggcttaa

SEQ ID NO: 1677 - DNA, 1017 bp, Staphylococcus capitis
atgttcaaatctaaaagaatagttttgacgagtttggtcgtgctatttataggtatcatttgtattactacctctaacttccttaatactaaaggagttaaagccaatcaaagtcaaacacaacaaacaactaatacaactcaagataatcattttaaacgtcaacctgaatctgattcagtaagtggaaaaacaaacgattcacatcctcactgggctactaatcctacaggagaaaaatatacaactatagctcatagaggtgcaagtggttatgcacctgaacatacttttcaatcttatgataaaagtcataatgaattaagcgcctcttacatagaaattgatttacaacgtacgaaagatggtcatttagttgccatgcatgatgaaacggtaaatcgtactacaaatggccatggacgcgtagatcattatactttaaaacaattaaaacagcttgatgctggaagttggtttaacaaagcaaatcctaaatatgccaacaagaactataaaaatgcaaaagtacctacgttagatgaaattttagatagatatggcaaaaatgccaactattatattgaaacaaaatcaccgaatgtttatccaggaatggaaaaacaattacttaatactctaaatcaacatggtatgttaacaaatagttcattaaaaaatggacatgtgatgttgcaatcattttccggagatagcttacaaaaattacatcaaatgaatccgaatgtacctttaattaaactaatgaataaattcgaattaacaaacgcttcagaacaagatttaaaagcgattaaatcatatgcagtgggtgtcggtccagaatacacggacttgaatataaaaaatactagacacttaaaagatttaggtttcctagtacacccgtatacagtaaataaagttaatgatatgagacgtttaaatcagtatggtgtagatggcgtcttcactaactatgctgatttatataaagcagtttcaaaacaacaataa

SEQ ID NO: 1678 - DNA, 1377 bp, Staphylococcus capitis
atgagcagtaaagcttggggaggtagatttgaagctcaaccagaagattgggttgatgactttaatgcttcaatcgaatttgataaaaatttaattaatcaagatattcaaggtagtattgcacatgccacaatgcttgcgaatcaacatatcattacacaggatgaagctcagtctatcattcaaggactaaaaaatattcaaaaggattttaatgaaggtaatattgaattcaaagcatcattagaagatatacatctaaatattgagcatgagttgattcaacgtattggggaaactggtggtaaattgcatacaggacgtagtagaaatgatcaggttgctacagatatgcatttatatacaaaagaagaagttcaaaatattatcgaattaatcaaatcatttcaacatgaaataattaaacttgctgaagaacatgtagatacgataatgccaggatatacgcatctccaacgtgcacaacctatttcttttgcacatcatgtaatgacttacttctggatgttagagcgtgataaaggacgcttcaatgatagtctgaaacgtatcgatatatcaccactaggcgctgctgctttaagtggtacaactcacccaatagatagacatgaaacacaagctcttttagattttgctaatatttatgaaaatagtctcgatgcagtgagcgaccgtgattacattatcgaaacgttgcataatatttcattaactatggttcatctatctcgttttgctgaagaaattattttctggtctacggatgaagctaaatttataacactatcagatgctttttcaactggatcatctattatgcctcaaaagaagaacccagacatggcagaattaattagagggaaagttggacgaacgacaggtcacttaatgagtatgctagttacgcttaaaggtttgcctctagcttacaacaaagatttacaagaagataaagaaggtttattcgatgcaattcatacggtcaaaggttctctacgcatctttgaaggtatgatagcttcaatgactgttaatactgatcgattaagtgaaactgtaaaaaaagatttttcaaatgccactgagcttgcagattacttagtaagtaaaggggttccttttagaactgcacatgaaattgttggtaaaatcgtgctaaattgtattcacaaaggtatttatcttcttgatgtaccactatcagagtatcaagcacaacattctagcattaatgaagatatttatgactatttaaatcctgaaaattgtttaaaacgtcgtaaaagttacggctcaacaggacaagattccgttaaacatcaattgaatgtagcaaaatcattattagcttaa

SEQ ID NO: 1679 - DNA, 1206 bp, Staphylococcus capitis
atgaaagaaaaaattgttttagcctattctggcggtttagatacaagcgttgcagtgcaatggttaattgataaaggatacgacgtcgtagcatgttgcttagacgtaggagaaggtaaagatcttgatgttgtatatcaaaaagcattagatatgggagctattgaatgtcacattatagatgcaacaaaagaatttagtgaagattatgtaagttatgcaattaaaggaaatttaatgtatgaaaatgcatatcccctagtttctgcactttctcgtccattaattgctaaaaagctagtggaaatcgctgagaaaactaattctattggaattgcacatggatgtactggtaaaggaaatgatcaagtacgttttgaagtggctattaaagcattaaaccctaatttaaaagcatttgcacctgtacgtgagtgggcttggagtagagaagaagaaattgattacgcaatcaaacataacattccagtttcaatcaatcacgattctccctactctatcgaccaaaatctatggggaagagcaaatgaatgtggtattttagaagatccttatgctgctccacctgaggatgcatttgacttaactacacctctagaacagacacctgataaagcagatgagattattatttcatttaaaaaaggacttccagttcaaattgacggtaaagattatcaactcgatgaccttattctttacttaaatgaattagctggtaaacatggtattggaagaattgaccacgttgaaaatagaatggtgggtattaaatctagagagatttatgagactcctggtgctgaagtattactcaaagctcacaaggcgctagaaacaattactttaacaaaagatgttgctcactttaaaccagttattgaaaagcaattttcagaacaaatctataatggactatggttctcacctcttacagatagtttgaaactctttattgatagtacgcaacaatatgtagaaggtgacgtaagagttaaattatttaaaggcaactcaatagtgaacggtagaaaatcaccatttactttatatgatgagaaacttgctacttacactaaagaagatgcattcaatcaagaagcggcagtaggatttattgacatctatggattaccaacacaagtaaatgcaatgttacatggaggttatagtgatgagcagtaa

SEQ ID NO: 1680 - DNA, 1332 bp, Staphylococcus capitis
atgactcatattcaattagattatggtaaaaccttagaatttttcgacaaacatgaattagaacaacaaaaagaaatcgttaaaacgattcatcatacaattcataaaggtaatggtgcaggtaatgactttttaggttggttagacttaccagtagattatgacaaagaagaattttcaagaatagtggaagcatcaaaacgtattaagtctaattctgatgtacttgttgtaattggaatcggtggttcatatctaggtgcgagagcagctattgaaatgctaacttcatcattcagaacaagtaatgaatatccagagattgtatttgtaggtaatcatttatcatcaagttatactcaagaattagtaaattatttagctgataaagacttttcagtaaatgtaatctctaaatcaggaacaactactgaaccagcagttgcatttagattatttaaacaactagtcgaagataaatatggaaaagatgaagcgaaaaaacgaatttttgcgactacagataaatcaaaaggtgctttaaaacaattagcagataatgaaggatacgaaacttttgtagtacctgacgatgtaggtggaagatattcagttttaactgcagtaggtttattaccaatcgcaacagctggtattaatatcgaatcaattatgattggtgcagctaaagcacgtgaagaattatcatctgaagatttagaacaaaatattgcatatcaatacgcaactattcgcaatattttatatagcaaaggttacacaacagaaatgttgataaactatgagccttctatgcaatattttaatgaatggtggaaacaattatatggtgaatctgaaggtaaagatttcaaaggtatctatccttcaagtgccaattacacaacagacttgcactctttaggacaatacgtacaagagggtcgtcgtttcttatttgaaacagttgtgaaagttaatcatcctaaacatgatattactattgaacaagatagtgaagatttagatggattaaattatttagctggtaaaacaattgatgaagttaatacgaaagcttttgaaggaacactattagcgcacactgatggtggtgttcctaatatcgtagttaacatacctcaactagacgaagaaacattcggctatgtcgtgtatttctttgaacttgcgtgtgcaatgagtggttatcaattaggagttaatccattcaaccaacctggtgtagaagcttataaacaaaatatgtttgcattactaggtaaaccaggatatgaagataagaaaaaagaattagaagatcgcttataa

SEQ ID NO: 1681 - DNA, 447 bp, Staphylococcus capitis
atgcacgcttatgggtcaattccgggaattatcatcagttggttaggcatcgtaactggtacatttactgtatttttagtgtgtaagaaattaattaatactgaaaaaatgaaaaatgtgaagaaaagaaaatctgtacaaagacttataagttttatagatagacaaggtttaatacctttatttattttactatgttttccatttacacctaatacattgattaatttagtagcaagtttatctcatattaaggtaaagtattattttattgttttaactatttcaaaacttatttcaattactattttaggagtaatgggaagagaagtaactactatttttactaatcctattcgcgcattaataatgttattattactcgttgcactttggtttattagtaaaaaagtggaaaaatattttatgggttctactaaggagtga

SEQ ID NO: 1682 - DNA, 537 bp, Staphylococcus capitis
gtgcaacgcacgattaaatatttgatttccttaatttttgcaattattattgtactattcattcaaacatttattgttgttggggcggttataccaaatcatgatatgtctccaactatgaagaaggatgatagagtaattgttaataaaataaaggtgactttcgatttacttaaagatggggatgttatcatgtatagtcgtgacaataaaatccatttcagtagaattgttggtaaacctggagaatcaattgaaattataaatcataacttatatagagatgatagacgcgtcaatcaacaatatggtaaaaatagacaaataaataatattgcattacgagatattaaagattcagatggagatactgtaccacctggttcatattttgtattaaatgataatgatgataaaaaatcagactcaagacgctatggtttaattgataaaaaagatatcattggcgatgtgagtttaaaatattacccttttaaagaatttgcctatgatttttataaattagaagaggtgtga

SEQ ID NO: 1683 - DNA, 576 bp, Staphylococcus capitis
ttgaaaaaagaaatagtagaatggattgtcgccattgccgtagcgctagcacttatatttgtaattgggaaatttattgctaagccgtacactattaaaggtgattcaatggatcctacacttaaagatagtcaacgtgtaatggtaaatattattggttataaaattggtggcgtaaaaaaaggtaacgtcattgttttccacgctaataaaaaggatgactatgtaaaacgtgttattggaacgccaggcgatagtgttcagtataaaaatgacacattatacatcaatggaaagaaacaaaaagaaccatatttaaattataatgaaaagcgaaaacaaaccgaatatattacaggaacatttaaagttaaagacttaccaaatgctaatcctaaaacaaatgtaatacctaaagacaaatacttagttttaggtgataatcgtgaagtaagtaaggatagtcgctcatttggtttaattgataaagatcaaattgttggtaaagtatcatttagattctggccgtttaacgaatttaaatcaaattttaatccggaaaataccaaaaattaa

SEQ ID NO: 1684 - DNA, 3468 bp, Staphylococcus capitis
atggaattaaatacatatatcggtagagctggtacgggcaaatcagcttcgatgttaaattatataaagaatgaaatgaaacatgatcctttaggcgatcccatcgtattaatcgctccaactcagagtacgtttcaattagaacaagcttttgtaaatgattcagaacttaatggaagtttgagaacagaagtccttcactttgaaagattaagtcatcgtatttttcaagaagtagggggatatacagaacaaaaattatctaaagctgctatgcaaatgatgatttatcatatcgttcaacaatatgattcagaacttaaattataccgttctcaatctaaatattatggctttagtgaaaaacttgctgaacagattcaagattttaaaaaatatagtgttacaccggaccatttagatcaatttattacagaacatcaattacaaacaagaacgcaacataaactagaagatattactctaatttataaagaattagaatctcgcatgagcggtgaatttataactactgaggatagtttagagcgttttattgaccaaatgtctaaatctgagtggctcaaacgggcagaaatatttatcgatggtttctacaacttctcaacacttgaatataggattattgaagctttagtacaacatgctaagagtgtcacagttctactaacaacagatggtaatcaagacccattcagtctatttagaaagccatcagaagttttaacacatcttgaagacattgcgaatcaattaaatattcacttaaataaaaccttatttaaacaaaagtttcgatttgaaaatgatgatctcaaacatttagaaagtgattttgatgctttgcaaatgacacctcaatctcattcaaattatgtggaaatacttgaatcttcaaatatgcgtgaagaagtaaatgaattagcaagacgaattattagagatgttcgtgatcatcatttgagatttcaagacattgctatcttatatcgtgacgaatcatatgcatatttattcgaatctattttttctttatacgacattccctttaatatcgatacaaaaaggtcaatgtcacaccatccaattatggaaatgattcgttctttaatagaggtcatacagtcaaattggaatattaacgcaatgttgcgtttatttaaaacaaatgtactaacttcacaatttaagaatagtagctacttaatagatttattggagaatttcgcattagagcgcggtgtatatggtaaacgttggttggatgaggaagtatttcatgttgaccaatttaataaaatgggacgtaaatctcatgctctaacccctcaagaaaaagaaacttacgaagaggtagttcgtttaaagaataacgtcattgataaagttctttactttgaaaaagcgatgagtgacgctaccactgtgagagatttcgcgactgctttttacgaaagtatggaatattttgagctgccaaaccaactcatgactgagagagatgagttagatgtagaaggtaagcatcaacaagcggaggaaatcgatcaaatttggaacggatttattcaaattttagatgatttggtaacagtttttgatactcaagagatgactttgaaacaatttcttgaagtgtttgatataggattagagcaactagaatttgtcatgataccacagaccttagatcaggtaagtatcggtacaatggatttggctaaggtcgataataaacgacatatatacatggtaggtatgaatgatggttcattacctcaaccggtatcttcatctagcttgattacagatgaagaaaagaaatattttgaacaaaatgcacaaattgaactaagtccgacatcagatattttacaaatggatgaagcatttgtttgttatattgctatgacacgcgcacgagaaaaagtaactttttcatatagtttgatgggaaattcaggcgatgaaaaagaaataagtccatttttatcacaaattaaagatttatatcatcatttagatatagttaatattcaacaagaacatgaagaacaaccaataagtcttatgcaacatgtgcatcaaactaaaattgaattatttgatgcattgcgtacatggttagaccatgaggacgtggatataagatggctagatgcataccaagtgattcgagatgatgagcaattaaatgatggattggattatcttatcacttctctaacttatgataatgaaacagtacaattaaatgagacactcacaaagcaattgtatggaacaactattaatgcaagtgtgtcacgttttgaaggctatcaacaatgtccatttaagcattatgcctcccatggtttaaggttaaatgaacgttcgaaatatgaattacaaaactttgatttaggagatatattccattcagtgctcaaacatatttctgaccgtgtagaaggtgactttaaaaacttagatcgtaagaagattaaagagctaactgaagaagcattagagttgatactgcctaaagttcaattcaacttattgaattcaacagcctactataagtatttatctagaagaataggttctatagtagaaacaactttaaatgcattaaagtatcaaacaggcttttcaaaatttataccgcaaaggtttgagacaggattccgaaaatcacctagaaataaagatgaattagttacgcaacctctacatactaaacagggaatcccaattaacataagaggtcaaatcgatcggattgatacgtatactaaaggcgatcacagttatgtaaatatcattgattataaatcttcaactggtagtgcgactttagatttaacgaaggtgtactatggtttgcaaatgcaaatgatgacttacatggacatcgtcttacaaaataaagatagattagaacttactgatatcgttaaacctggtggattactttatttccatgtccatgaaccacgtattaaatttgataactggtctaaaattgatgaagataaattaaataaagaactaattaaaagtttcaaaatgagtggtcttgtaaatagtgatgaggaagtaatagatgctttagataagcgtttggaaccaagttttaattcagatatcgccccaattggtttaactactaaaggtgccataagtaagaatacgagtcgtgtagcgaatgaaaacgttattcgtcaatttattcagcacaacaaaaataactttatcgatacggctactcacattatggatggccatacagaggtagcccctttaaaatataaaaatactttaccatgtcaattctgtagttatcagtcagtatgccatgtggatagtatgatagatagtaaacgctatagaactgtagacgagtctattaaacctatagaattaatccaaaatatgattgacgaaggtggtgaccagtga

SEQ ID NO: 1685 - DNA, 3657 bp, Staphylococcus capitis
atgataccaactaaacctaatgacgtaatttggactgacgcacagtggcgtagtatatacgctaaaggtcaagatgtactcgtcgctgctgccgctggttcaggtaaaactgccgtattagttgaacgtattattcaacgtattctccgagataatatggacgttgatcgtttactagttgtaacatttacaaatttaagtgcgcgtgaaatgaagcatcgcgtagatcaacgtattcaagaagcttctcttgcagaacctgaaaatgaacatttaaaaaatcaacgtgttaaaattcatcaggctcaaatttctacattacacagtttttgtttaaaattaattcaacaacattacgatgttttagatattgatcctaattttagaacaagtagtgaagctgagaatgtcttattattggatcaaacaattgacgatgttcttgaacgtcattatgacattttagactcagattttatcgagttaactgagcaattatcctcagatagaaatgatgaccaatttagaaatattattaaacgtttgtacttctttagtattgcgaatcctaatccattcgaatggttagatcagttatctcaaccttataaaaatgaaggccaacaagatcaattgctgaaattacttaatgatttggcaatgatatttcttaaagctgcttatgaagagattataaaaagttttaatttgttctcaatgctcgacaatgtggaaaagcaattagaggtagtggaagatgaacaccgctttgtttctaaagtgatcgaaggtgacatgattaattctgaattattggtctcacatgaatttgtgagccgtttcccttcaattaccaaaaagattaaagaagcaaatgaaggtatggaagaagcgttagatgacgctaagaaacattacgataaatacaaaagtctagttagtgacgtaaaaaatgattatttttcaagaagtgctgaagatttgaagttagatatgcagaaattggctcccagagtagcctatttagctcaaatcgtaaaagatgtgatagaggaatttagcaagcaaaaacgaagtcgtaatttattggactttgcagattatgagcattttgccttgcaaatactcactaatgatgatggtacgccttcacatatcgcaaaaacgtatcaagaacattttgaagaaatcctagtggatgagtatcaagatacaaaccgtgttcaagaaaagattttatcttgtattaaaacaggtgaagagtacaacggaaacctattaatggtaggtgatgttaagcaatcaatctataaatttagacaagctgatccaagtctatttattgagaaatataatcggttcactagtgaaggggaaggtacaggtatggtcatcgacctatctcaaaatttccgttctagacaagaggtactgtctaccacaaattatttattcaaacatatgatggacgataacgtaggagaaataatatatgatgatgcggctcaattatattatggagcaccatacgatcaaactgataaacctgtacaacttcgtgcattaattgaagcggataaagaaacgagtgaattgactggaagtgagcaagaagccaattacatcgtagaacaagtaaaagatataattgcaaatgaacaagtatttgatatgaagactggaacatatagaagtgtaacattcaaagatattgtaatacttgagagaaatactgataatgcgcgtaatttgcaacaagcttttaaaaatagtgatattcccttccatgttaaaagtaaaaaaggatattttgaacaaactgaagtacaacttgttttatcatttttaaaaactgttgataatcccttacaagatatttatttagtaggactcatgcgttcagttatttatcaattcactgaagatgaattagcagaaattagagtagttagtcctaacgatatttatttttatcaatcgattcaaaattatattgaggatgataattctaaaactcatttagttcataaactacaaagatttataaaagatataaaaaattatcaagattatagtcaaaatcaacctgtttatcagctaatagataaattttataacgaccatttcgtaatacagtactttagtggtcttattggtggtaaaggtcgacgtgcaaacctttatggcttaattaataaggctatcgagtttgagaactctagctttagaggtttattccaatttattcgatttattgatgaattgattgatagaggaagagatttcggtgaagaaaatatagttggaccaaatgataatgttgttagaatgatgaccattcatagtagtaaaggattagagtttccgttcgttatttattcaggactttctaaaaaatacaatgaaaaagacctgactcagcctgtaattctaaaccaacaatacggattgggaatggattattatgatactgataaagaaatggtttatccatcattatcctcagcagcctatcgcgctattaatagaaaagagcatatttctgaagaaatgcgtcttatttatgtagcattaactcgcgctaaagaacaattaattttaataggtagagtcaaaaaagaacaagaattgacagaacttgaacaattacctatatctgcagatcttattgcagtgaatgagcgcttgacggctaaaaattcatttaaatttatttacagtattttatccaaacatcaatcagcatctttacctgatgatcagaaattcgaacgagatattgaaacacttaattctgaagtgaaaccacgcgtaacgattacaattgatcactacgaagatgtatctacagaagaggtcacgcctgaaaatgaacgtcgaacagttaacgatattgacgacattaacagtggaaatgatgacgtaaaagctaagattcaccatcaattagcatatagatacccttatcaagatgatactttgaaaccttcaaagcagtctgtatctgaacttaaacgtcaacttgaaactgaggaaagtgacacaaattatgatagagttagacaataccgtatcggcgtagcgacatatgagcgacctagatttttgagtgaaaataagaaacgtaaagccaacgaaattggtacgttaatgcacacagtcatgcaacatctcccttttaatgaatcaggattaacaagagaagagctagattcatatgttgataagctgattcaacttaatatcattgaagaggatgccaaagctgatattaaatatgatgatattatgagatttattgaaagttccttgtatttgcaaattgcacaagcagacaaagtgtatactgaattgccgtttgtagttaatcaagctatggtcgatcaattacctgaagataatcaagacgtttcaattatccaaggtatgattgatttaattttccaaaaggatggaaaatactatttcgttgattataaaacagatgcatttaatcgacgaaaagggattactgatgatgagattggtcaacaactcaaacagaaatatcaaatccaaatggagtattaccgtaatacgttagaaactatactcaaacagccggttcaaggttatctatatttctttaaatttggtatgttaaagatagatgaataa

SEQ ID NO: 1686 - DNA, 906 bp, Staphylococcus capitis
atgaaatttttatcattcaaacacaatgacagaacttcatacggggtaaaagttaaacgtgaagatgctgtttgggatttaccaatggtttttgctgaatttggtgaagaagattttcatcccaaaacattactacaaggattacaacaaaaccagactttagattttcaagaacaagtacgtaaagcagttgtggctgctgaagatagcggtagagaaacagagtttaaaatttcgtttaatgatgtagagtttttacctccagttacacctccaaataatgttattgcatttgggcgtaattaccaagatcatgcgagcgaattaaatcatgaagttgaacgtttatatgtatttactaaagctgcttcatctttaactggtgatgaatcaacaattcctaatcataaagatattacagaccaattagattacgaaggtgaacttggtattgtcattggtaaatcaggtgagaagattcctaaaggtttagctttagattatatctatggttatacaattattaatgatataactgaccgcacagctcaaaatgcgcatgaccaagcattcttatctaaaagtttaactggtggctgtccaatgggaccttatatcgtcactaaagatgaattaccaacccctgaaaatgttaacatcgtaactaaagtgaacaacgatatccgtcaagatggtaacactggacaaatgattcttaaaattgatgagttaattgaagaaatttctaaatatgtagcactacatccaggtgatattatcgcgacaggtacaccagcaggcgtaggagcaggtatggaaccgccacaattcttgcaacctggtgatgaagttaaagttacaattgataacattggtacgttaacgacttacatttcagaaaaataa

SEQ ID NO: 1687 - DNA, 402 bp, Staphylococcus capitis
atgttacatgtccatatcttaagttgggtattagcaatagtattatttatcgcaacttatttaaacttttcaaaaatacaaggtccttcaccttactttaaaccattacatatggcattaagactatttatgttactcacattatttactggtttctgggaattaattaaagaatttatcgcagcagctcatggcgatggtggaaaccatatgttacttactttgaaaatgctatgtggtttagcggttattgctttaatggaagtaaccatagctaaaagaaagaaaaaagaagaaggacataaattcttttggattacaatcgcgctaattattataacaatggctattggcatcatcttgccatggggcccattaactaaaatgtttggtttaggttaa

SEQ ID NO: 1688 - DNA, 1317 bp, Staphylococcus capitis
ttgaataaaataatcattattggtgctgttgcaggcggtgcaacttgcgctagtcagattcgtcgtttagataaagaaagcgagattattgtatttgagaaagatagagatatgagctttgctaactgtgccctaccttattatattggtcagcttgttactgaaagggaaaaagtattagcttatacaccagaatcattttatgataaaaagcaaattaaagttaaaacctatcatgaagtaactgaaattaatgataagcatcaaacagtcactgttgtgaatagacaaaccggagaaacatttgaagaatcatatgacacgcttattttaagtcctggtgctggggctaataatctaggatttgatagcaatatttcatttaatttaagaaatttagaagatactgatgcaattgatcagtttatctctaataaccatgctaaaaacgcgttggtagtcggtgctggttatatatcactagaagtattagagaacttatatacccgtgggctcgacgtcacattaattcatcgttcagagcaaattaataaactaatggatcaagatatgaatcaccctattatcgatgaattagaaaaaagatatatctcttacagatttgacgaagaaatccatcaaattaaaggtaatgaagttacttttacatctgggataactgaaaaatacgaccttattattgaaggcgtaggaacacatccgcattcgaactttattaaatcttctaatattcacttagatgatcacggcttcataccagtaaatgataaatttcaaacaaatatacccaatatttacgctttaggtgatgttataacttcattttatcgacatgttgatttacaagctcaagtaccattggcatggggagcacacagaggggctagcattattgcagaacaattagctggagataaatcaattatatttaaagggtatttaggatctaatattgttaaattctttgattatacattcgcaagtgtgggtgttaaaccaaatgaactttctcattttgattatgaaatggtagaagttaaacaaggagctcatgctggttattacccaggaaatactcccctacatttaagagtatattatgacaaaacttcacgtaaacttttacgcgccgctgcagttggacaagaaggcgtagataaaagaattgatgtcttgtctatagcaatgatgaaccatatgacagttgatgaattaacagaatttgaagttgcttatgctccaccatatagtcacccaaaagatttaattaatatgattggttacaaagctagataa

SEQ ID NO: 1689 - DNA, 822 bp, Staphylococcus capitis
atgcaaccttatttaatttgtctagatttagatggaacattattaaatgacaacaaagaaatctcatcctatacaaaacaagttttaactgaactacaacaacgtggccatcatattatgattgctactggtcgtccatatagagcaagtcaaatctattatcatgaattaaatatgaatacaccggttgtcaatttcaatggcgcttacgtccatcatcctaaagctaacgattttactacaatacatgaagttttagatgtagaaatttcaaaaaatataataactgcccttcaacaatctcatgttacaaatatcatagctgaagtaaaagattatgtattcattaataatcatgatccacgcctatttgaaggattttcaatggggaatcctaaaatacaaacaggtaatttattagagcaactaacagaacctccaacttctttacttgttgaagcagaagaagataatattcctaaaataaaggatatgttaactcatttttacgctgagaatattgaacatcgtcgttggggtgcaccatttcctgttatagaaatcgttaaacgtggtattaataaagcacgaggcatcaaatgcgttaaacagtatcttaatgtcgcagatgaacgagtgattgctttcggtgatgaagataatgatatagaaatgattaaatatgcatcacatggtattgcaatgaataacggtttacaggaattaaaagatgtcgcaaatgatacgacatatagtaataacgaagatggtataggtcgctatttaaatgagttctttgatttgaatattcgttattattaa

SEQ ID NO: 1690 - DNA, 309 bp, Staphylococcus capitis
atggaggaagcattaaaagatagtatcctaggggctcttgaaatggtaatcgaccctgaattaggcattgatattgtcaatttaggtttagtatataaagttgatgtagacgatgaaggtctatgcacagttgaaatgactttaacttctatgggctgtcctttaggaccacaaattattgaacaaattaaaggtgtattagcagaaattcctgagatttctgatacagaagtaaacattgtttggaatccgccttggaataaagacatgatgtctcgttatgctaagattgctctcggtgttggataa

SEQ ID NO: 1691 - DNA, 1821 bp, Staphylococcus capitis
atggaaaaagaattaaagaaaggtcatcaacgcggtaaaaaaatgcgttatatgcctggacttgatggtttgcgagcaattgctgttattggaattataatatatcacttaaataaaaaatggcttactggcggttttttaggagtggatacattcttcgtaatttctggttatttaattactagtttattattaaaagaatacgaagaaactggaataattaatctcaaaaatttctggattagacgtataaagagattgttacccgcagttttagcattgctaattgttgttggacttgcaacactgatacttgaaccggataatattgtaagagttaaacatgatattgttgcagcgatattctatgtttcaaactggtggtatattgctaaagatgttaattactttgaacaattttcatttatgccattaaaacatctgtggtcactggctattgaagaacaattctatttgttctttcctgcgatattgatattattattgcttacgattaagaaatatagaaatgtggtagtaatattttggattatatcattagtatcacttttattgatggtaattatctcacagccacatatgaatcactcacgtgtctattttggtacagataccagattacaaacgcttttattaggtgtacttcttgcatttatgtggccaccatttaaactcaagactcaaccacctaaagcattaagagcaacaattgatactgctggaatagtcgggttaatatttttattcattctattccttaccgttaaagatgatagtgattggatttataacggtggattttatattatttcaacgatgaccttgtttattatagcaagtgtagtccatcctgcaactttagtttctaaagtattaggtaatccagtttttgtttatataggcaaacgttcatatagcttgtatttatggcattttgcagtgattagttttatccatagtcactatatagatggtcaaataccaatatatgtctatctacttgatatcattttaacgatagcgttagctgagttatcttatcgatacgtcgaaacaccatttagaaagcaaggtttcaaagcatttgctataaacaaacgtttcaagcctcagtttattagaacaattattactattgtattagctttgccacttattttaatacttgcaggtgcgtttgataaattaggtaaagataacattaatgataaagcgcaaacatttaacactagcgaaaatgataaatatcttatccgtatgttacctatcgatgacattaaacttactgctgacggaagaactgaagagggtaaagaggatgaagtatattctaatattaaaccattgctaattggtgactcggtcatggtagatataggtgagcaatttaaatctagagttcctaaagcaaatattgacggtaaagtaggaagaaatttatatcaagcattacctttagtagatagtaattataaacattataatcagccttcagatcaagttgtccttgaattaggtacaaatggtgattttactgaagatcaacttgataatttaatcgaaaaatttggtaaagctcaagtgtatctcgtgaacactagagtacctcgttcatatgaaggccatgtaaatgaattaatggctgatgctgctaaaaaacataaaaatgtaaaacttgttgattggtatcaacggtcagaggggcgtacagagtattttgctcctgatggtattcaccttgaaaatagtggtgttgaagcactcactgatgacattctaaaaaatatgaaaaagaaatag

SEQ ID NO: 1692 - DNA, 2613 bp, Staphylococcus capitis
ttggatattaatcaaatgacgtatgctgttcaaggagctttacaaaaagccgttgaagcaagcaaagaatatgaattacaaaatattgaaatcgaagctttattaaaagctgctttagaagaaaatgaaagtttgtttaaaagtgtattagaaagagcaaatattgatgttgatcaattaacgaaagcttatgaaaataaattaaaaaattatccaacagtacaaggcgataatgttcaatatggtcagtatataagtcaaaaagcgaatgatttactaaataaagctgaaacttatatgaaagaatatgatgatgaatttatttctatggaacatttattgcgtgcagcaatggatattgatgaaacgactcaacaacatgttggaaataaaacagaagttattaaagaaatcattactaaaattagaggaggaaatcatgtgacatctcaaaatcctgaagtaaattacgaagctttagaaaaatatggtcgagacttagtagaagaagttcgccaaggaaaaatggatcctgttattggtagagatgaagaaatacgtaactctatccgtattttaagtcgtaaaactaaaaacaatcccgtacttattggtgagcctggtgtaggtaaaacagctatagttgaaggtctagcacaacgtatagttaaaaaagacgttccagaatcattgttagataaaaccattttcgaattagatttaagtgccttagtagctggagcgaaatatagaggggaattcgaagaacgacttaaagctgtgcttaaagaagtaaaagaatcagaaggtcgaattattctcttcattgacgaaattcacatgttagtaggcgctggcaaaactgatggtgcaatggatgccggaaatatgcttaaaccaatgttagcacgtggtgaattgcattgtattggagcaactacacttaatgagtatcgagaatatattgagaaagattccgctttagaacgtcgattccaaaaagttggtgtgagtgaacctgatgtagaagatactatatccattttacgtggtttgaaagaacgctatgaagtttatcatggtgtgcgtattcaagaccgcgctttagttgcagctgcagaattatccgatagatatataactgatagattcttacctgataaagcaattgacttagtcgatcaagcttgcgctacaattcgcactgaaatgggatctaacccaactgaattagaccaagtcaaccgtcgtgtaatgcaattagaaattgaagaaagtgctttaaaaaacgaatcagacaatgcaagtaaacatcgtttagaggaattgcaagaagagttatctaatgaaaaagaaaaacaagcatctttacaatctcgaatagaacaagaaaaagaaaaaattgctaaagtacaagaaaaacgtgctgaattagaccgtagccgacaagctttagaagatgctcaaactaaaggtgatcttgaaaaagctgccgaactacaatatggtacaattcctcaattagaaaaagaattaaaagaattcgaagaggcttaccaagacgagacaggtgaggatagcgaaagaatgattcgtgaagttgtatcagatgaagaaattggagatattgtaagccaatggacaggtattccagtatctaaacttgtagaaactgaaagagaaaaacttcttagcttaagtgacatcttgcacgaacgtgtcgttggccaagacaaagcagtagacttggtttctgatgcagtagttagagcacgtgcaggtatcaaagatccaaatagacctattggtagcttcttattcttaggaccaacaggtgtaggtaaaactgaattagctaaatcacttgctgcttcactatttgattctgaaaaacacatgattcgaattgatatgagtgaatatatggaaaaacatgcagtctctcgtttgattggtgcccctccaggctatgttggtcatgatgaaggcggacaattaactgaagcagttagacgaaatccttattcagttattttattagatgaagtagaaaaagcgcacagcgatgtcttcaatgtgctacttcaaatattagatgaaggtcgacttactgactctaaaggacgcagtgttgatttcaaaaatacaattatcatcatgacaagtaatattggatcacaagttttacttgaaaacgttaaagacgctggagaaattagcgaaagtactgagaaagcggtaatggatagtttacatgcttatttcaaacctgaaatcttaaaccgtatggatgatattgtattatttaaaccattatcagttagtgatatgagtatgattgtcgataaaatcttaactcaattaaatattcgtttaatggaccaacgtattacaattaaagtatctgatgaagcaaaaaaatggttaggtgaagaagcttatgaaccacaattcggtgcaagaccattaaaacgtttcgttcaaagacaaattgaaacaccacttgcccgcatgatgattaaagaaagcctacctgaaggtacaacaattaaagtagatttaaattctgacaatgaattacaatttgacgttgaaaaagcagaaaatatttaa

SEQ ID NO: 1693 - DNA, 516 bp, Staphylococcus capitis
atgaaaatcaacactaattttaacaacaacattataccttatgactatgctgcaggtgcacaacatactcaactaatacataataacccaattaaatcttttccatttactgtagaagatttaccattcggtacaaaatatcttgcttggacattaatagattatgacgctattccagtatgtggcttcccatggattcattgggcagttgctaacgtgagagtaaatagcgatacaatagatattgttgaagacctttctagaattaaaggtgactttgtacaaggtaagaacagctttgcaacaggtttattagctgaagacttttcagatattgaaaatcattatgtagggcctacgcctacagataaagatcattactatgaacttgtagtttatgctttaagtgaaaagcttaatttaaaaaatactttctatttaaatgaattattacatcaagttgattctaaattattagataaagcaaaaattaatttagtaggtagaaaagtttaa

SEQ ID NO: 1694 - DNA, 195 bp, Staphylococcus capitis
atgaagtacctcatgacatttatttgggcagtattattgcttgaaatggttaacttcgtattgaatagccttaacagtggtccagcgcttaatgtaattaatccaatcattatggctgttgtattcacaatttttatcgctattttaggtgcggttatgaaaccaagcaaaggttcagatcaatacgattcatag

SEQ ID NO: 1695 - DNA, 942 bp, Staphylococcus capitis
atgaacgtgggtattaaaggtttcggtgcttatgctccggaaaacattgtagacaatgcctattttgaacaatttttagaaacttcagatgaatggatttctaaaatgactggtattaaagaaagacactgggcagatgaagatcaagacacatctgacttagcgtacaatgcgagtgttaaagcaattgaagatgctggtattcaaccagaagatatagacatgattattgtagcaactgcaacaggtgatatgccgtttccaagcgtagctaatatactacaagaacgtttaggaactggcaaagtagcaactatggatcaacttgctgcttgttctggatttatgtattcaatgattactgctaaacaatatattcaatctggtgattataaaaatatattagttgtaggtgctgacaaactatccaaaataacggatttaactgaccgttcaactgctgtcttatttggtgatggtgctggtgcagtagtgatgggtgaagtttctgaaggccgtggaatcatcagttatgaaatgggttctgatggtagcggtggaaaatatttatatttagacaaagaaactggtaaattaaaaatgaatggcagagaagtatttaaatttgctgtaagaatcatgggtgatgcatcaacacgtgtagtagataaagcaggtttaacgtcagatgacattgatttatttatccctcatcaagcaaatattcgcattatggaatctgcgagagagagattgggtatagaaaaagagaaaatgagtgtttcggtgaataaatatggtaatacttcagctgcttctatacctttaagtatcaatcaagagttacaaaacggaaaaattaaagatgacgatactttagtcttagttggcttcggcggaggcttaacatggggcgcaatcgttatcaaatggggaaaatag

SEQ ID NO: 1696 - DNA, 1245 bp, Staphylococcus capitis
atgagtaaaaataatagagttgttataacgggtatcggagccttatctccaatcggtaacgatgctaaaacaacatgggcaaacgcattaaaaggagtaaatggtatcgataaaattacacgtttagataccgaaaaatataatgttcatcttgcaggtgagctaaaggactttaatattgaagatcatattgataaaaaagaagcacgtcgtatggatcgtttcacacaatatgccgttgttgctgcgagagaagcggtacaagatgcgaagttagatatcaatgatcaaacagctaatagaattggtgtttggattggttctggtattggtggcatggaaacatttgaaactgcgcatactacactcgttgaaagaggaccacgtcgagtaagcccgttctttgtaccaatgttaattcctgacatggctactggacaagtttcaatagacttaggtgctaaaggtccgaatggtgctacggttacagcttgtgcaactggtacgaattcaattggtgaagcatttaaaatcatccaacgtggtgacgctgatgcgatgattacaggtggtactgaagctccaattactcacatggcaattgctgggtttagcgcaagtcgagctttatctacaaatgatgataaagaaacagcttgtcgcccattccaagaaggccgtgatggttttgtcatgggtgaaggtgcaggtatcgtggttatagaatcattagattctgctaaagcgcgtggagctgaaatttatgctgaaatcgttggttatggttctactggagatgcatatcatatcacagcaccagctccagaaggtgaaggcggttcaagagctatgcaagctgccttagacgatgtaggtattgaagcaaaagacgttcaatacttaaacgcgcatggtacgagtacgcctgtaggcgatttatatgaagttaaagctatccaaaatacatttggagaagctgcaaaatctctaaaagtaagttcaacaaaatcaatgaccggtcacttattaggtgcaacaggtggtattgaagccatcttctcagcactatcaattagagactctaaagtcgcacctaccattcacgcggtcacaccagatgaagaatgcgatttagatttcgttcctaataaagctgaagacttagatattacttacgctatgagtaatagtttaggcttcggtggacataacgctgtattagtatttaagaaatttcaagactaa

SEQ ID NO: 1697 - DNA, 1713 bp, Staphylococcus capitis
atgaaaaaatgctttaagtatttaagtttatttttagtgattatactagtgcttagtggctgtggtaaaggtaaacaagaagatgcatctagtgatgagagtaagacagcttcgtccgagcataaaggcggagtcttgaaagttggaatgccagccgcgccaactggagtttattcttctgtactaagttctgatcacacagattttacagttgaaagttatttcaatgaagctttaatgaaaattgataaaaaaattaaaccaaaaccatatatcgcatcatggaaagatatagatcctggtaaaaagattgagtttaagattaaaaaaggaatcaaatggcatgatggtaatgaatttactatagatgattggatttatactttagatgtattagctaataaagattatgatggtcaatactatccttctgtggaaaatattaaaggagcaaaagaagtacatgaaggaaaagcagatcatattagtggtttaaaaaaattagacaactatactatggaagttacatttgataagaaaaaacttaactatcttacaggatttgttggcggaccgttactaagtaaaaaatatcttagtgatataccagtaaaagatttgtctaaatctgacaaaatacgtaagcatcctattggaattggtccttacaaagttaaaaaaatagtggctggagaagctattcagttagaaagatttgatgattattggcaaggaaaacctgctctagataagattgaattaaaagtagtagatcaaccgcaaatgattaaagctttagaaaaaggagatattgatttagttgatgacgccactggacccatggctaaagaagctaaaaaatctaaaaacaatttaaaagttttatctactccaagtctagattatgcaattattggctttgtttcttatgattatgataaagctaaaaacaaaactggaaaagttagaccaaaatacgagaataaagagctaagacaggctttattatatgcgatagacagagaaaagtgggttaaagcattctttaatggttatggttcagtaattaactcatttgttccaagtacggaatggattgcagctgatcctaaagatttaaaagattacaaatatgatcctgaaaaatctaaaaaaatcttagataagttaggttataaagatagagatggggatggtttcagagaagatccaaatggaaaaccttttgtaattaacctcaaacattacgctggaacaaatcctacttttgaacctagaacagcagctattaaagatttttgggaaaaagttggtttaaaaactaaagtaaaattagttgaatttggtaaatataatgatgacttagccgatgcctctaaaaatatggaagtttatttcagaagttgggcgggtggaactgatccagatccttcagacttatatcatactgatagacctcaaaatgaaatgagaaccgttctaccaaaatcagataagcttttagatgatgctttagatttcgataaagttggcacagatgaaaagaaacgtaaagaactttatgttaaatggcaacaatatatgaatgaggaactaccagctctgcctatgctacagatgaaatcaatcgctataactaataataaagtacgcaattatgatattcaattaggtactgaagcacaattctataaagtgacaaaagataattaa

SEQ ID NO: 1698 - DNA, 993 bp, Staphylococcus capitis
atggagcatcttttagaagttaaggaacttgaaacatcacttctaattaataagcaatggtttccaactatcgataaagtaagctttaaattagataaaggagaagttttgggtatcgttggtgaatctggatgtgggaaatctatactaaataaatcaattatcaaattattacctgaaaagatttcaaaaattactaatggtgaagttctttttgaaggaaaaagaatagataaatatagcgagaaggaattcttaaatattagaggtaacgatattggaatgatatttcaagaaccaatgacagcattaaacccagtttttaaaataaagaatcaaataattgagagtatattagtgcatcagaagaaatctaaaaaagaagcctataaagaagctaaggaattacttttgaaagttggaatttctagacaggatgaggtgcttaatagttatcctcatcaactttcaggtggtatgagacaaagggttatgatagctatggccatttgttgttcacctaaattattaattgcagatgaaccaactactgcattagatgtaactatacaagctcaaatattagatttattaaaaaatatacaaaatgatactcaaatgtctattattttaattactcacgatttaagtgtagtttcggaattttgcgataaagtaatggtaatgtacgcagatcaaattgtagaatatggagatttaaaatctatactaaacaagcctaaacatccttatacaaaaaaattattaaaaacaattcctactttagaagatgaacgggatagattagaaactattgaaggaatcgtaccatctatcactgattttcagttagataagtgcagatttgctaatagatgtgatgaaaagattgaagtatgtgactctcaatgtccgaaaattactcatgttgatagttctctagttcgttgccatttatatcaaaatcaaagtgaggaagaacatcatgaataa

SEQ ID NO: 1699 - DNA, 984 bp, Staphylococcus capitis
atgaataacatattagatgtgcaaaatgtaaaaaaatactatgaattaaaaactggtttatttcaaaaaaatcaatatgttaaagctgtagatgacatttcattttctatcaaagaaggacaaacatttggcttagtgggagagtcaggatgtgggaaatcaactattggtaagacaattgtgaggttagaaaatgttacgagtggagacattaagttatgtggggaaaatattactcatttgaaaggaaagaatttaagagaagctcgtcaaaattttcaaatgatatttcaagatccctatgcatcattaaatcctatgcaaatggttggaaacattattgctgaaccactacttaattataaaaaagtctctaaagcagaagtaaagaaagaagttgtgcatttattaaaatgtgtaggtcttagtgaagaagcatactttaagtatgctcatgaattttcaggaggacagcgacaacgtattggaatagcaagagctattgctctaagaccgaagctaatagttgccgacgaaccggtaagtgcattagatgtgtcggttcaatctcaagtattaaatattttaaaagatttacaagatgaatttaaattaagttatctttttattgcacatgatttaagtgtagttaaacacattagtgacatcataggtgtcatgtatttaggtaatatggttgaaatagcttctcatgaagaaatttatacaaaacctttacatccttatacacaagcactcatttcttctatacctcaatttaatcaagaaaaaaagaacagagtaatcttgaagggagagttaccttcaccaagtaatccaccaagtggatgtcctttccaaactagatgccctttggttcaagataaatgtaggagagagaaacctaaactgaaagaaataattaaagatcatcaagtagcttgtttttatccaaaccatgtagggagtgtagctaatgtttaa

SEQ ID NO: 1700 - DNA, 963 bp, Staphylococcus capitis
atgtttaagttaataataaaaagactaggtctaatgattccattgctcattataatttcgatggtagtttttgcattagcaattatacaaccgggtgatcctttttcaggacaacatggtacgaatattaaacaagaagcattagatgctcaacgagaaaaattaggtcttaatgactcaataccacaacaatatattagatgggcaaataatattattcatggagattttggtgaatcaatcaagtataaaagaccagtaatggatctcattaaagagagactacccaataccattcttttaggtagtgtatctctcattattacctatattatttcttttactttaggaatagtatctggaagatatgcatatacgattagtgattactcaatacaagtatttaactacataatgctagctattccttcttttatagcaggtgtatttgcaatatttttctttgcctttcaattaaatttatttcctttccaaggttctgttgatattaatgttcaagaaggtacgttctcatactatataaacaagctttatcatacgattttaccagcggttacattgggattgttatctactgcaggttatatacaatatttacgtaatgatattattgaaaattcgcaaaaagattatgtattaactgctcgatctaaaggactttctacaaatcgaatttatatgaagcatattttgagaaattctttaattccaataattacttttctaggggctgacatagttagtatattgggtggagctgtaattacagaaactattttctcttataacggtattggaaaattgtttttagagtcagtaacaggacaagattacccagttatgatggcaatgacattatttttctcatttttaggtttgctaggaaacttaatttcagatattacgtatggctttgttgatccacgaatacgaagtaattaa

SEQ ID NO: 1701 - DNA, 150 bp, Staphylococcus capitis
ttgaagaaaaaaccaaattcaccttttaaaatttctatgaagaaattttatcataacaaacttgcgatgatttctttatcatttttaataattgttgcaatcatatctattattgctcctttaatagctcctttaccaattaataaataa

SEQ ID NO: 1702 - DNA, 708 bp, Staphylococcus capitis
atgtctattgaaaatttgcttggtactgatgctggtggcagagataacttcagtagattgttatatgcgggtaggatttctcttactatagggtttacgtctacggtaggaatgcttttaattggaatatcaattggcgttatttctgggtattttggtggagtattagatactgttctaatgagaattacagagtttgttatgttatttccatttctaatttttgcaatagtactcaatgcagcattaggagataaaataaaaaatccctatggttcagcaattattttagtatttgtaatcataatactgagttggggtggtattgctagacttgttaggggaaaagttttgcaagaaaaagagaatgaatactttttagctgcacaatcaattggaacacctacctataaaattatactaaagcatttattacctaatattttaagtgtcgtaattgtacaagcaacattaacttttgcaggtatgatagttgtagaatcagggcttagctttctaggatttggtataagtaagtctattccttcttggggaaatatgttgagtgatgcacaagagggagatgtattaagtggtaaaccatggatatggatgcctcctgctttaatgataactttgactattttgagtatcaattttgtcggagagggactcaaagatgcatttaatcctaaaggaagaaaataa

SEQ ID NO: 1703 - DNA, 990 bp, Staphylococcus capitis
atggaaactttattttcaggaattcaaccgagtggtattcctactatcggcaactacataggtgcgttaaaacaatttgtagatgtacaagatgactatgattgttttttctgtattgttgaccaacatgccataacggtaccacaagatcgtttgaaattacgtaaacaaattcgtcaattagcagcaatatatttagctacaggaattgactcagataaatctactttatttattcaatctgaagtccctgcacacgtacaagctggttggatgcttacaacaattgcttctattggtgaacttgaacgtatgacacaatttaaagataaagcacaaaaacgggttgatggtgtaccagcaggattattaacatatccacctcttatggctgcagatatagtaatttataacactaacattgttccagttggcgatgatcaaaagcaacatatggaacttacccgtaatttagtagatcgttttaatagtcgttataatgatgtcttagtaaaaccagaaattcgcatgcctaaagttggaggacgtgtgatgagtttacaagacccaactaagaaaatgagtaaaagtgatgataatcagaaaaactttatttcactactcgatgagccaaatgttgcagcaaaaaaaattaaaagtgccgtaacggattctgatggcattattaaattcgatcgtgaaaataaaccaggtgtttcaaatcttttatctatatattcaggtctaactgatgaacctattaaagatattgaagttagatacgaaggtgaaggttatggcaaatttaaaggtgacttagcagagatcgttaaagacttcttgattaatttccaagagaaatatgagaacttttacaattctgatgatttagatgacatcttggataaagggcgagacaaagctcataaagcttcatttaaaacattgaaaaaaatggaaaaagctatgggattaggacgtaaaagataa

SEQ ID NO: 1704 - DNA, 396 bp, Staphylococcus capitis
atggtaacattatttacttcaccaagttgcacatcttgccgtaaagcgaaagcatggttacaagaacatgacattccatatacggagcgtaacattttttctgaacatttaacaattgatgaaattaaacaaattttaaaaatgactgaagacggaacagatgaaattatttcaactcgttctaaaacatatcaaaaattgaatgtagatattgattctttacctttacaagatttatattctattattcaagataacccaggattattacgtcgtcctattatcttagacgacaaacgcttgcaagttggatataacgaagatgaaattagacgtttcttaccaagaaaagttcgtacgttccaattacaagaagcacaacgtttagttgattaa

SEQ ID NO: 1705 - DNA, 723 bp, Staphylococcus capitis
atgagaatagaacgcgttgatgacacaacagttaaattgtttataacatatagcgacattgaagcacgaggatttaatcgtgaagacttatggactaaccgtaaacgcggtgaagaattcttctggtcaatgatggatgaaattaacgaagaagaagatttcgtggtagaaggtccattatggattcaagtacatgcttttgaaaaaggcgtggaagtgaccatctctaaatctaaaaatgaagacgcaatgaacatgtcagatgaaaatacaaatgatcaatttgatgatcaagtgaatgaattattagcacaaaccttagatggtgaagataatttagaagaattatttgagcaacgtcaacaacagaaaaaagctgaacaacaggcaaataatcaacgaactcataaacgtgctaacgtaagaactgtaattgttaaatttgatgatttagaacatgttattaattatgcatatcataataaccaaaatactactgaatatgaagatttattatatatgattgataatcactactattattcagttcattttgatgactctgtaagccaagaaactattaatgatagctatagtcaattattagagtttgcttatccaacagataaaacggaagtatacttaaatgactatgccaaaattatcatgagtcataatgttacttctcaagttcgtagatattttacagactcagaagaataa

SEQ ID NO: 1706 - DNA, 990 bp, Staphylococcus capitis
atgttaatagcaatgaatagaatgaatgagcgagttttagcgaaaaatgcgaagagaaatcaaatatatcggtgtccttattgtctaggggaagttatattacgacatggagttaaagttatacctcattttgcacataaagttaaaagtactagactttgttataaagctgaaacgtataatcattaccaattaaaaatgctattagcacaaaaatttgaagcaataaattatgatgttgatattgaacccttttttaaatgtatcaagcaatatcctgatttagtgattaaccaaagacacgccatcgaaattcagtgttccacaattagtacgactgaaataattgaaagcacccttggtttaaaaagtataggcttaaaggtttattggataatcaatgatgtgaaaaaaagaggggattttattgaacttacacaatttcaaactacttttattaatcctattcatcgtaccctaataacctgggacttcacaaaatcaagactcataatttacacgcaccttcaaaatatcgctggaaaaaaatttatttgcaaaaaacataccatacaaattaaacaacttttcaatacatatcaatcagaacaagcacaaatctataaattatctaaaagaacaatcaataattatattctacagtgtagaaggaaaaattcggttcttgaaccaactctaagtgcaatatatcagctacaaatgaatgataatgaagtatgtataaatacaggttttatatttccaaatcaaatatatattgaaacacacccagttgaatggcaactcaattatctattattaagacgtaaatatgacagacatcaaagttgtgacttattaatgtctatcattaaattcagatatttcgcataccataagtatcataagttgactatattaaaagatttgttaaatgacttcgagaaaatgtattataacagatgtttaagcgtgcaaaaccaatcctaa

SEQ ID NO: 1707 - DNA, 1809 bp, Staphylococcus capitis
atgagtcaacaattaacaagagaagagcaggaacgtaaatatcctgagtatacatgggacttaacgacgattttcgaaaacgacgaggcttttgaggaggcgttcaaggaagtagagaatgagttaggtaaggaagaacaattcaaaggacatttaggtgatagtgctgaaactttatataatgccttagcacttgaagatgaattaggaactaaacttgaaaaagtctatgtctatgctcatttgaagcaagaccaagatactgctaatgataaatatactggtctagaagcgcgtgcacatcaattattaattaaatacagttctgcatggagctttttagtgcctgaaattttacagttagatcaatctactattgaacaatttgtttcctcatttgataaattaaaacaatatgagttcgacttaaaattaattaacgagaaacgtccacacattttagatgcagacacagagaaactattaacagaagcacaagatgctttatctacaccttcaaatgtttatggaatgtttagtaacgcagacttagaatttgaggacgccattgataaagatggggaagcacatccgttaacgcaaggtacttttataaaatatttagagtctgatgatcgtaaattaagagaatcagcatttagaaatgtatataaagcttacggttcacataacaatacactaggtgcaacgctagcaggagaagtgaagaaaaatgtatttaatgctcgaactcatcattataattcagctcgtgagcgtgctttaagtaacaatcatatcccagaggctgtatatgataatttagtcaaaacagtgcataagtatcttccattacttcacagatacactaaattaagaaaagagttattaggtattgaagatttaaaaatgtatgatctctacacacctctagttaaagatgtgaaatttgatatgccatacgaagaagctaaatcgtggatgttaaaagcactagaaccaatgggcgaagaatatttaaacgttgttaaagaaggtttagacaatcgatgggttgacgtctatgaaaataaaggtaaacgctctggaggttattcttctggagcgcatcttacaaatcctttcattttattaaattggtcagatactgtttctgatttatacactttagtacatgaatttggtcattcagctcatagttatttcagtcgtcaaaatcaaccttcaaacttaagtgattatacgatattcgttgcagaagtcgcatctacatgtaacgaagcgcttttaagtgactatatggataaacatttagacgaccagcgtcgattgttattgttaaatcaagaattagaacgctttagagctactttattccgtcaaactatgtttgctgaatttgaacataaaattcaccaaatcgaagaggcgggcgaaccattaacacctaaccgaatgaatgaagagtatgcgaagcttaataagcaatacttcggagatgctgttgaaacagatgaagatattagtaaagaatggtcacgtataccacacttctatatgaattattatgtatatcaatacgctacaggttatagtgcagcacaaagtttaagtcatcaaattttatcagaaggtaaaccagctgtagaaagatatattaatgaattcttgaaaaaaggtagctcaaactatccaatagaaattctaaaaaatgcaggcgtagatatgactacacctaaacctattgaagaagcgtgtgaagtatttgaacaaaaattagatgcatttgaaaaacttatgaaagcttag

SEQ ID NO: 1708 - DNA, 792 bp, Staphylococcus capitis
atggctgaagaattaagaatattggataacaagagtcgtgaagatgctaatctatcacctgtaagtaaaatagaaatttattctttttttgatccttttagcaaagaatgttttaagctatcagctatattatcaaaattaagaattgaatataatcaatatatccgagtaagacacattttaaacccttccttgaaagttttaactaagtgtcaggctcaaagtacatcggatttcgataacattgctctggcatataaagcagctgaattacaaggacgtttgagggctgaaagatttattcatttaatgcaaaatgaaatcatacctaaacgcgatatcattaccgaagatatgatttgcgattgtattaataatgcaggtattgattatcaagtatttaaggaagatttacagaagagcaagcttactgatagcctaaaggtagatctccatattgctagagaaatggacattgagcaagcgccctctcttgttttctttagtgaagacgtccaagaagaaggtttaaaagttgaaggtctatacccatatcatatctatacttacatcataaacgaattaatgggaaaacctattgagaagaatcttccacctaaattagaagtgtacattcaaaagaaacaattagtaacgatggaagaacttttaaccatttacgagtggccagaaaagttacttaataaagaattaaaaaaactttccttacaacaaaaagttgagaaattacaatatccagaaggcgatttttggaaatcaaaaatgccttaa

SEQ ID NO: 1709 - DNA, 390 bp, Staphylococcus capitis
atggaacacggtgatattatgtctaaaacaccttatgagttagtaggtcaagacgctctgtatcaaatgattgactatttctattatctagtcgaaagagataatcgtattaattatttatttccaggggactttaatgaaacaagccgaaagcagaaacagtttttaactcaatttcttggtggccctgacttatatactcaagaacatggacaccccatgttaaaaagaagacatatggaatttacaattactgaatatgagcgagatgcatggttagaaaatatgtatactgcgattcaatatgcaaatttccctgcaggtgttggtgagtatttatttgaaagattacgcttaactgcaaaccacatggtaaattccgaaaaataa

SEQ ID NO: 1710 - DNA, 588 bp, Staphylococcus capitis
atggcaacaaataatgaaattgagttcaaacaaatcttaaccaaagatttgtacgataaaatttttaacacttattttaaaaatgaaaaaccatttagccaaactaattattatattgatactatagattttaaacttaaagatcatcgttcagcattacgtatcagagttaaagataatacatatgaaatgactttgaaggtacctgctgaagttggattaatggagtataaccacgcaactgatattaaaccaaagatgaatgattcaatatcaaactccaaactaccagatgatataagaaatattattgaaggacaatttaatgttttagacgaagaattagttattttaggggatttaacaacttatagaatagaaactcaatatcaaaacgaattacttgtattagataaaagtgaatacctaaataaagttgactacgaacttgaatatgaagttagttcgtacgatgaaggttatgaaaagtttaaacaattacttcaggaattcgatataaaacataaaaaacctttaaataaagtacaaagattctttgaagaaaagaaaaaagcaagtgataaatag

SEQ ID NO: 1711 - DNA, 348 bp, Staphylococcus capitis
atgcgtatttatataaatgaaattaaagttaaagatgatggcatttattgcttctcagaggacccaacagatggtctagaggaagttggacaaatgcttgttgatagtgataattatggattcgcatatctattagatgacggtgaatcgtattcttatctaatctttgtgcaagagacatggtcactgttacatgaaaatagagataagaagattatcatcaataacgatttagaattgaaacatttccaagaagaactagattacatattaaaaaatattgaaggaaataataactatggtaaggagtttgtttcagctgttgaaaaaactttcgaactagagtga

SEQ ID NO: 1712 - DNA, 636 bp, Staphylococcus capitis
atgaaccagtgggatcaatttttaacaccttataaacaagcggtagatgaattaaaggtaaaacttaaaggtttgcgtaagcaatatgaagtaggtgaacacacgtcacctatcgagtttgttacaggaagagttaaacctatatcaagtgttatcgataaggcaaataaaagaggtattccgttcgaccgcttacatgaagaaatgtatgacattgctggattaagaatgatgtgccagttcgtggatgatattgatattgttgttaatatattaaggcaacgaagagacttcaaagtcgtagaagaacgagattatatccgtaatactaaagaaagtggctatcgttcctatcatgtaattattaaatatcctattgaaacattaaacggacaaaaacatattctagctgagattcaaataagaacgttagctatgaatttctgggctacaatagaacatactcttcgttataaatacgatggagactatcctgatgaaatacaacatcgtttggaaagagcagcagaagcagcatatttattagatgaagaaatgtctgaaataaaagatgaaattcaagaggcacagaagtattatactcagaaacgtgcgaagaaacatgaaaatgactaa

SEQ ID NO: 1713 - DNA, 810 bp, Staphylococcus capitis
atgcgttatacaatcctaactaaaggtgattcgaaatcgaatgcattaaagcataaaatgattaatcatatgaaggattttcaaatggtagaggatagtgaaaatcctgaaattgtcatatctgttggtggtgatggaacgttactacaggcatttcatcaatatagtcatatgttatcaaaagtcgcctttgtaggaattcacaccggtcatttaggtttttatgcagactggttacctcatgaagttgagaagttgattattgaaataaataatactgaatttcaagtgatagaatatccattattagaactaattgtgaggtataacgacaatggatatgaaacacgatatcttgctttaaatgaagctacaatgaaaacagaaaatggttcaacattagttgtggacgttaatatacgtggtaaacattttgagcgatttaggggagatggattatgtatatcaacaccgtctggttcaactgcttacaataaagccttaggcggagcgcttatacatccatcattagaagcaatgcaaattgctgaaatagcttctattaataatagggtttttagaacagtaggatctcctttagttctacctaaacatcatacttgtttaattacgcctgttaatcatgacacgattaggacaactattgatcacgtaagtattaaacataaaaatgtaaatgccattcaatttagagtagcaaatgaaaaagtaaggtttgctagatttcgaccatttcctttttggaaaagagttcatgattcattcatatcaagtgatgatgaaagatga

SEQ ID NO: 1714 - DNA, 855 bp, Staphylococcus capitis
atgattttcaaatatgttatcgagaaatcagaaactgttaaatctttcttacagagaaatgattactctaaaaagacgattagcgccattaaacataatggcgctttatctgtaaatggacgttctgtaacagttagaaaagagatggctatcggagatcactttgaagttcatatgccaattgaaacaccgagttcaaatttgttaccttatccaaaacctttagatatcgtatacgaagatgaatttatacttatagttaataaacctcaattacaaaactgtgcaccttcaagggaacatcctcatgagagtttagtagagcaagtattagcttatttgatgaataaagatgagcagacaaatccgcacattgttactagattagatcgtaatacatcagggctcgtcttatttgccaagtttggacacattcatcatttattttcaaaggtgaaatttgaaaaagaatatatatgtttagcttatggtcgtactcaatctgaaggtgttatagaagcaccaattgctagagacaacgaaagtattattacaagaaaagtctctgacaaaggaaaatatgctaagactagttattacactatcgctcaaaataataacttgagtttatgtaaagtgaaacttcatacaggacgaacccatcaaatcagagttcatttccaatttatgggtcacccaatagtaggagatgatttatatggtggcatacatcgtctagttgaggggcaaagtttacaatgttgttcacttaagttcgttcatcccataaaacataataaaatcacaataaatgttgattacaaacaattaattcaattatttaacgtgctataa

SEQ ID NO: 1715 - DNA, 1386 bp, Staphylococcus capitis
ttgtctaacgacacagagattaaagataaagtgcgcgaagacgtatatgatgaagaattattaaatagattattagatggaaatgacatcgaccaatttagagatgaatttttagcaatgcataattacgatcaaagtgaatactttgaagacacggatgataataatagacaaaaaatatttgagttcttatcacctaaagaagttgctaatttctttgatcaattagatattgatgatgaagattacgaagaacttttcgataaaattaatgccaattatgcaagtcatgtattagaggaaatgtcttatgataactcagttgatattttaaataaattatcaaaatctaaagtcgctagcttactaacattaatggataaagatgaagctaatgaaataaaagctttattacattacgaagaagatacagctggcggtatcatgacaacggaatatatctcattaaaatccacaacaccagtgaaagaagcgttaatgcatgtaaaagaacaagcacctgatgctgaaacgatttatgttattttcgctgttaatgaagcgggacaactggtaggagttttctctttaagagatttgataactgctgaaaatgattcttatatcgaagatgtgatgagcgaacgtgtcattagtgtgaatgtggctgatgaccaagaagatgttgctcaggtcataagagattatgattttattgcagtgccagttgttgattatcagaaccacctattaggtatcattactattgatgatattttagacgtaatggatgaagaggcaagtgaagactactctcgtttagccggtgtatctgatattgactctacaagtgattcagttatcaaaacagccagtaaacgacttccttggctaattgtcttaactttcttaggaatgattactgctactattttaggaagttttgaagatacattatctcaagtcgctttattagctgcgtttattccaattattagtggtatgtctggtaattcaggtactcaatccttagccgtttcagtacgtaatatttctactggtgaaattaatgaacaaagtaaatttaaaatagctttaagagaagctggaagtggatttttatctggtttagtttgttcagtggtactattcttaattattgtagttatatatagacaacctttattagcactaatagttggaggcagccttacatgtgcaatgactgtcggaacattagttggctctatgattccattaatcatgaataaatttaaaatagacccagcagttgcaagtggtcctttcattactactataaatgatattgtaagtatgttaatttacttcggtttagcaacatcatttatgtcatatttaacttag

SEQ ID NO: 1716 - DNA, 1845 bp, Staphylococcus capitis
atggagtttttatcattagttatcgtagttgttgctgcatttttaactcctattatcgttaaccgacttaacattaattttctgcctgtggtagtggcagaaatcttaatgggtattgtcataggtcattctttccttaatattgtggaaagagattctgtactaaacatattatctactttaggctttatatttttaatgtttttaagtggattggaaattgattttaaagcatttaaaaaagattcacgttctagacaaggaaagaataaacaagaaaagaatttaccaagtcatttaaatttagctttaactgtatttggttttatcatgttgatttctatcatcttggcttacgcttttaaatggttaggtttagtagatgatgtattattaatggtcatcattatatcaactatttctttaggcgttgtcgtaccaacacttaaagaaatgaatatcatgcgtacaacaataggtcaatttatacttttagttgcagttttagctgatcttgtaacgatgcttttattaactgtttatggcgctattaatggccatggaggcagtacgatatggttaactggaatactcatagtatttacaattattttctacatactcggtggcgtatttaaacgcatgtcatttttacaaaagttaatggatggcacaactcaaattgggattcgtgcagtctttgcattaataattttattagtagcacttgctgaaggtgtaggtgcagagtatattctaggtgcattcctagccggtgttgttgtctcattattaaatcccgatgaagaaatggtggaaaaattagattcatttggatatggattctttattccaatattctttattatggtgggtgtagatctcaatataccatctttaattaaagaaccatctctgctcttaattattccagtgctcatcatagcttttgtagtgtcaaagcttatcccagttttatttataaaacgttggtttgatactaaaacgacgattgcttcagcatttttattaacttcaactttatctttagtcatagcggctgcgaaaatcgcagaacaacttaaaacgatttcagctgagacctcaggtatattaattttaagtgcggtcattacttgtgtatttgtgcctatcgtttttaaaaagttgttcccaatacccaatgaggttaatcgtcgaattgaagtgagtttaattggtaagaatcagttaactattccgattgctcaaaatttaacatcacagttgtataatatttcgttatattaccgtaaggatttaagtgatagcagaaaattatctgacgaaattacaatggtagaaattgccgattatgaagagagtttattagctcgtttaggtttattcgaaaaagacatcgtagtatgcgcaactaatgatgatgatattaataggaatgtagcattaatggcaaagaaatacggtgtcgaccgtgtgatttgtagattagaaagctctaatgaagacgcggaaattaaagcgcaagacattgaggtgtttagtaattatctaagtaataaaattttactaaaaggtttgatcgaaactccaaatatgctaaaccttttaagcaatgtagaaacatctctttacgaaattcaaatgttaaatcatcattatgaaaatatacaactgcgtaatttcccatttggaggcgacatcatattcgtacgaatagtacgtaataatgaatcattagtacctcatggtgatacacaactacgttataaagatcgtcttattgtgactggttcaaaagaatacgttgatgaacttaaacaagaattagaattctattattaa

SEQ ID NO: 1717 - DNA, 771 bp, Staphylococcus capitis
atgttaaatttagagaacaaaacatatgtcatcatgggtattgcaaacaaacgtagtatcggatttggtgtagctaaggtattagacaaattaggtgcaaagttagtatttacatatcgtaaagatcgtagccgtaaagaattagaaaaattattagaacaattaaatcaatctgaacattatttatatcaaattgacgtacaaagtgatgaagatgttattaatggtttcgctaaaattggtgaagaagtaggaaatattgacggcgtttatcattcaattgcgtttgctaatatggaagacttaagaggacgcttcaatgaaacttcacgtgatggcttcttacttgcacaagatattagttcttattctttaacaatcgttgcgcatgaagctaaaaagcttatgccagaaggtggaagtatcgttgcaacaacttatcttggtggtgagtttgctgttcaaaactacaacgtcatgggtgttgctaaagcaagcttagaagcaaatgttaaatatttagcgcttgatttaggtgaagataatattcgtgtgaatgctatttctgcaggaccaattcgtactctaagcgcgaagggtgtaggtggcttcaatacaatctttaaagagattgaagaacgtgcaccattaaaacgaaacgttgatcaagaagaagtaggtaaaacggcagcttacttattaagtgatttatcaagcggtgtaactggtgaaaatatccatgttgacagtgggttccacgcaattaaataa

SEQ ID NO: 1718 - DNA, 1092 bp, Staphylococcus capitis
atgttaaataaagtttggtttagaaccggcatatttattatcatgctgctcatactcatcaaactatttatggaagtacatgaagtatttacacctattgcgacgattatcggctctgtattccttccattcctaatcagtggttttctattttacatatgtttaccttttcaaaatattttggaaagatggggatttccacgttgggcaagtattttaacgatatttatcgggttaattgcaattatagcaattgtggtttcatttatcgcaccgattattatttcgaatattaataatttaattaaacagacaccagcgttacaaaaagaagctgaacatattattaatttctctttaaaacaaatggacaaattacctgatgatgtgactcatcgtattaataaggctgttagatctgtaggtgatggcgcaacatcagttttatctaactcagtcacttacattacatcattcatttcaacagttttcttattaatcatggtacctttcttcttaatttatatgttgaaagatcatgagaaatttattccagctatagggaaatttttcaaaggtgaacgaaaagtattcatcgtagatttattaaaagatttaaacttcactttaaaatcatatattcaaggtcaagtaacagtcagtgtgattctaggtattattctttacatcggttatacaatcataggattaccatacacaccattacttgttttatttgcaggtgtggcaaatttaattcctttcctaggtccatggctctcatttacacccgcggctattcttggcatcattgaaggcccaacaacatttatatgggtttgtgttgttacattaatagcacaacaacttgaaggaaacgtaattactcctaatgttatgggtaaatcattaagtattcacccacttacaattattgttgttatcttagctgcaggagatttaggtggatttacattaattctaatagctgttccattatatgcagtaattaaaacattagttagcaacatctttaaatatcgtcaaagaattattgataaagcaaacagtgacgttaaagatattaaataa

SEQ ID NO: 1719 - DNA, 747 bp, Staphylococcus capitis
atgacagagtttaacgctggaaaaataaataaaaaagtaatacacagtgacattctagatagagatgtaacactctccatttatttacctgaagaatatactgagttgtttaagtatcaagttattatatgctttgatggattagatttcttaagattcggtagaattcaacgtacatacgaacagttgagaaaggataattctattcaaagagcaattatcgtcgggtttcattatgaagatattgataaacgacgagaagagtttcatccatcaggcagtcgttcacatttgacagttcaagcaattggtaaagaaatattaccttttattgattctacttttccaacttataaagtaggtaatgctcgattgttaattggagatagtttggctggtagtatcgctttaatgactgctctaacatatccaactatatttagtcaggcagcaatgctaagcccaatgtatgacgataatgttaaacaaaaagtagttaattgtgataatagaaatcaacttacactgtggcacgcaattggcttagaagaggaagacttcacattacctacaaatggtaaacgtgctaattttcttacgcctaaccgtgaattagctgaccttattaaagattatgatgttgattattactatactgagttcgagggtgggcatagttggaaatcatggaaaccattattaggagatattcttgaatatttcttgagtgatgtcattctagattaa

SEQ ID NO: 1720 - DNA, 510 bp, Staphylococcus capitis
atgattctaggattagcattagttccgtctaagtcattccaagaagaggtgaatgcttatcgtaaacgctatgatacgcattatgcacaaatcatgcctcatataacaattaaatctcaatttgaaattgatgataatgaattagattctattaaagaagaagtgaaaaaacgtattagtgacattcaaccagttgatgttcatgcaacgaaagcttcaagttttgcaccaacaactaatgttatttacttcaaagtagctaaaactgattctttagaaaaactttttgatcaattcaatactgacgagttttatggtaaggctgaacatccatttgttccgcactttacaattgcacaaggcttatcaagtcaagaatttgaagatatctatggtcaagtaaaattagcaggggtagaccataaagagacaattaacgaactttctttattacaatatagtgaagaagacgataaatggacagtagtagaaacatttgagttaggataa

SEQ ID NO: 1721 - DNA, 822 bp, Staphylococcus capitis
atgttatcaagtgttgaagagaataatcgtggtaagcaaatggggtatgtatacttctcatggttactaggtttattagtcggcatggtcgtaatgaacttgttaatcaaagtacaccctactcactttgctttcatgatgtctctcgtagttcttatcgcatgggtattatattattttgttaatatacaattaacgaattataatacgaaacctgtctcagaacagcttaaacaaatcgttgatgttacaaaacgacatctcgtattatttcctgggatattactacaaggtgcagcaatttcagcattagtgcctatacttcctaaatacgctacaaaagtaatcaaagtttctaccgttgaatacactattgcaatcattataggtggtattggttgtgcattttcaatgttgttcttatcaaagattattgataataatagtcgtggatttatgtataccattatctttggtggtttcatattatatacgttattaatatttgctttatcattgttaactaatatctacttagtttgggtaataggtctctttattggattaatgtatggaatacttttacctgcgtggaatacttttatggctggtcatattaatcctgaagaacaagaagaaacttggggcgtatttaatagtgttcaagggtttggatctatgattggaccattagttggtggattaatcactcaatttacaaataatttaaataatacattttacttctcagctatgattttcctatctttagctgtattctatggttattactttataagtagtagacaaaaaaggaaataa

SEQ ID NO: 1722 - DNA, 216 bp, Staphylococcus capitis
atgattacgaatggtgatgctgggaaccagatgactagaaacaaacttacaaatgcgagtaaaaagcctgcagttaaaacaatctttgcaccaaatttcttaagtaaaaatccgataacaaaatttgttgctgcatcagctataaaatgtatagaaaatgcaaatgaagtaattgcgattgcaatcgacgtcactgttggcaagaagttaatatag

SEQ ID NO: 1723 - DNA, 1176 bp, Staphylococcus capitis
atggttactcaaaataaaaagatattgattattactggatcatttggtaacggtcatatgcaagtcacacaaagtattgtcaaccaattgaatgaaatgaatttagatcatttatcagtaatacaacatgatttatttatggaagctcacccaattatgacttctatttgtaaaaaatggtatatcaatagctttaaatattttagaaatatgtataaacgtttttattatagccgccctaacgagcttgataaatgtttttataaatattacggattaaataaattaatcaacttactcataaaagaaaaaccagatttaatacttttaacattccctacacctgtcatgtcagtacttactgagcaatttaatattaatattccaattgcaactgttatgacagattatcgcatgcataaaaattggattaccccagattctcaaagatattacgttgctacagaggatactaaagatgatttcgttgaagcaggcgtgccagcttctcatataaaagtaactggaatccctattgctgataagtttgaagactccattgataaagaagcttggttgtctaagcatcatttagatccaaacaaaccaactatcttaatgtcagcaggtgcatttggagtttctaaaggtttcgattatatgattaatgaaatcttagaaaaaagtcctcactctcaaatagtgatgatatgcggacgtagtaaagaactgaaacgctctttaaaagcaaaattcaaacataatccaaacgttttaattttgggttataccgactatatgaatgaatggatggcttcaagtcaattgatgattactaaaccaggtggaattacaatttctgaaggactcactcgttgcattccaatgattttcttaaatccagcacctggtcaagaacttgaaaatgctcattatttcgaagataaagggttcggtaaaattgctgacacaccaaatgaagccatcgatatcgtatctcatttaacaaatcatgaagacagactagaagctatgactaatcaaatgcgattatcaaaagtaagttattctactcagaagctatgtagagatttattagatttaattggtcactcatctcaaccagaagaaatctacggaaaggttcctttatatgcaagattcttcgttaaataa

SEQ ID NO: 1724 - DNA, 1485 bp, Staphylococcus capitis
ttgaatgcgagtgcgttgttcgagaaaataagagtaaaaaatgtaattggaacactagataaaaatgtagatgatattactactgattcacgtacagctaaagaaggaagtattttcgtagcatctaaaggatatacggtagatagtcataaattttgtcaaaatgtaattgaacaaggttgtagtattgtagtggtaaacagggaacttgaacttgatggggaagtgactcaagttgttgttccagatacattaagagtagctagtttactagcacatacgttatttgattttccaagtcatcagttgactacatatggtgtcacggggactaacggaaaaacatcaattgcaacaatgattcatctcatttatagaaaattaaataaaaatagtgcctatttaggtaccaatggattccaaatcaatgaaacaaagactaaaggtgccaacacaacgcctgaaacagtttcattaactaaaaagattaaagaagcagttgatgctgatgccgaagctatgacaatggaagtatcgagtcatggtttatcacttggtcggttaagaggtgtagaatttgatgttgcgattttctcaaatctaacacaagatcacttagattttcacggcactatggaagcatacggccacgcgaaatcattattatttagccaacttggtgaagatttagctaaagaaaaatacgtcgtacttaataatgacgatgatttctctcattatttagcaagtgtgacaccttatgaagtgtttacatatggcatagataacgaagctcaatttatggctaagaatattaatgaatcgttacagggtgtggagtttgatttaagtacaccatttggagattatcgagttaaatcaccatatgtaggtcgattcaatatctctaatattatggctgctatcattgcagtttggagtaaaggcgcttctatggaagaaattattaatgcggtaacttctcttgaacccgtagaaggacgattagaggtactcgatccttcattaccaattgatttaattattgattacgctcatacagcagatggtatgaataaattgattgacgctgtgaaaccttttgttaaacagaaattgattttcttagttggtatggctggagaaagagacatgactaaaacacctgagatgggtagcgtagcatgtcgtgcagattatgttatctttactcctgataatcctgcaaatgacgatcctaaaatgcttacagctgagttagctaaaggtgcaactcatgataattatgtcgaatttgatgatcgcgctgaaggcattaaacatgcaatagatgttgctgaacctggagatacagtagtattagcatctaaaggaagagaaccttatcaaattatgcctggccatgtgaaagttcctcatagagatgatttaattggattagaagctgcttataagaaattcggcggtggacctgttgaagattaa

SEQ ID NO: 1725 - DNA, 165 bp, Staphylococcus capitis
atgttgatagcgattcctgacttattttggtctgtagaactgcccctcgacttaactgttaatgatttacatgatgaattattaatgcaattttttaatttttatactgaaaatgaagccgatgcactcgcacgtgacatttgtgattggatagcaacaaactaa

SEQ ID NO: 1726 - DNA, 1563 bp, Staphylococcus capitis
atgaatttaaaggaagaagtagagtcaagaaaaacatttgccatcatctcgcatccggatgctggtaaaactaccttaactgaaaaattattatacttcagtggagcgattagagaagctggtactgttaaaggtaagaaaacagggaaattcgctacaagtgactggatgaaagtagaacaagaacgtggtatttctgtaactagttcagttatgcaatttgattatgatgattataaaattaacattttagatacaccaggacacgaagacttctctgaagatacgtaccgtactcttatggcagtagatagtgctgtcatggtcattgactgcgcaaaaggtattgaacctcaaactttaaaacttttcaaagtatgtaaaatgagaggtattcctatatttacgttcatcaataaacttgaccgagttggtaaagaaccatttgaattgttagatgaaattgaagaaacattaaatattgaaacgtatccaatgaactggcctgtgggtatgggtcaaaatttcttcggtattatagatagagcgactaaaactattgagccatttagagatgaagaaaatctattacatctcaatgatgattacgaattagaagaagatcatgatattaaaaatgatagtgcctttgaacaagctattgaagaaatgatgcttgtggaagaagcgggcgaagaatttgataatgatgcgttactaaacggtgagctcacaccagttttctttggttcagctttagctaactttggtgttcaaaacttcttaaacgcttatgttgaccacgcaccgatgcctaacgctcgtcaaacaaatgaagatgttgaagtaagtccatttgatacagacttctcaggatttattttcaaaatacaagcgaatatggatcctaaacacagagaccgaattgcgtttatgcgtgttgtaagtggtgcctttgaacgtggtatggatgtaacattacagagaacaagtaagaaacaaaaaataacacgttctacttcattcatggcggatgataaagaaactgttaaccacgctgtagctggtgatattattggtttatacgatacaggtaattatcaaataggggacacacttgtcggtgctaagcaaaaatatagtttccaagatttacctcaatttacgcctgaaatctttatgaaagtttcagctaaaaacgtgatgaaacaaaaacatttccataaaggtattgaacaacttgtacaagaaggtgcaatccaatattataaaacgctacacaccaatcaaattattcttggtgctgtaggtcaattacaatttgaagtgttcgagcaccgtatgaagaatgaatacaatgttgatgtagtaatggaaccagtcggaagaaaaatcgcgcgatggatagaaaatgaagaagatattaaagataatatgaacacttcacgttctatattagtgaaagaccgctatgacaactttgtcttcttatttgaaaatgaatttgctactcgttggtttgaagagaaattccctgatattaagttatatagtttattataa

SEQ ID NO: 1727 - DNA, 801 bp, Staphylococcus capitis
atggatccaagtttgattttaccttatttatgggtactcttagtgcttgtgttcttagaaggtttattagcagctgataacgcaatagttatggctgtaatggtaaaacacttaccaccagaacaacgtaagaaggcattgttttatggtttattaggagcatttatatttagatttatagccttattcttaattagtattattgcgaatttctggtggattcaagctgcaggtgcaatctatttaatctatatgtctatcaagaatttgtgggatttcttccataaatcagaagaagagcatcataaagactcaggtgatgatcatcactatgatgattcaggaaatgaaaagaaagttgggcctaaagcattttggggcacagttttcaaagtagaatttgcagatattgcctttgctattgattcaatgttagctgctttagctatagcagtgacattacctaagatggggattcacttcggtggaatggacttaggtcaatttatagtaatgttcttaggtggcatgattggtgtcattcttatgagatttgctgcaaattggttcgttgaattattaaataaatatccaggtttagagggagcagcctttgccatcgttggttgggttggtattaaattagttgtaatggttcttgcgcatcctgatattggcgttttaccagaagaattccctcatggtgctttatggcaatccattttctgggcagtgctaattttactagtgattataggatggtttacttctgtcattaaaaataaaaagaagaataaatag

SEQ ID NO: 1728 - DNA, 1932 bp, Staphylococcus capitis
ttggataatgataaaaaacaagtcataccccgtagtcagtatcgtcgaaagcgacgtgaatattttcataatgaagaaagagaagaacgtattaaacgtgaacgagaagctctaaaacagcaagttgctaaagaaaaacaacaatccaaggttaacgaagaacgcgttaaagataatttacgtaaagcaagaattgagaaattaactcaagaagaaattcaacaacaacacgaaatagcaaatcaaaggcaaaaaaatagacatgaagagaccaatcaaacagatgcattaaaaccttcttcaatgagcaaaaaatcttctaattctaaagaattaagtgatcacactcaaacacatttaacttcagaggatagaccacgaagtgaagttgaagatgaacaagtaaatcataatcataaagaaacaagagtgccatattcaatcactaaccaaccgaaggacttagagggggaagacaaaaccgctaaaaccgctaaagaaaatgatgacaacgttcaacaagaacagtctagtataaatgaaacaacagataaaaaagaggttagcactaaagatagtgattatgagaacaataatcagatagaaacttctaatgatataacagataagagaaaaaataatgatgagcgtcatttagattctgaacaaaacaaagaaaagccatattcatctataaatcatcattcagatgataaggaaaatgatgataaaggttatgataaaaattcaaagaaagattctctaaaaacgagtaataaaaatgataattttgaatacatcaagaatgcaataattgctttctttaaagaacactggccaaaacttttaattatcataggtattatcttattattacttatattaaatgctatatttacaacagttaataaaaatgatcatactaatgatagtgcttttaatggaaatgacaagaattatacaactacaatgaaaaacgctaataactctgtcaaatcagtagtaactgttcaaaacaatgtatctaataatactactattcctaaaagtaaatcaggttcagataatgaaattggttcgggtgtcgtctacaaaaaagtaggcgactctatttatattttaacgaatgctcacgtagtcggagataaagataaacagaaagttacatacaataataataagtctgttgaaggaaaagtggttggcaaagacaaatggtctgatattgctgttgtaaaagctaacttatcagatgaaagtatgaaaccaataactttaggtgattcaaataacttagtattaggagaatcaatattagtagttggtaatcctttaggagtagattttaaaggcagtgtttctaaagggattatctcaggtttagatcgtcatgtacatgtggatatagataaagacaacagttatgatgtgttgatgaaagcatttcaagttgatgccccagttaatccaggtaactctggaggagctgtagtagataaagatggtagacttataggtattatttcgttgaagatagatatggaaaatgtagagggtatggcctttgcaattccgattaatgatgtacgtaaaatagcacaacaattagaagacaaaggaaaagtgcaataccctaacactggtataaaaataaaaaatgtagcagatatttcaagtgaagaacgagaggaagccaaccttccatcaagtgttaacaatggtgtgcttgttaatgatgttaaagaaaatagcttaggtgaaaaatcagggttgaaaaaagatgatgtaatagtagaattagatggtaaaaccgttgaagataatttacgctatagacaaattatttttagccatagagatgatttaaaaactttaacagctaaaatctatagaaatggtacagaaaaaactattcaaattaaactgaaataa

SEQ ID NO: 1729 - DNA, 1359 bp, Staphylococcus capitis
atgtctatattaagtcaattacttaagaaatcaagtcctcaacaagggattgttctttattatctctttgccattgtggttgcatttctattattaaatttaccttttgtacataaacatggagttgatgttaatcctatagatacattgtttgttgcggtttctggaattagtgtgacaggattaacaccagtaaatatagttgatacttattctacctttggacaaataatcattttgattattttaaatataggtggaataggtgtcatggctatcggtacattactctgggtagtgttgggtaagcacattggtataagagaacgacaacttatcatgttagataataataaagacacgatgagtggtactgtaaaattgattttagagattgtaagaacaatatttgtaattgaacttgtaggcgcattattattagcattttacttttatcgagataatcctgatttaaaacacgcttttatgcaaggtgtgtttgtatcggtttctgctacaacaaatggtggtttagatataacgggagaatctcttgtgccatatgcaaaagattattttgttcaaacaatagttatgtttctaattgttttaggttcgattggatttccggttcttctcgaacttaaagcatacataaaaaatagagtaactaattttagattctcattattcactaaaataacaacgtctacatatctatttttatttgtattcggtgtactatctatattgttattagaacataaccatgccttcaagggtttgagttggcatcaggctctatttgattcattattccagtctgcgactacacgtagtgctggtttacaaacaattgatgtgtcacatttcagtgatgccacaaatattataatgagcatattaatgtttattgggtcctctccaagttcggttggtggaggtatccgtacaacgacttttgctattcttattctttttattattaattttaataatactgctgataaaacaggtatcaaagcctttaatagagaaattcatattatggatattcaacgttcctttgcggtatttacaatggcatcaattctaacttttgtaagtatgattattattgctgctactgaacaaggtaaattgacatttattcaaatcttttttgaggtaatgtcagcattcggtacgtgtggcttaagtttaggtgcaactgataatattagtaatttaactaaaattgtactaatgattctgatgtttatcgggcgagtcggcttgatatcatttattattattttagctggacgtaaagaacctgataaatttagctatcctaaagaacgaattcaaataggataa

SEQ ID NO: 1730 - DNA, 1509 bp, Staphylococcus capitis
atggaaaaaaatgaaaatattactgtagatgtgattgcaacctcagatatgcatagtcacttcttaaacggggactatggatcaaatatctacagagcaggcacatatgtcaaagatgctcgtaaacaaaataagcatgttattttacttgatagtggaggtagcttagcaggttcgttagcagcattttattatgcggtagtagctccttataagcgtcaccctatgattaaattaatgaatgctatgcaatacgatgctagtgggataagccctaatgaatttaaatttggtttgtcattcttgacgcgttcagttgcgttagcccgttttccttggttatcagcaaatatagagtacacagtgacgcgtgagccatatttttcaacaccatatacaattaaaaactatgatgatttaaagatagctattgtcggattaacagctgatggtttaatgaaaaatgaatatgctgaaatggaagatgatgtcagtattgaaaagacgcttctctcagctaagcgttggattagatatattcatgaagttgaggagccagattttcttatagttatttatcatggtggtcttaataaaataagtaataagagtaaacgaaacgaaagaaatgcgaacgaagctgaaaaaattatggaagaattgggtgttatagacttaattattacagctcatcaacatcaaactattgttggtaaagatcatgaaacagtttatgtacaagcaggtcaaaatgctgaagagttagtacatttatcaattcattttaaaaagcgtacgagttcatatgaaatagagaatatcaaatcaaaagtgatagatttaaatgactataatgaagatcaagatttactaaatgagacgcattatgatcgtaaagctgtagagtattgggcagatgaaattatatctaataacaaatttaatctaattattgatagtattgaagacattatttgtcagccacatccatttgctcaattacttcatgatggtataaaagctgcgtatgattataaaatctcatgtgtgcacctacctataaacggagaggaaggactaggtggagttattcgcaatagggatttatatgaggcatatccacatccagacaaacctgttgatctaacggtaagagggaaaaacataaaagatattctagagtatagctattcccatatagaattcgaacaaggaaaattaagtttaacaattattgatgaaacgttgtttacattctggcaaggtattaattatacagtcgatatgaaacaacagccataccacagagttaaaatagataatatagatgagaatcaaatgtatagaatcaccatgacagattattgttatagaaattacaaagattacttgaaagatgcgattgttcatgaaactcatgatgaaacaatggggggactgattagaaataatctgaaaaatgcagattacaatattaaagtaatgaataattttaaagttaatctctaa

SEQ ID NO: 1731 - DNA, 603 bp, Staphylococcus capitis
atgaaaaatgtttctaaagctttaatttggtttattataagcttcatcgtctttcacgcaattttatttgtgatgtggggtgaacaccaagagtactggtacttatacactggcattatgctaatagcaggaataagttatgttttttatcaaagagacattgcatctaaacgattattaacttcaattggaattggtataatcacaagtattgtacttataatcgtacaactcattttttcacttatttcatcagaattatcgtacgcatcattaatcaaagaattatcaagaacaggcgtttatttcaaatggcaaatgctaattacattaatatttgtaattccgtgtcatgagttatatatgagaactgttttacaaaaagaattaattcgtttcaacttacctaaatgggtaagcatattaatagttgcaatctgttcaagttcattatttatctaccttgataattggtggattgtattctttatctttgtaactcaaatcattttatcattaagttatgaatatactagacgaatagcaactacttcaatagcacaaatagttgctataatattgttattaatatttcatggataa

SEQ ID NO: 1732 - DNA, 186 bp, Staphylococcus capitis
atgactgttgcagaagtaggtaatattgtagaattttatgacggtttaagaggccgtgtagagaaaattaatgacaattctgttattgtagacttaacaattatggaaaactttaatgaattagatttacctgagaaaactgtcattaatcataagcgatataaaatcgttgaacaagaaggttaa

SEQ ID NO: 1733 - DNA, 987 bp, Staphylococcus capitis
atgaagtttattagtaataataatattactgatcccacgctcaatctagcaatggaggagtacgttcttaaaaatcttccagctgaagaaagttactttttattttatattaacagaccttcaatcattgtaggcaagaatcaaaatacaattgaggaagttaataaagaatatattgataagaacagcattgatgttgtgcgtcgtatatctggaggtggtgcggtatatcacgatacaggtaatttaaactttagctttattactgatgatgatggcaatagttttcacaactttaaaaagtttacattgccgattgtgcaagctttacaatctttaggagttaatgctgaaatgacgggccgtaatgatatccaagttggtgaagctaaaatttcagggaatgcaatggtaaaggttaaaaatagaatgtttagtcacggcactctgatgttaaattgtgaacttgatgaagttcaaaatgcgttaaaagttaatcctgctaaaattaaatctaaaggcgttaaatctgtaagaaaatgtgtggctaacattgatgaatttttagaagaaccactaaatattaatgaatttaagcaaattattctaaagactatttttggggaaaatgaagtagaagaatatgtattaactgatgacgattggactaaaattaaacagttaagtaacgaaaaataccgtacttgggaatggaattatggtaaaaatcctaaatataattttgagcgtgaagaaaaatttgaaaagggttttatacaaattaaatttgatgttaaaaaaggacgtattgaacatgcgaaaatatttggagacttctttggagaaggcgatgtaaccgaacttgaatatgcacttgaaggttgtttacatgacttcgagcatattgaggaagcattatccaattatgatctataccattattttggtgatattgataaatatgaaattataagattaatgtcttaa

SEQ ID NO: 1734 - DNA, 219 bp, Staphylococcus capitis
atgaatcataatacaaatgtaaaatacactacacttgaagactttgtaacaacagttaatgatttaggtgtagaacttgtaattgatgaagcattaagagaagctaggaagaaaaaacttgagactcttatcgacgaagcacttgttaataagaatgagaaagatttcaaacagtacacagatgaatataaaaaattggaggcttttctcagtgaataa

SEQ ID NO: 1735 - DNA, 576 bp, Staphylococcus capitis
atgactatttttagtgaatcaatctatgttattagaaaaggtgacatgttaattcgaccaaggtatgatgaatatcagcaaacttcaggttcagaaattataagatttgataaatcacgaaaggtgagtccatttaaagttcaaagaattatcgagaggtcctgcaaattctatggtaatagctacctaagtaaaaaatctgaaactaatagaattacaggtatctctagtaaaccacctattttacttacccctttatttccaacttattttttcccaacacattctgatcgacaagacgaaaacatctggataaacatgcattatatcgacagcatcaaagaacttaaaaatcgtaaaagtaaagtgatatttgctaatggtgaatcctttatattaaacgtttcatatcatagcttatggcatcaatatacaaatgcgattatttattattatatggtagataaacatgcacgtatgaaatcaaataatccagaacaacccattgattataatcaatcatcgttaaatatatttgaagctctctcaaggtattctcttttagatgataagtag

SEQ ID NO: 1736 - DNA, 528 bp, Staphylococcus capitis
atggaaaaaaattacaacaagtatcaacaagaaagacaaaaagaacaatttcaagaatatcagaaaatgaacgaacaaaaaaagaaatccaagaaaggttggctgtggggatgcggcggatgtttagtcttaattattataatcattataggcatttctgcttgtactgctagcatcactaacactagtaactcaaataatagttcaaatgatactaacgctactactcaagaaaaagcagctttaaacaaagcaaaaatttattctgatactatgcatatgtctaaacaagcaatatacgatcagttaacatctgatgcaggtgaaaaatttaaagaaaaagacgctgattatgcaataaaacatttaaaagctaactataaagagaacgctaagaagaaagctaaggattacgttgaacaacaaaatatgtcaaaagatgcggtgtataatcagcttacttcatcttatggcgagaaatttactaaagaagaagcgcaatatgctgtagatcatctagaaaattaa

SEQ ID NO: 1737 - DNA, 672 bp, Staphylococcus capitis
atgcaacaagaatcaacatcatggtataaacaagaatggtttattgttttaactttaatatttattttcccacttggtttatttgtaatgtggcgatatagtaaatggccttctattacaaaatcaatcataacagtggcaatagtagttatagcgttatctagtataacttatgttggtaacctcaaaacaaataattatgaaacacaacctaccgtaaagacagataatgaaacagcagatacagccaataatacagaaaacataaattatgatgatagtagtacagataaagaaataaacgataagtatcaaaaagatgacaatacaacaaataaagaaaacgaggccacatctgttgaaggtacacgtttagaaaaagctgcactagaaaaagcaaaaacatattctaaagatttgcatatgtcaaaacaaggaatatatgatcaattaacatcagaatatggagaaaagtttaataaagaagatgcacaatttgctatagatcatcttgatgccaattatgaaaaaaacgcactagaaaaagcaaaatcttatgctaaagatatgcacatgtctgatgatgcaatttacgatatattagtatctgaatatggtgagaagtttaccgactctgaagcaaaatatgctgtagaccatttagataattaa

SEQ ID NO: 1738 - DNA, 2982 bp, Staphylococcus capitis
atgaaaagtatttttaatacgtctagctattacattattagagctcctttacttcctgtttccatttataatacttatttaaaaaatgatgaaatagattattcctctttttttcaaaacaaaattattgaagaaaccattttgactacgacatatcatttatatcaaagcttaactaatatttcatttgatagtgagacgaagaaagtgcgtaatgctaaagagagctttttaaaatatcttattagaatgagtacgaggggcacgccatatggattgttaagtggcgtatcattgggacaacttgctgaaaaaacaaatatacaaatacaagaagatgttaattactattataaaagcgtaaaaatagatgggtcttggttaagcaaattaattcattttttagaaagtaattatgattattatcaagatagttacgttatttggaatgaaagaaattacattaccgaccagcgtatatatttggataatcaaacatgtctcattcaggaaaataatagagaactagtctcgatcaaaaataatgatttgcttaaattcattaaacaaagcttgcaagaggatttaacatttaaagatctaataaaattaatttcagaaaaatttttaattaatgacgagcaggaaataaaaagttttatacaaaatctattagacaaagaaataatatttacaagcttaagaactgcttttaaaaaagaaaacccgttagattatttattatgcttttatagagactttgataatgattttattagatcacttcaacttatacattttgaaatgatgaagtaccaaattatggaaattgggaaaggtaagaaaacctttttaagaattcgagagttgatgagtcatttatttaaagctaaagagtatattcaaattgatactaaaattcaaactaaaaataattatttaagtaagaaaattgctagaaatattagtgaagctgcatatctactatggttactttctccagatgatttgggtattagcactaatcatgattttcattatagttttttagaaaaatatggtttagaacaaattgtaaatttaaaggaattactttctgatatcaatggtatgggttattgcactaaagaagataaatctataaaaaataatagtccttttttgaaagaaaaatattattacgcactttctcataatgaagagatagaaatcactgaaaatgatttcttagacatagaaaagaaaaacactattcctatcgagagagcgcctttatcttcagaaatatatagtgagttttattatggtaataatataaaaggatatgatgaatttttggtgattagtcctattgtatcttctttcaatgctggtgcgacgatggggcgcttttctcaggaaattgatagggacatacgtaagcaattagataacgaaatatatgaacaatatattgaatatagtaatgaaaataacactgaagttattcatataaatgaaattcctaaatatgccagaaatttaaatattaatcatactggtactacaaaatttaaagaacttgacctagatatgccatgtagttcaattacattagacgatttatatgttggaagtacttttgataaattatatttattttctaaaactttaaattcaagaatcttatttattactcattctatgttgaattatgttttatgttctaatttatataggtttctcagagaggtgtccttaggtaatacaaaatttatccaacctattaaagacgatggaattgagggatttaattattgtcctagaattagatataaaaatgtaattttaaagcccgcaacatggaaattaaataaagatatgttttcaagtagtgaaaaagaaaattggattgaacaatttcataagatccaacaattttataatatccctaatgatgtcaatatggcttttggcgataataggttaacgattaatttgtctaatgatgcgcatatatctatattaaaaaaagaaattgaaaagcaaggtagagtttgtcttttagaggaatttatatctaagtctaacaatgatagagtgatagaaattgtgacgccaatatatagaaaagctaaatctaatgaaaaaagtttaatgattcctaaaaatatatataagcgattggaaactaaaagggaatggctttcaatacatttgtatattgatgaaagctatcaaaatgaatttttaattcaatatatattaccgtgtttaagagaactttttgataataatcacttagaaagtttctttttcattaaatatagagaaaatgatcatttcattaagcttcgtttattaagtaaatcaaatgattcaatacatttatatcatgagataatgcaacttaaacaaaagtggcttaaagaatctgaattatctacttatgctattgtagaatatcaacctgaaatcaacagatatggtggtattgaaacaattgagatcattgaggattattttatgtatgatagttggttggcaattcatatcattgatcaaacatttaattatcctaaggaatttattgtagcaataactattatttttttaataaatgaattaaatataaaccaagaagaaattgatgaaattagacataacaatgttgaaaatttatatcgtaataatgagataagagaatataaaaatgagatggttaaacttactaaccctagagataattattgctatttacatgcaaagctacccaaacttcatcaaattttatataacaattataaagaaattgaaaaattaaaagtcgctttaagtagaggtttatctactcctagagcacatattattggcagtttgattcatatgagatgtaatagagtatttggcgttaatcgagataaagagaaatttgtactttctatttttaatgaaatagagaagacaaagaaatactggtgtggtgatattatcaatgaataa

SEQ ID NO: 1739 - DNA, 1245 bp, Staphylococcus capitis
atgaataaagtcgaagcaatgatgaaaaaagaagttgaatttttatcacactatgaaaatgctacagcactaattgagaataagagtgattgttggagttcttatacattgtcccatggttatcctggagtgatattgtttttaaatgaatttcaaaatttataccacgttaactttgatgaattaatacataaatatgtgttgaggataggcaaagaattagaaagaggaatagaaggttattctttgtttagtggtatatcaggtatagcattttcaattgatgtggtatctgatggtcatttacattatcgaaatattttgcagacactagatgattatttaatcgagtttatcaatagaaaaatgacgtgtataaatacagaagctaatcctagagaatatgatgtggtaagaggtttagcgggtattggtaggtatttgttaaacagagtagatgcaaatccgaaggttatttctagtttgatagaaataatgaatcactttagaggtatacattattcaaaaagatactggattgtttccaaggataatcaatttttaaatatagataaagaaaggttttctttaggaaatataaatttaggtttagcacatggcatattaggtccattctcgttgttggcgcttagtaaaataaaaggagtggaaattgataatcattcaagtttactttctgatattacggaatatttatttaagactgaatttcaatataatcaaagttggcttgatcgctatgatatagcagaaaagtattatccttcatactctatcagaaatggctggtgttacggggatactgggataatgaatacaatttggctattaggtttagctttaaataatgtaaatctcattgagaaagctaaaaatttaataattaaaataattagattgaataatgataatttattgagtccaacgttttgtcatggtctatcgtctcatttaactattctaaataatgtaaatagatactttaatatacaagaagttaatagttatctagaattaatccaggaaaagatattgtcacattattcttctgaaaatcagtttatgttttatgatatcgaattagaaaataatcaaacacgttataaaaataaggtggggttattagaaggacagataggtattcttttatcattattagattatcaagccactcatagtaattatttagaaaaaagttggaaaaatatgtttttaattagctaa

SEQ ID NO: 1740 - DNA, 615 bp, Staphylococcus capitis
gtgtttaatatccaaattttaccttctataaatgaaatagaaaaagaaaaaatactcgacattaatgactgcattgttattaattcaaagaagtccaaacccgatttgcttatcatttgggaaactagtaacgaatataatcagatgatagaaaataaagtgagttcaatacctatcatagtaataactaaaaataataacaaagaccgaaagtattacttttatgaaaaaggtgtagctttatatgtcatccttaatgacgaagaccattattttatagagtggctcattattaacgaaataaagaagcacttacactaccttcgacctaagctgctcatcgattttgaaaagcaattatttatttttaaggacaaaaaatatgcactctcccacattgaattgcaaattctaaattatctataccaaaatgtgaaccaatacgtctccagcaaagatctaaaaattcaagtttgggataccttagaatatgtagattctaatactataaatgtttacattcacagattaagataccatcttcaaaattgcgataatttggaaattataaataaaagatctacaggctacaaattagttatcaaagatagataa

SEQ ID NO: 1741 - DNA, 129 bp, Staphylococcus capitis
atggatatcattagaagagtttttagaattttaatcacaggctatattgttaaagccattagaaacctcatatctggtaaatcaggaaaatctaacaatggcaatgacaatgagaataaagaaaaataa

SEQ ID NO: 1742 - DNA, 555 bp, Staphylococcus capitis
atgatgattagaagagcgcgaccaagtgataataggcaaattgctaaattatgctatatcatatggaaagatatggagttagaactgactcaaacgtttactaaaaaacgtgtgattgaggcgatagaattaagcattgtaaatgttaaatatcgtacgtattatgagcatatttgggtatatgaaaaagaaggtgtcgtggctggttgtattatagcttatccaggtgaaaaggagctagatttagagagacaatggttgaatttaccgcttgaagaggatattcgtgaactaggtacaccattacctcaacaagaagcttacaatgatgaattctatattgaagcggtggctacttttcctgaatacagaggtcaaggcatcgctacgcaattgttaaaacatttaattgagactgataaaaatgcgaaatggagtttgaattgtgattatgagaatgagggcgctttaaaactctatactaaattaggatttaaacaaaatggagatattgatttgtatgggcatcagtatcatcacatgacattaaattaa

SEQ ID NO: 1743 - DNA, 939 bp, Staphylococcus capitis
atggcagatcaatatcaacaatattcaactgttaagaaatactggcaattgatgagacctcatactttaaccgcagcagtcatcccagttttagtcggaacagctactgcaaagctttatctactaggtagtgaagaccatttgaaattcagtttattcctagccatgcttcttgcatgtttattaatacaagctgcaacaaatatgtttaatgaatattatgatttcaaaaaaggtcttgatgatcataactctgtaggtattggtggcgctatcgtgcgtaatggtatgagtccaaaacttgtcatgaacatagcgattgcattttatattatcgcagcattattaggtatctttttagctatacaaagttcattctggattattccagtcggcatcgtttgtatggcaattggttatctttacactggtggacctattccaatctcatggacaccatttggcgaactattttccggcttattcatgggaatgattattatagtgttatcattctttattcaaacaggaaatgttcaaggttatgctttctggattagtattccaatcgttattacaattggacttattaatatggcaaacaatatccgtgaccgtgttaaagataaagaaagtggcagaaaaactttacctattttattaggtaaacgtgcctctgtgattttcatggcagccatgtatatagttgcttatgtattcgttattttcacagcattgttcaaagcaccaggatcactattttacttattagtgttattatcattccctatgccaattaaagctgtaagacgttttaataagaacgatacaccagctactatgatgccagctatggcagctacaggtaagaccaacacaatatttggtcttttatatgcattaggaatatatattagcgcactgttaggtgggctttaa

SEQ ID NO: 1744 - DNA, 1371 bp, Staphylococcus capitis
gtgaaaagaatggctgtgaatgttaaagaagaagacattgtcgataaattgtatgcgagcaccaaggactgggtgtctgttgaaactgaattaaatagaacaattgatccaagtactttattttatttaacagaacaggatgctggcgatcgcttttatatgcgcttaaatgacaatcattcttcatattttggatatcatgcagttcaaaggtttaaaaataactttgaaaataagcagtctatctttaaggaatgggaaaatttaaaaaatgagatcgaattaatacatcctaataccagtcaacaccacctaagattatgtggtggatttcaattttcaagtcataaatcagacgatgagtggcgagagtacgggttaaatcactttgtattacctaaagtattgatatctattgaaggggaccgcacattcatcacttatactactgaacgccaagattttaatattgaaacttttaaagaggtagtttcatattttgagaatacagaagttaatgaaacagaagatagtcttggagatgttacacgtgtggaagacatctacaaagacgattggcgagaactcgttgaagaagcgatagaaacaattgatgagactaaaaaaattgtactcgcgcgtagacgtttaataaaatttaataaagatattaatattccttacgttttaaatcaagctttaaaaaatgaaaagaatagctatatgttcttattagaatctaatcaatctatattcttttcacaaacgcctgaacaactcattaaagttcaggatggtgtactttcgacaaaggctgtcgcgggaacaattaaacgttctcataacgaagtagaagacgaagcgaatattaaagctttcttaaaagataagaaaaacttaggtgaacatcaatttgtagtggaaagtatcttgaatgatattaagcctttcgtacaagatgtagagtacaatgaaacacctaatattttaaaaaacgatcatttatatcatttatatacagagatcaaaggacatttaaacgaaaaatcatacattggtttaattgattgcttacatcctacaccagctctaggtggttatccaaaggatgaggcattagaatttattgagaataaagaatttggaactcgaggactttatggttctccagtaggtttcattgacgtttatgatgattgcgaatttattgttgcgattcgttcgatgttaatcaaaggagaccaagctacattattcgcaggttgcggtatagttaagaattctgatcctgatagcgaagtcgctgaaacagcagtcaaattttcaccaatgatgaatgcattaggagtagataattatgacaaatcatag

SEQ ID NO: 1745 - DNA, 1674 bp, Staphylococcus capitis
atgacaaatcatagcgacgcattgacgcaacaagttttcacgttcgcatctgaattatatgcatatggcgtacgtgaagtggtaattagtccaggatcacgatcaacgccgctagcccttgcattagaggcacatccgaaaattaaaacctggatacatcctgatgaacgaagcgcagcattcttcgcattaggacttattaaaggaagtaaaaaaccagttgcgatattgtgtacgtcaggtacagcagcagcgaactatacaccagcaatcgctgaaagccaaattagtagattgcctttaatcgtattgacgagcgatagaccacatgaattacgtagtgtaggcgcacctcaagcgattaatcaagtgaatatgtttagtaattatgtcaatttccaatttgatttacctatcgcagatggtagtgagcaattgctagatacgatacattatcagatgcaaattgcgagccaatatctatatgggccgcatcgtggtccgattcatttcaacatgccatttagagagccattgacacctgatatggatcgtgttgatttactcacatctgagaataaaacattaccgcattaccagaagagtattgctgttcatgatattagcgcaacattacagaagaaaaaaggccttattatcgtaggtgacttgcaacatcaagaggttgatcaaattctgacgtattctacaatttatgacttgcctattttggctgatccactaagccaattacgtaaaaataatcatcctaatgtgattaccacgtatgatttactttatcgtgcaggtttagatttagatgtagattttgttattcgagtggggaaacccgtcatttctaaaaagttaaatcaatggcttaaacgcacatcagcttatcaaatattagtacaaaataacgacaaaattgatgtctttccaacaccaccggatatttcttatgaaatttcagcgaatgatttctttagatctttaatagaggaagagaatgttcaacgtaaagattggctagaattgtggcaatcattagaaagacaatcccgcattgaaattaaagattacttgaaccatgcatctgacgaagcagcttatgtgggcgaacttattcataaattatcaaatgaagatgcgcttttcgttggaaatagcatgcctattcgagatgttgataatttaatgtttgaaaccgaagcggaagtttatgctaatcgtggtgcaaacggtatagatggagtggtatcaactgcgataggtatggcggttcataagaatgtgacacttttaattggagatttatctttttatcatgatatgaatggtttattaatggcgaagttaaatgatattcatattaatattgtgcttgtgaataacgatggtggtggcatcttttcttatttacctcaaaaagattcagctagtgaatatttcgaaagactattcggtacaccaacaggtttagatttcgagcacactgcattattatatgattttacttttgaacgctttgaaaacttaacagactttaaatatatggaattatcagcgatgggttctcatatatatgaagttttaacgagtcgagaggataatttgcaacaacatcaaattttatataagaagttgagtgatatcgttaatgttacattataa

SEQ ID NO: 1746 - DNA, 804 bp, Staphylococcus capitis
atgttacattataatttttttaaatctcaaaatgatagcaaacaattgcttgtgatgttgcatggctttattagtgattcgacaacgtatgacagtcatattgagcaacttcgtcaacatgtaaatgtattaaccattgatttacccggacatggtcaggatacttcagacatgagtgatacttgggatttcccgtatattgctcatgcgcttgatgaggtactgagtcaatatcacatgtatgacgtgtaccttcttggttattctatgggcggccgcgtagcgctatactatgctttaaatggcagtgtagcgctgcgtgggttgctcttagaaagtacttcagcggggattcaatcggaagcggataaagtggaacgtgttcaagtggatgcggctcgtgcgaaggtgcttgaaattgctggattggaaatcttcgtgaatgattgggagaagttgccgcttttccggtcgcagtacgaattggatgctgaggtacggaaggctattagggcgaatcgaatgagtcagaatcctgtgaggttggctaaagcgcttcgggattatggtacgggcaatatgccgaatctttggccacaagtgtcgtcgcttcgtgttcgtacgttaattttgacaggtgaaaaagatgaaaagtttgttcaaataggacagaaattaaaagaagagatacctaatagtcgaactgtacaagtttcagatgttgggcatacaattcatgtggaagatagtacggaatttgatacaataatattaggttttttaaaggaggagcaaaatgactag

SEQ ID NO: 1747 - DNA, 819 bp, Staphylococcus capitis
atgactagacagtgggaaacacttagagaatatgatgaaataaaatatgaatttttcgaagggattgctaaggtaacgattaatcgtcctgaagtacgtaatgcgtttacacctaaaacagtagctgaaatgattgatgcattttcacgtgcgcgtgatgatcaaaatatttcagttattatcttaactggtgaaggcgacaaagcgttctgttcaggcggagatcaaaagaaacgtggtcacggtggttacgtaggtgacgatgagattcctcgtttaaatgtgctagatttacaacgtttaattcgcgttattccaaaacctgttatcgcaatggttagaggctatgccattggtggcggtaacgtattaaatgtagtttgtgatttaacaatcgcggcagataatgcaatctttggtcaaactggacctaaagtaggttcattcgatgctggttatggttctggttacttagcacgtatcgttggtcataaaaaagcgagagaaatttggtacttatgtcgccaatacaatgctcaagaagctttagatatgggcttagttaatacggtagtacctttagataaagttgaagacgaaacagttcaatggtgtaaagacatgatgaaacactctccaactgctttacgtttcttaaaagcagcaatgaatgccgatacagatggcttagctggtttacaacaaatggctggagacgcaacactactttactacacaactgatgaagcgaaagaaggacgcgatgctttcaaagaaaaacgtgatcctgacttcgaccaattccctaaattcccataa

SEQ ID NO: 1748 - DNA, 1173 bp, Staphylococcus capitis
atgaagttatcattaaatacaaattcaaaatttttaagagcgccaagtatacgtcaattttcaaacagaatgaaacacattgatgattgtgtgaacttaactattggacaaccagattttccaatgcctgacgttgttaaagaagcttacatcagtgcaattagagaagataagacaagttattcgcacaataaaggcctctctgaaacacgacaagcaattagtaactatttcaagaataaatatgggttcgaatatagtgaagaagaaattattattactaatggagctagtgaagcgctagatacatctttgagaagtattattgaacccggcgatgaaattttaattccagggccagtatacgcaggatatataccacttattgaaacattaggtggcattcctatttacatggataccacacaattagaatttaaagtgacaccggaactcattaataaacatattacagagaaaaccaaagctattctacttaactaccctactaaccctacaggcgttatacttgaacgctcagaggtaaaagccatagtagatacacttgtagataaaaacctttttattattagcgatgaaatctacgctgaaaatacatttaaaggcgctcatacatccttcgcggaattcgaagaaattcgagatcaattgttactcattggaggcttaagtaaatcgcattcagctacaggtattcgtataggtttcctcattggtccagaatacttaattgaaaagttaacgtttatgcacgcgtataattgtatttgtgccaatgttcccgctcaaattgcttgtatcgctgctttaaatgaaggattagaggcaccacaatacatgaatgatgcttacattaaacgtcgtgattatttaaaaaataaacttgaatcacttggttttgaattaacagctcaaccggaaggcgcattttatatttttccaagtataaagaaattcactgaaaatgatttcgatttttgtgtagatgtacttgaacaagcacatgtcgcaatggttcctggctcatcgttcacagatatgggtaaaggatatattagaatttcatatgcttatgagatggatatgctcaaagaaggcatgcgtcgtctagagaactatttaaaccaaaattatcctgataagatgaaataa

SEQ ID NO: 1749 - DNA, 1005 bp, Staphylococcus capitis
atgacagctatcaaagatagggattttttcgataatgcccgagcatttttaatatttttagttgtctttggacatcttttacaaccttatacttccgaagataaatttttatcagcattatacctactcatttatagttttcatatgcctacattcttatttatttcgggatattttgcgaaaaatcttgataaaccacactacctagagaagatcgctaaaaaattactagtaccttatatcatttttttcgcattcttttcaatatattattacttaactggcaaggaagacgctatacagttagatccatttaacccggtctttgccctatggttcttactcacgctattcttcttccatgttgtattagttatcgtgcgtagatacaatccatatattgttttatctgttgctatattagtttctgtgcttgcaggattttcaggtaatatagatagttatatgagtatttctagaacaatcgtcttctttcctatcttctatataggacatttagtcactaaagaacaaacaatcaaattaagaaataaaaaatgggtacccttatcaatcattatacttattggtttctttatagggtatgttatgcaccctattaatggcgattggttacttggcagttcgccttatatatcacttgaaaaccatggtggtgatatgtatagtccatttaaacgattaatacactacaacattattctaataactatgagtgcattcttaaatctgacatcacagaagaagcgtttctacacatatattggacgtagaacgatgtttgtatatttgttacatggcattgtcattggtatattaagaggctttgctatttatccatttaaagatacagtttcgatattcacatatttattcttaatcgttacttcactgattatcgtgttcgtattatcatcaagatttgtgtgtaaatggactaatccagtcatcaacttgcgcaaaccagcggatttcaaagactaa

SEQ ID NO: 1750 - DNA, 420 bp, Staphylococcus capitis
atgtataaacaacttgaaaaacttatcacactcacaaataatgatttaaatttagtaaacagacgtttcggtcaacgtacagatataaccgctgaacagttagaattattacgtattttatataattatgatcgcttatcacaatatgatttaactatgaagatcagccgagagcaatctatcgtttcaagatggattaaaaagctagtacttaaaggttatattacaagtcaacaatctcatgaagacttacgttgtaaagagttaatattaactgatgaggctcgcgcacttattcaacaaattaatacagcaagatgtgaattaatcgaagcgagatgccaatgtttaacacctaaagaaatagaaagtcttaatcaattattagataaactgaacagtagacatatttatatttag

SEQ ID NO: 1751 - DNA, 4395 bp, Staphylococcus capitis
atgacgaagaaattcaattacaaattaccgtcaatggttgcattaacgttatttggaactgccttcactgctcaccacgcacacgccgcagaaaacactcaagatcaaacaaacaataaaaacgtattggatgaccaagctactcttaaacaagctgaacaagttaaagagaaagtctctcaaccagcacaaaatgtttcaggaactcaaacttatcaagatcctacgaaagttcaatcaaatgatgataccacttcaaatacatacgatgcctcactagatgaattaaacggttcttcaagtaaaacttctcaagatcaatcgaacaattcagctcaaactgaccaacaaactcaagatgctaacgtaacaatttcaaataaagaagatgctagcacacaagatgatcataaggaagcttcacaatctgaacaacatgaacaagatgcaactagtccttctactaaagaagacttaaaatcagataataatgaagatgtttcacaacctgaacaacaaaatcatgaatctagcttggacaaaaatgaagttacttcacaatctgaagaagtagctcacccatcaaatactgaagattcaaaatctaatgagagtcaacaagtagacaactcatctacaaacgagcaatatgcatctcaaacacaaagtaatgacaataaagagttagatactactcaatcatcattaaacaaaactaatgaaaaggaaaatagtgagacttctatttctaattcaagtcattctaatcatcaaacaactaaaaattctaatagtcaacaaccaactgatgaagaaactaatcaatcaagcgctaaagtaagtagcactaatcaatcagggtataattttgactatgacgaatatgatgagactgaagatacagatgtatctaatgttcaagcttcaacatctaatgaagcagattctcatacaactcgaactaataatgataagcagcctcaaaacgcgtcattaactgctcaagctaaagaggacaatagttcagagcctaaagctgaatctaataaatctaaaaataatgaatcaactaataaagctacaactactagtgtgaaagctactaacagtaacgctactactagttcaaacaaatcaactaatgaaaaagctacttctaataatgataaaaaagtgactacatttagttcagtagctaaacctagaatgatgtattcagtaaataagaaaacgacatctaaagccacttcttctttacctaaatacacacctcaagttaaatcgtcaatcaatgattatattcgtaagaatattttcaaagcacctcaaattgaagaaaactacacttcatatttccctaaatatggttatagatatggtgtaggtcgccctgagggaatcgtagtacatgacactgcaaatgaaaactctacaattgatggcgaaattaattttatgaagaataattatgaatcagcatttgtacacgcatttgttgacggcaatagaattgttgaaactgcgccaactgattatttatcttggggcgcaggtccagctggtaacgagcgttttattaatgttgagattgttcacacacatgattacgcttcatttgcgcgctctatgaataactacgcagactatgctgcaactcaacttgtttattatggtttaaaaccagatagtgctgagaatgatggtcaaggtacagtatggactcactatgcaattagccgatggttaggtggtacagaccatgcagaccctcatcaatatttcagtaatcataattacagttatgctgaactttatgatctaattaatgaaaaatacttaattaaaactggacaagttgcaccttggggtactacttcttcaagttcaactaaaccatcaggtggttcaagttcatcaagtagcgataaattaactgtaaaagctaatagtggtgtcgctcaaatcaaacctagcaacagtggattatatactacagtctacgattctaaaggacattctactgatcaagctcaaaaaactttatctgtaactaaatctgcaactttaggtaataataaattttatcttgttgaagattataatagcggtaaaaagtatggttgggttaaacaaagcgatgtcgtttacaacacagcgaaatcacctgttaaagtaaatcaaactttcaatgtgaaagcaggttcaacactttacactgtaccatggggtacaccaagccaagtagctagtaaagtttcaggttctggtaaccaaacatttaaagctacaaaacaacaacaaattgataaagctatttatttatacggtacagtaaatggtaaatctggttggattagtaagtattatttaactactccatcatcaagtagcaattcaactaaaccatcaagtggttcaagttcttcatcaactagtaataataaattaactgtatctgcaaatagcggtgttgctcaaattaaatctaaaaataatggcgtttatacaaccgtttatgacagtaaaggtaaaaaaacagaccaagtacaacgtactttagctgttacaaaatcagctactttaggtaatgataaattctacctagttgaagactataacactggtaaaaaatatggttgggttaaacaaagtgatgtagtgtataacacagcgaaatcacctgttaaagtgaacgcaacttatactattaaacctggcgttaaattatatacggtaccttggggtacatttaatcaagaagctagtaaagtttcaggttctggcaaccaaacattcaaagctacgaaacaacaacaaatcgacaaagctacttatttatatggaacggtcaatggtaaatctggttgggtaagtaaatattatttaactgcaccaactcaatctaaagttgcaacgagcagtaaagtcacaactgcgaatagagctgcttcaactcaatcaacatctaaagcaactcaaagtgcaacaactcaaactataaataaagtagcacaggttaaagctaataattcaggtatcaaaacatctgtttatgataaaacagctaaaagcggcactaaatatgctaacagtacctttgttattagcaaacaacgtactgaaggtaacaacacttatgttttacttcaagacagcactcaaaatacacctttaggttgggtaaacattaaagatgttacaagccaaaacttaggtaaacaaacaaaatctacaggtaaatataaagttaattcagaaaacaacggattatattctattgcttggggcacgaagaaccaacaacttctttcatcaaaaatgatttcaaataaagcgtttagtgctgctagatcggtatatgttggaaaagaattattcttatatggaacagttgataacagaacaggttggatagcagctaaagacttaactcaaaatagtactgatgctcaagctactccatatcattacacgtttgttgtaaataataataagggttactactataatgatgttgcaaataacgcccattattcactcaactcttattacaatcaaccattctttgtatcgaaacaaatgaaagtcgacggtgtaacttggtattatggtcaattaacaaatggtaaatatgtatggattaaatcaactgacttgtctaaagagtcaatcagatacgttaaaactggtatgactttaacaaaagcagcaaatattcaaaataattcatactataaccctcaagttcaaagaacagcaggaaaatgggaagatgctaattatgatgaaattaaaaacgctatggatcctattagattagctaaagacgatgagtataaatatcaattcttacttttagaccaaccacaatatttaccagtttcagcacttaataaattgctggaaggtaaaggtgttctagaaggacaaggcgcgtcatttagccaagctgctaaaaagtatggtattaatgagatttatttaatatctcacgctttaatagaaactggttatggtacttctgatttagctaaaggtggagacattgttaacggtaaattcactaataaatcagctaaaaaatatcacaatgtatttggtataggcgcatatgatgataatcctttaatagaaggcattaaatatgcaaaagaagctggttgggattcagtttccaaagctattgttggcggagctaaatttattggtcaatcttatgtcaaagcaggacaaaatacgctttataaaatgcgttggaaccctgcacatccaggtacacatcaatacgctacagatattaactgggctaatttaaacgctcaagttattaaaggtttctacgataaaatgggtgaagttggtaaatactttgaaatcccacaatacaataaataa

SEQ ID NO: 1752 - DNA, 426 bp, Staphylococcus capitis
atgtttaagaaagttattaatgaagacatgttgaatgattgttttatgataagaaaaaaagttttcgtcaaagaacaacacgtccctgaggagaatgaaatagataattatgaagaaatatcatatcacataattggttatacaaaagatggtgatccgtttgctaccgctagaattagacctattaaagaaaagttaggaaaagtggaacgtgtagctatcattaaagaacatagaggattgggttacggtaaactattaatgaactctattgaagaattagctaatgatttaaactttgacgaattaactatgcatgcacaaacacatgcgcaaactttttacgaaaaaatcggttataaagcattcgggaatactttcattgaagaaaatatcgaacacatcagaatgaataaagcaatataa

SEQ ID NO: 1753 - DNA, 471 bp, Staphylococcus capitis
atgagtcgaaaaacatatgaaaaggtcgctaatattaatggcatgtttaatatgttggaacaacaaattgttcatagtaaagacatggccctatttcgtaatgaattcttctatgtcaatcatgagcatagagaaaactacgaagcattacttgtttactataaaaacagtttcgataatccagtcgtcgacggcgcttgttatattgtcgcccttcctgagattttcaataaagtagatgtattcgaatctgacttacctttcacatgggtttatgatgaaaatggtataactgaaactatgaaaagtattagcgtacctttacaatacctaatcgctgctgcacttgaagtgacagacgttaacttgtttaaaccatctggctttacgatgggcatgaataactggaatatagcgcaattaagaattttttggcaatattgcgccattgtacgaaaagaagctctataa

SEQ ID NO: 1754 - DNA, 1266 bp, Staphylococcus capitis
atgaacaaatttttaaagtattttttaatattattaacattcgttcttgtcgtcgttccaatcatatttgctactcaattatataaaagttcagaatctgcttttgaaaagtctcaagatcagcataatgcgcaacgtcaatccactttaagagattcaaaagtaaatcctgaaaagcaacctatttctattttatttttaggaatagatgataatgaaggcagagaaaagaacggacaaagtattgaacactctagatcagatgcaatgattttatcaacatttaatcaaaagaaacatcaaattagaatgttaagtattccacgcgatacaattagttatataccaaaagtaggctattatgataaaatcactcacgctcatgcatacggtggtcctatagctgctatggactctgttgaagcgacaatgaatgtaccagtagattactatgttcgaattaatatgaaagcatttgttgaagctgttgatgaattaggcggtatttattatgatgtgccttataatttaaatgaaccaaatagtgacgataccggcagaataaaaattaaaaaaggctatcaaaaattaaatggtgaccaagctttagctgtagctcgaacaagacatcatgattcagatttaaaacgtggtcaaagacaaatggacttaataaaaattcttttccaaaaagcccaaagtttagattcaattgataaattagataatgtagttgaaatcgttggtaaaaatgctaaacataatcttactaaaaaggaaattcaatcattagctaagatgtatcttacaggcaacacagatataaaaacatcccaacttgaaggtaaagacgattatttagatggtatttattactataatccaagtgttaaaagtataatgaaatattcaaatatcttgcgctctgatttaggcttatctaaaataacagataaagacgactttttagaccatagagttatcaaacattatggttcactcgtcccattaacagagttaagtgatagtttattacgtcaaaatcaaaaagacacaacaagcgatgatgacaataataacaacgatacaatgaatgataactcaaataacgaagcaacattcaacaataacgatcaaaatgatggtcaagaagatacaggtaataataatcaaacaactgatgacaacaattaccaaaatcaatatcaacaaaataatgagcaaaataacacattaaatgatgatgctaatatgaatgttcaataa

SEQ ID NO: 1755 - DNA, 1653 bp, Staphylococcus capitis
atgaaacaagaatggataaagcgtttggatgaaagtttaattcaatcgttttatgagcaacagaacgaaagagaaatagaagaagggttaacaacacagttatcttttgggactgctggaattagagggaagtttggcattggtcctggtagaatgaacgctttcacggtaagaaaagtagctttaggcttagcaaaatttataaaagcaaattctaatgaagcaactattgttgtcttttacgattctagattactttcagaagctttctctaaagaattatctacaatattagctgataacggagttaaagttattactgcagaaagctataaatctacacctgaactctctcatgctataagatattacggggcagatggtggggtaatgataacagcaagccacaatcccaaaaattataatggtattaaagtttataatgaatatggtgggcaactattacctaaagactctgaaattttaagtagttatatagacgaaattgaaaatccattagatatagaaatcggtagctttgataagttagtaactaaagatcaaattaattttgcaagcaaagatgttagaaataattacataaatgaagttattagggctacgggaaacattgaaaaaaagaatgttaaaacagtactaactagtctacatggaacaagtttgcctatagtttctgacattttggacaaactcaattatgataattatgttattgctcaatcacaatctattccagacggaacatttcctacactaaatagtcctaaccctgaggacgaatccgcatttgaagtagggaagaagctagctgaagaaagtgatgcacaactcattattgctactgatcctgacgcagatagattagggatagtagaacgtttagataatggagaatataaatttttcaatggtaatgaattaggacttatattaatgaaattaaggtatcaagacctaattgatgcttcatatgaagatttatatattgttaagtccatagtaactagtgaactaagtgaaaaattggcggatgttttaaatgttaatgtttataatgtgcttacaggatttaagtatatttcggaaattttaaatgataagagccatactaatgaaaaactattgttagcatttgaagaaagtaatggctatatggttgaaccatttgtaagagataaggatgctcttcaaatcgtacctttaatcatcaaatttaaaaatctactttacgaaaataatattactttaaaagatacacttgatgatatatatcgtacagtcggtcattataaaaatgttaatttaagtcctgtatttgaaggtgcggatgggcagcgtaaaatagaaacaattataaattcatttagaaataaagaaatacatcaagtgtgtgggttagatgtaaaagcaattgaggattatcaattaggaacaattaagtatatagaaagtgggaaagaaaaagccacttacttacctaatgcaaacttaatacgtctaatatttgatgaaggttttatagctattaggccatcaggtacagagcctaaaattaagatatatttttcactaaacgtaaataacattgatagtttaattaaagaattccaagagacttatattgaatattaa

SEQ ID NO: 1756 - DNA, 1224 bp, Staphylococcus capitis
atgaaacttaataaatttaaaataatcttttttataatcgtactagttacactgattgtattagttggaatattaggatttaaatggagtaaacatcatgaagtagaaacgcaagtattaaagaatcaaagcgataacactaattatattgaaaaaagagataagtcagttaaagcgcccgagaagttaaaaacaatagttgataaaaaagaaccaatgtatggccaaattgataagtatttaaaagaaacgcatttcaatggtacagtagctatatttgataatggtaaattgaaaatgaataaaggatatggttataaagacattgaaaaaggtaagaaaaatactgctaatacaatgtatcttattggttcttctcaaaaattcacaacgggattaatgcttaaacaattagagctagaacataaggtggatttaaatgcccctgtaacgaaatatttaccttggtttaaaacagataaagaaataacaattaaagatttaatgttacataaaagtggattatacaaatacgaagcttcaacaaacattaaaaacttagatcaagcagtattatctattcagaaacgtggaattgatgataaagtttatcataaacatagttataatgatgcaaactatttagtcctagctaaagtgattgagaaggtaacagggaaaccatacgtacaaaattattacgaacgtcttggtaataaatttcatctaaagcattctgctttttacgatgagaagccattacaaaatgaaatggctaaaggttataaatttaagaatgattcattttcgttcttacgtcctaatgtactagatcaatattttggtgcagggaacctatatatggcaccttacgatatgggtaaacttattaataagtttcaacaagataaattatttagctctaatgtgacaaatccaatgctacatgaatttggtactgaagagtatcctgaagaatatcgatatggcttctatgttacgccatatcttaatagagtgaatggcgtgttctttggccaaacatttactgtatactttaatgaccgttatgttgctatattaggtactaatattaaaaatactaacggcttcgtgcctaatgaagataaaatgagacatattttctataatattcttaatcaaaagaaaccttataatacaccaggtgttaaagttcaagaaaaacagcgtacaaatcattag

SEQ ID NO: 1757 - DNA, 909 bp, Staphylococcus capitis
atggtaaccccaataattattgatactgatcctggtatagatgatgctacagcaatcagtttgggtttatgtcatccagaatttgatgtaaaaatgattactactgtgaatgggaatgtaggtattgagaagactaccgcaaatgctttaaagcttaaacatttctttaatagtgatgtgcctgttcatagaggtgcatcaaaacccttattaaacgaaattgtcgacgctgcaccagttcatggagaatctggtatggatggctatgactttcccccaattgcgcaaaaggatttggcatctacccacgctgttgaagctatgaaagaaacaattttaaagagcgagaatcctatgactatcattgcaattggtccattgactaatatagcaatactcctttctacatatcctgaagtaactgattacattaaagaaattgttcttatgggtggtagtacaggaagaggaaacgtcacgcctctagcagaatttaatatttattgtgatcctgaagctgcgcaagtggtatttaactctggattgcctctgacaatgataggattagacttagctagagaagccatatttacgcatgattacgttaaaagctttaaaaatcaaaatgaaacaggacaaatgttacatgatttatttcaacactatcgaagcgaagacttcgaatatggcgttaaaatttatgatgtgtttactattttatatttactgcaacctcaagcatttaatgtcaaagaagcagatgttcaaatagaattagctggtcattacactaaaggagcaactgttgtagatttcgaatctcaatatcctaattgtacagttgtactctcacctgtagataaagattacgaagatttattccttaacgcactgagctattgtaaatag

SEQ ID NO: 1758 - DNA, 291 bp, Staphylococcus capitis
atgaatacaatcgtaaaacatactgtcggtttcattgcttcaatcgttttaacgcttttagcagttttcgtaacactatacacatcaatgacattccatgctaaggtaacaattatctttggttttgcttttatccaagctgcagttcaattattaatgttcatgcacttaactgaaggtaaagatggtcgagttcaatcattcaaagttatcttcgcaatcatcattaccctagctatcgttattggtacgtattgggtaatgcaaggtggtcactctcaccacttataa

SEQ ID NO: 1759 - DNA, 606 bp, Staphylococcus capitis
atgagtcatgatactaatacaatcgattcacgtagtcatgaaggcgaattaaataaacttggcttctggattttccttacagctgaattcgcgttattcggtaccctattcgcaacgttattaactttgcaacacggtggcgattacgctcacaaaatgactacagagttatttgaattgcctcttgtactaattatgacattctcattattattaagttcttacacttgtggtattgcaatttactacatgcgaaaagagaaacagaacttaatgatgatttggatgattatcactgtattattagggcttgtattcgtaggttttgaaatttacgaattcgcacactatgcacaagaaggagtaaatcctactatcggttccttctggtctagtttcttcatcctattaggtacgcacggatgtcacgtatcagtaggtattgtttggatcatttgtttattaatccaaatcggaactcgcggtttagattcatacaatgctcctaaattatttatagtaagtttatactggcacttcttagatgttgtttggatcttcatcttcactgccgtatatatgatagggatggtgtatagcggatga

SEQ ID NO: 1760 - DNA, 1989 bp, Staphylococcus capitis
atgaattttccatgggatgaattactcgttaaaggtaactggatgattatcatggcgcaaattgctgccccattcttagttatcggacttatcgcagtaattagctattttaaattatggaaatatctatacaaagaatggttcacatccgtagaccataaaaaaatcggtgtaatgtatttaatctgtgccgtattaatgttcgtacgtggtggtattgacgcgttattaattcgtactcaattaactattccagataataaattcttggaagcaaaccactatgatggaattttcagtacgcacggtgtaatcatgattattttcatggcgatgcctttcatctttggtttatggaatatcgtcgttccattacaaatcggtgcacgtgatgttgccttccctgtaatgaacaacgttagtttctggctattctttgctggtatgattttattcaacctatcatttatcgtaggtggatctccagctgcaggttggactaactatgcaccacttgctggtgaatttagtcctggaccaggagtcaactactatttagttgcaatacaaatttctggtcttggtacattaatgactggtattaacttctttgtaacaatacttagatgtaaaactcctacaatgaagttcatgcaaatgccaatgtttactgtaacaacatttattactacgcttatcgtcattttagctttccctgttttaacagttgcgttagcattaatgactacagatagagtgttcggtacacacttctttacagtagcagatggcggtatgccgatgttatgggcaaacttcttctgggtatgggggcaccctgaggtatacatcgttatcttgccagcattcggtatttattcagaaattatcccaactttcgcacgtaaacgcctattcggtcaccaaagcatggtttgggcgactgcaggtatcgcgttcttaagtttcttagtttgggttcaccatttcttcactatgggtaatggtgcattaatcaactcattcttctcaatttcaacaatgttaatcggtgtgcctaccggagttaaattatttaactggttactaacattgtataaaggtagaattacattcgagtcacctatgttattctcactagcattcatccctaacttcctattaggtggggttacaggtgtaatgttagcgatggcatctgctgactatcaatatcacaacacttatttcttaatagcccacttccactatacattggttactggtgtagtatttgcctgcttagctggtttaatcttctggtatccaaaaatgatgggttacaaattaaacgaaacattaaacaaatggtgcttctggttattcatgatcggatttaacgtttgtttcttacctcaattcgtactcggattagatggtatgccacgtcgtttatacacttacatgccttctgatggttggtggttattaaacttcatctcaactatcggtgcattattaatgggaattggtttcctattcttagttgcaagtatcgtctatgctcatatcaaagcaccacgtgaagcaactggtgataactgggatggacttggtcgtactttagagtggtcaacagcttcagctattccacctaaatacaactttgcaatcactccagattggaatgactacgatacttttgttgatatgaaagaacatggtcgtcattacttagacaaccataattacaaagatattcatatgcctaacgatactccagtaggtttctggatgggtatcttctttacaatcggtggtttcttcttaatctttgaaacactcgttcctacaattatctgcttagcaggtatctttggaactatgatttggagaagtttccaaattgatcatggttaccacatccatgcttctgaagttgcagaaactgaaaaacgtttaagagaagctcgtattaaagaaagggaggctgtaagtcatgagtcatga

SEQ ID NO: 1761 - DNA, 1125 bp, Staphylococcus capitis
gtgtcaaaatttaagtctttgcttctattatttggcacactaattttacttagtggctgttcaaatatagaagtttttaatgcaaaagggccagtagcaagtagtcagaagttcttgatcatctactcaatcatcttcatgcttgttattgttgtcgttgtgcttgccatgtttgcattctttatttataagtacagttataataagaatgaagtatcaggcaagatgcaccacaattctttaatagaaacaatttggtttgtggtacctatcctaatcgttattgctttagctgtaccaacagttaaaacattatatgattatgagaaaccacctcaaaaagacaaagacccacttgtggtttacgcagtaagcgctggttacaaatggttctttgcttacccagatcaacacatcgagactgttaatacattaacaattcctaaagatcgaccagtcgtattcaagcttcaagctatggatactatgacaagtttctggattccacaattaggtggtcagaaatatgctatgactggtatgacaatgaattggactttaacagcagatcaattaggtaccttcagaggtcgtaactctaacttcaatggtgacggatttgctcgtcaaacatttaaagttcactctgtaagccaaaatgatttcgataaatgggttaaagaagctaaaggtaagaaaacattaaatcaagatacatttgataaacaactcttaccaagcacacctaataaagaattaacattcaatggtactcatatggcgtttgttgacccagcagctgatccagaatatatcttctacgcttataaacgttataatttcgttcagaaagatcctaacttcactgaagaaaaagatctttataaagatgtaaaagataaacctgttaaaccagctcgtaaggtcaaagtgacaaacgcgaactatgaacgtcatggtatgaaacctattattctcggcaacaatgaaaaatatgacaatgagttcaaaaaagaagaggaccataactctaaagaaatggaaaaaatttctaaaggagcaaaagacgaaaatgcgtctaaacttcaaaaaaaagaacatgatgatcatggaggtggacattaa

SEQ ID NO: 1762 - DNA, 318 bp, Staphylococcus capitis
atgaataaattactacagtcattatcagcgcttggtgtttcagctaccttagtaacgcctaatttgaatgcagaagcgactactaataccgaacctcaactacgcggggtcaatgatattgtaattgaaaaaggccaagattataatttattaaatggtataagcgcatatgataaagaagatggtgacttaactcataaaatcaaagtcgacggtcaggtagatacatctaaagttggaaaatatgaagttaaatatatagtaactgactctgatggagcagaaaaaacatctacgagatatattgaagtaaaatag

SEQ ID NO: 1763 - DNA, 1146 bp, Staphylococcus capitis
atgttaacggaaaaagaaaaaagtatcattaaagaaactgttcctgtattacaggataaaggtgaaataattacatcacatttctataaaagaatgtttaaacaacatcctgaattaaaaaatatgtttaatcaaacgaaccaacaaaaaggtcttcaatcaactgcacttgcacaaagtgttttagctgcggcagttaacattgagcatttggaaaatattatgccagtagttaaagaaatcgcttataaacactgtgcattacaagtaccacctgctggatatgatattgttggtgaaaatctgattgcagctataaaagaagtagtgggattagatgatgatcatgaaattattaaaacatggaagaaagcctatcaagatatcgctgatgtatttatttcagttgaaaaggatatttatagtcaaatggcttgggacggtttccaaccatttaaaatagaagaaattaaacatatttcttcagatattaagtctttcacagttgtttcagataaacatgatttaagtcaatttgttccaggtcaatacattaccgtagatgtaagtagcgaaaagatgccgtatcgtgcaaaacgtcattattcaatagtaaaaggtgacaaacaacatttaacatttgcagttaaacgagatgtgacaactgagcatgaaggagaggtatctactatattacatgatgagttagtagaaggtgattcaattaatttatctgcaccagtaggtccatttaaagtagaaaacttgaataacgaacaattattcttaggatctggtataggagttacccctttagtaccaatgtttaatgaagcagttacaaatgggtctaaagctcaatttattcaggttactaatgatgttaacgatgcaccgtttgaatcattaattaatgaaattgcaactactaaagaatctgttgattatcacctacatgataaaaactcagaaggctatctagatgaagaaaaacttaaagactatattaatgaagaaacagaaatttatatttgtggaggtactcacttcttacaatcaattataaaagcattaaaagaaatgaatgtagatacaaataaaattcattacgaaacattcattcctaaattaagtgtaactgtataa

SEQ ID NO: 1764 - DNA, 858 bp, Staphylococcus capitis
gtggttgctaaagtattagatggaaaacaaatagctaaggaatatcgtcaaggattacaagaacaagttgaatctttaaaagaacgtggtttcactccaaaattatcagttattctagttggtaatgatggcgcaagtcaaagttatgtaaaatctaaaaagaaagctgctgaaaaaataggaatgatttccgaaattgtacatttagatgaatcaacatcagaagaagacgttctaaaagagttagacagacttaacaacgatgattctgtgagtggaattcttgttcaagttcctctaccggaacaagtgagtgaacaaaaagttttagaatctattaatcctgataaagacgtagatggtttccatccttcaaatattggtaaactctatattgatgagcaaacttttgtaccttgtacaccattaggaattatggaaattttaaaacatgcggatattaatctagaaggtaaacatgctgttgtaataggcagaagtcatattgttggtcaacctgtttcaaaactattactacaaaagaatgcaactgtaactattttacattcacgatcaaaagatatgagtaaacacttaaaagatgcagatgttatcgtcagtgcagtaggtaaacctggccttgtaactaaagacgtggttaaagaaggtgcagtaattattgatgttggtaatacacctgatgaaaatggcaaattaaaaggcgatgtagaatatgaagaagtgaaagaaatcgccggagcaattacacctgttccaggtggtgtaggaccattaacaattactatggtactaaataatacacttatagcagaaaaaatgcgcagaggaattgaataa

SEQ ID NO: 1765 - DNA, 420 bp, Staphylococcus capitis
atgttagatgaatttaatattccgtacgataaaaaagtggtttctgctcatcgtacgccacaacttatgtttgaattcgctaatcaagcaaagcaaaacggctatgacattattattgctggagccggtggagcagcacatttacctggtatggtagcgtcaatgactactttacctgtcataggtgtgccaatagagtcaaaaagtttaaaagggttagattctttattatctatagtacaaatgcctggtggaataccagtagcaactacggctataggtaaatcaggtgcaaaaaatgctggaatattagcagctagaatgattggtatgactgataacacagttcataaaaatttggaaaattatgaaaaaacattagtgaataaagtggaggcaatgcaaaatgagcttcaataa

SEQ ID NO: 1766 - DNA, 1128 bp, Staphylococcus capitis
atgagcttcaataaactgaaattcggttcaacaatcggaattattggtggaggacaattagggaaaatgatggcacagtccgcacaaaaaatgggctttaaggttattgtccttgatccaaacgaagacagtccatgtcgctatgttgcacatcaatttattcatgctaattatgacgacgaacaagcattaaaagaactaggtgaaagttcagacgtcatcacttatgaatttgaaaatatttcttcacaacaacttaaacaacttacagaaaactacaatatacctcaaggctatcaagcaattcagttacttcaagatcgtcttactgaaaagcaaacactaaaagatgctggaacacaaatcgttccttttctacaaataaaaaataaacaagatttatatcaagcttctaaggaactagggtatccattcatcgttaaaactcgctttggtggatatgatgggaaaggacaaatcctagttgaaaatgagtcaaatttagatgaagcgattgatttaatttctaatcaagagtgtgtagcggaacaataccttgatattgataaggaagtttctcttacagtaactatcggaaatgagcaacaaacaacttattttccattacaagaaaatgaacatagaaatcaaatcttatttaaaacagtcgtacctgctagatccaataaagaaaatgaagcgcgtaaagaagtggataagataaccaatgcaattcattttgtaggtacatttactgttgaattttttatagataaagaaaataatctttacgttaatgagatagcaccacgccctcataattctggacactattcaatagaagcatgtgacttttctcaatttgatacccatattttagcagtaacaggacagagactcccacaacaaattgaagtcttgaaaccagcagtaatgatgaatttactcggacgcgacttagatttacttgaaaatgaatttgaaaatcatcctgaatggcacgttcatatctatggtaaatcgcaacgcaaaccagatagaaaaatggggcatatgacattacttactgatgatgtgaatcaaactgaacaatacatgttaatgaagttcgaagggagagacaaataa

SEQ ID NO: 1767 - DNA, 708 bp, Staphylococcus capitis
gtgtcattattatatgaaggaaaagcaaaacgcgtttatactaccgatacagaatatcaattgcgagtagaatacaaagatgaagtaaccgcaggcaacggagccaaaaaagacacaatggccggcaaaggaaagttaaataatcaaatcacatcaattatatttgattatttaactcgtaacgacatcaataaccacttcattaagcaactttcagagacagaacaaatagtacaacaagtagagattatcccattagaagtcgtagtgagaaatatcgccactggttctattactaagcgattaggatttgaaaaagggcacgtgtttgaagaaccattagtcgaatttttctataagaatgatgaccttaacgatcctttaattactgatgatcatgtaaaactacttcatattgctaaagatgatgaaatagacaagttaaaacatatggcaaaagaaattaataaagtattggttcaacttatggaagaaatggagctaagacttgtcgattttaaagttgaatttggtaaaacacatgatggcgaaattttactagctgatgaaatttctcctgatacatgtcgtatatgggacaaattttcagatacaaactttgataaagacgtttatagaaatgatactggctcactcattgaaacgtatcaaacattcttgaataaattggaggattttaaacaatga

SEQ ID NO: 1768 - DNA, 261 bp, Staphylococcus capitis
atgaaaacaatcgaattgcacatcactttacaaccacaagtattagatactcaaggacaagctctaaacagagctgtacatgatttaggttatacacaagtgaatgacatacgtgtaggtaaagttctatacatgacggttgatgaagcaacagatgaagcggttgataatatcattacgacattaagtgaaaagttattcgctaacacagtgatagaagaatataactataaagtgattgaagaaaaggagaatgcataa

SEQ ID NO: 1769 - DNA, 672 bp, Staphylococcus capitis
atgaaattcgcagttctcgtattccctggctctaactgtgatagagacatgtttaatgccgcaattaaatctggcgttgacgcagcttacgtcgattatcgtgaaacgagcctcgaaggatttgatggggttctgatccctggtggcttttcatttggtgattatttaagatctggagcaatggcaagtgtggctcctattattaatgaggttaaacgtcttgcaaaagaaggaaaaccagtgcttggagtatgtaatggtttccaaatattgacagaaattggattacttcctggtgcgttgcttcataatgattctcatcttttcataagtagaaatgaaactttaaaaattgttaataatcaaactccatttactcatttatatgaagctaatcaagaagtcgtttatcctgttgctcatggtgaggggcattactattgtacagaagaaatctttaatgaacttgaacaaaataatcaaattatccttaagtatattgataatcctaatggttcatatgaagatatcgcaggcattgttaataaagaaggaaatgtttgtggaatgatgccccatcctgaacgtgcattagaaacactactaggcactgacagtggagtgaaattgtttgaatcaatggttaaaagttggagggaacaacatgtctaa

SEQ ID NO: 1770 - DNA, 2190 bp, Staphylococcus capitis
atgtctaaatttatcgaaccaagtgttgaagaaattaaacttgaaaagctttatcaagatatgggacttagtgataaagaatacgataaagtagttgaaattcttggtagagaacccaactttactgaggtaggaatcttttcggtaatgtggagtgaacattgttcatataaacattctaaaccattcttgaaacagtttccgactactggtgagcatgtcttaatgggccctggtgaaggggcaggtgtagtggatattggagataatcaagcagtcgtatttaaggtggaatcacacaatcatccatcagctatagaaccttatcaaggcgctgcaacaggtgtaggtggaattattagagatatcgtctcaataggagcgagacctattaacttgttaaatagtctacgtttcggtgaactatcagtcaaacaaaatcaacgacttttaaaaggagttgtgagcgggattggtggttacggaaattgtatcggtattccgactacagctggtgaaattgaatttgatgatcgatatgatggcaatccacttgtaaatgcaatgtgtgtaggtgtcatcgaccatgacatggtccaaaaaggtactgctaaaggcgttggtaactcagttatttatgttggtctgaaaactggtcgcgatggtattcacggtgccacattcgcttctgaagaactaactgaagaaagtgaaagtaaacgaccttcagttcaaatcggtgatccatttgtaggtaagaagctcatggaagcaacacttgaagctattacgttcgatgaactggtaggaattcaagatatgggggcagcaggtttaacatcttcttcatctgaaatggctgctaaaggtggaagtggtcttcatttaaaacttgaccaagttcctactcgagaacctaatatttcaccatatgaaatgatgctttctgaaacacaagaaagaatgctacttgtagttgagaaaggtactgaacaaaaattcttagacttatttgataaacatgaacttgatagtgcagtgattggtgaagttactgatacagatcgattcgtattaacttatgaagatgaggtatttgcagatatcccagttcaacccctttctgacgaagcacctgtttatatacttgaaggtgaagacaaagaatacaatacttctaaaaatgattatagcaatattgatgtagaagatgtattttcaaaattattaaagcatccaacgattgcttcaaaacgttatttatatgagcaatacgatcaacaagttggagcaaacacgatagtgaagccgggtcttcaatcttcagttgtacgagtagaaggaactaataaggcaatcgcttcaacaattgatggtgaagcacgttatgtttttaatcaaccatatgagggtggaaagatggttgttgcagaggcatatcgtaatttaattgcggttggtgcgacaccacttgcaatgacagattgcttaaattatggttcaccggaaaagaaagaaatttatcaacaattaattgattcaactaaaggcatgtctgaagcgtgtgaagttttaaatacacctgttgtatcaggtaacgtttcgctttataacgaaacgcgtggtacgtctattttcccaacgccagttgtaggaatggtcggtcttattgaagatattaattatttaaacgatttccatcccaaagctggagaaaaactttatttagttggcgatacgcgtaatgatttcggtggaagtcaaatcgaaaagttattatacggttctgtgaaccatgaatttgaagagattgatttaagcgatgaagttgagaagggtgaatccattaaacaggcaattcgtaacggcgtggcttctcatgttcaaacagtaggtaaaggtggtttacttcttaccctagctaaaataagtgcatactataatcttggacttcatgcacaacttgatatgactaatgcacaattatttagtgaaactcaaggtcgttatattatctcagttaaagacggtcagactttagatatgaatcaagctatagagattggtcaattaacaagtgatggcacatttaaggtctctaattcagaagttacaatttcggaaaaggtttcagacattaaacatacatgggaaggagcaatcgctcaatgtttaacaactcaggattaa

SEQ ID NO: 1771 - DNA, 1485 bp, Staphylococcus capitis
atgtttaacaactcaggattaaatgaggaatgtggcgtatttggaatctggaatcatcctgaagcagcacaattaacttacatgggtcttcatagtttacaacatcgtggtcaagaaggtgcagggattgtagtttcggatgatcaaacacttaaaggagaaagaggactaggtttactgactgaagcaattaaagatactaatatggaaaatttaaaagggtatccacatgcaattggtcatgtacgatatgcaacatctggtaataaagggattgaaaatatacaaccctttttatatcacttttatgacatgagtgtcggtatttgtcataacggtaatttaataaatgctgaatctttacgtcaaaatttagaaaagcatggtgcaatattccattcatcatctgatactgaagtcatcatgcacttaattcgtcgcagtaaagcaccaacctttgaagaagcacttaaagaaagcttacgccaaattaaaggtggtttcacatttgcgatacttactgaagatgcactctatggcgcagttgaccctaatgcgattcgtccacttgtagtcggtagaatggaaaatggtgcatatatcttagctagcgaaacttgcgctattgatgttctgggtgcagagtttgtacaagatatccatgctggagagtatgtcattatcaacgatgatggaatcgttgtcaaaaattatacacgtcatgtaaatacagctatttcggctatggaatatatttattttgcaagaccagattctacaatagctggaaaaaatgttcatgctgtgagaaaagcatctggtaaaagactcgctgaagaaagccctgcaaaagctgatatggttattggagtacctaattcttcactgtctgcagcgagtggttatgctgaacaaattgggcttccttatgagatgggtctcgttaaaaaccaatatgttgcacgtacatttattcaaccgacacaagaattacgtgaacagggcgtacgtgttaaattatcggcagttaaagatattgtcgaaggtaaaaaaattattcttgtagatgattcaatcgtgcgtggtactacgtgtaaaagaattgtgaaaatgcttaaagattcaggagctgatgaagtgcatgtgagaatcgcttctccagagttcatgttccctagtttctatggtattgatgtgtcgactactgcagagttaatttcagcaagtaaatcaccagaagaaattaaagattacattggtgctgattcactagcatatctaagtgttgatgggctcattgactcaattggtttgaattatgatgcaccgtatcgtggattatgtgttgaaagtttcacaggagattatccagcaggtctttacgattatgaaaagaattacaaatcacatttaagcgatcgtcagaaagcttatatagctaataataaacattattttgatagtgagggaaacttacatgtctaa

SEQ ID NO: 1772 - DNA, 1035 bp, Staphylococcus capitis
atgtctaaagcgtatgaacaatcaggtgtaaatattcatgcaggttatgaagcggtagagagaatatcaagtcatgttgaacgtacaatgcgtaaagaagtcttatgtggacttggaggttttggtgctacttttgatttatctcaacttaatatgaaagcacccgtactcgtttctggtacagatggtgtaggtacgaaattaaaacttgctattgatcatggcaagcacgatacgattggtattgatgctgtagcgatgtgtgtgaatgatattttaacgactggagcagaacctctatatttcttagactacattgctacaaataaggtagttccatcaattattgaacaaatcgtcaaaggtgtgagtgatgggtgtgaacaaacgaataccgcattaattggtggagaaactgctgagatgggtgaaatgtatcacgaaggtgagtacgatattgcaggttttgcagtgggcgctgttgaaaaagatgagtacatagatggttctaaagtagaagcaggacaagcaattataggtttagcatcgaatggtattcattctaatggctatagtttagttagaaagcttattaaagaatctggcatcaatttacatgataactttaatggaaagacttacttagaaacgtttttagcacccactgaattatatgtaaaaccaattctagaattgaaaaaacatgtggatattaaagcaatgaatcatattactggtggcggattctatgaaaatataccaagagctttacctaaagggttgtcggctagaatagatacaacttcgttcccaacattagacgtttttaattggttacagcaacaagggaacattagtacagatgaaatgtataatatcttcaatatgggtataggctataccgttatagtagataaaaaagatgtatcaacagctttagcggctttacaagagcttgatgtgaaagcttatgaaattggtgaagtgattgaagacgctgatacgccacttcatttaatgggggtagaatcgtga

SEQ ID NO: 1773 - DNA, 567 bp, Staphylococcus capitis
gtgattaaaatagcgattttcgcctcaggttcaggtagtaactttgaaaatatcgttaaacatgttaaagagggcgatttgcagaacatagaagtgactgcactatatactgataaagctaatgctcagtgtatagaacgagctagaaaattaaatatacctgttcatattaaccaacctaaagactttgcttcaaagtcatcttatgaacaacagttgcttaaacatttatccgatgaaggggttcaatggatagttttagcaggttacatgagattggttggtcaagatttacttcaagcctttgaaggacgaatgttaaatatacatccttcactattgcctaaatataaggggttagatgcaataggccaagcatttgatagtggagatacagtgacaggttcaaccgtgcattatgtagatagtggcatggatacgggagaaattattgaacaacaacaatgtgatattagaacggacgacacgaaagaagatttagaagagagagtcaaaaatttagaatatgaactttatcctagagttatcgctaaaatcattaaatag

SEQ ID NO: 1774 - DNA, 1479 bp, Staphylococcus capitis
atgaaaaaagcaattttaagtgtttcaaataaaagtggaattgtagaattcgctaaatcattaacttcattagattatgaattatattctacaggtggcactaaacgtgtgctagaagatgcgggtatcgctgtaaagtcagtatctgaattaactcaatttcctgaaataatggatggtcgagtaaaaacattacatccagctgttcatgggggtatcctagcagatcgtgataaacaagaacatctcgatcaattgaatgaacaacatatcgaccttatcgatatggttgtcgtcaacttatatcctttccaaaaaacagtagaaaatccagatgttactgaagcagatgctattgaaaatattgatattggcggaccaacgatgttgcgtgctgcagctaaaaactttaaacatgtaacaacaatagtacatccttcagattacaatgaagtcattgatagaattaaaaataatcaattagatgaagattataaaaaatccttaatgattaaagtatttgaacatacaaatcaatatgatcatgccattgtaagtttctttaaaggtgataaagaaacacttagatatggtgagaaccctcaacaatctgcatactttgtaagaacatcagatagtaaacacacaattgctggtgcgaaacaattacatggtaaacagttaagctttaataacattaaagatgcggatgcggctttaagtttggttaaaaaatttgaagaacctacagcagtagcagttaaacatatgaatccttgtggcgtgggtgttggagaaactattgaagatgcatttaaaaatgcatatgatgctgataatcaatcaattttcggtggaattattgcattgaaccgtactgtagatgctaaattagcagaaacattacattcaattttcttagaagtagttattgctcctaaatttactgaagaagcacttgaaattttaactcaaaagaaaaatatacgtttacttgaaatagatatgaccattgataacgctgaacaagaatttgtttctgtttctggtggttatttagtgcaagataaagataataaggatgtcactcgtgaagacatgactgttgctactgaagtacgtccaactgaatcacagtgggaagcaatgttattaggatggaaagttgtaagttctgtaaaaagtaacgctgtgattctaagtaatgataaacaaactgttggtataggtgcagggcaaatgaatcgcgtaggttcagctaaaattgctatcgagagagcaattgaaattaatgataatgttgcgctaatttctgatggtttcttcccaatgggggatacagtagaatatgcggcagaacatggtattaaagccattattcaacctggtggctctattaaagatcaagaatctattgatatggctaataaatatggtatcacaatggttatgactggaatgcgtcactttaagcactaa

SEQ ID NO: 1775 - DNA, 1239 bp, Staphylococcus capitis
atgaaagttttagttatcggagcaggtggacgtgaacacgcgttagcttctaaaatcaatcaatcctcactcgttgaaaaggtctatgctataccaggtaatgaagcaatgattaacgttgcggaaattcataatgaaatagccgagtcaagtcatcaagagataatagatttcgctataaataataacattgactgggtggtcataggacctgaacaaccattaattgatggcctaggagatttacttagacaacaagcaataaaagtgtttggcccagggcaagctgctgctcaaattgagggttcaaagctctttgcgaaacaacttatggagaagtatgacattcctactgcagattataaagaagtaacgaatcgatctgacgcgctaacgtatgttaaaacgtgtgaattgccggtagttattaagaaggatggtttagcagctgggaagggagtaataatcgccaaaacccgagatgaagctatcaaaggtgtagaaacactatacactgaagagcaagggcaactggtttttgagagctttttagagggtgaagagttttcattaatgacatttgttaatggtgattatgcagttccttttgattgtatcgctcaggatcataaacgtgcttatgataatgatgaaggccctaatactggaggcatgggggcatattgtcctgttccgcatattagtgaggaggtacttcatcaaaccaatgagcgcattgctcaacctattgctcaagcgatgagtaaagaagggtatcatttctttggcttgctctatattggtgctattttaacaaaagagggtcctaaagtgatagagttcaatgcaagatttggtgatccagaagcgcaagtgttactcacgcgtttagaaagtgatttaatgcaacatattattgatttagaacaacgtcaaccaattcattttaaatggaaagatgaagcagttgtaggagtcatgttagcatctaaagggtatccaggatcatatgataaaggatataaagttagtggtttcgacccagattctcattattttgttagtggtttaaagaaagagggagaccattttgttaatgctggtggtcgtgtgatcctagccattggtgagggatctacggttaaggatgcacaagctgctgcatataacaacgctgaaaaaattaaaagcgataatcttttctatcgtaatgatataggcaataaagcaataaaatag

SEQ ID NO: 1776 - DNA, 807 bp, Staphylococcus capitis
ttgtttgaaagatggaagaaacgtcacacctttgttgatgatgtaaatattataacgaaattaatactaggaatcgcactttttttctttattatcttcattcataatttcgattttatgatttatatcgtgttactcatgtttattttcttactattatttaatggtacagaatttaaaattacaggtatattcatactagttaccaccctattcgccttactatcctcattatttatgatactttatggtgatggtgagcatatgttagttaaatttggaatcgttcaaattagtgaagaaagtatagtacggggcttacatctctctttaagaacaatcacagtatcaatgttcgggattcttatagcattaacatctcaaatagttatgattttttatagtttaatgcaacatctaaaaatcaaacccaaaattgcctatgcctttatggcagcaatacgaatggttcctttaattataagttcattaatccaattgagacgctcattaaaaatgagataccaaatgattgatgtctcaaattataaaggactaaaaagattaaatcatttagttattccattattgagtcaaaacatacgacgtgcacatcaactctcagttgctatggaatctaaaggctttaaagatggccctagaacatattactacgagacacctttctcatataaagatgtagtatttattgtgtgtgtgttaatgattattggtctatctttcatactatcaggctatttaccattaactggcattcatgatgtacgttttggaaaattaggataa

SEQ ID NO: 1777 - DNA, 1404 bp, Staphylococcus capitis
ttgttaaaagtaaaaaatttacgtttgaaataccctaacggggatagaaaaatttttgataacttaaatatagagattaatgataaggaaaaagtgcttttactcggcccatcagggtcgggtaaaagcacattacttaatgtactaagtggtattgttcctaatttaattgaactaccaatgaaatatgatgaattacatgtcgatcatcaaagtggtgtcattttccaaaatcctgatacacaattctgtatgcctaaagtatatgaagagttagcttttgtgttagagaaccgcaaaatccctcgtagtgaaatggataatgaaattaaaaaagcacttgaatctgtaaatcttaaagtctctgaccaaacttatgtaaatcaactaagcggaggtatgaagcagaagttagctatcgtagaaaccattttacaaagagcggaaaccttattcttagatgaaccaactgctatgttagatgttcaagcaactgaggatttatggaagaaattaatagaattgtgggatgaacaaacagtattaatcgtcgaacataaggttgaacatatttggcaacatgtggatcgcgtactattaatgaattatgaaggaaaaatcatagctgatgatactcctcaacacattcttaatgactacgaacatttattaactgagtatggcgtgtggcatcctaaagcctggaattatgcgccacgtcctattaaactagatattcaaccttccaatagtttatttgaatttcaacaaggccaaatcgtacgtggtaaacaaacgctcttctctgttgatgactttgaattacataaaggagaatggctaactataacaggagaaaatggtgctggtaaaacatctttgctcgaatcaatacttcaattaataaaatataaaggtcgaatgacttataataatgaagaactgaaaaagattaaacaagcagcaaaacacatgtatctcgtgtatcaaaatccagaattacaatttattacgaattcagtttatgatgaagtttacattcattataaccatttagaccctgaaaatgctgaacaagaaactattcaattgcttaaattacttcatctagatcaggttaaaaatcatcatccctttgaaatatcaacgggacaaaaacgccgattaagcgtagcaactgcccttagttcaaaggtagaaattgtattgttagatgaacctacatttggtttagatagtcataatacgttccaacttattaaactttttcaagaacgcgttaaacaagggcaaacaatagttatggtcacacatgattcggaaatcattcgtcgatatccaacacgtcgtttacatgttgaagatggaatacttaaagagattgaaggtgagcacgttgtttga

SEQ ID NO: 1778 - DNA, 576 bp, Staphylococcus capitis
atgtcaaaaggtttaaaactatcagaaatacttgtaactgtattaatatctgtagtcttcgcaatcatctataacttatggtggttcttctacaatattacacaagttgcaggtattcacctagagcagcttacatatggtgtttggtttatggcagcagtagtttgctacttaattattccaaaaccaggtatcgcaatcttagctgaactagctgcaggggctggcgaaacaatagtcatgggtaaatttgatatacctacaattatctatgctttattacaaggtgtagcatgcgaaattatcttcgcaatttttaaatatcaatctcgttctgcagtagtagcaatgcttgctggtttggtcactgcactggccactttcccagtagattatttttacggttacttaaatgaagtcgcgggatggaacttattcttattcattctattccgatcaattagcggaattgttatcacaggattagtgtcctattggcttgttagagcacttgataaaacgggagttactaaactctttagaccagcttctaaacatgactacgataacctataa

SEQ ID NO: 1779 - DNA, 135 bp, Staphylococcus capitis
atgggaaaagaagaattcgaaaagaaatctgctgaaaaagctaaagaagcagaagaaaaactaaaagaacaaaatgaagaaaaaactgatgatattgaacaaacgaaaaaagatgtacaagatacgttagattaa

SEQ ID NO: 1780 - DNA, 1296 bp, Staphylococcus capitis
atgtcttttcttaggaaacacaccgagatcatatttagctacattatcggtatcgtttcacttttcacaggtctcatcattctaattaacttaccattgattaaacaatttaatggtgataaaaaagttaatactcatgtacataatgtatgggaatttcttaatgcattcttcgctgaaattataaaagtgatgagtaggtttataggtagtttcccagttataagtgccattattattattttgtttggtatcttagttatgcttttaggtcatactttattcagaactattaaatatgactatgacatatccattttcttcttagttattggtattatgtattttattattacactaatattaatgactcaagtttatggtttcttcgcaattgtgtttattataccgttcatcgttcacatcggatacattgtttataaagatgaattaaataaaaataatcgtaaaagtcattatatgtggattatcgtgacatatggtattagttatttaattacacaaatttctttatacggacgtatagatgcgaatgaaattgaatctatagatattttaagtgtgaacaccttcttcattattatgtggttattaggacagatgtctatatggaatttcttattcttaagacgatcattaccattaactaaagaagagttaggcgaggaagaacctgaactttctagaacaaataaaggaaacgtatctaatcaaactaaagttcacttaaaacaactacaagataagacaacagaatatgcacgtaagactagaagaagtgtagatttagataaaataagagctaaaagagataaatttaaggaaaaagttaaaaatattgtagatattcaagaagatgatattcctaattggatgagaaagccaaaatggattaaaccaatgtatgttgagttgttctgtggagctgttattttattctttacatttcttgaatttaataaccgcaacgccctattcttatcaggagaatgggaactttctcaaacgcaatatgtagtagagtgggtcacactcatattattactattcataatcatcatctttattgctacaactttaacttattatttaagaaataaattttattacttacagctcttcatgggtagtattttattctttaaattcttaactgaatttatcaatattatgattcacggtctattgttatcaattttcatcacaccaattttactgttaatgttaattgcaatgattgttgcttactcattacagttaagagagaaaccataa

SEQ ID NO: 1781 - DNA, 1173 bp, Staphylococcus capitis
atgaaaatagcaacattgaatagaggtaaagaaactaaatatcttaatcaatatcctttaattgatgaggaagatatttaccaacatgaccaccttaaagaaggggatttagttaaaattgtgactgatcaacaacagtatatcgcaactggctatgttggccgtcaacataaaggattaggttgggtattaagttatgatgaaaatgaggacattaacactcaattcttcgtaaaattatttgaaagtgcattagaggaaagagaatattatttcaacattgatggtacaaatgcttttagactttttaatgctgagggtgacggcgtaggaggcctcacaattgataattatgatagtcatttattaattcaatggtattccaaaggcatttataaatttagatatcttatcatagaagcaattaaaacagtatttggttatacgtctttatatgaaaaaatgagatttaaggatacaacatacacaggtggatttgttgatggtgaagcccctgagtttccaattactattgaagaaaatttcacattttataatgtagatttagaagatggtttaatgactggtatctttttagatcaaaaggaagtacgtaaaaaattaagagaccaattttccgaagatagagatgtattaaatttatttagttatacaggagcgttttcagttatagcagctcagaatgcacgttcaactacaagtgttgacttagcaaatcgttcaagaggcttaacggaagaaaactttggtttaaatggtattgatcctaaatctcaatacatttatgtgatggatacgtttgactattataattacgcggcacgtcatggtcttcagtatgaaacggtagtcattgatccgccaagttttgcacgcaataagaaaaagacattctcagttcagaaagactatggttcactcgttaaaggcgccttaagtgtattagctcctgagggttcactgctattatgtacaaattcaagtgcattttctttaaaagcgttcaaaaatgtgattaaaaagacattagatgaagagggggtagagtttgaaataagagaggtcatgggacttcctaaagatttcaagactcatccacattacaaaccttcaaaatatttaaaagctgtatttatagatattaagcattaa

SEQ ID NO: 1782 - DNA, 540 bp, Staphylococcus capitis
ttgggtattagaagtaaattcacaaatgatatcactaataaagtgggcaatgaacttttaaatatagaagaaattaaagaaaaaaataatttacctaagactaaagaagaattagcgcgtcgccgagaacaggcgttaacgttagttaaaaagaaatcaatactttcatcaggcgcaagtattgtacctatcccaggattagacttcggtgtagatattaaattaatgagagacattattgaggatgttaacaaaatttatggtttagatcataaagaagtgaattcgttaggggatgatgtaagagagagagtgatgtctgctgcagcgattcaagggagtcaatttgtaggaagaaaagtttcagaagcacttttaaaagttgttattaaagatgtagcgaaacgagcagctgctaaacaaacaaaatggttcccagtgatcggtcaagctgtttcagcttcaattagttactactttatgaataaacttggtaaagatcacgttgaaaaatgtgaaaaagttatcaataacctatag

SEQ ID NO: 1783 - DNA, 267 bp, Staphylococcus capitis
atggaacaaaaatcatatgtaattatcgacgaaacagggattcacgctcgccctgctacaatgctagttcaaactgcatcaaaatttgattcagatattcaattagaatataacggtaaaaaagttaacttaaaatcaatcatgggtgttatgagtttaggtgtaggtaaagatgctgaaatcactatttatgctgacggtagcgatgaaactgatgctattgaatctatcagtgatgtcttatcaaaagaaggattaactaaataa

SEQ ID NO: 1784 - DNA, 1719 bp, Staphylococcus capitis
atgtctaacttaattaaagggattgctgcctctgatggtgtagcaatcgcaaaagcttacttattagtagagccagatttatcttttgacagtaacgaacaggtcactgatgtagaaggcgaagttaataaattcaataaagctatcgaagcatctaaagttgaattaactaagattagaaataatgcagaagttcaattaggcgctgataaagcagctatttttgatgctcatttattagttctagatgatccagaattaattcaacctatccaagataaaattagaaatgataaagttaatgcggctacagcattaaacgatgtgacaactcaatttgttactattttcgaatctatggataatgaatacatgaaagaacgtgcagcagatattagagacgtttctaaacgtgttttagcgcacattctaggtgtagaattaccaaacccaagtatgattgatgaaagcgtcgttataattggtaacgatttaacaccttcagatactgcacaattaaacaaggaattcgtccaaggctttgtaactaacatcggtggtagaacgagccactctgcaataatgagtcgttcacttgaaattgcagcagttgtaggtacgcaaactatcactcagcaagtcaaacaaggtgatatgattgttgtagatggaattacaggtgatgtaattatcgatccaactgaagacgaattaatcgcttatcaaaacaaacgtgaacgtttctttgaagataagaaggaactacaaaaattacgtgacgcggatacggtaactgttgatggtgtgcatgctgaattagcagcgaatattggtacgccaaatgatttaccaggagttattgaaaacggtgctcaaggtataggtttataccgtacagaattcctttatatgggaagagaccaaatgccaactgaggaagaacaatttgaagcctacaaacaagtactagaaacaatggatggtaaacgtgttgttgtacgtactttagatatcggtggagataaagagcttccttacttaaatttacctgaagaaatgaatccattcttaggttatagagcaattcgtttatgtttagctcaacaagatattttcagaccgcaattacgtgcattattacgtgcatctgcttacggtaaattaaatatcatgttcccaatggttgctactatcaaagaattccgtgatgctaaagcgattcttttagaagaaaagaaaaaccttgaaaatgaaggttatgacatttctgacgatatcgaattaggtatcatggttgaaattccagcaactgctgcattagcagatgtcttcgcgaaggaagtagacttctttagtatcggtactaatgacttaattcaatacacactagctgctgatcgtatgtcagaacgtgtatcttatttatatcaaccatataatccttctattttacgtcttgttaagcaagtaatagaggcttctcataaagaaggtaaatggactggtatgtgtggtgaaatggccggagatgaaacagctattccattattactaggtttaggattagatgagttctcaatgagtgcaacttctattcttaaagctagaagacaaattaatggcttaagtaaaaatgaaatggctgaattagctaatcgcgctattgaatgtgctacacaagaagaagttatggaattagttaacaataaagcaaaataa

SEQ ID NO: 1785 - DNA, 243 bp, Staphylococcus capitis
atgacttcgaacattgtcatttatacccaagatgattgtccaccatgcactttcgtgaaaaattatttatcagagcaaggcgttgattttattgaaaagaatattaaaaataatcaatatcgtaatgaaatgattgattatgatgcatttgcaacgccttttattttattaaataatgaaccaatgtatagtgtagatatggacaaaataaattctacattgaatttaaatagtaaaaattag

SEQ ID NO: 1786 - DNA, 1356 bp, Staphylococcus capitis
atggattcagttgaaattagccgatttctcactggtatgacattagcagtgcatattatatttgccacaatcggcgtgggtatgcctttaatgtttgcgattgcagaatttatcggtattagaaagaatgatgcaaactacattgcattagcgaaaagatggtcaaaagggtacacaattacagtagccgttggagtcgtgacaggtactattataggcttacaactttcgcttgtgtggccaacatttatgaaaatgggtgggcatgttattgctttacctttatttatggaaactttcgctttcttctttgaagcaatcttcttaagtatttatctttatacttgggatagatttaaaaataaatggacgcattttattatttcattacctgtaattattggtggttcattctcggcgttttttattacatcagttaactcatttatgaatacaccagcaggttttgaaatgaaaaatggacgtatggttaatgtacaaccattagaggcaatgtttaactcctcatttattgtcagagcattccatgtagtagctactgctggtatgacgatggcatttattttggctgcaatagcggcgtttaaattattacgtaataaacattctgaagataaaacttatcataaaaaagcattgaaaatgacaatgatagttggtttcttatcaacgatattatcgatggtagctggagatctttccgctaaattcttgcacaaagtgcaaccagaaaaactagctgcttatgagtggcattatgatactcaatcacatgctaacttagtattctttggtgtgctcaatgagaagacacatgaagtaactggtgctattgagattccgggattacttagtttcttagcagatgacagtttcaaaacaaaagtcaaaggattaactgattttcctaaaaatgatttaccacctatgattgttcattatttctttgatttaatggtttctatgggtgtgttctgtttcattatttcaggactatatatgttaattttattcttcaagaaattacgtaaatttaaagttaataaagctatgctatatgcaatacttttaactggcccagcctcattacttgcaatagaatttggttggttcttaactgaaatgggtcgtcaaccttggatcattagaggttatatgcgtgtgtctcaagctgctacacaagcaggtggtatcacgttagttacgattctcttcggtatattgtatctcgtgcttatggtaacagcagcttatgtacttattcgtatgtatcgaaataaacctgcttatcaagatgtagacaaagtgattgaagaaagaggtggaacaaaatga

SEQ ID NO: 1787 - DNA, 1017 bp, Staphylococcus capitis
atgatttacgcatatattgggataacagtattatggatatttttattttgttacatcatcgtagcatcaattgactttggtgctggatttttcgctttacattctagaattactggtgaagagaagaagatcaatcacttaattcatcgttatcttaatccagtgtgggaagttacaaatgttttcttcgtctttttcttcgttggatttattgggttcttccctgattctgcaaagtatttgggaaccgttttattagttccaggttcaatagcattaattcttatctccattagaagtagtttttatgcttttgaaaattacggacaagatacgaagttaccatggatagtgctctatggttttacaggattacttattccagcatcattagctactgcactaactatctcggaaggtggatatatcagagaacatgggtctcatatagatttgaactgggtacaattactattaagtccatttgcctggtctgtggtattcttggctatcatttcggttctatatatttcttcaggtttcttaacattttatgctagtaaagcgaaagataaacctgcataccacttaacaagacaatggcatattttctggggcccgcctatgattgttatttcattgtttgtatttttatctttaagaatacaaaatgcagatcatttcaataatgctgtatttaactattggtggatgtttgtaatcagttttatcttctttttaattgcaggtgtattaacgattcttaagaaaaatcatggattagcgtttatcatggtcatattacagatgttctttgcattctttggctatggtatgagtaaattgccatttttattacatccatttgtgaaaatcacaagttctcatgttaacccagaaatgggattagcattagttatagcctttattttaggtttacttttattaattccatcgttaatattattattaagattatttgttttcgataaagagtacgtagaaggaaagaaataa

SEQ ID NO: 1788 - DNA, 660 bp, Staphylococcus capitis
atggataaagaatacgtcgttattggactaggtcgttttggtggcagtattgttagagaacttaacgctttagatatggatgtcatggcaattgataatgatgaaaatcgtgttaatgaatatagtgatatcgcaacacatgcagttgtagctgatacgactgatgaagcggtcatgaaaagtttaggtatacgtaactttgatcatgtcattgtggccattggtgaaaacattcaatcaagtacgttaactactttaattttaaaagagttaggtgttaaaaaggtaactgcaaaagcacaaaacgactaccatgctaaaatattaaataaaataggtgcagacactgtcgttcacccagaacgtgatatgggtagacgtatagcgcataatgtagcaagtgcaagtgtattagattatttagaacttgctgatgagcattcaatcgtagagcttaaagcgactgaaaaaatggctggacagactataattaatttagacatccgagcacaatatggcataaatatcattgcaattaaacgagcgaaagaatttatcgtttccccagatccgaatcttagtatagagattggtgatattttaatcatgattggtcatgataatgatttaggtcgtttcgagaaaaatatagccaaataa

SEQ ID NO: 1789 - DNA, 432 bp, Staphylococcus capitis
ttgaaaaaagattatataaaaaaagacaaagcggaagttaattttgttaatctcggtttcttaggtaaagactctatgaaagctggacgagcagcattagcagtcaaactcatatctgataaagagtatttaaaatttaatcacttaatttttaacgaacaacctaaaaatagccataaaacttggattactaatagattattagataagcaaatagataaacttaacttgaatgatgaagaaataaaaaaagttaagaaaatgtataaagaaaaagatagcaaagcatgggaaatggctaatgatgataaaaaagttgctaaaaagaaaaaagttaagaaagttcctttagtatacataaatggtgaaaaagtaaaaaaaccatataaatataaagaatatcaacgcatattagataaaaagacatcgtaa

SEQ ID NO: 1790 - DNA, 1740 bp, Staphylococcus capitis
atgaagcaattacattctaatgaagtaggtgtgtatgcacttggtggtttaggtgaagttggtaaaaatacctacgccatcgagtacaagaatgaaattgttatcattgatgcaggtattaaattcccagatgataacttactaggaatagattatgttattcctgactacacttacttagaacagaaccaagacaaaattgtaggtctgtttattactcatggacacgaagaccatataggtggtgtgcccttcctattaaaacaaattaatgtacctatttacggtggtccattagcattaggtctcatacgcaataaattagaagaacatcatttacttagaactactgagttacatgaaattgatgagagtagtgtaataaaatctaagcattttgaaatatcattctatttaactactcatagtattcctgaagcatacggagttatcgttgatacaccagaaggtaaaattgttcatactggtgactttaagtttgatttcactccagttggagagccagctaatatagctaaaatggctaaacttggagaagaaggcgtactatgtttattatctgactcaacaaattcactagtacctgattttacacttagcgaacgtgaagttggacaaaacgttgataagatttttagaaattgcaagggccgtatcatttttgcgaccttcgcatctaatatttatcgtgtacaacaagcagttgaagcagcgataaaatataatcgtaaaatcgttacttttggtcgttcaatggaaaataacataaaaattggtatggagcttggatatattaaagcaccacctgaaacatttgttgaacctaataaaattaacaatatacctaaacacgaattgttaattctttgtactggttcacaaggtgaaccaatggctgcattatcaagaattgcaaatggtacacataaacaaattaaaattatacctgaagatactgtagtattcagttcatctcctattccaggtaacactaaaagtatcaatcgcactataaatgctttatataaagctggtgcggatgtcattcacagtaagatttcaaatattcacacgtcaggtcatggttcacaaggtgaccaacaattgatgctacgtttaattcaacctaagtatttcttacctattcatggtgaatatcgtatgttgaaagcacatggtcaaacgggtgttgaatgtggtgtagatgaggataatgtattcattttcgatatcggtgatgtcttagctttaacacatgattcagctcgtaaagctggaagaatcccatcaggtaatgtgttagtagacggtagcggtattggagatatcggaaatgtagttattagagatcgtaaactactttctgaagaaggtttagtcattgttgttgtaagtatcgattttaatactaataagttattatcaggacctgatatcatttcacgtggctttgtttatatgcgcgaatccggtcaacttatttatgacgcacaacgtaaaattaaaacagacgtgatatctaaattaaatggtaacaaagatattcaatggcatcagattaaatcatcaattattgaaacacttcaaccttatctatatgaaaagacagctcgtagaccgatgattttaccagtaattatgaaagtgaatgaagataaaggtaacaataaaccttctaataagaaaaataacaaacaagataaaaatgagtctaaataa

SEQ ID NO: 1791 - DNA, 219 bp, Staphylococcus capitis
atggcagtatttaaagtattttatcaacataataaagacgaagtcatcgttcgtgagaacactcaaacaatttatgttgaaggacaaactgaagaacaagttcgacgttatttgaaagatcgtaattacaatattgagtttattactaaattagagggcgcacatttagactatgagaaagaacactcaactcacttcaatgtggagaatgctgaataa

SEQ ID NO: 1792 - DNA, 552 bp, Staphylococcus capitis
atgttaactatgaaagatattattagagacggtcatccaacgcttcgtgagaaggctaaagaattaagtttccctctttctgaagaagataaagaaactttacgctctatgcgagagtttttaattaatagtcaagatgaagaaactgcaaaacgttatggattacgttctggcgttggtttggcagctccacaaattgatgtggctaaaagaatgatagcagtttatttaccagacgatggtaatggaaaatcttatgattatatgctcgtcaatcctaaagttatgagctacagtgtgcaggaagcttatctaccaactggcgaaggttgtttgagtgttgacgaaaacattccaggattagtacaccgtcataatagagtgacaattaaagctcaagatatagacggtaatgaagttaaactaagattaaaaggctatccagcaattgtgtttcaacacgaaattgatcatttaaatggcgttatgttttatgattatattgacgctaatgaaccacttaaacctcacgacgatgcagtcgaagtttaa

SEQ ID NO: 1793 - DNA, 627 bp, Staphylococcus capitis
atgaagttcggtaaaactgttgcaattgtcctaacatcaacagtgttattagctggatgtacaactgacaaaaaagaaattaaaaaatatgacaaccaagttcaaaaagcttttgaccaagaaaaatcagtaaatagtactagtaaaaaaataaatgatttagaagaaaagaaacaaaaattatttaaaaaagtaaatggtaaagatcagaatacaagaaaacaagctgcagaagatatcgtaaaaaatgtagagaagcgtcaaaaagaatttaaaatcgaagaacaagcattgaataattctgaaaaagaatttaaaaaagctaaacagtatatgaatcatattgataactcggctaagaaaaaagaagtaactcaacttaatgatgcactcaaagaaaaatacgaagcacatgatgcatatgcaaaggcttacaaaaaagctttaaacaaagaaaaagaactgtttacattcttgaaccaagatggtgctacacaatcagaagtagacagtaaatctaaagatttatcaaaagcatataaagatatgaataaaaaattcaatacctactcaaaagcgatgagaaaggttactcaagagaaacaagacgtagatcaattgaaataa

SEQ ID NO: 1794 - DNA, 1113 bp, Staphylococcus capitis
atggctcctaagttacaagcccaattcgatgcagttaaagtattaaatgaaactcaatcgaaatttgaaatagttcaaattttggatgaggatggtaatgtcgtaaatgaagacttagtacctgatttaacagatgaacaattagtagaattaatggaaagaatggtatggacgcgtattcttgaccaacgttctatctcattaaacagacaaggacgtttaggtttctatgcacctacagcaggtcaagaagcatctcaacttgcttcacaatatgctttagaaaaagaagacttcatcctacctggttatcgtgatgttcctcaaattatttggcatggtttaccacttacagaagctttcttattctctagaggacacttcaaaggtaaccaattccctgaaggcgttaatgcactaagtccacaaattattatcggtgctcaatatgtacaaacagctggagtagcattcggtcttaaaaaacgtggtaaaaacgcagtagcaattacttatactggtgatggtggttcttcacaaggtgacttctatgaaggtatcaactttgcatcagcgtataaagcgcctgctatttttgtaattcaaaataacaattacgctatttcaacaccacgtagtaaacaaactgctgcaacaacattagctcaaaaagctatcgcagttggtgtaccaggtattcaagtagatggtatggatgctttagctgtatatcaagctacattagaagcgcgtgaaagagctgttgcaggtgaaggtccaacagtaattgaaacattaacttatcgttatggaccacatacaatggctggtgatgatccaactcgttacagaacctcagatgaagacgcagagtgggagaaaaaagacccattagtacgttttagaaaatatttagaagcaaaaggtctttggaatgaagataaagaaaatgaagtcattgaacgtgctaaatctgaaattaaaacagctattaaagaggctgacaatacagacaaacaaactgttacttctctaatggatattatgtatgaagatatgcctcaaaatttatcagaacaatatgaaatttacaaagagaaggagtcgaagtaa

SEQ ID NO: 1795 - DNA, 978 bp, Staphylococcus capitis
atggcacaaatgacaatggttcaagcgattaacgacgcgcttaaaagtgaacttaaaagagacgaagacgttttagttttcggtgaagacgttggtgttaacggcggtgtattccgtgttactgaaggtttacaaaaagaatttggtgaagatcgagtatttgacacaccattagcggaatctggtattggtggtttagcgttaggattagctgtaacaggttatcgcccagttatggaaatccaattcttaggattcgtatttgaagtatttgacgaagttgcaggtcaaattgctcgtacacgtttccgttcaggcgggtctaaaccagcaccagttactattcgtgcaccatttggtggtggagtacacactccagaattacacgccgataatttagaaggtatcttagcacaatcacctggtttaaaagtgattattccatctgggccatatgatgcgaaaggcttattaatttcagcaattcaaagtaatgaccctgttgtctacttagaacatatgaaattgtatcgttctttccgtgaagaggtaccggaagaagaatatacaattgacattggtaaagctaatgttaaaaaagaaggtaatgatatatctctaattgcgtacggtgctatggttcaagaatctatcaaagcagctgaagagcttgaaaaagatggatactctgtcgaagtcatcgacttacgtacagttcaaccaattgacattgatacattagttgcatcagtagaaaaaactggtcgtgcagtagttgttcaagaagcacaacgccaagctggtgtaggtgcacaggttgctgcagaattagctgagcgtgcaattctttcattagaagcacctatcgctcgtgtagctgcagctgatactgtatatccattcactcaagctgagaatgtttggttaccaaacaaaaatgacatcgttgaacaagctaaagctacattagagttctaa

SEQ ID NO: 1796 - DNA, 1326 bp, Staphylococcus capitis
gtggcatttgaatttagattacccgatatcggggaaggtatccacgaaggtgaaattgtaaaatggtttgttaaagctggagataccatcgaagaagatgatgtcttagcagaagtgcaaaacgacaaatctgtagtagaaatcccatcgcctgttagcggaactgttgaagaagttttagtagatgaaggaactgttgcagtagttggtgacgttattgtaaaaattgatgctcctgatgctgaagaaatgcaatttaaaggtagccatagtgatgactcttctaaacaagaagagaaacaagaagaagcaccagctgaaaaagaatcaacttcatcatcacaatctcaggaagcttcaacagcttctactcaagaagcagaagttgatgagaataaaacagttaaggctatgccttctgtacgtaaatacgctcgtgaaaatggtgtaaacattaaagctgttacaggctctggtaaaaacggacgtattactaaagaagacgtagatgcatacttaaatggtggaagcacggattcagcttctaacgaaagtgcagctgcatcatctaaaggtagtgaagaaactagtgcttcagctagtcaatcagtaccagaaggtgacttcccagaaacaactgagaaaatccctgctatgcgtaaagcaattgctaaagcaatggttaactcaaaacatacagcacctcatgttacattaatggatgaaattgatgtacaagaattatgggatcaccgtaaaaaattcaaagaaattgcagctgaacaaggtactaaactaacgttcttaccatatgttgttaaggctttagtttctgcacttaaaaaatatccagcacttaacacttcatttaatgaagaagctggcgaagttgtacacaaacattattggaatatcggtatcgcagctgacacagataaaggtttattagttcctgttgttaaacatgcggatcgtaaatcaatcttcgaaatttcagatgaaatcaatgaacttgcagttaaagctcgtgacggtaaattgacttcagatgaaatgaaaggtgcaacttgtacaatcagtaatatcggttcagctggtggacaatggttcactccagttatcaatcacccagaagtagccatcttaggaattggccgtattgctcaaaaacctattgttaaggatggagaaattatagcagctccagtattagcgttatcactaagctttgaccacagacaaattgatggcgcaactggtcaaaatgctatgaatcacattaaacgtttattaaataatccagaactattattaatggaggggtaa

SEQ ID NO: 1797 - DNA, 1407 bp, Staphylococcus capitis
atggtagttggagatttcccaattgaaacagatactattgtaatcggagcaggtcctggtggatacgttgcagcaattcgcgcagcgcaattaggacaaaaagtaacaatcgttgagaaaggtaatttaggtggcgtgtgcttaaacgttggttgtattccatctaaagcattattacacgcgtctcatcgttttgttgaagcgcaacattcagaaaacttaggggttattgctgaaagcgtgtctttaaactacgagaaagtccaagaattcaaatcatcagtagtaaataaattaactggtggtgttgaaggattattaaaaggtaacaaagttgaaatcgttaaaggtgaagcatactttgttgataataatagccttcgcgttatggacgaaaaaagtgctcaaacttacaatttcaaacatgctattatcgcaactggttctagaccaattgaaattcctaattttgaatttggtgagcgtgttatcgattcaactggcgctttaaatttacaagaagttcctggtaaacttgttgttgttggtggcggttatatcggctctgaattaggtacagcatttgctaacttcggttcagaagtaacaatccttgaaggtgctaaagacatcttaggtggattcgaaaaacaaatgactcaaccagttaaaaaaggcatgaaagaaaaaggtatcgaaattgtcactgaagctatggctaaatctgctgaagaaactgacaatggcgttaaagttacgtatgaagctaatggtgaagaacaaactattgaagctgactacgtattagttactgtaggacgtcgtccaaacactgatgaattaggcttagaggaattaggtcttaaattcgcagatcgtggtttattagaagtagataaacaaagccgtacttctattgagaatatctttgcaattggtgatatcgttcctggtttaccacttgcacataaagcaagttacgaagctaaagtagctgctgaagcaattgatggtcaagctgctgaagttgattacattggtatgcctgcagtatgcttcactgaaccagaattagctcaagtaggttacactgaggctcaagcgaaagaagaaggtttatcaattaaagcttctaaattcccatatgcagctaatggacgtgcgttatcattagatgatactaatggttttgttaaattaattacacttaaagaagatgatactttaattggtgctcaagttgttggtactggcgcatctgatatcatctctgaattaggtttagcaattgaatcaggtatgaatgcagaagatatcgcattaactgttcatgctcacccaactttaggtgaaatgtcaatggaagctgctgaaaaagcaattggttatccaatccatactatgtaa

SEQ ID NO: 1798 - DNA, 276 bp, Staphylococcus capitis
atggaatatcaatatcctttagatttagattggacgaatgaagaaatgatgcaagtcattcatttttttaataaaattgaaaattactatgaatcttctgttaaaggtgaagatgtaaaaaaagcttataaaaaatttaaagacattgtacctggtaaagctgaagaaaaacaaatctttaaagaatttgaaaataaaagcggatataatagttataaagttgttcaagaggtaaataaatatcctgaacagcagagatttggtaaagaatcttaa

SEQ ID NO: 1799 - DNA, 540 bp, Staphylococcus capitis
atggatataggatataaattaagaaatttaagacgtattaaaaattttactcaggaagaacttgctgaacgtacggatttgtcaaaaggatatatctctcagattgagagtcaacatgcgtctccaagtatagagacgtttttaaacattttagaagttcttgggacaccagctagtgacttttttcaagagcgcccaagtgagaaagtgttatataaaaagaaagatcaaattacatatgatgaatacgatcggggttatattataaattggctagttacagattcaaatgaatttgaaatggaaccattgattcttacattgaaacctggagcatcctataaaaattttaaaccatctgagtcagacacgtttatatactgcttagaaggtgaagtgtcattgctacttggtaatcaaacttataaagcgagtactgaagatgtactttattttaaggcgagagataaacatcgcttatacaatgaaactcatgaagaagtgaaaatattaattgttgccacagcttcatatttatag

SEQ ID NO: 1800 - DNA, 1095 bp, Staphylococcus capitis
atgaatccgttactttcattcaaatctgtaagcaaaggctttgatgatgtacaaattttagatgaaattgatttagatattgaatcaggttatttttatacattattaggaccttctggctgtggaaaaacaacaatattaaagttgattgctgggttcgagtatcctgacagtggagaagtgatataccaaaataaacctatcggaaagttacccccaaataaacgtaaagtaaatacagtattccaagattatgcgctctttccacatcttaacgtttatgacaatattgcctatggcttaaaattaaaaaaattaagcaagtctgagatagatgaaaaggtgatagaagctttaaaactagtgaagttacaaggttatgaacaacgacaaattgaaggcatgagtgggggacaaaaacaacgtgtagcgattgctcgagcgatagtaaacgaacctgaaatacttttacttgatgaatcattatctgcattagatttaaaattgcgtacggaaatgcaatatgagttacgtgaacttcaatctcgtttagggatcactttcatatttgtgacccatgatcaagaagaggctttagcattaagtgattatatctttgttatgaaagatgggaaaattcaacagtttggtacgcctattgatatatatgatgaaccagttaatcgttacgtcgctgattttattggtgaatcaaatatcgttgaaggaagaatggttaaagatttcgtagtaaatatttatggtcaaaactttgaatgtgtagatatggggatacctgaaaataaaaaagtagaagttgtaattagaccagaagacatatcactcattgataaagaacaaggactttttaaagcaactgtagattcaatgctatttagaggtgtacattacgaaatttgttgtattgatagaaaaggctacgaatgggttattcaatctactaagaaagctgaagttggaagtgaagtaggtctattctttgaaccagaagcaattcatattatggtacctggtgaaactgaggaagaatttgataagcgtatagagagttatgaggatgtagaccatgcgtaa

SEQ ID NO: 1801 - DNA, 804 bp, Staphylococcus capitis
atgcgtaatatcaataaattactacttgttccatatttattatggatggttatttttattattatacctgtaattttacttgtttatttctcattcactgacgtgcatggtcattttagttttacaaattatgaacaaattttttcgttgcgttattttaaaatgtttgcggattccatatggtatgcatttctaatcactctcattactttattgatcagttatccagcagcatactttattgctcaatctagatttcagaatatattactaatggtaatgattattccaacgtggattaatttacttctgaagacctatgcttttatagggttattaagtcatgatggtattataaatcaagcacttcatgtctttcacttaccagtatttaatatgcttttcacaagtggagcgtttttattggttgcaagttatatttatatcccatttatgattttacctatattcaatagtatgaaatcaatacctaataacttattacaagcttctagtgatttaggtgctagtccgttaattactttcagaaaggtcatcattcctttaactaaagagggagtaatgacggggattcaagtgacttttatacctgcgttatcactattcatgattacgcgattgattgcaggtaataaagttattaatataggtacatcgattgaagagcaatttctaacaattcaaaattacggtatgggctctacaattgcgttattcctaattatatttatggcctttatcttaatcttaactaaatctaactcatctaatgggaaggggtga

SEQ ID NO: 1802 - DNA, 714 bp, Staphylococcus capitis
atgattcattttgagcatttcacgttagaacattatcgtactctcttccaagatgatcgattaatatctgtaatattcaacacggtggcggtcgccctattagctgcatcagtgtctacggtaattggtacgtttggcgcgattgctttatattatttacgcaataaaaaattcaaagtaacattattgactttgaataatgtactcatggtctcatcggatgtagttattggtgcatcatttttaattatgtttaccgcaattggacattttactggtttaggtttagggttctttactgtattagcatcacatatcgcattttgtatacctatcgtagtgattattgtgttaccacaactttatgaaatgaacgataacatgttgaacgcagctagagatttaggagctaatgaatcgcaattattgagtagcgtcattatacctaatatcatgccttcaattattggaggatttttcatggctttaacatattctttagatgactttacagttagctttttcgtaacaggaaacggatttagtgtcttatctgtggaagtttatgcaatggctagaaaaggtataagtatggaaattaatgctatatcgactatattatttatagttattttattaggtatcataggatattatttaatacaacactttgttaaacgtcaaaagacggtgaaacggggtgtaagtgaatga

SEQ ID NO: 1803 - DNA, 1074 bp, Staphylococcus capitis
atgaaacgatttctacaacttatcttttctgcagtaattattggtattttatgtttagttatgagtcattggtttaaatctaaagagaacacccaaacgcaagaaaagatttatgtttataactggggagaatacattgatcctagtttgattaaaaagttcgaaaaacaaacaggcatacaagttgtatatgaaacgtttgattcaaatgaagccatggaggccaaaattcgtaatgggggtacacattatgatgtggcatttccaagtgagtacaccgtgcaaaagcttaagcgttccaatttgttagttcctttagatcatactaaaatacccaatatcaaaaatcttgattctgattatatgaatatgtcttatgatcctcataataaatattcattaccttatttctttggtacagtgggtattttatataataaagataaatatcctcatgataatttcaatagttggagtgatttgtatcaatctaagtataaaaatgatattttattagtagatggtgctcgagaaatgatgggaatgggattaaacaaattaggttatagtttgaatgataaccattcttctcatattaaaagagctgaagtggatttgaaaaagttagttccgcaagtaagaggtgtcgttggtgatgagataacaatgatgcttcaacaacatgaaggtaacatcgctgtagtttggagtggtgtggcagcacctttagttcaaggtagtaataagtataactatgtcattcccaaagagggatctaatctttggtttgataacatggttattcctaaaactgctcagaataaagaaggcgcatataaatttatgaacttcttattagatgagaaaaataataaacagaatacagagtgggtaggctatgcaacgcctaataaagcagctagagataagctacctaaagaagttagagaagaccatagattttacccaacaaaaaaagaacaaaatcgtttggaagtttataaggacttaggccagaaaacacttagcgaatataacgaaagctttttaaattttaaaatgaacttaaaatag

SEQ ID NO: 1804 - DNA, 1233 bp, Staphylococcus capitis
atgtcaggagagcaatacacacaaattaagcgtccagtcggtcggctaactgaaaaagtactaggttggtttagttgggtatttttactcatattaacgattgtaacgatgtttattgcacttgtatcatttagtaatgatacatcgattgctaatttagaaaattcattaaataataatgagttggttcaacaaattttaggtaacaatgatttaagtacaactcaatttgttatatggttacaaaatggtgtttgggctatcattgtttacttcatcatttgtttattgatttcattcttagctttaatttcaatgaatattagaatactttcaggtttcttatttctattagcagctatagttacgattccattggtattattagttgtcacattaattattccaattttattctttatcgtcgctatcatgatgtttgctagaaaagatcgggtagaaaccgtaccagcatactataatgatgattatggacaaccatactatgataattatgaatactatgataaacgtagaccacagtctacctctcataatgactattacgaagatggatacaatcacggttattacgatgattacgaacaaccacgtgataataaagaatatagaaacacacgtcgtaaacgcagaaaagaacgtcaacaaagagaagcctatgaagcagagcaccaatatgaacctcaacaacatgacgcttatatgaatgatgagtcagagagtcataattatgatgagacagatgataaatatgctcaatttccaaaacgcgctgtagaaagtgaatacaagtccactcagcaggaagaagaagaaccggcgattatgtctagacaggcgaaatacaataagaaatctaaaaaagctaagcgtgatgaacaattccaagaagattattatcaaaatgaagatgatagttacggttatgaggatggttatgcttacaaccaagagccacaagaacctcaagttgatcctagagaacttaaggctcaacgcaagaaagaaaaagctgaaattcgtgcgaagaaaagagaaaagaaaaaagcttataataaacgcatgaaagaaagaagaaagaatcaacctagtgcagtcaatcaacggagaatgaattacgaggaacgtcgtcaaatgttccaaggtgaaaaacctcaagaagataatcaagagaaccaagttgaacacaaagacgacacggaaaataaataa

SEQ ID NO: 1805 - DNA, 528 bp, Staphylococcus capitis
atgaatagaaaaacagaaactatcttagcatggatagctaatggtttaagtattatatatttattattaacttgtttatcacttttagtaatgaaaagtggtcaaaatcaacaacaatataaagatataatgaaacaaatgtatggcaataatcaaaatgtatcctctgatattttgttagcctcaatgatgatttcaattggatttttagcattctctacaatattagggatatttggagccttaacaatcaaagggcgtaaaaatttagcaggggccttacttatagctgctgcagtaacaggtttaataactatgaatttcattgcaatgattttatggattattgctgctattatgttgtttagtaaaaagaaagaccgcaacaatcatacacactataatcaatctcataatagagaacaatttaacgataattatcatgaaaacaaacaatcacataatgaagaatgggatccagacaaagaactaaaaaatcacaagaaagatgatccatacatttattag

SEQ ID NO: 1806 - DNA, 1347 bp, Staphylococcus capitis
ttgaagttaaaagacgacaactatgaacaacaacaaagtttagacgaaataaataatactattcattttgaccataaaagtagtgcaagtcagaagtttttagcatttttaggtcctggtttactcgtggcagtaggttatatggaccccggcaactggattacatccatgcagggtggcgcacaatatggctataccttgctattcgtgattttaatctcaagtttagcagcaatgttattacaaagtatgacggttagattaggaatagcaaccggtaaagatcttgcgcaaatgacacgtcattttttaagtaaacctgtagctatcatattttggattatcgctgaattagccatcatagctactgacatcgcagaagttattggtagtgctatcgcgttagacttaatttttggtattccattaattgtcggcgccttaattaccgtattcgacgttttcttattgttattcattatgcgcttcggtttcagaaaaattgaagccatcgttggaacattgatatttactgtattagcgatatttgtatttgaagtttttatatcttctccacaattaactgatatattgaatggctttgtaccacataaagaaattgttactaatcaaggcattttatatattgctttaggtattattggagcgacaatcatgcctcacaatttatatctacattcttcaattgttcaatcacgtaaatatgatcgacatgacaatgaagagaaagctcaagcaattaagtacgctacaattgattcaaaccttcaattatctatagcttttgtagttaattgtttattattaactttaggtgcagctctattttttggaactaaaacaaatgatttaggtggtttctacgatttatatcatgccttaaaaaccgaacccgtattaggcgcaactttaggcggcgtgatgagtacactatttgcagtagctttattagcttctggacaaaattctactattacaggtactttggctggtcaaattgtgatggaaggatttttacgattatcaattcctaactggttacgtcgtttgattactcgagcgcttgcagtcatcccagttatcatttgtttaattatctttaaaggcaactctgaaaaaattgaacaacttcttgtattttcacaagtatttctaagtatcgcattacctttctcattaataccgcttcaacttgctacaagtaataaaaaattaatgggaccttttattaataaaacgtgggttaatattatttcatggatgctaattgtcattctaagtggattaaatgtttacttaatcattcaaacgttccaagaattataa

SEQ ID NO: 1807 - DNA, 612 bp, Staphylococcus capitis
atgactcaatatacatttgctccaaaagattttaaagctttcgatgtcgaaggtctagacaatcgtatggaagcactcaatgaatatgttagacctcaattaaataatttaggaacatactttgcagattattttagtactcaaactggcgaagagttctaccctcatgtagctaaacatgcgcgtcgtagtgttaatccacctaaagatacgtgggtagcatttgctcctaataaacgtggatataagatgttaccacattttcaaattggattatttagagaccaattatttgtaatgttcggcgtaatgcatgaggctaaaaataaagccaatcagatgaaagtctttaaaaagcatttcgataaaattaaagacttacctgaagactatagtgtttgcttagatcatatgaaacctgaaaagacacttattaaagatatgaacgatgacgatcttcacaaagctattgatcgcgcaattaatgttaagaaaggtgaatttttcatagcacgagaaattcagccttctgatcaaagattaaaaagtgataaagcctttctacagtttattgaagaaacatttgatgcgtttttaagattttaccaataa

SEQ ID NO: 1808 - DNA, 831 bp, Staphylococcus capitis
atggcattatatgattttgcaaagggaataatactagaggctggtaataaagttcgtcatatgatgaaagatgatctggatatagaaatgaaatctaatccgaatgatttagtcacgaatgttgataaggctactgaaaattatctttatgaaacgattcatcacaattatcctgaacatcgagttataggtgaagaagggcacggacataatttaaaagatacacaaggcatcatttgggtcatagatcccatagacggtacgctaaacttcgttcatcaaaaagaaaattttgcgatatcaattggtatttaccatgatggtaaaccgtacgctgggttcgtatatgatgtaatgagagacgttctataccacactaaagttggtgaaggtgcctttgaaaatagccatcaattaaagccactagaagattccgaacttaaaacaagtatcattggtataaatcctaactggttaactaaaccaataatgggaaaagtgttcgcaccaatagtagaggacgctagaagtgcaagagcttatggtagtgctgcattagaaattataagtgtggctaaaggtcaacttgctgcgtaccttacaccaagattacaaccatgggattttgctggaggcttaatgatattgaatgaagtgggaggcgtaggtagtaacttattaggggacagacttgaaatgaaccaccctaattctattttaatggctaacgcaaaacttcatcgagagatccttaataactatttaagtgaatttgaagagacgattgctaaacatcatgaacagcgatttggtagaaaacgagaaaaataa

SEQ ID NO: 1809 - DNA, 192 bp, Staphylococcus capitis
atgcaacaaaaaaaatcaaaaggcatcttctggatattctctattttagcagtcattttcttagtatcttttagttttgcattaggtgctgctaatgttccatggatgattttaacatttatattactcattgcaacatttggcgttggtttcactgttaaaaagaaatacagagaaaacaactggctgtaa

SEQ ID NO: 1810 - DNA, 1848 bp, Staphylococcus capitis
atgactaatttaagagaagatgttcgtaatatagcgattattgcgcacgttgaccatggtaaaacaactttagtagatgagttgcttaaacagtctggtattttcagagaaaatgaacatgtagacgaacgtgcaatggattcaaacgatttagaaagagaacgtggtattacgattcttgctaaaaatacagcaattgattataaaggcacacgtattaatatcttagacacacctggccatgccgatttcggtggggaagttgaacgtattatgaaaatggttgatggtgttgttcttgtagttgatgcatatgaaggtacaatgccacaaactcgttttgttcttaaaaaagcattagaacaaaatttaaaaccagtagtagttgtaaataaaattgataaaccagctgcacgtcctgaaggcgtagtagatgaagtattagacttatttatagaattagaagcaaatgatgaacagttagatttcccagttgtttatgcttcagcagtaaacggtacagcaagccttgaatcagataagcaagatgaaaacatgcaatcattatttgaaacaataattgattatgttcccgcaccaattgataatcaagatgaaccgttacaattccaagtcgcattattagattataacgactatgttggacgtattggagttgggcgcgtatttagaggtaaaatgcgtgttggagataacgtatcattaatcaagttagatggctcaatcaagaatttccgagtaactaaaatatttggttactttggtttaaaacgtgaagaaattgaagaagcacaagctggagacttaatcgctgtgtcaggaatggaagatatcaatgttggtgaaactgtgacacctcatgatcatcaagaagcgttacctgtgttacgtattgacgaaccaacacttgaaatgactttccgagtaaataattcaccatttgctggtcgagaaggtgactatgtcactgcacgtcaaattcaagaaagattagagcaacaacttgaaacagacgtttcattaaaagttactccaacagaccaaccagatgcttggattgtagctggacgcggtgagttacacctttcaatcttaattgaaaatatgagacgtgaaggttttgaattacaagtttctaaacctcaagttattttaagagaaatcgacggcgtgttaagcgaaccatttgaacgtgtacaatgtgaggtaccttctgaaaacgctggtgcagtaattgaatctctaggtgcacgtaaaggtgaaatgttagatatgatgactactgataatggtcttacgcgtcttatctttatggtaccagcacgtggtatgattggttatactacagaatttatgtctatgacacgtggttatggtattattaatcatactttcgaagaatttagacctcgtgttaaagctcaaataggtgggcgtcgtaacggtgctttaatttcaatggaccaaggtcaagctacatcatatgcaattattaacttagaagaccgtggtgtaaacttcatggaaccaggtacagaagtttatgaaggtatgatagttggtgaacataaccgtgaaaatgacttaacagttaatattacgaaagcgaagcatcaaactaacgtgcgctctgctacgaaagatcaaactcaaacgatgaatcgtcctagaattttaactctagaagaagcattacaatttatcaatgacgatgaattagttgaagttacaccagaaaatattagattaagaaagaaaatcttaaacaaatcagcacgtgaaaaagaagcaaaacgcgttaaacaaatgatgcaagaagatcaataa

SEQ ID NO: 1811 - DNA, 210 bp, Staphylococcus capitis
gtgctagaagttcaatgtatcatttgtgatacaaaagtgtttattgatgaacaaacagttgaggctaaacgcttaagaaacaatcctattcgcacctttatgtgcgatgattgtaaaagtcgtttagatacacctaaacaacgcaaaccacaagtgatggaagacatttctaaaacagaaaatcattcaatcgataaagatgaattataa

SEQ ID NO: 1812 - DNA, 483 bp, Staphylococcus capitis
atgatccaaattaagggtgcagttaagtttcctatctctttggatagtacaacttggattttcgatgacagaaaagtgagtatcgatgatttagaacgtggggttttcgacggtactagacctgttaacttcgaagataacactgaatggaatcgagctattttagaaggacaaaccaatccacctacacttgattcagaaattaaatataaaaagcgttcagttttagaaggatctttcgtcattaatatgacaccatttttcaaaaatgctgaaccacacgataaagcaacagcaataaaactttataatgataatgatgctatcgaaataccaattgaattattaccttatttattcttccaattcgcgaaagatggcaaacgattatatagcgacaatgccgttgatagctttgtttatgtgccagaggatgggtatacatatgaattcaaatatgtaactcatatagaggtgatttaa

SEQ ID NO: 1813 - DNA, 276 bp, Staphylococcus capitis
atggctaaccaatcgaaattaaataatgcggcatatgaccagttgaataaagatgctgatagaatcttacatcttattaaagttcagatggataacttaactttaccttcttgtccgctttatgaagaagtgttagatactcaaatgtttggccttcaaaaagaggttgatttcgctgttcaacttggtttagttgataaagaagatggtaagcaattaatgttaagattagaaaaagaactttctaaattacatgaagctttcacaaatgtttaa

SEQ ID NO: 1814 - DNA, 1224 bp, Staphylococcus capitis
atgaataattttaaaaatataatgcggtatattggaaaaacttctaaatttatcgattatccattattaattacatacgtactcctgtgtttgattggattagtaatggtatacagcgcaagtatggtagctgcaactaaaggtactttaactggtggtgtagccgttgcaggaacttacttttataatagacaacttttatacgttattatgagtttcgctatagtcttttttatggcatttattatgaatgtaaaagtcctaaagaagcctaatgttcaaaaaggaatgatgattggtattttcgtactactattactgactttagttattggtaaaaatatcaatggttccaagagttggattaatttaggttttatgaatctacaagcatcagagttactaaaaattgccatcattctttacataccatttatgattgaaaagaaaatgcctgcagtaagacagaacatcaagttaatcttaggtccaattctattcgtagtaacgtgtctggttcttgttcttttccaaaaggacgttgggcaaacgatgttaatactaatcatcttcttctcaattattttctattctggtattggtgttcagaatatgttgaagtggggattattagtagctttaggatttgttattattgcatcgtttatgttgatactacatatggttcctagttatttagaagcacgttttagtacgttaacaaatccatttggacaagaatcaggaacagggtatcatatttctaattccttaatggcgataggtaatggtgggctatttggacgtggattaggtaacagtataatgaaattgggttacttgccagaacctcatactgattttatctttgcggtgatatgcgaagagttaggtttagtgggtggcttattagtaattattttagaatatttcattgtatatcgagcattccaattagctaataaaacaaattcttatttttacaaattagtttgcgtcggtatcgcaagttatataggaagccaaacatttgttaatatcggtggtatttcagctacaatcccattaacaggtgtaccgttaccatttattagttttggtggttcagcaatgattagtttgagtattgccatgggtcttttattaattactgctaaacaaatcaaacaagatgataaacgccaaaagcaacgtaaaatcgatatgaaacgccgttataattaa

SEQ ID NO: 1815 - DNA, 3450 bp, Staphylococcus capitis
ttgaaacatataaagaagttacttgttgctaaccgtggtgaaattgccatcaggatttttagagcagcagcagagttaaatatcaatacagtagcaatatattctaatgaagataaaagttcattacatagatataaggcagacgaatcttacttagttggtagtgatttaggacctgctgaaagttatttaaacattgaacgcatcatcgaggtagcgaaacgtgcaggtgtagatgcgattcaccctggatatggttttctaagtgaaaatgaacagttcgcacgtcgttgtgcggaagaaaatattaaatttataggtccccatcttgaacatttagatatgtttggagataaggtcaaagcgagaacaactgctattaaagccgatttgcctgttattccaggtacagatgggcctattgaaagttttgaagcagccaaacaattcgcagaagaagctggctttccactaatgattaaagcaactagtggtggaggcggtaaaggtatgcgtattgtacgtgaagaaagtgaacttgaagatgctttccaccgtgctaaatcagaagctgaaaagtcttttggcaatagcgaagtttatattgaaagatatattgataatcctaaacatattgaagtacaagttattggtgatgaactaggcaatattatacatttgtatgaaagagattgttcggtacaacgacgccatcagaaagttgttgaagttgcgccttcagtaggattatcaaacagtttaagagaacgtatttgtgaagcagctattcagttgatggagaatattaaatacgtaaatgccggaacagttgaatttttagtctcaggtgatgaattcttctttattgaagtcaatccacgtgtacaagttgaacatacaattactgagatgatcacaggtatagatattgttaaaactcaaattttagtggctgatggcgagtcactttttggtgatagaattgctatgccaaaacaacaagatattcaaacgcttggatatgcgattcaatgtcgtattactactgaagacccattgaatgattttatgccagattcaggaacaatcatcgcataccgttcgagcggtggatttggagttagattggatgctggcgatggtttccaaggagctgaaatctcaccatattatgattctctattggttaaattatctacacatgcgttttcttataaacaagctgaagaaaaaatggaacgttcactacgagaaatgcgtatacgtggagttaaaaccaacattccgtttttaatcaacgtgatgcgaaatgataaatttagaagtggagattatacaactaaatttatagaagaaacaccagaattattcgatattgcacctacacttgatagaggtactaagacactagaatatattgggaatgtaactataaatggcttccctaatgtggaacagcgtcctaaaccagattacgaatcaacatcaatcccgagagtatctcaagatcgtattaatcaattatctggaacgaaacaaattttagatgaccaaggacctagggggcttgctgattgggtacgagcacaggaagacgtactcattacagataccacattcagagatgcgcatcagtcattattagctactcgtgtaagaacgaaagacatgatgaatattgcatctaaaactgctgaagtatttaaagatagcttttcattagaaatgtggggtggcgcaacctttgatgtggcatataatttcttaaaagagaatccttgggaacgtttagaaagattgcgtaaagcaatacctaatgtcttgttccaaatgttattacgtgcatctaacgcagttggttacaaaaattatcctgataatgtaattaagaaatttgtacatgagagtgctaacgcaggtgtagatgtcttccgtatcttcgattcattaaactgggtcgatcaaatgaaaattgctaatgaagccgtgcaagaagcaggtaaaatatctgaaggtgcaatttgttacacaggcgatattttaaatgtcgaacgttctaatatctatacattagattactacgtgaaaatggctaaagaattagaaagagaaggattccatattttagcaattaaagacatggctggactgctgaaaccaaaagcagcaaatgaattaatcggtgaattacgtgcagcagttaatttaccaattcatctccatacacatgatacaagtggaaatggtttgctaacttataaacaagctattgacgcaggtgtagatatcatagacacagctgttgcttcaatgagtggattgacaagtcagcctagtgcgaattctttatattatgcactcaatggtttcccacgcaacttaagaactgatattgaaggtttagaagaattaagtcattactgggctactgttcgtccttactatgctgactttgaaagtgatattaaatcacctaatactgaaatatatcaacacgaaatgcctggaggtcagtactctaatttaagtcaacaagctaaaagtttaggtttaggtgggcgctttgacgaagtaaaagatatgtatcgtagagtgaatttcttatttggtgatatagttaaggtaacaccatcttctaaagtagtgggagatatggcgctctacatggttcagaatgatttagatgaatcatcagtacttagcgatgggtataaacttgattttcctgaatcagtggtttcattctttaaaggtgaaattggtcagccagtaaatgggtttaatcgaaaattacaagaagttattctcaaaggtcaacaaccacttactgagagatctggagaatatttagagcctgttgactttgacgagattcgtgaagagttagctgaaaagcaacagggtgaagtgacagaacaagatgttataagctatgtcctatatccgaaagtgtataaccaatatattcaaacaaaagagcaatatggtgatctatcattacttgatacaccgaccttcttgtttggtatgcgtaatggtgaaaccgttgaaatagaaattgatacgggtaaacgtttaataattaaactcgaaacaattagtgaacctgatgaaaatggtaatcgtacaatttattatgctatgaatggtcaagcacgtcgaatttatattaaagacgaaaatgtgaagacaaatgctaatgtgaaacctaaagctgataaaactaatcctagccatataggagctcaaatgcctggatctgtcactgaggttaaagttgctgtaggtgatgaagttaaagcaaatcaaccattgttgattactgaagctatgaagatggaaactactatacaagcaccatttgatggtgtaattaaacaagttactgtagtaagtggtgatgccattgcaaccggcgatctacttattgaaatagaaaagctatcataa

SEQ ID NO: 1816 - DNA, 909 bp, Staphylococcus capitis
ttgtttagaaagcagaaccttaaatggttaggtgttttagctacgattattatgacttttgttcaattgggtggcgccctcgtaactaaaacaggatcagaagatggttgtggatcatcatggccattatgtaatggtgcacttcttcctcaaaatttaccaattcagacgattattgaattaagtcacagagctgtatcaggtctatctcttatcgtcgtgctttggttagtcattacagcatggaagaatattggatatattaaagaaatcaaaccactttcaatcattagtgttgctttcttacttgtccaagcactaataggagccgcagccgtaatatggcaacagaatgcttatgttcttgcattacattttggtatttctttaattagtttttcatcagtattcgtaatgactctaatcatattttctgttgaccaaaaatatgaagctgatgaattatttattaagaagccactgcgtacattaacatggctgatggcaattattgtgtaccttacaatttatactggtgcattagtaagacatactaagtcgagtcttgcttatggtgcatggccagtgccatttaatgatattgtgccacataatgcgcatgattgggtacaattcgcccatagaggtatggcatttatcacatttatgtggattatgttcacatttattcatgctattaaaaattattctgacaatcgcacagtacgttatggttatactgctgcatttattttagttattttacaagttattacaggtgcgctatctgttataacaaatgtaaatttaattattgcattattccatgcattatttatcacatatttattcggaatgattgcctacttcatcttattgatgttaagaacaacacgtagtatgaaatag

SEQ ID NO: 1817 - DNA, 912 bp, Staphylococcus capitis
atgagcaaagaacacactttgtcacaggatacgggccgagtaaccttcaaagaattacaacaaatcataaaaatgggcctcgttcaaggtaacttgatacctgcatttgcaggcgcatggcttgcagttgtaatgacaaaccattccttcctatcgtctatacctcaaatattattgatgattgttggctctactttaatcatggggggcgcatgtgctttaaataattattatgatcaagatattgatagcatcatgcctagtaaacaaagtagaccgactgtaaacgatagaatctcagatagaaacttattaatattaagctttggtatgatgttaattggtgaagctagtcttttcctattgaacgtaccttcaggcgttttaggtttaataggtattgtaggatatgtttcttattattcaatttggtctaagcgacatacaacttggaatacagttgttggaagttttcctggtgctgtaccacctttaattggttgggtagctatcgatggcaatattagcttagcagccattgcactatttttagttgtcttttgttggcaacccgttcacttttatgcacttgctattaaaagaagtgacgaatattcattagctaatattccgatgttaccatcagttaaaggttttaaacgcactagaattagcatgttcatttggttagtattcttattacctttaccattcttattgtctggcttaggtgtaacatttgtagtcatcgctacattacttaatctaggatggttagcattaggattgactacctttaagaaagattctgaccaaacaaaatgggcgacaaaaatgttcatttattcattgaactacttagttgtatttttcgtacttgttgttgtcgtttcattaattaaaatgatctaa

SEQ ID NO: 1818 - DNA, 462 bp, Staphylococcus capitis
atgagcgtacccattttacccacgataagtacttcatgtatcgtcattagtgcaatcttagtggctatcggatggagattaatttggaaacgtcaaattgataaacataaaaaagtcatgttatgggcagcagtttttgcattaactttctttattatttatgctagtagaacaattttcatagggaatactgcctttggtggtccagattcagtgaaaatctactacactatctttttagttttccatatcaacttagctactattggcggtgtattaggattagtacaaattattttagcttttaatgataaatttaatattcatagaaagattggaccggttgcatcgattatttggttcttcacagcaattactggcgtggcggtgtacattctattgtatgtactttacccaggcggagaaacaacctcattaattaaagcaactctaggactataa

SEQ ID NO: 1819 - DNA, 1047 bp, Staphylococcus capitis
atgaaaaagttagttatcaaagtagtaggtgttatttttttaattacttttttaatttatttattttactcaccacgtcttaaatttgatgtattagagaatccaaataaaagtaataaaagtaatcattcagaacaattccaaaagtctaataagaatgttgaaaatcctaaacctaaacatggcattggtacttggattggtaaggatattaaatttatgactaaacactatggtcaagctgatcgtacatatccatttaaatatggttataaaaattacatattcaaaaaagataatgaatattatatcgtaagtactaagaaagatattattacttcagtttatgcaaccggaaaagacgtcaaagttgatccgttaactatcggtgagagtgcctcacatctatttgaaaatacaagcattaacccggaaccaacgatacaatctaatggtaagacgtatcgatttgaaatgtcagatgaagatatgaaaactcaaacattaattaaatatggtaatgtctacgcacaagtttattctgaccaagaatcaaacaaaatcttagcagttcgatttttagattcagatacattagcggcactacaaccatataaattaaataccgatgaaggtgacagttcagattctaaagataaagcaacaccgtttgaacagaacccgaatcaactcattacactttatgaagtcactaatcaaatgagagagttaaaggggttaaaacctctaaaaattaatgacgatattgcacatatagcttcaattaacttgtatgaagcaactgaaaagggtactgatagtgccgaattcactgagaatgcattgacacaacaactcgatgaaaacaatgtgtcctacacatcaacgagtcagaacgtagggtatgattttgatgatgtaccaactttaattcatagttggatgaactcagatatccaccgctctcgtatgttaaataataagtatgacgaaatgggcggagaggttatgaaagattattattcattaattttcttggaaaagtaa

SEQ ID NO: 1820 - DNA, 435 bp, Staphylococcus capitis
atgattactgaagaaacattatccattttagatgagatagaaaatttatctgatatgattgttcaatcagacgtatatcaaacttatcaatatgctaaagataatttagaaaatgatgacgaagcacatctactttatcaagcatttttaaagtcaaaagatcaatacgatgatgtcatgagatttggtaaatatcaccctgactataaaagaattatgatggaaacacgtcaacgtaagcgtgcatacgaaatgttacctgttgtcatggaatataagacaaaggaagtcgcattacaggatttaattgatgaagtattgacaaaaattgcattcgcagtttcggaaaatgtgaaaattgaagcggggaatccattcttccaaacaggtcataatgggtgtgcaactggtggatcttgcaattgttcattataa

SEQ ID NO: 1821 - DNA, 927 bp, Staphylococcus capitis
atgagtaataataaaagatggttagtcaaaggttttttagcaaccgctggtatcttaggaagtttgttttactttaataaaaataaagcacctaaacaagttaagtctattccagcattcttttcaggacaagcaccctatttatttgcccatagaggtgggatggcagttcgtcctgaacaaactcaattagcattcgacaatgcagtagaatatggactagacggttttgaaacagatgtacgtttaactcaagatggtaaattaattgtctttcatgatgcgcttgtcgaccgtactactaatggttcaggtaaagtcagcgaacatactttagaagaattgaaacgtctagacgcaggctatcattttacagatattaatggcgctacaccttatcgcaatgatcctcatgccaaaatactttcatttgaggaattattagagatgtatccaaacatgtatatcaatgttgatttaaaagatgcacctaatacgtatgaaggtcgacttgctcctgaggtgatgtacaatactattgttaaacatcaagcgcaagatcgtgtgctcgtaacaagttttcataaaactcaaattcgacgctttgttgagtatagcaatgatgaaatagccgtcggtgctagtcaagctgaagtagctgaaggtttcttgaaatttaatagtatgcttggaaatacattcacgcctcaagctgatacatttcaaatgccaactgagtttaaaggtgtgccgttaacgtctaaacgctttatcgactggctaaatttaaataatattgttccaggtttctatggtgtgaacagcattgatttaatgacagacctttataataaaggcgttcacaccttagttacagaccgccctgacttagctaaacaatttaaagaaaccttacttaataagtaa

SEQ ID NO: 1822 - DNA, 252 bp, Staphylococcus capitis
atgaatttaattcctagagtaagtttaattatttatttaaaacatattaagcacgaacgacaaataagaaaatatggacatattgttcattcaaatagacaaagaaaatatgtggtgatgtacgtcaatgaagcagatgctgataatgtagtacataaactcatgcagcttaaatatgtgagagatattgatgggtcaccatataagtttttaaagaaaacttatgagaaggaaaaacatgaagtgctataa

SEQ ID NO: 1823 - DNA, 390 bp, Staphylococcus capitis
atgaaacaatcgtttatcaaaatcggtgaaggtttaacagatttatttgaattcactacccttatcgagttcaattaccctcgtatcaatcgcatcatttactttcattcgccacaatctgagaaacaactatcttcagtagcaatgattatgaatccgacatctggcaaccactttcaagctatgtatatcatggttaatgctttaaactatccatatccagatggaaataagaaatttgaaatcattaatactgaagctgaaaagtataatattccaattgtaggcattgatgttcaaccaccagaaacttaccctgatatagatttatattttaactatcttatcagcgtattacgtctacaacgctggattccaccattacaataa

SEQ ID NO: 1824 - DNA, 543 bp, Staphylococcus capitis
atgcgcgtaattgcaggtaaacataaaagtaaagcgttagaaagtcttgaaggacgaaatacaagacctactatggataaagtaaaagaaggcatttttaacagtttgcatgaagtttcaggtttaggattagatttattcgcaggaagcggagcattaggcatagaagctttatcacgtggtatggaaaaagttatttttgtagatcaaaactttaaggctgttaaagtcatcaaagctaatctaaatcaattggatttaatgcctcaagctgaagtatataaaaataatgccgatagagcgttaaaagcacttgctaaacgtgatattcaatttgatgtcattttcttagatcctccttacaaaaaggggttaattgatgaagcaattgagcgaatttcggagtttaatttattaaaagaaaatggtattatcgtttgtgagtttagtaatcatgaggatattaaatatgagccgttccaagtgattaagcgttatcattacggtttgacagatactttgttacttgaaaaaggagaataa

SEQ ID NO: 1825 - DNA, 486 bp, Staphylococcus capitis
atgagtaagacgagagcagttattcccggtagtttcgatcctattacatatggacacttagacattatagagcgaagcgccgatcgctttgatgaaattcatgtatgtgtgttaaaaaatagcagcaaaggtggaacatttgatttagaagaacgaattgatttaataagagattctgttcaacatttatcaaatgtagaagttcatcactttaatggattgttagtcgacttctgtgatcaagtaggagcaagaacgattatcagaggtctacgtgcagtcagtgactttgaatatgaattacgtttaacctccatgaataagaagttaaataataatattgaaacaatgtacatgatgacaagcacaaattattcatttattagttcaagcattgtaaaagaggtagcagcctataaagcagatatttcagcatttgtaccaccaaatgttgagaaagcattaaaagataaatttgatgtttaa

SEQ ID NO: 1826 - DNA, 1134 bp, Staphylococcus capitis
atgaaaagtgttgggctcataactgaatataatccatttcataacggacatttatatcactcacaacaaactcaacttcactccaattcaaatgtaacaattgcgttgatgagtggcaactttgttatgcgtggagaacctgcaatttataataaatttactcgtgctgaaatggccctcactggcgttgatttagtcgtggaattaccgttaatagctagtctctcttcaggagatacatttgctgaaatggctattaaagtagctcattatttagatattgatgaagtttcttttggtagtgaaagtgcagatatagaagaattacaacaacttgcgtctactatttcaactttagaaagccaccccgattttaaaagtaaacttaaagaaggaaagagttaccctcgtatattgagtgaactcactgatcatcatgaacttattcaatcgccgaacaacatgttaggtataagttatcttaaggcaatcaaacgatttgcaccacttataaaagcaatgacaattaaacgtgaaggttcacatcatcaccactctgaaatacagcatcctacctttgcaagtggaacatctattcgtcagtctttaataaagaacgataatgagtggaaacgtgtggttcctgaatcagtacacgctttgtatcataaacctcatgcttcaatcgaagatacattccctttcattaagtatcaacttatggtgcaagatactgaggctttagcatcaatatacactgtaaatgaaggctttgagaatcgtttaaaatctatagttcaagaaagttactcgttcaaagaactaatggagaagcttaaaacgaaacgttacacttatactcatatacaacgtgtgcttatgaatgtattaatcaatgtacgtgctcataatgtaaaaaaagacatcgacgctgttagaattttaggaatgaacgatactggtagaaattacttaaaatatttaaaaaataaatttcctgagcgtcattttatcactaacataaataaaaaaaatgcacattatttccaaaatgaaattaaagctacacaagtgtataatcttatcagcaaacaatctcaaacagatttcaacacacctatcatacgcaaataa

SEQ ID NO: 1827 - DNA, 555 bp, Staphylococcus capitis
atgaaatggtcaataacacaattgagaaagtatcaaggtaagccgtttgagtttaaccaaaaggctcattttgatcatttgaaagagtcattagatttaattgatctatcagaaataaatgttgaaggcctattaacagtgaaatctaatgaagtgattgcagatatgcatgttactggtacatatactatgccatgtgcacgtacgctagagccagtagatgtgcctctagatgtaactacttcagaagtatttgacttagaaggctacgatgattataccgatgatgacgatcaagaagatgaacattatcatcttgtcactgatggtatgattaatatcaaagacattgctgaagaacttgtaattattgaaaagcctatgcgcgccttttctgaaaatagtgatcaaatgctaacagaaggtaatggctgggaagtcattgatgaagatcaattaattgaagttcaaaaagaacaagaagatgattctgaaactaagcaagttgatccaaggcttcagaaattacaacaattatatgataaagagcaatag

SEQ ID NO: 1828 - DNA, 174 bp, Staphylococcus capitis
atggcagtaccaaaaagaagaacgtctaaaacaagaaaaaataaacgccgtacgcatttcaaaatttcagtacctggtatgactgaatgcccaagctgtggcgaatacaaattatctcaccgcgtatgtaaaaactgtggttcttacaacggtgaagaagtcgtttctaaataa

SEQ ID NO: 1829 - DNA, 3390 bp, Staphylococcus capitis
atgaacaaacaacataagaatcattcattgaggtatgccaattacttttcaatacgtaaattaaccgtaggagtagctgcaatcacgttaggaactgccatcttcttaggtaccaatcatgaagctcaagctgctgaagatactacttcccaagctattactaattcggctgcttcttctggacaaaacactaatacagctcacccaactggggcttctacctcaagttcaactaatcaaagtgatcaagctcaaccgaaaaatactactcaagcttcatctgatacacagagcacatcaacttctcaaaataattcaaataataatgctagtaatacaactcaatccgcttcaaacactagtcaaaatgcacaaactaaatttcactctgctgataatttaaaagaagcaattaaagatccagcagtcgcaaatcaaccacatgatgaggggcccagacgccctatagaatttagtttagaaggtagtagtgaaaaaactttctatatagaagcgagcacaaaaaacccggctgatgtcatatttacaagagatggcgcaaaagttgaatttgaagttcagaccgcagattcatttgaaaaatttgaagtatataatggcgatactaaattacccgttaaccttgtttcatttgattcagaaaaagattatgcatatgtaagatttccagttacagatggaactaaagaagtcagagttcttgctacagtagtatggggtggtggtaccaacaaagattattatgacgcaagattagtatttaaaaagccaattcagaatgatacatcccaattccaaacccaacaggaatatgatactgagaagttattagaaccttatagaaaagctaaaacattggaaagacaagtttatgaattagaaaagattcaagataaactacctgataatttaaaacaagaatacaaggaaaaacttgctaaagctaaaagtgatttagaacaagaagtaacgtccgctaaacctgagtttgaaaatgtagaacctactcccaaaacattaactgacgaaaaaaatgctgatttcgtagtacttgaaagtactgaagataatccttcagttatggacggctttgttcaacatccttttaaaacagcgactattgatggtaaaaaatacgttgtaatgcaaactaacactgactcatattggaaagatttaaaagttgaaggtaaacgtgtggtgactatttctcgtgataaaacgaatgatacacgtacaatcattttcccttatgaagatggtaaagatgtatacaatgcgattgtaaaagttgtagttaaaaatattggttatgatggtcaatatcatgtaagaattcaaaataatgaatttgcgaagaaacgtgtttcaagtgattcaacggaaaataaatcaacttctacagacacgagtacttcaaatgcatcacaaaacagtgattcatctaaaaaagtaactgctaaagattatcaagcaacaacatataaaaatatttataaagatgttgtgtatgataaaaataaattacataaagaattaccaatttttgtaagtggacattttagaaatgcaattaataatgaggaatcatctttatacgaaggtgctttaaatcctaatgtaaaaattgaaaaattaaatgatttatataaatatactgttcacttacatcctggaattgctgatgtcggcggagaattctatgattttgaacttttcaaagtagaatataaagaccaaccattagaacttaaaacaattaatgaaaagaataaaattaaggaattcactgtaacctctagagatttattagagaaaattcaactcacaggaacaactaaatatcctgaaaatattaataatcctaataaaagtagagatcaagctcatgacgtaacacttcaattatactatgatagtgcgcgtcaatttaataatgacttatggaatgatcctaaagagcgtccatctaaaccagctaaaacaactaaaccggcaccatcatcacagaatcaacaaactactactcaaacaaacaataatgaccaatcatcagttccagatcatgaagttgaaacagctaaagttccaactgctttccctgtaactatcaaaggggatttgaaatatcaaaaggacaatgcccaagattcgacatacgctaatttattcgaaaaggatgtaaaagtagaaaaagttggagacaaatataaatatactttcaaagtcaaagaagcaaatggtaattcacttattactaagagaactaaatatcaattttctaaaattacccataatggtgaaaacgtgatattaactgatcaaggtaataaagttaaagaagcagttttaactactgataaattactagataaaatccaactcgtaactaaagtggtatctaaacttgataaagaaggaaatgacgtagcaacaacattagtggttgatttccctgttatagagaaaccaaaagctgattctaaccaaacgaacaatcctacaaataataatccaaacaataataatgcaacgactaaccctgtagaaacaccaacagctaaacctaatgaaacaccaacagctaaacctaatgaaacaccaacagctaaacctaatgaaacaccaacagctaaacctgcggaaactcaaaacacaacatcatcagtaaaaccaaattcaacagagtttgaaagtgctattactacacctacagtattaaaagatgaaaaagccgttgatttttctatactgaaaaaattaaaagatcaaccttctgcaatagaaaattacgttcaaaaacctatcaaagtagctgtagatgaaaaaggcaacaaacttgtagttcttacaattaaaaatgattcttattggaaagaatttaaagttgagggccaacgtgtaactacaatagcaagagataaagaacatgatacgcgtactgttgcgttcccttatgtaaagggtcaaaaggtttataacgcatttgtaagtattgaagtacccaaaatcggctataaaggaaattatgatattagaataattaatgatgaacctaataaagaattcgaacctattccaattcctaaaaaagaaaaaccaaatcctaagcgtccaacaaaacttacaaagacttcttcaaaaactaaaactttaacagttactaaagatagaaaatctgaccaatctcaaacagtaacagttattaaagatagtaagtcaaacaaatctcaatcaactgacaaatctaaaactttacctaatactggtttagattcttctcaaacaacaatatgggcaagcttaatagcattcttaggtagtacgttactcataaatagaaagaaccgtaaaagtgacaaacattaa

SEQ ID NO: 1830 - DNA, 1404 bp, Staphylococcus capitis
atgaaacaccaacataagaaaaacacactcattttaaataatttcttttcaattagaaagcttaaatttggagtagcttcaatcacattaggttcagcacttattattggtgcacaccatgaagctcaagccgctgaaagcaataatagtcaaggtactcaaaactctacaactattgaccaaactaacaaaaatacgaatcaatcaacgcaacaagcgcagtccaaaccagccgatacggttgctactcaaaattcaaatactcaaaataaccaagctactacgcaaaatgcgccaactactaatacaaacaatagtaattcaaagtcgaatgaactttctcaaactttaaatttccaagttcaaaaagataaaacaaacgacgtttctcacatggatcaatatgtgcagcatcctggtaaagtaataaaaaaagatgataagtactacttccaaatcactttagacaacgcctcatggtggaagagttttcgatttttcgatgaaaatgaaactgaattacccactacagttgtagatgataatactgagaaagatactaaaacagtaaatatggaagtaacaccaggtatgaataatattattagtaaagttcatattgtaatacctgctttaaaatatgatcatgaatatacaacgcatattgaattagaaagtgtcatccctactattgaggacccagaaccaacggctactcaaaaccaagctaaacaaaatgataatatgaatgtagaacaacctgatgctggtaataatcaagctaaaaatgaaaaaccatcagctccggtaaaccatactgatactaataatcaaaacactaaaattgatagtcaggacaaaaaagataacgcttctacagatcaacaacctgatgctaataaaaaacaagacacgactcaaaagccttcagcgcctgtaagcgatactgttactaacaatcaaaatgataaaactgataatcaagctaaaaaagatgacgcttctaaaaatcaacaaacagctactgacaaaaaacaagatactaaaaaaccggcagctcaagtaagcgatactactaaaaagcaagatgtaaaaactaataaaaaagatgatacttctaaagataaacaacctgatgctgctaaacattctgaaaaactcgataaaatacataaagactccaacggccctaaacctaagaaagaccaaaagcatgataaagattctaaagaagccaaaggaaaagattctgtagttaaagacaatagtaaatctaaaacttcaaaagaattaccagaaacaggttcaaaacaagaatcaaatagtaacagtctagtatttagtcttatcgccctattatcttcattattacttcttaaaagaaaaaacaataaaaatatctaa

SEQ ID NO: 1831 - DNA, 114 bp, Staphylococcus capitis
ttgattagattagctcgccatgaaatttataactatttagattcttttctttgtcttcttaatagtaataatgatgcagctaaagttattgtgccgaatacagtagtagcgtag

SEQ ID NO: 1832 - DNA, 114 bp, Staphylococcus capitis; identical to SEQ ID NO: 766

SEQ ID NO: 1833 - DNA, 114 bp, Staphylococcus capitis; identical to SEQ ID NO: 1311

SEQ ID NO: 1834 - DNA, 120 bp, Staphylococcus capitis
gtgagagtgattcaacaagcgcaagtacgtctgaatcactcagtacctcaacatctgacagtacatcagagtcaacaagcacatcagcatcagaatcagaaagtgaaagcacgtcaataa

SEQ ID NO: 1835 - DNA, 597 bp, Staphylococcus capitis
atgcaatatccagaaccaatttctaaacttatagacagttttatgaaactgccaggcattggacctaagacggctcaacgtctggcttttcatactttagatatgaaggaagacgatgttgttcaatttgctaaagcattggtagatgttaaaagagaacttacttattgtagtgtttgtggtcatatcactgaaaatgacccttgctacatttgccaagataagcaacgtgatcgttcggtcatttgtgttgttgaagatgataaagacgttatagcgatggagaaaatgcgcgagtataaaggtttatatcatgttctacatggttcgatatcaccaatggatggtatagggccagaagatattaacatcccagcattagttgagcgactaaaaagtgatgaagttaaagaacttattttagcaatgaatcccaacttagagggagaatctacagcaatgtatatttcgagattagtgaagccaattggtattaaagtaacacgtttagcacaaggactatcggttggtggagatttagaatacgcagatgaagttacgttatctaaagcgattgctggtagaaccgaaatgtag

SEQ ID NO: 1836 - DNA, 318 bp, Staphylococcus capitis
atgcgcggtggcggaaatatgcaacaaatgatgaaacaaatgcaaaaaatgcaaaagaaaatggctcaagaacaagaaaaattaaaagaagaacgcgttgctggaacagctggcggcggtatggttactgtaacagttactggccataaagaagttgtagatgtagaaattaaagaagaagctgtagatccagatgacgttgaaatgcttcaagatttagtattagctgctactaatgaagcgatgaataaagctgacgagttaactcaagaacgtttaggtaaacatactcaaggcttaaacatccctggaatgtga

SEQ ID NO: 1837 - DNA, 1707 bp, Staphylococcus capitis
gtggattaccaagctttgtatcgaatgtatagaccgcaaagtttcgatgatgttgttggacaaacacacgtcacgaaaacgttacgtaatgccatctctaaaggtaaacaatcacatgcttacattttcagtggacccagaggaactgggaagacaagtatcgcaaaagtgtttgccaaggcgattaattgccttaatagcgatgatggagaaccttgtaatgagtgtgcgatttgtaaaggtattactcaaggtacaaattctgatgtgattgaaattgacgcggcgagtaataacggtgtggatgagattagaaatataagagataaggtgaaatacgcaccaagtgaatccaaatataaagtatatattatagatgaggtacatatgttaacgacgggggcgttcaacgccttacttaaaactttggaagagcctcctagtcacgcgatatttattctagcgactacagaaccacataaaattcctcctactattatctctcgagcacaacgttttgattttaaagcgattagtatggatcaaattgtagaccgcctaaagttcgtagctgaatcacagtcactagagtatgacaatgcagcattagaatttattgctaaaacttcagaaggtggtatgcgtgatgctttaagtatcatggatcaagcgattgcttttggggacgagcgtttgacactacaagatgcgttaaacgtgactggtagcgttgatgaagcggcattaaatgatttgttcaaagatgttgttgaggggaatgtcaaagaagcttttggtagatatcatcactttatttcagaaggaaaagaagtgaatcgacttattaacgacatgatttacttcgttagagatacgataatgataaaaacatcaaatgaatcaattgaatatgatgctttagttagttttgaattagacacactatatcgtatgattgatatcattaatgatacacttgtttcaattcgttttagcgttaaccaaaacgttcattttgaagtgttactagttaaacttgcggaaatgattaaagcgcaaccacagactgttcagaatatggctacaacagctgtagctactgaacctgataatgatgtactgcttcaacgtatggagcaacttgaaaatgaattaaaaacactgaaagcgcaaggtgcttcgaatagtggtcaaacacaacaaccgaagaaacctacacgtacagttcaacgctctaaaaatgcattttcaatgcaacaaatagctaaagtattagataaagctaataaagaagacataaaattattaaaagaccactggcaagaagtgattgatcatgctaaaagtaatgacaaaaaatcattagtaagtttactccaaaactcagaaccagtggcagcgagtgaagatcatgtgttagttaagtttgaggaagagattcattgcgaaattgtaaataaagatgatgaaaagcgtaacaatatagagagtgtagtttgtaatatagtaaataaaacggtaaaagtcgttggtgtaccttcggatcaatggttaagagttagatctgaatatattcaaaatcgtaacgctaatggtgaaaataacagcgagtcaggagaggcacaacagccagcacaagttgatgtggcccaaaaggctaaagatttatttggtgaagaaacagtacatatgatagacgaagactga

SEQ ID NO: 1838 - DNA, 531 bp, Staphylococcus capitis
atgcaaatatttttaagtactttaactgaagttgattatgaacgatcacttgatagcattgaacaaaattatgatcaagacccagagatgagttggaaagaacgtgccagagttaagaatctcagaaaatccgagaattataattctgaattagaagttattgctaaaaatgatacgaacgatgtcattggccatgtcttattaggagaaattttattagtttctaataatcatcaaactactgcactagcagttggagctttatcagtacaaccagatgtgcgtgaacaaggactaggaaaagctttaatgcaagcagtagaagagcgtgccaaagctgaagggtatccagcaatttttgttcattgctatactgaatttttcaatcacataggatacgttgatgcgaaacaatacgatattgttatggaagaattaggtaacgatgataccttaagtgtgaaatttttaacttcagacatagcatcacttcatggtatgactgttatgttacctgaagtatttgattaa

SEQ ID NO: 1839 - DNA, 1464 bp, Staphylococcus capitis
atgggcgaatttaaaggatttatgaaatataataaacagtctttatcagaattgtctttggtagatcgtctttctggtcatgatgcgtttcaacaacgctttactaaggaagatgcctccgttcaaggtgcacgctgtatggattgtggcacaccattttgccaaacaggacagttatatggaagagaaactatcggctgtcctattggaaattatataccagagtggaacgatttagtatatcatcaagactttaaaacggcttatgaaagattgagtgagacaaataattttccggaatttactggacgtgtatgccccgcgccatgtgagaattcttgtgtcatgaaaatcaatagagaatccgttgcaattaaaggtattgagcgtactattatagatgaagcttatgataatggttgggttaaaccaaagtatcctgaagaacgtaaagagcaaaaagttgcaatagtaggaagtggacctgcaggacttacagctgctgaagaactcaacattaaagggtaccaagtgaccgtgtttgaaaaagcacatgaaccaggtggcttattaatgtacggtatcccaaatatgaaattagataaagatgtagtacgtcgtcgtatagcgttaatgaaagaggcaggtatagagtttaaaacaagtgttgagattggcgttgatattagtaaagaagagcttgaagatgcatttgatgcaattgttttatgtacgggttcgcagaatgcgagagatttacctttagaaggacgtatgggctttggtattcattttgcaatggattacctaactgaacaaacacaatatctcaatggagaaattgatgaagtttctattactgctaaagataaaaacgttattatcataggtgcaggtgatacaggcgccgactgtgtagcgactgcattgcgtgaaaactgtaaatcaatcgtacaatttaacaagtatactaagcagcctgaagaaattacctttgaaagtaatacatcttggcctttagccatgcctgtatttaaaatggattatgcgcataaagaatatgaagcaaaatttggtaaagaaccaagagcttatggggtacaaacaatgcgctatgatgtagatggtcttggtcgtgtgagaggattgtacactcaagtgctgcaagagacatctgaaggcatggtaatgtcagatggtccagaacgtttttggccagctgatttagtcttattatcaattggttttataggaacagaaacaactattcctcatgcgtttggtattaaaactgaacgtaataaaatagttgctaatgacattgacttccgaactaatcatcctaaattttttgcagctggagatgctcgtagaggtcaaagtttagtcgtatgggcaatcaaagaaggtcgcgctgtagcacgatctgttgaccaatatttaaataaaaaaattctggtgtag

SEQ ID NO: 1840 - DNA, 4497 bp, Staphylococcus capitis
atgtacaatgagaaattaaaaaaaggtttatatgattatcgtgaagagcatgatgcgtgtggtattggattttatgccaatatggataataaaaggtctcatgatattattgaaaaatctttagaaatgttacgtcggttagaccatcgaggtggcgttggtgctgacggtatcactggtgatggtgcgggcataatgactgaaattccatttaagttttttgatcaattagatgaaattaatattcccggcgaaggtaactatgctgtgggattatttttttctaaagaaaaagttaaagattcgattcatgaacccatttttaactcatatttcgaaaatgaaggtttcaaagttattggttatcgagatgtccctgtaaatactaatgcgatagctaaacatgttgctgatacaatgccttacattcaacaaatctttgtagatattagaggcgttgaacatgttgaaaaacaattatttttagcgagaaaacagattgagagatatggagaagagcaatcactggagttatatttcacaagtttatccaagaggacaattgtttataaaggttggttacgctctgatcaaatcaaagaattatatttagatcttcagaatgaaacgtttcaatctaaattaggattagtgcattcaagatttagcacaaatacttttcccagctggaaacgtgcacatcctaaccgaatgctcatgcataatggtgagattaatacaattaaaggtaatgtgaattggatgagagcacgccaaaataaattggttgagacgttatttggagatgaaaaagataaagttcatttcatagtagatgaagatggaagtgattcagctattgtggataatgcgcttgagtttctttcattggctatggaacctgaaaaagcagcaatgttattgattccagaaccttggttatataacaaagctaatgacaaaaatgtgcgtgctttttatgaatattatagctatttaatggaaccatgggacggtccaacgatgatttcattttgtaacggcgataaaattggtgcgcttacagatagaaatggtttacgtccaggccgctatacgattactaaagataactttattgtattttcttctgaagttggtgtagttgatgtgccggaagagaatgtcgcttttaaaggacaacttaatccaggcaaattgttactcgtcgactttttacaaaataaagtagtcgaaaacaatgacttaaaggcagatatagctagcgaattaccttatcaacaatggttagaaacatttaaaattgatgatcgctttgatcgaatagattatgagccgtctgattgggatgaacatacgttatttcgtctgcaaaagcaatttgcctatactaaagaagatataaataaatacatggttgatttagttagtagcaaaaaggatcctattggagcgatggggtatgacgcaccaattgctgttcttaatgataagccagaatcattatttaattattttaaacaattatttgcgcaagtcactaaccctcctatcgacgcttatcgagagaagattgtaacgagtgaaatgtcatatttaggtggagaaggtaatttacttcatcctgatgagacagcgctacaacgtattcaattgaagaaacctgttattactgaggcacaacttgcttccatagactcaagttgcttcaatgtaacccatctatcaacggtgtatacaggggagcttgaaagtgcattaaactcacttggagaacaagcaattgaagcagtaaaatccggtgctaagattattgtgctagatgatcaaacacttgtctcacaggaaggttatgcgatgccaatgttacttgctcttagtcatgttcatcagttactgatacgtgaaggattgcgaatggatacaagtcttgtaactctaacaggtgaaactagagaggtacatcatgtggcatgtctacttggatatggtgctaatgcaatcgtaccttatcttgcgcaacgtacgattgaacaattgacacttaaaggacagttatctggttcagtaattgagaacgtagaaacgtatacacgcgtattatcagaaggtgtcataaaagttatggcgaaaatgggaatttcaactgtgcaaagttatcaaggggcgcagatttttgaagcagttggattatctcaagatgttatagatcgttattttactggaacacagtcaaaaatatctggaataagtattgaacaaatcgacaatgagaataaagcgcgacaaagtaatgcaacagattacttagaatcaggtagtacatttcaatggagacaacaaggtcaacatcatgcatttaaccctcgtacaatctttttactacaacatgcttgtagagaaaatgattatgaactgtttaaagaattttcagaggcagtcaatgataaacgtacagatcacatacgtcatctgttagagtttaaaaaacaaaaagccattgatattagtcgtgtggagccggcaagtgaaattgtgaaaaggtttaatactggtgctatgagttatggttcaatttcagctgaaacgcatgaaactttggcacaggcgatgaatcaaattggtggtaaaagcaatagtggtgaaggcggagaagatccgtctcgatatgaattgcaaaaggatggaagtaataagacgagcgcaattaaacaagttgcgtccggacgatttggtgtaacgagtgattatctccaacatgcaagagagattcaaatcaaagtagcacaaggcgctaaaccaggggaaggtggacaattaccagggtcaaaggtctatccgtggatagctgaaacaagaggttcaacgccgggtataggattgatttctcctccaccacatcacgatatttattctatagaagatttagctcaacttattcatgatttaaaaaatgcgaataaagaagcggatattgcagttaaattagtttctaaaacaggtgtaggaaccatcgcttcaggggtagctaaagcattcgccgataagatagtcattagtggttatgacggaggtactggggcttcaccaaagaccagtattcaacatgctggagttccttgggaaataggattagcggaaacacatcaaacattgaaattaaatcatttacgtagtcgagtgaagttagaaacagatggtaagttactcactggagtagatgtagcgtacgcttgtgcgcttggagcggaagagtttggatttgcgacagccccacttgttgtattgggatgtatcatgatgcgtgtatgtcacaacgatacatgtccagtaggagttgctacgcaaaacaaagatttacgtgcgctatttacaggtaaggcgcaacatgtagtcaactttatgtatttcattgctgaagaactacgagaaattttagcttctctaggtctagcgacagtagaggagttagtaggtagaacagatttactacagcgttcttctaagataacttctggaagcaaagctgcagcaattcaaatagagaatcttatcgaacagtctgaaggacctaatacgaaacaaataatgcaagatcatcacttagatatcggctttgatttgaattatctatatccagatgctaagcacagtattcaaaatggacattcattcacaggaagttatgtggtcaacaatgaacaaagagatgtaggcgttatcacaggtagtgccattgcacgtcaatacggagaagaaggccttcctgaggatacaatattcgcttatacagaagggcatgccggccaaagtcttgctgcttatgcgccacacggtttgacgattcatcatactggtgatgcgaatgactatgtaggtaaaggtttatcaggtggaacagttattgttaatgcgccaaatgaagagcgagaacaagaaattatcgcaggtaatgtaagtttttatggagcatcaagaggaaaagcttatataaatggtaaggcgggagaacgtttttgtattagaaatagtggcgctgatgttgtggtagaaggtattggagaccacggactagagtacatgactggtggacatgtcattattttaggagatgttggtaaaaactttggccaaggtatgagtggcggcgtaagttatatcttcccatcaagtattgaagaatttaaaaaggtcaatgcactagaaactcttgaatttagtgaggttcgctatgatgaggaaaaagcattaattaaagagatgcttgaagcgcattataaacatacacgtagtacgaaagcacgacaaattttgaatcaatttgaaaatgtaagccaatatgtagtgaaagtcataccgaaagattacaaattgatgatgcaaaaaattgatttacaaaaacgacgaatagaacaagtagatgaagcgacactcgcagcattttatgatgataggaaaagtattgaagaagaattacaaccagcagtagtttattaa

SEQ ID NO: 1841 - DNA, 882 bp, Staphylococcus capitis
gtggagattaaacaacttaaatactttgtagaagtggcacgtcgtgaacatatatcagatgccgctttagaattaaacattgcgcagtcagcggtaagtcgtcaaatcacacaacttgagaaagagttgaacgtaaccctttttaaaagaagtggtaggaatatcatcctcacctccgagggaaagaaactcatgtctcaagctactcaaattctcaaacaaatggaccacacgattcaattattcaaacagcaagcttctacagatcaacggacgatttatattggttacgaagaaggcgacatttcacaaatgatgttgccactagtacaatcctttgagcaacaaagtgagagtattataacgccgcaactcttgaaacataatcacattgtagatcgagtaaattcgggccaactcgatatagggcttattgaaatgactaaggatataacaacacagacagaacttcatgtcacacctttattcgaagagaaatatcatatgtatgcgcctaaagaccatcccattactttgacaactcaaccccttttaactcaacttgaaaatgaatcattatattgtctcatgcctttcgccaactcaataaaaaagaaactcgaacaattaattaaagcaaatgtgtatacattatcgaataaacaacttgctcagtatctcgtgcgtcaaaataaaggatttattattagcaatgaaaatattcatcttaacgaaagcgaagattgggtccaaatccctctttcacatactgaattaaaaagaacaatatgcgccatcactaaatatgataataagaaaaaagatatagatttagtatggcattatattcatactatgattaatcaaacggctcaattttag

SEQ ID NO: 1842 - DNA, 1002 bp, Staphylococcus capitis
atgccgataggaaaaattacaaatgtacatcctattcacactgaaaaaattacggatgaacaacacaataaagatattaaatataaagaaaaactcactttagaaattttgaatggtaaatttaaaggtcaaacagcaacgattgaccaccaatatgtaaaatctcaagcggactcggagtcattttccaaaaatgacaaagtgttattacatatttctaagaaacctagtgatgccaatattatagagaaaaaacgtgatggtttggttgtggcaataacaggaatcttcctactcacagtactcatcgttggtaaaaaagttggcttacaatcaatattatcactaatcatcaatacaattgccgtcataggggcaatctatatacacaatcaaaatgggcaaatcaacttattcctattaatgacgatcgcgattattgtctcgacaacgttaaccctattacttgtaactgggtggcacatgcgtacactcgtcacaatagtaagtacactcattggtacatttctttgcgttggaattacagaattagtgattaaaatgacaggtggtaacgggattaagtatgaaacaatgaccttccttacactacctcctaaagacgtctttctcgcttccgtcttaattggaacgctcggagctattatggacgtagccattacgatttcaagtggaatgtatgaaattcttcaacgtactccaaatataacaatgggtcgttgggcgcttgcgggacgtcacattggccaagatattatgggtacaatgaccaacatcttacttttttcttatctgtctggaagtttaccaatgtttctaatttatttgaaaaatgctaatacaatcacttacaccatttcaatgaattggtcattagaagttgctagagccatgacaggtggcataggcattgtgttaacaattcctattaccattgcattaatggaagtattgctaaaattgagaggtgctaaacaatga

SEQ ID NO: 1843 - DNA, 792 bp, Staphylococcus capitis
atgagtgcgataacaattttaggcttattactcttggtgctaatgataattttcggaggaaaaaaaggtctcatttctttcttcacactatttttaaacttcatcatacttattattagtatcattttaataatttttggtgtaccgatttacttagtaacttttatcttctgcatagttattgctgctgtgaacttattcgtgttaaatagttataacgttaaaacacaagcagcatttatcggtacaataattacgacactcatattgatactagttattttcctatcggttaaggtaggtcatcttcaagggtttgcgacagaacaacaagatgaaacatatgtgtattcaatgaatattggtattgatatgatagagtttatggtttttacaatcgttttggctgttatagccgctgtaatcgatttagccattacaattagctcaccaatgtatgaattaagcgagaccaatccggaactaaatcaaagacaactattcacttctggcatgcgagtaggtagagaaattttagctacttctgccaatactatttatttagcatattttgggggtcaattaactttatttttctggttctttaaattacattattcttttggacatattattaattctaaaattttcgctcaagaatttgtgtcgatattactaggaggcattgcagttgcactcagtattccaataactgcatgggtaactgctttgatgattaaaaataaaaaacgtaaaaattctactcaatcacaacatcttaagaatgattaa

SEQ ID NO: 1844 - DNA, 465 bp, Staphylococcus capitis
gtgtatttaaaagcatatgaaccggaattatttgagcaagtcgaaaacttagaaattctagaaagtgactataaatttacgaaatcaccagttgaaaacatcaaatcggctaatcaagatagtgatagacatcctacgttagttatgaataatgagtcgtgtatcgcgtttttcactttacacgaaggaaatgggcctaaaccattcactgataatccaaaggccattttctttagatcatttagtgttgatcaacgttatagaggacaaggcataggtaagaggacccttgaaatattgcctgcatatattaaacaacattatccatgcattaatgaaattacattagcagtaaatacagataatgagaaagcaatcaatttatatgagcaagctggttatcgccacacacatgaaagtgaattaatagggcgacctgtttacgtgatgtcgctaaaaatttaa

SEQ ID NO: 1845 - DNA, 396 bp, Staphylococcus capitis
atgattaaatgtgtttgtttagttgaagagaaagaaaatcaaattttactcgttcaagttcgtaatagagacaaatattatttcccgggtggtaaaatcgatgaaggtgaaagctatgttgaggcgttacaacgagaacttaaagaagagttacgcctcgatttggctgaaactgatttagaatttataggcaccgttgttggaaaggcatatcctcaaccagatacgcttactgaattaaacggatttaaaacgacaaatgctattgattggtccagtataactgctgacaatgaaattactgatattagatggtttaatatcaatgattcagagaacatagcacctgccgtattgacttggatagaccaattttctaaaaaagctaaaggctag

SEQ ID NO: 1846 - DNA, 270 bp, Staphylococcus capitis
atggcaaaacaaactggcgctgtacgtttatctaacttatttaacatggcaggtttcatcgtcgacggttataatggaatacgtcacgatgctaaaaataaacaaatggtatatttatcattgggtctaagtgctatcggtacaatcatcgatttttatgtatctattaagtcaccatcaaaattacgtaaattaggtgcgcttacttcattcgcgataaacggtttacgcttatttactagtttccgtaaagttaaaaatgaatattaa

SEQ ID NO: 1847 - DNA, 1506 bp, Staphylococcus capitis
atgctttacactgtcacaacaacacttcctatttctcacggtggaagaacccaagctcttttaagacgtatcaaacttatagatgaagaatttaacttacctactaaaattcttaccacaaactattatggcaactacccaagtgtctacaaacgttttttaaaagaaaataaaattactaaaaatatagagtttgaaaatatgtatgaatggttgtctaatttcaaactttataaggttcccaaaacttttattactaaaaatcctaaatacgttaaaactaaacgtaaaattaaaggtctaaaatatgaattaggcaaagaccaaagcgaggttcattactataataagaagtcatatgtccgttttcgcaaatattatggccaatctaatgttcttcaatatgaagactatatctcgccttcaactggtttaaagtatgagcgacatgaatataatttatatggcttacttcacagaaaaattttctatgtaaataactcatcaataagacacagtgatgaattaatagatgctgaaggtaccatgtattgtaaaagatattttaataataatgagaaaaataaaattatctgcgtcgagttatacgaaaatggcaaagttattaaaacttttaaaaatgataaagtacttgcgcagtattactttcaatcgcgttttaaagacaacgatgtggtgtttagtgatgcaagatttttagatgcaccattaattaaacaaacgcatcaaactaaaaatatcttagtctttcatagttcgcatttaaaagagggtaaaactaaaaaatcttataaatatgctttagaacatagcaataacgtggataaatatatagtacttacgcaccaacaaatgcaagatattcaagagatgtatcctattgaaaatgaacgctttgaactcatacctcattttatagaactcaatcatagaaaaggtgaaaatgaagttatacaagaagatcgtttcatttatatcggtagatttagtagtgaaaaacaaatggatcatttaattaaagcttatgataagtttgttaaaagtggtcatcaaacaaaattacatttatttggtagggatgaagataatcaattacctatgatgagaagcttgattgctgagtaccatcttgaagatatggttaaaatttcaaaatatacaaaaaagcctttagtagaatttgaaaaatcgaaagcttctatattaacaagtaagtatgaaggttttggattgactattatggagagcattgaaatgggttgccctgttctatcatatgacgttcgatatggacctaacgaaattatcaatcatggagaaaatggttatttaatagaggaaaaccacatcgagcaattagctcatcgaatgatagacattgtggaacatccattaagaaatgtaagaaatcaagagaaattaacatattctgcagcagtaaagaattatcatcacttactaagaaatctcaatttaaacatttaa

SEQ ID NO: 1848 - DNA, 1011 bp, Staphylococcus capitis
gtgcaaaaaaaatatattactgcccttatcggaacaacagcaattagtgctttagcaactacgcaagcacatgcggcaacgacacatacagtaaaaagtggagaatcagtttggtcaatttctcataaatacggtatttcaattgctaaattaaaatcacttaatggcctaacttcaaacttaattttccctaatcaagtacttaaagtatcaggatcatcatctagcgcgtcaaaatctaagacatcatctaatagtggttcagtgtacactgtaaaagcgggagactcattatcatctattgcagctaaatacggaactacttataaaaatattatgaagttaaatggtttaaataacttcttaattgtacctggtcagaagttaaaggtttctggatcagtatcaacgtctaaatctacaagtggctctaaaaaagcgacttcaagtagctcaggtcgtacatctacgtacactgttcaatatggtgactctttatcattaattgcaagtaagtacggtacttcatatcaaaaaatcatgcaattaaatggactttctaatttctttatctacccaggtcaaaaattaaaagtgccaggtggaggtagtggaggttcaagtagttcatctactagtaaatcaacttcaagtggtggctattatacgccagttttctaccaccaaaacttatatacatggggtcaatgtacttggcacgtgtttaaccgtcgttctgaaatcggaaaaggtatcagcacatattggtggaatgcaaataattgggacaacgcagcagctgcagatggttatactattgattataatccgacagtaggttcaattgctcaaactgacgctggttactacggtcatgtagcctttgttgaacgcgtgaatagtgatggtagtattttagtctctgaaatgaactggagtgcagcaccaggttacatgacttatagaactatcccttcatatcaagttagaaattataaatttattcactaa

SEQ ID NO: 1849 - DNA, 846 bp, Staphylococcus capitis
atgaagaaaattcttggtttattaatagcggcagttattgtgttagctgcttgtggaggcaataatgacaaaaaagtaactattggtgtagcttctaatgatacaaaagcttgggagaaagtaaaagaattagctaaaaaagatgatatagatttagaaattaaacacttttcagattacaacgtacctaataaagctttgagtgacggtgatattgatatgaatgcttttcaacactttgcatttttagatcaatataaaaaagcgcataaagatgctaaaattcaagcgctaagtacaactgttcttgcgccactgggtatttattctgataaaattaaaaatattaaagatgttaaaaagggcgctcaagtagccattcctaacgatgtatctaatcaagcacgtgcgcttaaattattagagtctgctggattaattaaattgaaaaagaatttcggtttaaatggaactactaaagatattgaaagcaatcccaaagatctcaaaatcaaagctgtagatgcacaacaaacagcacgtgcattatcagatgtagacatttcagttattaataatggtgtagcaactaaagcaggtaaagatgctaagaaggacccaatttatttagaaaaagtaagttcagacgctgtgaaaccatacattaatgttatagcagtaaattctaaagatatggataataaaacatacaagaaaattgtagaattatatcattctaaagaagcccaaaaagcgcttaaagaagacactaaagatggtgaaaaagcagtagatttatctaaaaaagaaatcaaagaaattgaagatgacttagttaaaaaataa

SEQ ID NO: 1850 - DNA, 660 bp, Staphylococcus capitis
atgtttggttcaagtttagatgcatcccaactgtttcaagcattatatgaaacattgtatatggttactgtagcactagtaattggtgcgttaattggtatacctttagggattttattagtagtgacccgtaaaaatggtatttggcaaaacctagtgttacatcaaattttaaatcctataatcaatattttaagatctatccctttcataattttacttatagcaatcgtgccatttactaaattgttagtaggtacatctatagggacgacggcggctattgtgcctctaacggtttatgtagcgccgtacatagcgcgtttagtagaaaactctttactggaagtagatgacggtattattgaagcagctaaagcgatgggggcatcacctcttcaaattatacgctactttttgttacctgaagcattaggttcactgattttagctataactacagcaattataggtcttattggtagtacggctatggcaggtgctgtaggtggcggcggtataggtgatcttgcattagtatacggttatcaacgtttcgatactatggtaatcattattactgtcattgtgttaattattatcgtacaagttattcagtcattaggtaactttatttcaagggttattcgtagaaattaa

SEQ ID NO: 1851 - DNA, 1026 bp, Staphylococcus capitis
ttgattgaatttcgtaatgtgaacaaagtctttaagaaaaagaataagactgtacatgctttgaaaaatatttcatttacgatagataaacacgatatatttggtgtcattggatatagtggtgctggtaaaagtacactagttcgactagttaatcaactggagaaagtgacggatggccaagttgttgtagatggtcatgaaattgatacttataaagaaaaagatttaagaaatgttaaaaaagatatcggaatgatatttcaacatttcaatttactcaattctaaaacagtttataaaaacgtggctatgccccttattttgagtaaaaagaataaaaatgaaattaaagaaaaggttaatgaaatgctagagtttgttggactagctgataagaagaatcagtttcctgatgaattatcaggaggacaaaagcaacgtgtagcaatcgcacgtgctttagtaacaaatcccaaaattttactttgtgacgaagctacaagtgctttagatcctgcaacaacgagctcgatattaaagttattaagcaatgtcaatcggacatttggtgtaacgattatgatgattacccatgaaatgagtgtcattcaaaagatttgtaatcgtgttgcagtgatggagaatggtgaagttgtggagatggggacagtaaaagacgtttttagtcatcctcaaacaataacagctaaaaacttcgtatcaacagtcattagtactgaaccttcgaaacgtttgcgagaatcgttcaaccgaagtagaaaagatgatttctctgactataaattattcttagacgcgaaacaaatccagaggccattattaaatgaattgatttatcgtcatcagctaaatgtgaatgtacttttctcatctatgtcagatattcaagatgaaaccgtttgttatatgtggttgagatttgagcatgattcgcagtttaaacgatttaatccagaaacatatttcactgaacggcatattcaatttgaggaggtgcaataa

SEQ ID NO: 1852 - DNA, 933 bp, Staphylococcus capitis
atgagtttaagtgaatttaaaataccaacttcaacgtcaatattgtcaatgaagcctattgtagtacccgcttcctatagaggaatagatttacagctaaaggtctctttccctaatgaaggacatcaacttcctattattttgttagcacatggatttggttcatctatggagggctatggacccttagctgatttttacgcgagtcatggtttcatagttattcaaccaacttttctagattcaagaacgataaatttagataaagatgataaaagacaatcagaactctggagatatagagtgcaagatatgaaaaatatcatcgatcatttagatcaagtcactgaagaaattccaacattacatcaacgaattgataaagataatattgcagtagtgggtcattcattcggaggtcagactgccggcaatctacttggtctacaagtctttgatccattaacaaattcttataccgattacctagattcaagagtgaaaggcggtgtactgttagcaactgcaggtgaaggtggagataaattaactcaattcgccaaagataacttcccattccttaatccgacatttaaacacatgtccaaacctgctcttataattgctggggataaggatgattctccattaacacagttagggcctgaatggatggaagaaccttactatttaagtcccggtaaaaaatcattgcttaaattatatgatgccgaacattctcttggcggcatagctggatatgaagtgaaagaaaccacagatgaaaatccagagcgagtatcattagtacagtatgttacttgggcatatttacgttcattattggatattgaacacgatagttggaatcatgctcaatccgttttagatgataaaaatgcaatgggaatcattcaatctaaaatgcattaa

SEQ ID NO: 1853 - DNA, 1146 bp, Staphylococcus capitis
atgaataaaaaaacgcaaatgattcatggtggacatacaactgacgattatactggagcagtaacaacgccaatttatcaaacaagtacgtatttacaagatgatatcggtgatttaagacaagggtatgaatattcacgtacagctaatccaacacgtgcgtcactagagagtgttattgcggatttagaacatggtaagcatgggttcgcgtttggttcaggcatggctgcgattagtgcagttataatgttgttagataaaggtgatcatttaattttaaactctgatgtctatggaggaacatatcgtgcattaactaaagtatttacacgatttggtgtagaagttgattttgtagatacaacgcacattgaaaatgttgaaaaatacattaagccagaaactaaaatgttatacattgaaacaccatcaaatccattattacgtgtaactgatataaaagcatcagctgaaattgctaaaaaacacaatcttatttcagtggttgataatacatttatgacaccttattatcaaaatcctctagatttcggaattgatatcgttttacactcggcaactaaatatattggtggacatagtgatgtggtcgctggtttagtagcaactgctgatgatgaattgggtgagcgtttaggttttatttctaattcaacaggtggcgttcttggacctcaagatagttatttattagtaagaggtattaaaacacttggtttacgtatggaacaaatcaatcgcaatgttgaaggtattgttaaaatgttgcaagaccactcgtcagttcaacaagttttccatccaagtatagaaggtcatttgaatcatgatattcaccaatctcaagcaagtggacacactggtgttattgcatttgaagtgaaagacactgaagcggctaaacaagtgattcatgctacaaaatatttcactttagctgaaagtttaggtgcagttgaaagtcttatttcagtaccagcattaatgacacatgcttctataccagcggatgtccgcgcaaaagaaggtattactgatggcttaattcgattatcaattggtattgaagatacagatgatcttgtgaatgatttaagtcatgcattagacacattaaattag

SEQ ID NO: 1854 - DNA, 909 bp, Staphylococcus capitis
atgatagcttatgatttaattgggcagacaccactggtgttattggaaagttttagtgatgaaaatgtaaaaatatatgcgaaactagagcaattcaaccctggaggcagtgtaaaggatcgtctaggaaaatatttagttgaaacggcaattgaggatgggcgtctcaaagaaggtggcacaattgttgaggcgacagctggaaacactggtataggacttgccatagctgcgaaccgtttcagagtcaaatgcgttatttttgcaccggagggcttttcagaggagaagatctcaattatgaaagcgttaggtgcagatgttaggcgaacaccaaaagttgacggtatgatcggggcgcaagaagaagcgaagtcttatgctaaaaaatacaatgcgttgtatatgaatcaatttggtactgaagacaatcctggtgcatatacgaataccttagccaaacagatcactcatcaattagaccatattgattatttcgtagcaggtgtaggttcaggcggtacatttactggtgttgcgaaacatatgacaacactgggagttaagaattatatagttgagcctcaaggatctattttgaatggaggcccaatacacgcgcatgcgacagagggcataggttctgaaaagtggcctacattcttagacagagatttagtggatggcatatttactatttcagataaggatgcctttaataacgtcaaactcatcgctaataaagagggattactagtaggaagttcatctggtgctgcattgcaaggtgccttagaattaaaaaaacacattaaaaaaggcgtaatcgtaacgatattccctgatggtagtgaccgttatatgtcgaaacaaattttcaattataaggagagtaatgacaatgaataa

SEQ ID NO: 1855 - DNA, 540 bp, Staphylococcus capitis
atgacgaaacgtgacttgtccttatcagtatttacgaaagaaaattttaaaaatctacgttatacatcgtctaattttagaaaatcaatgtatgatgaattagaagttaataaaagtcgttttaaaaactgcaactttaatgaaggtatttttaaaaatataaaagcgatttctaatagtaagttcactacatgtggttttaataattgcatctttgagagtgttcatttttataagaatcaatataaagacacaacatttgtgaatacatcatttgatgaaactgttcttaataacatggtcttccaagatatcttgttcgacgaaaatctcgctcgtaatgttaaaatgacggatactacattcaaaaacgttaactttaaaaatgttgaagttgataatgcttcatttgaaaatgttaaattcaaaaattgtgcgttcgataatgtagtcattaaaaatgctacaatgtctcaaaaacttataaatgaattacaaaagcaacacgtcgaattagagaatgttcaaccttcaaagtag

SEQ ID NO: 1856 - DNA, 549 bp, Staphylococcus capitis
atgaatgtcactggccattatgaagaatttgataaaagtaatttaaataaagaagatttaacatcttttgataaaattaagcaaaatatagagaaaattaaacaacttaatgattcaaattcggaagatagtaaaaagcttgaacaacaaatacaaaaagatttaaatgattggaaagaatatttaaaagatgagtttagacctgataacgaaccagaaaaagaacgtttatccaatattaatgataaggttaaaagtgatttagatgcagcttttaattataaaaatggcgctaaagtaatgagtttattagaacctgcttatcaacgtagtaaacgtgacttaccttatggtagagcgctcatcatttatagcgatagtagcattgtagaaaatgctaaaacgttcttcgagtctaatgaagaaaatgaaaaattagcacattttattttagataaaaatattgaattaagcgaagaaattatgtctgatgattttgtagagttacttaaactagataaagcatatcttgaagcatactttaactaa

SEQ ID NO: 1857 - DNA, 1329 bp, Staphylococcus capitis
atgagcaaccaatcgcagtggaagacatctaccggttttatcctagctagcgcaggttctgcaattggcttaggcgcaatgtggaaattcccatacatggccggaatatacggcggtggcgcattcttattaatgtttttgattttcactatttttgtaggacttccgttactcataatggaatttactgtaggcaagatggggcgtacatatacgactcaaatttatagtaaattaactggtaagaaatggttaaatctcattggatggaacgggaatttagccgtattaatattatttggattttatagtgttataggtggttggattatcatctatatgggcaatgttattgtacaagcactatctttcaagcccatttctctaactagtatcaaatttgaagatattattagtaatccttggctaacagtactcggacaggggatatttatttttctaacgatgattattgttatgctcggtgttgaaaaaggtttggaaaaagcatctaaaattatgatgccattattatttatctttttattaattattgtagtaaaatctttaactttagacggtgcgctagagggcgtgcgctatattttacaaccaagacttcatgatgtctcaatggaaggtgtgctctttgcactagggcaatctttctttactttatcacttggtacaacaggaatgattacttatgcaagctacgcaccaaaagaaatgactattaaatcttcagcaatttcaattgtagttatgaatattctagtgtctatcttagcaggtttagccattttcccagctttaaaagcgtttggttaccaacctcaagaaggtcctggtttattatttaaagttttaccattagtgtttaatcaaatgcactttggagcgattttctactttatctttttagtattgtttttatttgcagcattgacatcttctatttcattgttagagttaaatgtatctaactttactaaaaatgataatcgcaaacgtaaacgagtagcattcatcggcagtgtattagtatttgtgattagcattccggctaccctttcatttagtagtttaagtgatgtgaaaataggtgcgggcaccatcttcgataacatggattttattgtttcaaacattttaatgccaataggtgctttaggtaccacattagttgtaggtcaattgttagataaaaagttattacaagagagctttggtaaagacaagttcaaattattcttaccttggtattatttaattaaatttgtaatgccagtggtgattatattagtctttatcgttcaattagtataa

SEQ ID NO: 1858 - DNA, 249 bp, Staphylococcus capitis
atgaaacgcacattcttacttacttatacaactatttcaggtaaaacttatacagaatttaaaacttttgaaaatggtcccgactatgacacttgtgtgagacgtattatagatgagtttgatgaactcccgtatctatatatcaaaaaagatattgttcgttatattaatgtaaatcatattgagagtttagatattgaggaagtatctgaggggcaaaatattgtttatggattagatgatgagtaa

SEQ ID NO: 1859 - DNA, 735 bp, Staphylococcus capitis
atgaagattaaagcacctcaaccaatttatttaaagggaaatcgtgaccaagcgattctcttattacactcttttacaggtacagtgcgcgacgtcaagcacttagcgacaactttaaatgaccaaggttttacctgttatgtgccaaactatccaggtcatggtttaccattagatcaatttacacaatttaatattaatgattggtggaatgaagttaaagatgcctatcacttcttagaggacgaaggttatcaacatatttatgctacaggtgtttctttaggaggattgtttacgcttaggctagctgagcaatttgatttagagcgaatagctgtcatgtcagcacctcataaaaaaggtgagagtggtattgctaaaagacttgaaacttacgggcgaagaatgaatcaaattttaaacttcgatgacgcagaaagctttgatcaattggaaaatattcaaaagtataataaacaaattgaggtttttcaaaatatcattgatgatatcatgtctcatcttgatagaattacaattccaactaaggtaatgtatggcgagcaagatgataaggcgtattcccatagtgcgcaatttatttttgaccatattgctagtgaggataaagaattgaattcttttgaaagaagcggtcatttaatgacatatggagagggacgagaagcattagagcaagctattgttgaattttttaacgataacgagtaa

SEQ ID NO: 1860 - DNA, 852 bp, Staphylococcus capitis
atgggaaatgataaagcacttgtactaggcggcggtggaatcacaggaatggcatgggaagcaggtgttctagcaggattaattgaaaatgatataaatgtatctagtgccgatgcgattattgggacatcagctggttcatttattggtgctatattagcaaatcaagtggatatgaaatcctattatttagaattaccatctcaacttagttcgaatgatagaggttcattaaattcggatttatatcgtctttggcaaaatgcatttgttgtaggcaaagatgatccaattaaagtaggtcaaatgcttggagatattgtttatacgcatccatctaaaatgccattaaaccaacgtatgcatgcagtccgtcagcgcttaggtaatgtggattggacaggtaatctttttataaccgctattaatgccaaatctggacagctagccactttcaataaagagagcaacataccgttagaagaagcggtagcagcaagtggtgctgtaccaggtttatggcctcatatacgcctattaaatcaagattggattgatggaggaatgacttctccagcaaatgcaatggcagctaaagattttaaaaatatcattatcatagccccgttagctgatggttatggaaatctacctagtgtaaacgatgatgcaaataaattaaataaaaatagtaatgtaattactgtcacaccaaataatgatagtcaaaaagctattggtgagaacatttatagtcctgataatttaattaatattggacatgctggttatgagcagggcatatcaatagctgaagaaatcaaacaacatcatcatgtatggatgtcatag

SEQ ID NO: 1861 - DNA, 678 bp, Staphylococcus capitis
atgaagattgaaaggttgaatttaataaaagtaacaattcctttgcttatcatgttgcttattatttttagttttatgatgtatggtgtaatgacaaactgtcacttactcaaagttatagataaatcatctttagagtggtttacacaatgctttggtcacccaccaagagtatatgaaggtgatattttaaatttatatatgactttttgtgctacagttggcgatgtaagtgccgttcttaaattagcatcaatactcgttatatgtttgtttattttcaaaaataaacatcaagcgatatgggtattattattaatgactacaggtacatggattaattatcttattaagcaaactgtggaaagacagcgtccatttagtcatttagctattgattctggatggtcctttcctagtggtcactctaatgcgagtaccttactctttttagtgattatgcttacaattgtacctgttataaaagtaaaagtgattcgaatcattattataattgtaacaagcatactctggataagcattttgttttgcagattatattttcatgcacactatcttactgatgttattggcggtggaacattagcagttgtatgggtattactatttataatggcttaccctttgtttactttacggaataataagaaaaactag

SEQ ID NO: 1862 - DNA, 684 bp, Staphylococcus capitis
atgagaataaatcaatttaatcagcctataggggatgaagtatctcataattatcaattccaatttcctaaaaaagaacaattagacggaaggtatagttcattagttaaattaaatgaatctcatattgacgatttgtttcaagttttaggtaaggaagatagtcggcctagttggacatatttatttgagaatccaattctacacaaagaggaatttaataagtacatccaacgtttaatacacaaggaggactcagtattttacgcaattatcgatcgcaaccagcaacgtgcattaggctatgtctcactaatgaggataaatcaaaatcatggctcaattgagataggtaatgtacattattctaatcagttaaaacgtacaagagttgctactgaaatccaatttttattagcacaatatgtctttgaaggtttaggttatcggagatatgaatggaaatgtgatcatttaaatgagccttctaaaaaagctgcacaacgcttaggatttacctttgaaggtgtgtttagacaggcagttatttataaaaatagaaatcgtgatactgcatggttttctatgatcgataaagagtggcctcaaataaaaaagagatatgaaatttggctaaaacctcaaaattttgatgaaaaaggcaatcaagttaataagttgtaa

SEQ ID NO: 1863 - DNA, 249 bp, Staphylococcus capitis
ttgaaggataagcgaatactcatttacattgctctcattattacacttatacgcttttttataccattccatcccaactttgacacgttattattatggttatttatactttatataatccctattattttaagtttaattgcatttaaatctgaaaagttaatcgccacaatggttattattcctaatttaatgggaatcatctatcgtttagttgtatacgtcaatgatttatttcatctaaaataa

SEQ ID NO: 1864 - DNA, 369 bp, Staphylococcus capitis
atgaaaaagactaaaggtatttatgaatccgaaataagtaaagctattacgcaatgggaaaaggactttctaggtagagggtcattatctgtaaaaactgacatattacgcgatatgataattgttaatttacaaggtatattaacacctgctgaatatcgtgtatgtaagacgaacgaaggcttattaaatattaagcgtacacgttcagaacttgtcgaatcaggagaagatgatttaaatgcgattatttatgatttgacaggcgtaaaagttgtgacatttcatagtgatttaagcacagttactggtgagcgcgtgattgtttttaaattagaagataattttgaaaaaagaataaatcaataa

SEQ ID NO: 1865 - DNA, 2571 bp, Staphylococcus capitis
atgactcaatatcaacaatatatgaatgaattggtatcacgtgcaaaacgtgtcattacacccttatcacctatttctatatttgctgcacgcaatccatgggaaagtttagaagatcgtacctttgatcaagttgcaaagtggattagagaggtaagagatattgatatgtatcctaaccatgcttctattcatgcaggaattaaaaatggagagattgataagaaggtgtttgaagacgttcttcaagaagatataaacgcttttgatacgcctctctctgaaaatgaagttcacgcatatatggataatgctaaacatttatctcacattgatgaggaatattttaatgaaaatgatcaaacaaaattagaagaatgggtgaaagatcattttaaagattctgtgagtcaaacacgtgttagagctaagagtgctgaccgtcttagttcaaacggagaaaaacttatcgatattttagacgcacacatgattaaatggtcaaaattatatttagacgattttcaatcaagttggacaatgccacaacgtgataaaggtttttatacagcatggttacatttagcacaacacgacccaatgttacagaaagaacaacgtcaaaaaattaaaatgctatctcatgacgtcaatgaagcgatttatcaagcttttaaatatttgaacattaaggaagaaaaccagcaagcatatgtagaaagtcatttattatcattacctggttgggctggaatgatgtattaccgtgcagaaaaaaatgaatttgaaaaagacttacttactgaatatgtagctatacgcttgtctatggaagcattgctgattaatagtcaatttgatacctctaatggactgccttttcatataaaaaaaggtttggagcaagttcatacgttactttatcacagcaacatgtctgtgagtgaatggttagagttaccggcgtctaaacagagtgattatttaaaattagtagaaacttttagtccggcatatttccagaaactgtggctttatgcgtgggaagaaacgcatgaaaatgaattagttgaaaaaatctatgattcaccacgtaagatacatgataaacaaagaacacaagtacaactagcattctgtattgatgtacgttctgaaccgtttagacgtcatttagagagtgaaggtccttttgaaacgataggtatagcaggattctttggtttacctattcaaaaagaagtgctagatgagcaatttacgcataattcattaccggtcatggtagaacctgcatataaaattaaggaatatgctgatcgacaagagttaaatatgtataatcaacaacaacgttctgtaacttcgatgttttatacatttaaactaatgaagcataatgtattacctagtctattattacccgaactaagtgggccatttctcagtattaatactattgctaataccattttaccgaagaaagcacatcaatttgtgaatcgtcttacaaaaaaatggcttcgtaaacctgatgccaaattaacaattgaaagagaacacggtcaatactctgaattaccgatagggtttactgaggaagagcaagttcaattttctaaaaatgctttacaattaatggatttaacaaaagactttgcaccacttgtagttttaggcggtcatggtagtgagtctcataataatccttatcatgccacattagagtgtggcgcttgtgggggggcatcgagtggatttaacgctaaattattagctaccatgtgtaatatgccatctgtaagagaagggttagcccaagaaggaattcacattcctgaggacactgtttttatagctgcagaacataaaacatcagtagattatttagagtacatttacatgccacacttaagtgaagccgcacaacatgcttttgatcaattagaagtagcaatgcctaaggtaagctataaagctaatttagaacgtctaggtgaattaccgagtattgatgaacatcacaaggaccctattggtgaagcgcatcgttatgcaagtgattggagcgaagttcgacctgaatggggattagctaaaaatgcagaatttataattggtaaacgtgaaattactgagaatagtgatctagaggggcgagcattcttacacaattatgattgggcgaaagatgaagatggccaaattttaaacacgattatctcaggccctgcccttgttgctcaatggattaacttacaatattatgcgtctacagtggcaccacacttttatggtagtggaaataagacgacacaatctgtgacttcaggtgtaggtgtgatgcaagggaactcaagtgatttaatgtacgggctgccgtggcagtctgttatggcaggagataatgaaatgtatcattcgccaatacgcctccttgtagttatccaagcgcctgatgcgcatattcaacgcctgctaaatgaaaatgatcattttcgtcgtaaagttgatcatcgttgggtcagacttgctagtattgatgaaaataatagctggaaagattggtaa

SEQ ID NO: 1866 - DNA, 1341 bp, Staphylococcus capitis
ttgaatgttagtgatagagaacaaattgggccttttacaatggatcatctcgcgtggttaatgggaagtttcatacttattttaggttttattattcaaaagttctcagttcgttatttaataggtgaccgtaattaccgcaagtattttccattatttacgttaatcacatcttttgcatctattgcatggttaagtggagatttgagattgatggttttattttggggagcaacgttactttctttaacgctactcataagagtaaatcgttcttggaagataccttacgaggcggctaaagtatctggaaagtcatttgctttgggatggctctcattacttgttgctgtcatcttattatatgtagctacaggaaactggcatattaatgtcactttagcaaacgatgacgtaataactagtggtatgagattcatcattgatatgctcatcgttttagcagtaatcgtacctgctgctcaatttccattccaaagttggttaattgaatcagtagctgcacctacgcctgtttctgcaattatgcacgcgggcattgtgaatgcgggaggcataatactaacacggttttcacctgtctttaatgacccattagcaattactatcttgttaattatcgcaagtatttctgtattactagggtctggcatcagcttggtacatgtggattataaaagacaattagttggttctacgatgagccaaatgggctttatgcttgttcaatgtgccttaggagtttactcagcagcgattattcatttaattttacatggtgtatttaaagcaacgctattcttacaatcaggttcggttgtgaaacgatttaatataccaataccacctagcgctaagcgttcttatagttgggtagtattaggtcgttgcttagcaattattattgctattttattttggttaggtagtgaccgcagtgcatatgaaattttaagtgctttaatattggcgtggtcgctaatggtatcatggaatcaaatggtggcatttagtagaggactaatcggtagagtgataggtattataatgattgttattgttgctcttgtttatattgttacacatcattatttctacaatacattaagtcatgtttatatgaatgttgctcatccaccattaatgagtgtgatcattggtattttaattttagtgtttggaagcgttcttagtatttgggttgcacgtcagagagattcaaaagcgtttgctgttttgtatttgtggctggttaaattaggtgaagccaagacgaaatcaatcgaaagtcacccaacttatctgaagaaatatttataa

SEQ ID NO: 1867 - DNA, 147 bp, Staphylococcus capitis
atgtatttaattggtactgatggaatgagaaatattaatccactcagtatagcaatgacaagtgttataaaaaatactattaaaatgatgctcatacttaacattgcacgtcccccacttttcaaaaatgacttctatttcacttaa

SEQ ID NO: 1868 - DNA, 264 bp, Staphylococcus capitis
atgagaaatctatcaattttagatattttatcaatcttattcacactaattagcgtgtttatttgctatacaacaatgttcactaatctatataacgaaagtggatttagtttttggtatttcccaggtgcaacatttttcgttatatctatcattgttaacattttaggaatgtttagaaataataaatcacttaatatttctctattcttcgttaacttttttgtgttactcattttcactacgccattcgctattgtctaa

SEQ ID NO: 1869 - DNA, 879 bp, Staphylococcus capitis
atgaaaatatctcaaatcattaaaactgttattgctggtacactgatttcaacatccactattacatttagtttgtaccacagtgaaaaagctaaagctgaagttgatcattattatcgagacgggtttcagtatccaacatatgttacagctttgaataaagctaaaaaaatcagtaataagaaacttagtatctcgcattacacaactactaaacaaagtaaattaaaagcaattggtagagtatctaataagaatggctggaaaaaaggaagcaacgacccaaaagtaagaaaacaagattcaatgggaacaggaacagtgataggttcgcatacatttattacgaatgcccatgtcattgatgacagatatggtaaagctgcagctgctaaatacatttcattcgatatgaatcgagatggcaagtctatcccatatcattttcatgcctcaaaggtgattaaagtacctcaaagcgatattgcggtagtacatactaaagaaaatatgggcaagtatgttaaacctatacgaatcgctacggacaaagaaattaaaagtttaaaattcaactcgacactttactcattaggttatccatggcaacataatgataatactaaggcatattttaatcgtttacgctttgtacaattttctggaaatggttcagaaatactaacaaaagatattttcagatcaggcgcttcaggttcaccgatgttagattccaaattcagcaaaatttatggcttgagaacatatggatataatttagatggaaaatcaacagaccaatatgcgaaacaagaaatggctggtggcgaatcatttaaaggttcggcaggtcaatttgttagaaagaatattaaataa

SEQ ID NO: 1870 - DNA, 1203 bp, Staphylococcus capitis
atggctaagataccagtgacagtgctaagtggatatttaggtgctggaaagacaacattgcttaatcatattcttaaaaatagagaggggcgtcgaattgctgtcatagtcaatgatatgagtgaggtcaatattgataaagacttagtcgctcaaggcggagggttatctagaacggatgaaaaacttgtcgaactatcaaatgggtgtatctgttgtactttaagagatgatttacttaaagaagttgaacgtttagttaaaaagggcggtattgaccaaattgtcattgagtctacaggaatttcagaacctgtaccggttgcgcaaacattttcctatatagatgaagaattggggattgatttaaccgctttatgtaggttagatactatggtaactgtagtggatgcgaatcgttttgttaacgatatacaatctgaagatttattagctgatagagatgaaagtataggggatgctgatgaacgcacaatagcagatttactgattgaccaggttgaattctgtgatgtgatgattatcaataaaactgatttagtaagtaaagaggcattaggtcgtttagaacagactcttagagcgttacaacctgaagcaaagatgattaaaacagtaaattcagaagttgatttatcagaagtattaaatacacagttatttgactttgagaaggcaagtgagtctgcgggatggatcaaagagcttacagaaggtggtcatgaacatcatacgcctgaaacagaggagtatggaatttcatcatttgtttatcgcagaaaactcccatttaacgcagaacgttttaaagattggttcgatcatttacctagcaatatcgtgagagcaaagggaatcgtttggtttgcacaacataatagtgtagcttgtttattgtcgcaagcaggctcgtcatgtgatgttcatcctgtaacatattgggttgctaccatgcctgaacaaaagcagaaagaaatacttcaagcacgtgcggaagtagctgctgaatgggatttagaatatggggatcgtcatacgcaatttgttgttataggaactgacttagaccaagaggaaataactagacagctagatgcttgtttaataaatacttcagaaattaatcaagattggcgattactttacgatccttatcaatggaaatatgataaaagaatgtag

SEQ ID NO: 1871 - DNA, 384 bp, Staphylococcus capitis
atgaagactgtcagtccatttatttatgtaaaagacgtagataaatcattaagttattataaagatgtatttcaggcaaatactgaaattctgatgggtaaagatggtaaaacgtatcatgcccaattgattattggagagagtacttttgttcatttcgcagatactttccataaacatccgatttctaaaaatcctcacctcattatcgaatgtgattcgcaagaagaattggaacgtgtgtatcaacgattagtagatgacggtggtcaaattaaagtgaaattagagaagacgttctttaatgcgtatcatgctgaagttaaagaccgcctaaatggtattacatgggtattaaattacttcattaatggcacattttaa

SEQ ID NO: 1872 - DNA, 1176 bp, Staphylococcus capitis
ttgaaaaatttacctgaaatcatatatatattatttttagctacatttcttgaaagatttagctattttctgattataccttttttatctatttatttagctcaaaattatcatttaagtggtttggaaataggtttggtagtttcgacatttgcgattacatctctatttatgagttttatagcggcgccttttatagacaaaatcgataaaaaagtcattatttttgttggtttatttctatcggcaatgagtttcctatgtttccctctaatcagtaaatgtctatttttcgttatatttgctttagttaatagtattggaagtagtcttctttcgccgacatataaaacaattttggcattatccactgataaaatgaataaggaatttgtatttaatatacgctattatcttgttaacatttcagctacattagctccattggtgtcagtacaattacaattcttaggtgtacatattatttgttacatcatttttatggcttattgtatcaatttcaatgcgtttatatatgcattttacgtacttaaaatagatttacaaaataaaaataatactttgaaagttgatattagtcgtatgtatactacatttcgtgatgatagagcatattcatatttaatcattggattgatcctgtttgtgtttggttataccgttatgactagcatattaccccaatattttgctatatattataaaaatcttaatgcctcaaagttatttgcgttgttactttcagtaaatggaattactgttatcacatgtcaattcttcgtttatatttttagcaaacgcgcatccattaaaacagcaatgattacgggggccttcttattacctgtgagtttatttgctctagggataattgatgatgttatcttaaaatgtatatcaatggtcgtgtttactttaggcgaaatgttggtttttacaatgatggatatacgtattgatgcattatctaatgataattttaaagggacatattattcgttagctgggttgcaaaacctgggagctttgttagcgccaatcataggtggtgtgtgtttagacattattcagcaaagttggataatattcggattgttatcaattataacctctttcagtatattatttttctataaaagtaataaaattgcataa

SEQ ID NO: 1873 - DNA, 1212 bp, Staphylococcus capitis
atgactgtaattatattgtctagtaccgatggaaacaaaacgccttacgatttatggtttcctaatgctaaagaaaatattattcttttttgtccagtagaaaaagaacatacattcaattcacagcattttttattaattgaagcatttgaaaattacatggataacgtggaggttgaaactaaagcgatacagctaagcaaaaagtacaatatcacaaatgtattatccatatcggaatttgacgttgtacggagtgcgcggttaagagagatactacattgtcccggtcagttattgatgagtgcggaatcatatagaaataaaatattgatgaaacaattactatatgattcatctgtaaatattcctaaatttgaaaaagtaatttctaaaacacaagttgaaaagtttattcaacaaacgagctatcctgtggttttaaaaccaatctatggttcaggatccatggatgtatatattattaagaatcaacaagacatagacgccttttttgaaaaaaatctaaatataaataattatgaaatcgaagaatttatcaatggagaaatgtatcatgttgatggattaattcaaaatcatgaagtcatcgtttcttatgtttctaaatactataaaggctgtttagaatttcaagaaaatcaacctttatcgagttttatgattgaagaaaaaaattcgatcaataaaattttaaaagcacaagctgaaaaagtcatagatatattacctagctttccaaacggctcatttcatgctgaatttttcgtaactaacagtggcgaagtttatttttgtgaaaaaggcagtagaactggaggcgcagaaataggaaaagtgattcaaaattcgacgtatatacacttaaataaagaaagtttatatttgcaaatgtttgaggaacatactatttcaattccacaagaaccagttgaacgatactctggttttgttttgattccacctcaacgtggcgtctataaaggaattaagaaaaatttagattttgactgggttgtagcgactaaaatttttgctaaaaaaaataaaacatataacgatgcgcaattaagtgttgatcatatcatatctgttgtaatagaaggcaacagtgaaaatgaacttatttctagaattaatattgtcaatgaatggtatgaaaaaaatgttatatgggaacatcatcaatag

SEQ ID NO: 1874 - DNA, 1248 bp, Staphylococcus capitis
atggaaaccttattgtttataaatataagaagccataaggtagaaagagttcaacctattatagaagctaaaaatttagggtatcgtgttgtcttaatggcagataaaaatcctaagttaatcggaaaattagtagatgaattaattattatagattcttatgatattcaaaaaacgattaatacagttattgaatacaacaaaaatataaaaattagtggtgtttttacttggtcagataaagatgtagagcttgtgtcatttttaaacaaagaattggatttgcctggtattaatccagaaatagtacaaaatgtgagaaataaatattttatgagacaagctatgtcgagtgttaaggggctttgcccaaattttcaagaggttaaaagcttgaatgatttaaaagaggcagtagctaatattggaatgccaggtatattaaaaccagttggtgcctctggtagcaaaggtatttttaaaattgaaagtaaagcacatttggaagatacttttaatttattattggattctacctccccaaataaagataaggtttatagttactaccctaatctatatatttatgaagaatacattgaaggagaagagttctctgtcgaaggtgttgtgcaaaataaagaagtatttattgctggaattactgataaaagggtaacacctaaattttctttagaatatattgcatttttcccttctgataagcctgaaaaggtgaaagatgaaattaaaaagaaaacgaaattagcgattcaaagtttaaaaattgatcactgtgcatttcatttagaaggtcggttgacggaatctggttttaaagtgatagagattgcagcgagaccagctggtggcttcataacgtcgcatcttattagactctcttcgggtcactcatttatcgaaaaaatcattgatgttgctattggaaataatgttaaagatagctggccagattatgaaaatggtaataaaaaattatgcttttatagtatacgtgcacatcaaagtggactgttcaaaaaaattgcaggtctagattttattatggaaattcccggagtcattgccgtcatacctttgaaagaagaaggcgatgaagtcattatgccaccacaacatttctctagttgcttcattgcaaatattattttagaaggagaaagcactgaagatattgaaaatactatcgatgaaatcgaatcgtttataaaggttgagatacaatga

SEQ ID NO: 1875 - DNA, 1710 bp, Staphylococcus capitis
atgaataaaaatggttttggcaagttattgttagaagttcaaaataaagttaagcgtttaaagaatccatcaacaattattcgtacgctttttacgttagatgggaaaatagctgaatctgttggagtgaaaagtctcaatatagaacaaaatgctatttatcaatgtttaaccgaacataattctagaatcgtttttacttctgagttagaaaatgttgatgaaaatagaatttatttcggtataactgaatatggaagaatactcttgggtgcggataacttttttgatgattatgcacttgtattaggttacttcgttgtaaatgaacaagtgataaaaatcataaatgaaaagataagaaaagcgttagagatagaagaaatatacaataaagaagtaaagaactttttcaaaggtaaaagcaaagatgagattaacgaaataataaaatttattaagtttaatatctatcacatggcacccatattgctttatgttaaagataaaacttttagtacattttataattataataatttgataaaagaattcgatggagatacagaggactttttattaaatgatttgccctataaaagtgctgaaaaatgggataaagcagaaaaaatttttgtttttaatatgtatctattacttaaatctggacctccctcacgtggagaggaagtaaatggtatacatttctcgctgtcatttttaaaagattattttaatgaaaaaatcaaagaatatagtcatattttgaaaagagagacgaatagtagtcttagcctagaaaaacaagcggcacgtatatattcgttgagaaaagaaattgaaaatagctatttaatctacaggtatatcaatggtctgaatttacataaagaggaaagatatatcgataaaagcgaactagctaaactaaatgacggtagcttaaaaactgatttagaaaaatttacctcaattaaattcaaaaaagattattatcattatttttgccaaattatagagaaaaatattgataaagaaccatatcaaatgattgaaaaaattatggatatgattatcaataaagcaattgaccgaacttcatccgatataggtatggctagaggttttagagcgccactcaaattttatgaagcccatcaaaaagataagttagaagaaatttttaactggggacaaaatcaatatttttgttgtgttatcccaagttcactcatgaaagatgcatttcaagataattctaaaatattagcaggaatacttaccgctataagtaaaagaatggaatataacagttggcattataccccgggaaattttttgaataatcaaacaaggatcactcgtcatttttattttccacctgttatggctgacataactatgtggagtgatcagcatcataaaggacatgtgttcgctaaagttaaacatgccatacgttgtccgggatttattgaaaatggggcaacaatatataacgcattttttgatctaagattaatgaagcaaagcggaagtgattacagtaagaatgacctagtcatcgctatatattataaagaaatattgaagtcattatttcaatcttggtttgatatatgtaaaaaaaccaagaaagaaataaatatcaatatttatagtagagaatggtaccaaaataaatatactaaagataaagtgggtggttag

SEQ ID NO: 1876 - DNA, 240 bp, Staphylococcus capitis
atgaactattatacttatgtagatagagaaaattgtatttcatgtgctgcctgtggagtagctgctcctaatttatttaaatatgatgtagaagatattgcatatgcgtgcttagataataaccgcggatgtgaatcggtgccatctaatgaaattgaacatttgaaaaatgcacttgagggatgtccaacagaatcaattaaaatatcgcaacatccttttaatgaaaagggtgagtga

SEQ ID NO: 1877 - DNA, 1542 bp, Staphylococcus capitis
atggagatggcgaaagagcaagaattaattcttgtcttagactttggtagccaatacaatcaattaattacacgacgtattcgtgaaatgggcgtctacagtgaattacatgatcatgagatttcaattgaagaaatcaaacgaatgaatcctaaaggaattatactttcgggtggtcctaattctgtatatgaagaaggttcatttacaattgatcctgaaatatataatttaggtatccctgtattaggtatttgctacggaatgcaattaacgacaaaacttctaggtggtaaggtagagcgtgcaaacgagcgtgaatatggaaaggctattatcaatgctaaatctgatgagttattctttggactaccttcagaacaaactgtatggatgagccactctgataaagtcattgagattcctgaagggtttgaagtgattgcagatagtcctagtacaaactatgctgcgattgaagataaatcacgtcgtatttatggcgttcagttccatccagaagtacgtcatactgaatatggtaatgacttattaagaaacttcgtacgtcgcgtttgtaattgtacaggcgagtggacaatggagaatttcattgaaattgaaatagagaagattcgtgaacaagttggcgaccgtaaagttttatgtgctatgagtggtggcgtagattcatcagtggtagcagtgttgttacataaagcaatcggcgatcaattaacttgtatatttgttgaccatggtttacttcgaaaaggtgaaggcgatatggtcatggagcaattcggtgaaggctttgatatgaatattattcgtgttaatgcgcaagaccgttttatggacaagttaaaaggcgtgtctgatccagaacaaaaacgtaaaattataggtaatgagtttgtttatgttttcgacgatgaagcggctaaattaacggatgtagatttcttagctcaaggtacgctttatactgatgtgattgagtctggtactaaaacggctcaaacaatcaaatctcaccataacgtaggtgggttacctgaagatatggaatttgagcttatcgaaccgattaacacgttatttaaagacgaagtacgtgctttaggtattgaattaggcattccagagcacttagtttggagacagccattcccaggtcccggtttaggtattcgtgtacttggagaaattactgaagataaattagaaattgtacgcgaatctgatgcaattttacgtgaagttgtgcgagaagaaggtcttgaaagagatatctggcaatatttcacagttttacctggcattcaatcggtaggtgtgatgggtgactatcgtacgtacgatcacactgtaggtattcgtgcagtgacatccattgatggaatgacaagtgactttgctcgtattgattgggaagttttacaaaagatctcaagtcgtattgtaaatgaagttgaccacgtaaaccgcgtcgtctatgacattacttctaagcccccaagtacaattgaatgggaataa

SEQ ID NO: 1878 - DNA, 1467 bp, Staphylococcus capitis
atgtgggaaaataagtttgctaaagaatctttaacattcgacgatgtattactcattccagctgagtcaaatgttttaccaagtgacgtagatttaagcgttgaattatcagataaaattaaattaaacattccagtaatttctgcaggtatggatacagtaacagaatcaaaaatggcaattgcaatggcacgccaaggtggattaggtgttattcataaaaatatgggcattgaagaacaagctgatgaagtacaaaaagtaaaacgttctgaaaatggtgtcatctctaatcctttcttcctaactcctgatgaaagtgtttacgaagcagaagctttaatgggtaaatatcgcatttcaggtgttccaattgttgataacgactctgacagaaatttagtaggcatcattactaaccgtgatctacgttttattgaagatttctcaattaaaatttcagatgtgatgacgaaagaaggtttaatcacagctccagtaggtacaactttagatgaagcagaagcaattttacaagaacacaaaattgaaaagctacctttagtagaaaatggtaaattgaaaggtttaattacaattaaagatattgaaaaagtacttgaattcccacatgctgctaaggatgaatacggtagattattagcagcagctgctatcggtacgtctaaagatactgaaatccgcgctcaaaaacttgttgaagcgggtgtcgatgcattaatcattgatacagcgcacggtcactctaaaggtgttatcgatcaagttaaacacattaaagacacgtatcctgaggtaactgttgtagctggtaacgttgccactgctgaagctacacgtgcgttatttgaagcaggcgctgacgttgttaaagtaggtattggacctggttctatttgtacgacacgtgttgtagcaggtgttggtgttcctcaaattactgctgtatatgattgcgcgactgaagcacgtaaacatggcaaagctattattgccgatggtggtattaaattctcaggagatattatcaaagcattagcagcaggtggacatgccgttatgttaggtagcttattagctggtactgaagaaagcccaggtgctactgaagtattccaaggaagacaatataaagtttatcgtggtatgggctcattaggtgctatggaaaaaggttcaaacgaccgttacttccaagaagataaagctcctagaaaatttgttccagaaggtattgaaggacgtacagcatacaaaggtcctttacaagacactgtttatcaacttatgggcggtgtaagagcaggtatgggttatactggttcgaaagaccttaaagctctacgtgaagaagcccaatttactcgcatgggacctgctggtttagcggaaagtcaccctcataacgttcaaattactaaagaatcaccaaattattctttctaa

SEQ ID NO: 1879 - DNA, 1269 bp, Staphylococcus capitis
atgaaaaatttcattttaagtcttcaacatctcttagctatgtacgctggagcaatcttagtacctattatagtcggtacgagtttgaagttctcctctgaacagattgcttatttagtaacagttgatattttcatgtgtggtgtagcaacatttttacaagctaataaaataacaggtacaggattacctattgttttaggctgtacatttacagcagtcgctccgatgattttaattgggcagacaaaaggtttaggagtactttatggttcattatttgtatcaggaattttagttgttattattgcaccattcttttcctatttagttaaattctttccacctgtagtaacaggaagtgtagttacaataattggaattaatcttatgcctgtcgcaatgaattatctagcaggtggagaaggtgctaaaaattatggggatcctaaaaatctaattttaggtggcgtgactttaattatcatcttggtattacaaagatttactaaaggtttcctaaaatcgatagctattttaataggtctagttctaggtacagccttggcagcagtgtttggccttgtagatattaaacaagtgggagatgcacactgggtaggcttacctttaccatttagattctcaggttttggctttgatctaagttcgacacttgtcttctttattgtagcaatcgtaagtttaattgaatccacaggtgtctatcacgcacttagtgagataactggtaaaaaacttgagagaaaagattttcgtaagggttacactgcggaaggtctagccatcatcttaggatctgtatttaattcattcccatatactgcttattcacaaaatgttggtcttgtgtcactatcaggtgcgaaaaagaacaacgttatttatgggatggttattttactactcatttgtggttgtattcctaagttaggtgcattagcgaatattatcccactccctgtattagggggagctatgattgccatgtttggaatggtaatggcgtatggggtaagtattttaggaaatattaactttaataatcaaaacaatctattaatcattgctgtatctgttggtttaggaacaggtattagtgccgttccccaagcgttcaaaagcttaggagatcaattcgcttggttaactcaaaatggaattgtattgggtgctatttcggcaattatcttaaatttcttttttaatggtataaactataaacaaagtgatgaaaatgtgaaataa

SEQ ID NO: 1880 - DNA, 579 bp, Staphylococcus capitis
gtggagtcgttaggacgtaaagtcaaagaagacggtgtagtcatcgatgagaagattttaaaggtggatggatttctaaaccaccaaattgatgcaacgctaatgaatgaagtaggtcagacattttatgacgcgtataaagacgcaggaataacaaagattttaactattgaagcgtccggtatagcccctgctattatggcggcattccattttgatgttccttgtctattcgcaaaaaaagctaaacctagtactttgaaagatggattttatagcacagagattcattcatttactaaaaacaagacaagcacagttattgtctctgaagaatttcttggagagggcgacaaagttcttattattgatgacttccttgcaaatggagacgcatcattaggtcttaatgatatcgtgcaacaagctaaagcaacaactgtaggtattggtattgtggttgaaaaaagtttccaagacggacgtcaacgacttgagaacgaaggtctaaatgtaacgtcgctatgtaaagtagcttctttaaaaggtaataaagtgacgctcttaggtgagcaataa

SEQ ID NO: 1881 - DNA, 408 bp, Staphylococcus capitis
atggcagaaattactgtagtaaatgacaaaagtgaattatataatgtcattaaccaaaagaaatctgaaggctatttagaaactgaattagcagttattagtaaaagtaaattacacttagatgacctacacaattctcaaatctctatgattgccacaagtggttcatttagtgatcgcatgtctcgtttattaactggcgaagatggtgaagaggctgttctttctcgttacaatttaactgaagatgaattagaatcacataaaaacgacattttaaatgacaaattattacttgtagcaaatcgtgatcgttcttctcacgatgaagttgaagagaataattcagcttatgaagagatagatattacgcattatgctgctgaatcaaaaggtcctaaatcataa

SEQ ID NO: 1882 - DNA, 669 bp, Staphylococcus capitis
atggagtttaaaacgattcaaaccgctaaagatcctttatttgaaaaagcactccaattatatgatgcaaaattagatataagtttaagtgaagatagttctatatttaaacgttcacttgaaaataacaaaactgaaaatgactatgcattcgttgtaggtatagaacatgaccaagtggttagccttgctacagctcactatgaagcgacaaccaatgccgcgtttctaatctatttaatcgcccaagatggacctaatcatgacgagctcattactttaacgttagaggaagtcgaaaaacaacttaatcttttatccaacgaagttcatgatagagacattaattttattatgctcgaagttccaaaagaaccaaagactgttgatgataaaactgataaaattcttgaacatcgaagacaatttctttatgaacatgaatttgaaaagcaagaagaaattgactacattcatccaaattacgccttgaatgaagaatctaaaaaagttgacttatttattaaagccaatatcgaactcacgaaagacatatacggtacgagtgttaaatcaaattacattcttaaatatgtcttcgctaatggaatttcacgcgatattatttatccccttttagaagaaatgaatttaagaacccctctatag

SEQ ID NO: 1883 - DNA, 855 bp, Staphylococcus capitis
atgttaaccaaagaatttgcacaacgtgtcgaactaagtgaaaaacaagtccgtaaaatcgtacaacacttagaagaacgtggatatcaacttagtaaaactgaatatcgtggacgtgaagctacagattttaaagaagaagatattgaattatttagagatatcgctgataaagtaaagcaaactaatagctatgatttagcatttgatgaacttgaaaaagaaaaagatttcttacaagtaattgtaaaagatgaagatagccaattacctactgaccaaaatgttgcgcagttagttgaagatttacgtagcgaaattcaaaaaatgcacgaagaacgccaaatgcttggccaaatgatcaatcaagttcatcaacaacagcaagaacttaaagatttacaaactgaaatcacaaacaaaattgatgcgaacactgaatctttaaaaactattcaaacttcacaagaagctattcaatcttctcaagagaaacaagcaaaagaaatcaagaaggcgaatacgcaatctagtgaaactgtatcctcaccatcattaagtgagaataaggagaaagttatttctgaaagtacatcatctactaaaagtgaaagcgcaagcacatctgactctctctctacatctcaatcagaaagcagtaattcattaaacggaagtgcatcaaattctcaatcaccaagtaccactgtaagtacttcagaacaaccagagtcaactcatagtgaatctactattaactctaactcaacaacatcgtctcattcacctaacgaaatgaacactcaacctagagaagagaaaaaaggattctttgcgcgtttatttaatttataa

SEQ ID NO: 1884 - DNA, 1389 bp, Staphylococcus capitis
atggaagcattcttcactattattaacgtagtagtgttaattattttcattattatgttaaacataatggctagaaaacatgtttcatttcctaaacgtgtatttaccgctttaggtatagggattgtattaggaatagctttacatcttatattcggagcagaatcgaaggtattaaaacaatccacagattggtttagtatcgtgggcgatggctatgttgccttacttcaaatgattgtaatgccactgatcttcgtttcaattgtggtagctttcagtaaaatccagattggagataaatttgctaaaattgggacattcatttttatgtttttaattggcactgtagccattgcagctattgtcggcatcatttacgctttaatctttggacttgatgcttcttcaatcgacttaggtagtgcagaacattctcgcggtactgaaattagtaagcaagctaaagatttaactgcaaacacgttacctcaacaagttcttgaattactgccaagtaatccattcttggactttacaggtcaacgtacgacatcaactatcgcagttgtcatttttgcaactttcgtcggttttgcatatttacgtgttgcacgcaaagaaccagagtatggaaatctgttaaaacgtggcattgaagctgtatactcaatcgttatggccattgtaactttcgttttaagattaacgccatacggtatactagcaattatggcttctacattagcaaccagtgactttgcggcaatctggactttaggaaaattcttactcgcatcttatgctgctttaatcacaatgtatctcatacatttaatcattttaggagtattaggtgttaatccagttagatatgttaagaaaactttagaagtgctaatctttgcttttacttctcgctcaagcgcgggttctctgccattaaatatccaaacccaaacacaacgtctaggtgtacctgaaggtatcgcaaacttctcagctacatttggtttatcaataggacaaaacggttgcgcgggaatttaccctgctatgctagcaatcatggttgcgcctgtggcacatgtacacattgattttcaatttgtcattacgctaatagctgttgttatcattagttcatttggtgttgcaggtgttggtggcggcgctacattcgcttccatcttagtactatctacgttaaacttacctgtggcacttgcaggtgtactcatttctattgaaccgctcatagacatggggcgtactgcattgaacgtgaatgattcaatcttagctggtacaggtactgcacgcttaacaaaaaattgggataaacaaacatttgaatctaataattatggggaattatcttcaaactga

SEQ ID NO: 1885 - DNA, 756 bp, Staphylococcus capitis
gtgtcagattatgtatacgacttaatgcgtaagcatcattcagtaagaaagttcaaagatagtcctcttagtgatgatactgtgaagaaattagttgaggctggacaaggcgcatcaacttctagttatcttcagacttactcaattataggtgttgatgatcccgaaattaaagaaaatttaaaagaagtttcagggcaaccttatgtgttagataatggttatttattcgtcttcgttctagattattaccgtcatagtttagtaaatgaaaaagtggattcagatatggaagtctcatacggttcagctgaaggcttattagtaggcacgattgatgtggctcttgtatctgagaatatggctgtagcagctgaagatatgggttacggtatcgtttatttaggttccctacgtaatgatgtaggtcgtgttcgtgaaattttagacttacctgactatactttccctctatttggtatggctgtaggagaacccgctgaggatgaagatggtgagcctaaaccacgtttaccatttgaacacattttccataaaaatagttacgatgcaagtaatgataaacaacgtcgtgaattagatgaatatgaccaagtggttagtgattattataaagaacgtacaaatggcgaaagaactgaaacttggaccgaacaaattgaatctttcttaggaagaaaaactaggctagatatgctagaccaacttaataaagctggatttataaaacgttaa

SEQ ID NO: 1886 - DNA, 780 bp, Staphylococcus capitis
atgactcaagctattaaaaatatttcaaatgccctgttcaattcttttaaaaataaaaaacctattgattttgtaagcgaaaattacaatatcactgaggaagaagcttatttaactcaagatgatttaattgaacagctaaaatttaaagatcgtacacatgttgctggatacaaagtgagtatgacgagcgctacaacacaagcaattgctcatactaatgagcctgcttatggcactattttatcagataaaatagtaaataatggtgacgctgtctcactttcttcattattttccccattattagaaccagaaattatgtttattgcaaaagaagacttaccttatgatgcagatttacaaacaattattcttaatactgaaatcgctgccggcattgagatacctgacgcaagatataaagattggttcccgaatttcactcttggtgatttaatttgcgatgatactgcaacaggattgattgttgtaggaaataaagtagatcctttagatatagacgcatttgcgcatgtacaattgaatttatataaagatgaagaattaattgctacaggtgactcatctgaagtattaggtaaccctctcaatgctgtactttggcttattaaaaagttacattcccacggtaaacaaataaaaaagggacaagtcatttcttcaggaacattcatctctccgcttaaattagagtatggtacgtatcgtgcagaatatagtggaataggtaccgtagagtttaaggtttctaaataa

SEQ ID NO: 1887 - DNA, 570 bp, Staphylococcus capitis
atgtctttaattaacaaagaaatcttacctttcacagcgcaagcttatgatccaaaaaatgatgaatttaaagaagtttctcaagaagattttaaaggttcttggagtgtagtatgcttctatcctgctgacttctctttcgtatgtcctacagaattagaagatttacaaaaccaatatgataaattacaagaattaggtgtcaacgtattctcagtatcaactgatactcactttgtacacaaagcttggcatgatcattcagatgcaatcagcaaaatccaatatcaaatgattggtgacccatctcaaacaatcactcgtaacttcgatgtattagatgaagaagttggtttagctcaacgtggtacattcatcatcgatcctgatggtgtagttcaagcagctgaaatcaacgctgacggcatcggtcgtgacgctagtacattagttaacaaaattaaagcagctcaatatgtacgtcaacatccaggcgaagtttgcccagctaaatgggaagaaggttctgaatcattacaacctggtttagacttagtaggtaaaatctaa

SEQ ID NO: 1888 - DNA, 1524 bp, Staphylococcus capitis
atgcttaatgctgatttaaagcaacaattaaaacaattattagagctaatggaaggcgacgttgagttcatcgctagccttggctcagatgataaatctaaagaacttaaagatttactagatgaaattgctgatatgtcagcacgcatcactgtaactgaaaaagatttaaaacgtacaccaagtttctctgtaaatcgcccaggtgaagaaacaggtgttacatttgcaggtattccattaggtcatgagtttaactcacttgtattagcgatattacaagtaagtggccgtgctcctaaagaaaaacaatctgtgattgaccaaattaaaggtcttgaagggccatttcatttcgaaactttcgttagtttaacttgtcaaaaatgccctgacgttgttcaagcattgaatttgatgagtgttattaatcctaacattacgcatactatgattgatggtgcagttttccgtgaagagtctgaagacatcatggctgtaccagctgtcttcttagatggtcaagagttcggtaatggccgtatgactattcaagatattttaactaaattgggaagcactcaagatgcttctgaatttaatgataaagacccttatgatgttctaatcgtaggtggtggtcctgcaagcggtagtgctgctatctatactgcacgtaaaggactacgtacaggtattgttgctgaccgtattggtggtcaagttaatgatactgctggaattgaaaactttattactgttaaagaaacaacaggttctgagttttcttctaaccttgaagatcatatctcacaatatgacattgatacgatgacaggtatccgtgctactaatatcgagaaaactgattcagcaattaaagttactttagaaaatgatgctgtactagaaagtaaaactgtgattatttctacaggtgcaagttggcgaaaacttaatattcctggtgaagatcgccttattaataaaggtgtagcattctgccctcactgtgacggccctctatttgaaaataaagatgtcgcagttatcggtggcggtaactctggcgttgaagcagctatcgatttagcaggaattgttaagcatgttactgtatttgaatattcatctgaattaaaagcagataatgtcttacaagatcgtttacgttctttatcaaatgttgatattaaaacgaacgctagaactactgaagttcttggtgaagaccatgttaccggtattagttatgaagatttaaatagcggtgaaactcaagtagtaaatcttgatggtattttcgttcaaatcggtttagttcctaacactgcatggctacaagatgctattgaactaaacggacgtggcgaagtagtcatcgatcgtgataacgcgacaaacgttcctggtgtattcgcagcaggtgacgtgacagatcagaagaataaacaaattataatttcaatgggtgctggcgctaacgctgcgttaaatgcattcgactatattatcagaaactaa

SEQ ID NO: 1889 - DNA, 627 bp, Staphylococcus capitis
atgaaaaaaagagtaattttaagtttactaattgtgctcgccttggtactttcagcttgttcaaatcaaagcgaggatgataatgaccaaaatagtcatagtagtactcatgcacctaaaaaagctaaaaatatgaaagaaaaagacattttctcctctaataaaaagggacaaaaaataagtgagtctgaaatgaaaaatgctcttaaaacatatttacaagctaatagcgatattcttgataataaatacgtaatgcaacataagttagataaacaaagtgatagtagccctaaaatcactaaatctcaggcaaacaaattaagcgaattatctaatttagctgttaaaaatgatttacgtttcaaaaaatttgttaaaaacaatcacattccacaagaatataaagatccaacacaacgtattatcaactatttcaacgctttaaatagtacaattgcaaatgttgatgaagatattgaagaattaaattaccaacctcaaaattcaatcaatgtcgttgacgtacctactaaatatgcaggtgacgtcaataaaaaacaacaagataaaatcactaaattcctcgataaaaaaggaattaacactgaagtatttaataagtaa

SEQ ID NO: 1890 - DNA, 378 bp, Staphylococcus capitis
atgaaactacgtgtaagttttataattctagcgatactaggatcaattggcgcgattttaacacttgctaagtatccgagcggcccaaatactattaattatgacgagccttggcaaatattcactgctatcgttactctattagtgagtgctttaccagctttaatattaggattcttcaataatttagtatgtagaatcgtatcggcaataatacaaatttttgcattaatgctttggttcatcttagccgtagtcacttttttaacagggtatatacaacctggtttaatgagtggtttaacagtcgttttgatactagtaagtactattatcacactttctgtgggctacaaaaagacacagtcttatgcataa

SEQ ID NO: 1891 - DNA, 579 bp, Staphylococcus capitis
atgaatatctatcttgtaagacatggtgaatctcagtccaattatgataataaacatggtaaaccatatttttgtggccaattagacgttcctttaactgaaaaaggtatgcaaagtgcgcaagatttagtcacttattttactaataagaagattgaacatgtttatgtctctgatttgttgagaacacaacaaacatatgagggtatctttccgtataatatacctacaacgttcactaaatcgttgagagaacgttcattaggtgtatttgaagggaaaaataaacaagaggttagtgaagatgtagaatacgaaagatacttcaatgacccagagtttaaagactttcgacatagctttagtcaaaaagcacctgagggtgaaagctatcaagatgtttatgaacgtattgagcacttctttaatgaggagttaaatcatgacgatgaaaatatagttataattgctcatcaagtagttataagatgtatattagtttatttaggtgaactcaataaagaagatgctttagatgccgagattaagaactgttatccatatttagttcataaataa

SEQ ID NO: 1892 - DNA, 633 bp, Staphylococcus capitis
atggaaggactattttcattcattattattacgttactgattatcattgtgccaggtcctgattttttaattgtgatgaaaaatacaattaattctagtaaaatgaatgggatagtagcagcattaggaattactacaggacatattctttattcttctttagcaattttcggcattatatacatattgactagtttatattacgtctttttaattattaaaatattaggtgcttgttatcttatttatttaggaattcaaagtattagaagcgcccatagtacaatgaattttagtaaggaagcgttggcagatgtaagaaatgtaagctatttaacatcttatcgacaaggttttcttagtacaagtttaaatcctaaagcattattattttacgtgagtattttacctcaatttctctcaaatggaggtattcaagtaaaatcagaagtagctgttttatctttatcagtagtacttgttacatgtttatggtttttattctgtgtgtttattttccaatatattaaactattatttagtaaacctaagttcaaagtggtttttgactatgtagttggaatcgtattaattggtttatcaattaatttactactaagtaaaagtagttaa

SEQ ID NO: 1893 - DNA, 855 bp, Staphylococcus capitis
atgtctgaacaaatcactttagtattaggtggcggtggccaatatggtattgcctgggaaattggtttactaaaaggattagctgatcatggaattgagctaagactttctgaacaaattattggaacttcagcgggttcacaagttggtgccgtaatcgcatcaaataaaacttgggaagagatttggaatgaacaaattgatgaagaaattaatgaagttaatcctaaccctaatatgggagaagtattcgatgaatatgaacgtataactaaagaagctactaatggagatgactgggttgagaaattgtgtgaatttgcgaaaacataccaagtagctgtaacagaagatgaacatattaaaagaataaaagaacgtataggtgatatccaatggggagataacttaataattactggtactgatattgaaactgtacgtagaaagacttggaagcaagaagataatataaatatccatcaagctttaagtgcaagttcttcacttccaggagtatggcctcctactacgattgacggtaaacaatattcagatggcggatcctattcaatggaaaatgcagatttagctactgagactgagaaagtaattattctttcacctaatgtccaagtagatacgcctataagtttaaagcagcaagttgatcaattaatacaagaaggcaaacaagtattgtcattaataccgaatgctagtgtagtagctaagtttaatgaaatgggtaataatccagttgacccaagtattagaaaagtaattgcagcagcatccagagaacaaggacttgcagattcaaataaagtgaaagagtttctaaaaaatttataa

SEQ ID NO: 1894 - DNA, 255 bp, Staphylococcus capitis
atgtttggattaataggtatgatcattgtcggtggtatcattggttggattgccggcttaattatgggtaaagatatcccaggcggaatcttaggtaatattatcgcaggtatcgtaggttcatgggtaggtactgcaattcttggacattggggtccacaattaggtaaaattcacatcttcccagcgttacttggttcaattattttaatctttttaatttcattagttttacgtttattcaaaaagaaataa

SEQ ID NO: 1895 - DNA, 261 bp, Staphylococcus capitis
ttgaatagtaaattgaacatactcaaatttttaaataaatttttccaaattataggtttcttatcagtcattacaattttattaatcattacatttaattttttcatttatggccatctggaaggtaattttgaaataggatttaacattaaaagtaaacaaatctatattatgactacgttaattatcttaattatagtttgtactattgcttctctaatcattagaaaaattgaatataaaaaagaaaaaaatcaatga

SEQ ID NO: 1896 - DNA, 750 bp, Staphylococcus capitis
atgaaaatttttgatgcacattttcatattattaattttgattatcctgtaaaagaaaataaaggttatatgcctccagaatttaaagaagaagattatgaaatatggcaaaaagatctagggatcgatgatggtgtaattgtctctggctcattccaaggattcaatcaagattatttaatacatgcacttaaaagtttaaaaggacactttgtaggtacaactcaactacctgtagaaacgtctgatgaaaaaatcataaaattaaacgaattaggagtacgaggagtaaggtttaatgtaaaaagaggaggttcggaagatttaagacatcttaaatcatttgcacagcgtgtctatgatttagtgggatggcatactgagctttatattgaatcaaaaaaattgggtgaaattaaagatattattttagaattgcctcaagtttcaatagaccatctggggcttactaaagaaggctttgaagatttaaaagatttagttcgtaatggggtttatgtaaaagcgacaggtttcggtcgaatagaggttgatcctttacaaactcttaaagcactgatggaaattaattctaacgcgattatgtttggcacagacttaccatctactcgagcaaaacgtccatttgagaagtcagacattgaactgattgagaaaaacttctctaaagaagaacaagaaaagatcttttacaaaaatgcgatgcatttttataggattacaaagtag

SEQ ID NO: 1897 - DNA, 258 bp, Staphylococcus capitis
atgaatttacatattctatataatttaagaactaaacgccatttagaaattgaggaattagcccaacagttaaatgagaaatacggaacgcactacgaagctcatcaaatttgggagtgggaaaatcactaccacgaacctaaatttaaagatgcattgcatttagctgatttcttcaacactccatatcaaatgtttcttgaaagtaaagttacagagtatcaaaagcatttagatgatgtggatattagaatgtag

SEQ ID NO: 1898 - DNA, 354 bp, Staphylococcus capitis
atgaacaatattgaaatgactaaaaatcaaaaattacttgcggctttaagttattttagtatcttattcgcgccgttgctatttccattttgcgtatggatattcgctgataaaccaatgtcaaaatatggtaaaaactcattaattaatcatatttcatggactatatttgtttggataatgaaaagtgcttttaataatgctaaatacgcacataatggtgctcatgcgcatcctgatgcagttttcattattagtttaattgttggaattatctttggtattttagctttaatctgtttgattataagcattgttactggggttaaaatattaaatcaaggaaagaaatga

SEQ ID NO: 1899 - DNA, 564 bp, Staphylococcus capitis
ttgaaaagaattcttgctactattttaatattatgtctgtttggtgttttttgcgataagagtaaagctcaaaaagatgaggttaaaagtgaaaataaattagtacataagatgttaaataataatattgtgcaatttaagaataataaattggttctcgataaacagataattaaaatcaaaaggattttcatactaagggatcctcgtaataatgttactgatttagctattcaatacaaagtgaagagtaaatctgataaatacagtgtaactgtaaaaaactcttgggagaaaggttttagagttttacaaaacgataaacccttagggatgagaaagaatacaaagcatttgtatcactatagaaaatggcttactaagaatgatgaaaaaatagaaaaaggtgagacgcgtaaaggaatggtaatttatcaccttaataatgcccaaaaggttgttctgcaagcgaaacgaggttatgaaggtaagatattagctgaacaagattaccctatttcagaacttaaaacagttgatttaaatcaactttccaatcgataa

SEQ ID NO: 1900 - DNA, 255 bp, Staphylococcus capitis
atggaatataatttaaaggaagttcttaaaaatttatttatcaatttagtggtcacgtttgttgtggcttttgtctttgattattttaatataaataatgatagacatggatggttttttaatataataagtaaaattgattttatacatatttttgataacaaaactgctaacgctatagttattttaggtttggttataacgattattgaacttatttatgatgtattcttcgatgatgacgatgatgaatag

SEQ ID NO: 1901 - DNA, 243 bp, Staphylococcus capitis
atggcaggtggaccaagaagaggcggacgtcgtcgtaaaaaagtttgctatttcacagcaaatggtattacacacatcgactataaagacactgaattattaaaacgttttatctctgaacgcggtaaaatcttaccacgtcgtgtaacaggcacttcagccaaatatcaacgtatgttgactacagctattaaacgtgctcgtcatatggctttattaccatatgtaaaagaagaacaataa

SEQ ID NO: 1902 - DNA, 510 bp, Staphylococcus capitis
atgttaaatagagttgtattagtaggtcgtttaacgaaagatccagaatacagaaccactccctcaggcgtaagtgtagcgacatttactctagcagttaatcgtactttcacgaatgctcaaggggaacgcgaagctgatttcattaactgtgttgtctttagaagacaagctgaaaatgttaataactacttatctaaaggtagtttagctggcgttgatggtcgcatacagtcgcgtagttatgaaaatcaagaaggtcgtcgtatttttgttactgaagttgtgtgtgatagtgttcaattccttgaacctaagaattcacaacaaggtggccaacgttcacaaaacaacgatttccaagactatggtcaaggattcggtggtcaacaatcaggacaaaatacgtcttacaataacaataattcatcaaacgctaatcaatcagacaacccatttgcaaatgctaatggcccaatcgatattagtgatgatgatttaccattctaa

SEQ ID NO: 1903 - DNA, 297 bp, Staphylococcus capitis
atgagaacatatgaaattatgtatatcgtacgtcctaacattgaagaagatgctaaaaaagctgtagttgagcgttttaacggtatcttagcttcagaaggatcagaagttttagaagaaaaagactggggtaaacgtcgcctagcttatgaaatcaatgatttcaaagaaggtttctataacatcgtacgtattaaaacagataacaataaagctacagacgaattccaacgtctagctaaaatcaatgacgatatcatccgttacatcgttattcgcgaagaccaagataagtaa

SEQ ID NO: 1904 - DNA, 180 bp, Staphylococcus capitis
atgttcacaaaaaaacttgtgagtggttcaaaaagtaaaagacctagtttagataaagcaattgaaattgcgagatcaagagatactattatcttttggagattagatagactaggatgtaatatggaggatttaatcacattagttaaagaacttaacgagagaatcattataaaatga

SEQ ID NO: 1905 - DNA, 747 bp, Staphylococcus capitis
atggctagaaaagtgaaattggttatttttgatttagataatacgctattttcttttaataatttatggataaaagctaataaagatacttttgaagaatatacgttatttaaagacatagagtatagtgactttatgaaattatataagaaatatgatttatatttttggaaacagcatgatgaagggattattaccttagatgaattgcgagagttaagattaattaaaactttaaaacattttgatatagatatttctcatgcagaagctaataagtatttccaatccttttttactaaattgctgtctagtataactgttaatagaaaaataaatgatttgcttttgtccttgaaagaaaatgtaaacatcgccatccttaccaatggtaagcttaaagaacagaacactaaaattgataacctcgatattagatcaatattcgaaaagaatatttttatatctcagaatataggttatgaaaagccggaccctaaagcatttttaaatgtcacgtctaatctaaacgtcaatcctgaagagtgcttgtttataggagattcttttaaaaatgacatcttgggagcattagatgttaatatggctgccatttggttaactaattctgataaagatacagaattatataaaaagaatggtctttgtggttgcgaagataatatagaagttctactaaaaaagctccttaatgatgaatataaagattttacaattaataactag

SEQ ID NO: 1906 - DNA, 891 bp, Staphylococcus capitis
atgtctaaaaaaccttctgttatcggtggaatagctgctttgttcgttggaatttcatttggttttaattctaatatagtcaaaatggctaatgtaaatggtgtagaaactatcaatataatactatatcaattagtaataggtttagtatattttataatccgatatttagtttctaatccaacttataaaagttttacacctaatattttaaaaaatccatttaactatattgctggtattactacagcgctaacaggtatttgctattattcatcgatcaaattaactaatccaagcatagcatcactaggtttattccaatttccatggatattatttttgttaggtgtgatctttaacaaagaaagatttaattataaacacattctttctattataatgctttggattggctcctttattttaattggtgctaatattacacaaataagtttcctagggtgcttatggggcttgtttgctggagtatcatttgcaacaaatatgtttacattacctaaaacaaccaatcatggatttataaaggtatatatatttgcaatagcagtaattacagctttattttgtagtattttttatattcaggagctctctcttttaaaaaccaacgtcattttttatggtactacaatagctatattaggtcagattataacatttgaattacttatgttttcaacaaaaagagtcagttcaattagtatggcaactttaactactatagagttacctgtagctatgataatttcatggattctctggggaccacttcccaatttcatgaaaattttaggccttatcattactctagtatcaatcatttggttagtatatgaagaatattcaattaataaaaagaatggatga

SEQ ID NO: 1907 - DNA, 384 bp, Staphylococcus capitis
atgattaaaaaagttgctgctgtcattataaaaaatgattgtattttatccgttagtaaaaagaaagcacccaatttttatatgttacctggcggtaaatatgaagggacagaaaatgacattgaagcgttatcaagggaattgagagaagagctaaatgtaactatttcaaaaatggaattttttggtgattatgaagatatttctatgttagaaaatgaaaagttatttttaagaacatatatcactgaaataaacggcgaaccatatccagataatgagattcataatgtgaaatggatacctattcatgcaaactgtaacactgaaataggtagtggcattgctaaatttgtaattccaaaattaagaggcgagttttaa

SEQ ID NO: 1908 - DNA, 678 bp, Staphylococcus capitis
atggaaagagaaaaagttgctattttatttactggtggaagagatacttctttagttgcttgtttggaatccctacaagataaagaagtacatttaataacttgtaatagtggtattggcataaaaagtgaactttcagaaatgagggttaaagaattgattgaaagatttccaaataatattgtagggagaacaattttacctacatatggactgtttagaagtattgcaataaaaaatttagaagccgatttcaaaagatggggtataaatctagtgcttttaggcgataaattagctatacatgcagctgcgacagtatattgtttagaacacggtattaaaaaaatagttgatggttgtgtaggttatcaagaagatttagctgagcaaaagaatgttgcaatagaattatttagagaatttgaagctaaatatggtattgattacgagtgtcctatttataactttggaaatcaagacgatgttaaatatgctcttatgacatttggattatcttctaaatctttagaaggtgtttctatatttggtgatgctttcagtgaaccaacggaagaagtagtaggagagtacattaaagataaattagatatatgtgaagaacacgtgcattttatgacaaaaacaaaagatttaatgcaaaattaccaatattaa

SEQ ID NO: 1909 - DNA, 1161 bp, Staphylococcus capitis
atgtgtaaaaaatttctttttgtgttattatttattttaaaaggaggaaattttataaaaaataatctttattttaatacaggtgaattatctatagtaattaaagaattaaaatgtaaaatgataaaagaaataaaaaatgaattttattacggacgatcaagaaaaggatcaagaaaaaagtttaatgtacaattatctcatttacgagaacagatagccgatttaattggtgcttatagtgaggaaataaccattactgataatactacgtttggccttaatatagttcttaatggtatgaaatttaatactggagatgaaataataacaacttctatggaacatcttgcaagtatatctcctttaataaatttgaaaaacaaaaaaagcgtagtaatcaaagagtataaagtaaagcaaagatttaatatcaaggaactagaagacctaattacctgtaaaactaaaatgatagttatatctcacatattttggaagacaggagaagtagtacctattaaagaagttatagatattgcacatagtagagggatgaaagtactagtagatggtgctcaagctgcaggatcatatcctgtaaatctacataatattaatgcagatttttattgttttcctgctcataaatggctttatgggcctgaaggattaggttttttatttgttcggaaaaatatccaaaaagatttagatattatattttctggaatttcaacctttgaatactttaatgattataacgattatagcattcaagacaatggacaaagatgggaattaggaactatgtttagacctagtgtttatggtatgaacgatgttttaaaatatttaactggttcgagaaaaattgaaagcgtttacataaaaacgcaaagtttaaataattatatgaaatgtttagtttctgatattgctaatataagtattgttacagacaacaattataatatttgtactttaactttcccagaaaacattaactgtaaggcattgaaagagcatttagagtttttttctattttcactaaagatatcgtagatattaatgccataagggtatctttaagttttataaataatgaagaggacattcaatttttactaaaaaaaattaaagaatatatggaggaatga

SEQ ID NO: 1910 - DNA, 816 bp, Staphylococcus capitis
atgttaaagaaggttacatactcgataatttcattttcaatgttagcgacaagtttgggcatggttaacgcaaatgcagaggaatcttctaaaagtcagtcaacaagtgaaaaaggaacaatgggttatggctaccaacaatatttaaagaaacatcctaatcaaaaaagtaacgcaacacaaaatcgttcaacgttctcaactaaatctagatcagctgtaactaacactggagagagagtattagatatttcagaatggcaaggtaatttaactgacgctcaagttaaaaaactcaagaaaaattatgacttcatcattatacgcggccagtatggttcagaatatgtagatcaatgtttagagcacaattcagctttattagacaaaaataatatgaaattcggtgtttattcttatagtatgtatgagaatgctgatgacgcgcgttatgaagcaagaactttatacaatcgtgctccaaaagcttcattctatattaatgactatgaacaatcttcagtaacgagcggcgatgagaatacagctactcaagcttgggcaaatcaaatgagacaacttgcaggaaacaaaaaaatactcttctattcttatgaaaactttatggtaaatcacgttgcaaatgcagtgagttcgtatgatggctactggttagcatcatatcaagctgaagaacctacacgtgaaaaagttttatggcaatatactgatagttattattcacctgagttagaccaaaatgtagatgccaattaccttgatagcaatgttgatgcttcttggttcacatcttaa

SEQ ID NO: 1911 - DNA, 192 bp, Staphylococcus capitis
atgaaattaaatttagattggaataaagatttccaagaatttcaagatatcttaaattgtggtattcaccctgaatggctttattgtgctaaggcaaatatggtccttgaacctgcatacactggcgaaggaaagcaattctttagcactcaagatataatcgaagcaagtgaagtaattccatttttttaa

SEQ ID NO: 1912 - DNA, 1098 bp, Staphylococcus capitis
atggctttaacagcaggtatcgtaggcttacctaacgtaggtaaatctaccctatttaatgcaattactaaagctggtgcattagcagcaaactatccatttgctacgattgatccgaacgtgggaatcgtagaagtaccagattcacgtttatttaaattagaagaaatggtacaacctaaaaaaacaattcctactacatttgaatttacagatattgcaggtatcgtgaaaggtgcctctaaaggcgaagggttaggaaataaattcttatcccatatccgtgaagtagatgcgatatgccaggttgttcgtgcatttgacgatgaaaatgtaacgcatgtatctggtcgagtgaatcctctagatgacattgaagtaatcaatatggaattggtattagcagatttagaatctgttgataaacgcttacctaaaattgaaaaaatggctcgtcaaaaggataaaacagctgagatggagttgcgcatcttgactagaattaaagaagcgttagaagatggtaaaccggttagaagtattgatttcaatgaagatgaccaaaaatgggtaaatcaagcacaattattaacttctaagaaaatgttatatatcgctaatgttggtgaagatgaaattggcgatgaagataacgataaagttaaagcaattcgcgaatatgctgaaaaagaagattctgaagtcattgtgattagtgccaaaattgaagaagaaatcgcaacattagatgatgaagataaagaaatgttcttagaagatctaggtattgaagaacctggtttagatcgtttaattcgaactacttatgacttattaggcttatctacttactttacagctggtgtccaagaagttcgtgcatggacatttagacaaggtatgacagcaccacaatgtgcaggtattattcatactgactttgagcgtggatttatacgtgccgaagttactagttatgaagattatgttgaacacggtggcgaaaatggcgctaaagaagcgggtaaacaacgcttagaaggtaaagagtacattatgaaggatggagacatcgtacacttccgctttaatgtataa

SEQ ID NO: 1913 - DNA, 204 bp, Staphylococcus capitis
atgacgtcaaattacggaataaatgatatagtagaaatgaaaaaacaacatgcatgtggaacaaatcgctttaaaattataagaatgggtgctgatataagaattaaatgtgaaaattgtcagcgtagcattatgattccacgtcagacgtttaataaaaaattgaaaaaagttcttgaatctcatcaagacaaagaaagttag

SEQ ID NO: 1914 - DNA, 882 bp, Staphylococcus capitis
atgaaccaagtaaagcatattttatcttctttatttgaacctttaactaaagtagagacttatgaaaatcttgtcataaaaattattatgattttgatttatatcattgtcgcactcatcgttatagcgattttaaataaagtcattgaacaagcttttaaaatacaaaataaaagtaaaaaaggaaacaagaaacgttctaagacactcgtgtcactagtacaaaacatagtaaaatatatcgtatggtttattgtgattactaccattttaagtaaatttggtataagtgttgaaggaattatcgccagtgctggtgtggtcggagttgcagtaggtttcggtgctcaaacgattgtcaaagacatcattacaggtttctttattatatttgagaatcaatttgatgttggagattatgttaaaatcaatagcggtggaacaactgtagcagaaggtacagttaagtctattggtttgagatctacgcgtatcaacactatttctggtgaattgacgattttgccaaatggtagcatgggagagataactaatttctcaattactaacggcacatctattgtggaacttccagtctcagttgatgagaatttagaccaagttgagaagaaattaaataaattatttacttcattacgtagtaagtactatttatttgttagtgatccagtggttgaaggtattgatgcattagagaataataaagcaacgattcgtatttctgccgagacaattcctggcgaaggtgcctcaggtgcacgtattattagaaaagaagcacaaaaaatgtttattcaagaaggcatacgcatgccacaacctctattcactcagtatagtgaagagcaaagtaaaagctaa

SEQ ID NO: 1915 - DNA, 831 bp, Staphylococcus capitis
atgacacagaatgatgatcagcgcttgcaactcgagagagatgagcaagttcaacatgtagctataggtttaatcaagcctaatccttaccaaccgcgtaagacctttgatgaggataaattgcaagatttagctaaatccattcaacaacatggaatccttcaacctattgtaataagagaaaccatacaaggatattatattgtagtgggcgagcgacgctttagagcttcacaaatcgttgggttagaaagtattcctgcgatagttaaaaagttatctgatgaagatatgatggagctcgcaattattgaaaatttacaacgtgaagatttaaatgcgattgaggaggctgaaagttataaaaaattaatgtcggatttaaagattacgcagcaagaagttgctcgtagattaggtaaatcacgtccttatattgcgaatatgcttagattactccatcttccatccgccattatgaagatggttagagagggagagctctctggtgcacatggccgcaccttattatccttaaaggacgaagctttaatgaaaaaggtaggtaaagaagccgtccgggagtcttggagcgtacgacaacttgagcaatatgtaaatacacatttaaaagaaggcgagtcgaatgcaaaatcaaagcaagcgaacaataaaaaaccgaaatttattcaacaacaggaaaggttacttaaagagcagtatggttccaaagttgaaatttccacgtctaaaaatattggaaaaatcacgtttgaatttaaatcagaagacgagtttaaaagaattattcagcaattgaatagaaagtag

SEQ ID NO: 1916 - DNA, 1104 bp, Staphylococcus capitis
atgaaggatactgaattagctcaaattgctctaacaaaggatcataccggcgctattgccaatccaatttatttatctactgcatatcaacatcctcatctaggtcaatcaacaggatatgattatacacgcactaagaacccaactcgcacagcgttcgaagaatcatttgccaaactggaaaaaggcattgcatcttttgccacttctagtggaatggcagcaatccaactcgtttgtaacatcttcaaacctggggatgaagtgctcgtagcatttgatttatacggaggcactttccgtttattcgatttctacgaacaacaatatggcgtgaaatttaaatacgttgatttcttagattatgaagatgttgaaaaaaatataactccacaaacaaaagctttatttattgaaccgatttccaatccacaaatgatagaaattgatgtcgagccgtattatgttctaagtaaaaaacacaatttattaacaatcattgataatacgttcttaacgccctatctatcaacacctcttgaagaaggtgcagatatcgttttacattcagcaacgaaatatattggtggacataacgatgtattagccggcgtcgtaactgtgaaagatgaacgcttggctgaacaacttggacaattccataatatgattggcgcaacgttatcacctttagacagttatctacttcaaagaggacttaagacattacatcttcgtatcgatcgctctcaagagaatgcacaacgactggctgaacgttgtcgtcattcagaatccatagacgaagtcctctatagtggccgtacaggaatgcttagtttaagactcaataaggcttttagcgtcgctaagtttttggaaaatttagacatttgcatattcgcagaaagtttaggaggtacagaaacatttatcaccttcccatatacacaaacacatgtagatatgcctgatgctgaaaaagataaacgaggaatagacgaacacctgattcgactatcagttggcattgaagattatcaagatattgaagcagatattattcaagcattagaaaattctaaagtaggagtgatttcatga

SEQ ID NO: 1917 - DNA, 1176 bp, Staphylococcus capitis
atgagtttatctagagagacagaagtaatctttgattcacgtagaggacaggattatcactcagcaaatccacccttatatgattcttcaacatttcaccaaacagtacttggtgggaatgcacaatacgactacgcaagaagtggaaacccaaaccgtacacttttggaagaaaaattagcacgtttagaaggtggaaaatatgctttcgcatatgcctcaggtatagcagccataactgctgtcttacttacactcaaatcagacgatcatgtaattcttcctgatgacgtttatggtggcacatttcgtcttactgaacaaatattaaatcgttttaacattaaatttacgacggtaaatacgacaaacattctagaaattaaaaatgcaattcaatcaaatacaaaactcatatatgtggaaacgccatcgaacccacttttcaaaattacggatattcgtgcagtagccagaatagccaaacaaaacaacttactcttagcggtagataatacctttatgacaccccttggtcaatctcctttagctctaggagcagatattgtagtacatagtgctactaaatttttaggtggtcatagtgatcttattgctggagcagcgatcactaatcgtaaagatattgcagatgccctttacctcttacaaaacggtactggtacggcgctttcagctcatgatagttggacgttagcaaagcatcttaaaacattacctgtaagatttaaacaatctgtagaaaatgccgaacgtttagttaagttcttaagtcaaagtaacgaaattgctgaagtatattacccaggaaataatccaacacatttaagacaggcttcaaccggtggtgctgtcattggcttcagacttaaagacgaatcaaaggcacaaacctttgtagagtctctaactttaccacttgtgtctgtcagtcttggcggagttgaaacaatcctttcccacccagccacaatgtctcacgcagctgttcctgaggcaataagaaataagagaggcattactttcggtttatttcgcttaagtgtaggactagaggacccagaagaaatcattgcagatattaactacgctttaaaggaggctttcaatgagtcaatttctgaaccaattgcagaacaacgttttggtagctga

SEQ ID NO: 1918 - DNA, 1839 bp, Staphylococcus capitis
atgagtcaatttctgaaccaattgcagaacaacgttttggtagctgatggagctatcggaacaatattttattcagaagggctcgacacttgccctgaagcatataacttaacccaccctgataaggtagaacgtattcatcgctcttatattgaagcaggtgcaaacgtcattcaaaccaatacgtatggtgctaactttgaaaagttaaaaactttcggcttagaacatcgtgtcaaagaaattcataaagcagcagttcaaattgcaaaacgtgcagcgcatcatgacacattcatcttaggaactgtaggtggctttagaggtgtcagacaagatgacatcagtttgtctacgattcaatatcacaccgaattacaaattgatactttgattgacgagggcgtagatgcgctactatttgaaacctactacgatttagacgaattaaaaagtattgttgtcgccacacgtcgaaagtatgagattcctatcatcgcacagttgaccgcttcaaatacgaactatcttgttgatggtactgaaatcaatgacgctcttaaacaactggttgcatgtggggctaatgtcgtaggtctcaattgtcaccatggtccacaccatatgcagcgttcattttcacatatagaacttccggataatgcctatttatcgtgttatccaaacgcgagtctcttagatattgaaaacagtgaatttaaatacagtgataatgcccaatatttcggagatgtagcacaagaattaattaatgaaggtgtgagattaattggcggatgttgcggcacgacacctgagcacattcgttacattaagactgctgttcaaggtttaacacctataaaagacaagaaggtcgttccaatcacgaagaaatctaatcacaaacctacgaaagtggttaaacagaatctgacttctaaagttaagaatggtccaacggtcattgtggaacttgatactcctaagcacttagatacagataccttctttgaaaatgtaggcaaactcgatgaagcaggtatcgatgccgtcacattagctgacaattcacttgcaacggttcgagtaagcaatattgcagccgcaagtcttattaaacaacaatatgatatcgaaccactcgttcacgtgacatgtcgcgaccgaaaccttattggcctgcaatctcaccttctaggattatcactcattggtgtaaacgaaattctagcaattacaggagatccttctaaagtaggtcacttaccaggagcaaccaatgtctacgatgtaaattcaaaaggtttaacggaactcgcattgagatttaaccaaggtattaatacagatggtgatgcgctgaagaaacatacaaacttcaacatcgcaggtgcgttcgatccaaacgtacgtaaactagacggcgccgtaaagcgtcttgagaaaaaagtcgcaagtggcatgagctatttcattacacaacccgtttacagcaaagaaaaaattaaacaagtttatgaagaaacgaaacatttaaatacaccgttcttcattggcattatgcctatcgctagttataataatgcacttttcttacataacgaagtgccaggcataaagatgtcagaagatgtattgaaccaattcaaagctgttaaagatgataaagaaaaaacgaaagagttaagtttacgactttcaaaagaattaatcgatacagtgcatgaatattttaatggtttatacattattacaccattccagaaggtggattactcactagaactcgcagcatactctaaatcaattactgctaataaggaggcaatattatga

SEQ ID NO: 1919 - DNA, 2247 bp, Staphylococcus capitis
atgacaacaattaaaacttcaaacttaggattcccaagattaggtagaaaaagagaatggaaaaaagctatcgaaagttactgggctaaaaaaattaataaagctgaattagatcaaacacttactgatttacacaaagaaaacctattacttcaaaagaattatcatttagatagtattccagttggagacttctcattatatgaccatattcttgatacatctctactattcaatattattcctaaacgtttccaaggtcgtgaagtcgatgacgatttattgtttgatatcgcccgcggtaataaggaacatgtagcgagtgcactaattaaatggtttaatacaaactatcattacatcgtaccggaatgggacaatgtagaaccaaaagttgagaaaaatacattattagaacgattcaaatatgctcaatctattaatgtgaatgctcaccctgtgattgttggacctatcacattcgtcaaactctctaaaggtggcaaccaatcatttgaagaaaaagttcaaacattgcttccactttataaagaagttttatcatcattgattcaagctggtgctgaatacattcaaattgatgaacctattttagtaactgacgatagcgagagctatgaggatattacaaaagaagcttatgaatattttgctcaagcgggcttaggtgaaaagttagtcatccaaacttacttcgaacgtgtgcatttaaaattcttaagttcattaccagttggcggattaggtttagactttgttcatgacaatggttataacttaaaacaaattgaatcaggagatttcgactcaagcaagtcactttatgctggtattattgatggtcgtaacgtgtgggctgcagatattgaagctaaaaagcaattaattgaaacgttgcaacaatatactaatcaattagtaattcaaccatcgtcctctctcctacatgtgccagtctcattagatgacgaaacgttagatgaatctattgccgaaggtttgagttttgctactgaaaagttagacgaattagatgcattacgtcgtttattcaacaataatgatagcgcaaaatatgacgagctcaaagcacgttacgaacgtttccaaagccaatcattcaaaaaccttgagtatgactttgatagcgttcctacaagtcgtaaatcaccattctcagaacgtaaacaaaaacaatatgcacgtctaaatttaccagatttaccaactacaacaatcgggtcattccctcaaacacgtgaagtacgtaaatatcgtgcagattggaagaaccgtcgcattacagatgctgaatatcaagagttcctacaaaatgaaattgcacgttggattaaaatccaagaagacatcggtttagacgtcctcgtgcatggtgaattcgaacgtaatgacatggttgaattctttggtgaaaaacttcaaggcttcttagtaactaagtttggttgggtgcaatcatatggctctcgtgcagttaaaccacctgtgatttacggggatgtaaaatggactgaacctttaactgttaaagaaacagtctatgcacaaagcttaactgataagccagtcaaaggtatgttaactggaccagtaacaattcttaactggtcattcgaacgtgtagatgtatcacgtaaagttgttcaagatcaaattgcattagctattgatgaagaagtcttagcgcttgaagaagcaggcattaaagttattcaagtagacgaaccagcattacgtgaaggcttaccattacgttctgaatatcataatcaatacttgaaagatgccgtcaactcattcaagttagcaacatcgtccgttcatgatgaaacacaaattcatacacatatgtgctattctcaattcggacaaatcattcatgctattcacgacttagatgctgatgttatatcaattgaaacatcacgtagtcatggtgatttaatcaaagactttgaagatatcaattatgatttaggtatcggattaggtgtttatgatattcatagtccacgtattccgactgaagaagaaattacaacagcaattaatcgttctttacagcaaatcgatcgttcattattctgggtaaatccagattgtggtcttaaaacgcgtaaagaagacgaagtgaaagatgccttaacagttttagttaatgccgttaagaagaaacgccaagacaacgatgcaacaatagcttaa

SEQ ID NO: 1920 - DNA, 744 bp, Staphylococcus capitis
atgacaaactatcctttatgggagcaactcaatcaacttaaagaggcccaatgggtcgacttaactcatacgttcgatccagacattcctcgctttagtgagtttgaaaaaggcgaagtttcaacactctttaacgtcaaagatcatggtttttacgttcaacgatggaatatcgttactcaatatggtacacatatcgatgcgcctattcattttgtggaaaataagagatatttagaagagttagacttgaaagaactagtattaccacttattgtcttagattactctaaagaggttgcagagaatgcagatttcatcgtgacacgacaacaccttgaagaatgggaaagtcagcacggcaaaattgaagccggtaccttcgtcgcactccgtacagattggtctaaacgttggccagatatagatcagtttgaaaataaggactccgacggcaaccaacatttacctggttggggtttagatgcgttaaaatttcttattgaagaacgtggcgtaaaatctataggccatgaaacgtttgataccgatgcctcagttgatactgctaaaaatggggatattgtaggagaacgttatattctaggtaaagatacattccaacttgaattattaacaaacttagatcaacttcctacaagaggggccattatttacgcaataagtcctaaacctaaaaatgcacccggcttccctgtcagagcattcgcaatcaaaccataa

SEQ ID NO: 1921 - DNA, 648 bp, Staphylococcus capitis
atgactgaattaacacctaaagagaaaatcttgctacgtgcaggacgtgaaattaaaagtgatatgtacattaatttaggtattggtatgccaacattggtagcgaatgcgatgcctgaaagtgtagagaatgtttattttcaatcggaaaatggtttactaggtataggcccttatccgactgaagacgagctagatccagacttgatcaatgcaggcaaagaaacagtgacagtcgcaaaaggggcgagttacttcgataatgcggagtcatttgcgatgattcgaggtggacatatagatttagcaattttaggcggcatggaggtttctgaaacaggcgatttagcgaattacatgattcctggcaaactcgtcaaaggtatgggaggcgcaatggatttagttgttggtgctaaaaaggttgtggtgattaagttccataccaataaacatggtgcgtcaaaggtgaaaaagcaatgtgatttaccattaactggtgcgggtgttgtatctagattaattaccgatttagccgtatttgattttattgatggtcagatgcgtttggttgagttacaagatggtgtgacacttaaagaagttgaagataaaacagaagcacactttgtgaattgtttgaagtaa

SEQ ID NO: 1922 - DNA, 696 bp, Staphylococcus capitis
atgggtaaagtcattacgaatattgaatctgcctttgaacatttagaagacggcatgactatacttgctggtgggtttggtctatgcggcattcccgaacacagtattgcagctattcaagcacgtggtactaagagactcactgttgttagtaacaattgtggtgtagacgactttggccttggtgtgttacttcaggataaacaagtggacaagatgattagttcttatgtaggtgaaaataaattattcgaacagcaatttatctcaggtgagttagacgtagagcttacgcctcaagggacattagcagaaaaattacgtgcaggaggggcggggattcccgcattttacactgccacaggtgtaggtactgagattgctgaaggtaaagaaacacgcgtatttaatggccgtgagtatgtcatggaagaagcgattcaaggagactttgccatcgtaaaagctgatatagcggatacagctggaaatttaatatttaataaaacagcacgtaattttaatccattatgtgcgatggctgctcagacaaccgttgttgaagtagagaaaattgttgatgttggtgaaattgatcctaatcaggtgcatctcccaggtatctatgtagattatattttcgaaggtgaaaattttgaaaaacgcatcgaaaaaagaacgctaagggagggttaa

SEQ ID NO: 1923 - DNA, 1188 bp, Staphylococcus capitis
atgacacgagtagttctagcagaagcatatcgtacacctattggcgtatttggaggcgcattcaaagatgtacctgcatatgatttaggtgcaacagtcatcaagcacatcgttaaaaatacaggtatagattcaaatgaaatcaatgaagtgattatgggcaatgtcttacaagcaggacaaggacaaaatcctgctcgtattgcttctattaaaggaggattatctgaagcaacgccggcatttactctgaataaagtgtgtggttctgggttgaaagcaattcaacttgcatatcaatctatcgtagctggtgataatgaggttgttattgcaggtggcatggagagtatgtcgcaatcacctatgttattaaaaaatggtcgctttggctttaaaatgggcaatcaagcattagaagatagcatggtaagtgatggtttaactgataaattcaatgattaccatatgggaattactgcagagaatctagttgaaaaatatggcatcagtagagaggaacaagaccaattcgcagcccaatcacaacaaaaggcggcgcatgcacaagaaactggtggatttgacgctgaaattgtaccggttgaggtacctcaacgtaaaggtgatcctattattgtttcgcaagatgaaggtatccgccaaggcacaacagcagataagttaggtaagttacgtcctgcgtttaaaaaagatggttcagtgacagctggtaatgcgtccggtattaacgatggtgcggctgcgatgttagtgatgactgaagagaaagcaaaagccttaggtgttaagccgattgcaattcttgatagtttcggcacgagtggcgtggatccatcaatcatgggtattggtcctgttgaagcggttcgtcaagcattgaagcgctcgaataaatcagtttcagatattgatgttttcgaattaaatgaagcctttgcctctcaatcattggcagttgatcgcgaacttcaactaccacaagataaagtaaatgtgaaaggtggcgcaattgcgctaggtcatcctatcggtgcatcaggtgcgcgtatacttgtaacgttattacatcaattgaacgaaaccacaaaaacgggtatcgcttcattatgtattggtggaggacaaggtatcgctactgttgtctctcactatgaggagggataa

SEQ ID NO: 1924 - DNA, 387 bp, Staphylococcus capitis
atggatattattgcaaatagtatattcgttgaaaatcaagaagaagcattacaattttatacaaacgtgttaggctttaagaaaaaacgcgatgaacctgtcggagagggatttcgctggttaacacttgtctctccaacacatcaagatggtacagaattaattctagaaccaaacggcaatcccatttctaaagactatcaagagcgcctatatgaagctgggattccaattacaatgtttggtgttaaagatgtacaacaaacatatgaaacgttattagaatcaaatgttaactttaaagttacacctaccacgatgggtagcgtcagaatggctatctttgatgatacttgtggtaatttaattcaaattattgaaaattaa

SEQ ID NO: 1925 - DNA, 252 bp, Staphylococcus capitis
atgaataatttacacaatattcgagaaaaaaataatttagaaattaaagagcttgtagaagacttaaacaagaaatttggtactaaatatgaagttcatcatatttgggaatgggaaaatggtaagaacgaacccaaaatggaagatgcacttgttttaagtaagtatttcgatgtacctcatcaagagtttttagatagtgaaatgaaaaagctaaaagattcagttgatgatgtttcaattaataagtaa

SEQ ID NO: 1926 - DNA, 204 bp, Staphylococcus capitis
gtggtgagtttttataacttcatgaaaaactatgaaggtgagaaaagtcattttggcgatttatttgaaggtatgaaagatattgattttcctgaagatatctctacccctagagacatcattgaaagatttcatcattggcttgaagaaccaagtttacataatacaattcatcaggctattgaaacgtatcaacagaagtaa

SEQ ID NO: 1927 - DNA, 204 bp, Staphylococcus capitis
ttgcgaaatcgacttaaagaattacgtgcaagagacggatataaccaaacgcaacttgctaagaaagcagggatttcaagacaaaccgtttctttaattgaacgtaatgatttcacaccttctattttgacagcaatcaaaatagctagaatttttaatgaaccagtagaaaacatttttatcatcgaggagggagatttatga

SEQ ID NO: 1928 - DNA, 720 bp, Staphylococcus capitis
atgaaagtaggaagatacatattattaacacttatcggaggaataattggaggattgataggtctttctttcggcggaattaaaattttaagtctgacaccattcactcattttgccaaaactaacgtcgttatcataattgcaactatatcttcaataatcaatatacttctaactttatatttatttaaagtacacaaagatgcactcaatttaaaagttaaaactaggaatcacattgatgatgagtctgcagatttatatgagaaaaaggcatatctaaaatcgatgaaaagtgactttatctattcaatacaaatactaatcagtctactaactattttaatcgttgttttaggtaatgcgtcagcaaaaaatataatgtttgtgataataccttacgttattacaattattccagctttgatgataggatttttcatccgaaaatttgatcctagatatcctaaactaggagagaaaaactatatcgaaaaaacattaaatttattcgatgaaggtgaacgtcatatcactttaattgctatgtataaattgtatagagttaacatctcattgataattggagggtgtttaatcgttggtctattctcaatttccacaggcattaaccaaacattgagcttaatcatattaattattctttttgtttataacacatttggttacttaactaaaatcaataaattttataaataa

SEQ ID NO: 1929 - DNA, 843 bp, Staphylococcus capitis
atggaaaagtttttagatattcaaaatcttaataagtcgtatacaaattcagaatttcgactttcaaatatttctttttcaattggacagggtgaagtgattggcttaatcggtaagaacggatcagggaagtctaccctcattaatacaattgtaggaaatagacataaagatagtggttcaattcgctttttcgatgaagaagtgagcgaagaagacgttcaatacaaagagcatattggtgtagtgtttgatgatttaagagtacctaataaattgactttaacatctatagacaaagtattcactaatatttataacacttggaatagtgataaattcttttcattggtaaaggaatttgaattaccaacacataatcaaatcactaccttctcaagaggtatgagaatgaaaacagcattatccatttcaatggcacatgactcaaagttactcattcttgacgaagcaactgctgggatggatgtatcaggccgagaacaagtgattgaaattcttgaagattttgtggcacaaggtaacagcattctaatttcttctcatatttcagaagatatagaacaactcgctaatcaattagtatttatgagagacggcgaaatcattttaaaggaaagtaaagaagaactactcaaaaattatggcattgttgaccaacctgttgaatcatttaatatttctaacgactatttggtcgcgtcacgtcaaagaaatcataatagaattagtcttgtgaacaatcatcatgaggttcccgaagccaaacaaattaacaacattgatgatgcaactaaaattattatgagaggtgataaataa

SEQ ID NO: 1930 - DNA, 636 bp, Staphylococcus capitis
atgaaaggtttagtattgagtactttatatgcaactaaaaaaccattaattatatatttcattgttggaatcataacagctataattatgacttttttaaacccaactatgagcggtttcatggtagtagtattattggtttcatctattgcagataatttcaaacgcgaaaaagattctaaatggatgtattacgtctctacattgcctgtaaaacgtgctgattatgtaaagagttactatttactttttggcgctatcacagtcatctcttttgtgattagtttcccaattgtattgataattacacacagcataaatatggcgttgattgcctttttagtttgtgttggttgtacagggttatattccgcactattcccattaacatttaaattcggccctgaaaattcaaacacaatcatcatgattaccgttttctttatgattattatatatttcgtattctatattttagcacttgctctaggtgcacatcatgatagttcaatgattaatatgttaagtagtacaaatagtttacttgtgtttattgtctttggcatattggggttagtgacttttgccttaacttatattttatctataaaaatttttaataaaaaagaactataa

SEQ ID NO: 1931 - DNA, 1359 bp, Staphylococcus capitis
atggaaatcgtaaaaaataaaaatgatttatttagaattatcgaccatgcagaccagaaacatacatctaaaattcttctttttatgatattaggcacgatttttttagatgcgtatgacattaccattttaggtacaatgacagaccagctaacgaaagaattccacctatctccaacaatgctttcagtggttatgacttccttacctattggagcactttttggagccatactagggggttcacttgcatataaattcgggcgtaagcgtatattatctgtctcattacttatccttgtaatcacttctttaggcgcagcacttgctcctcatttagctattttacttatctgccgcttcattatgggcttcgctatcggtatggatagtcctgttgcattcactttcattgctgaaattagtaataaatggcagaaaggtcgtaatgttaactattggcaggttgtatggtatgtagcaatcgttgcctcagctttagtagttatcgccttctttttaatgggtacaggtgaacacttatggagattcgcagttggctttggtgctttgattgctttagtactctacattttacgtattaattatttaaaagagagcccaacttggatgattaatcaccactctcttaaagaagctatcgagtatgtacgaaataattatgatgtggatttaaaacttgaagatactggggagtcattttccgagaataaatcttcaaagtcttctggcactgaaatatttaaacctaaatatttgaaaaggattgtactagcaacagccatttcaacattacagggaatgcagtactatggagtaggattatatatcccaataattgcaacttacataattagtaaagataaattaggcgtgctattaggtacagctatcgtgaatatagcaggtattattggtgcttatgtaggatcgcaactgacatataaggtaggtacacgccgactcacaatgattggtttcagtcttgtgttaatcgcgatggttatgacgggcttgttctatcatagtctaccaatgattatcaatacattcttgatcgcattgttcttatttggacattctggtggacctggtacacaaggtaagacgattgcggctttatcattcccaacatatttacgctcacaagctactggtttcgtagaatcagtaagtcgtacgggaagtattatcggtacatttgtatttccgattatacttgcagctgtgggattaacaaatacgatgcttatcttagccatcgttcctttagttggtctaattatcacgactgcattgagatgggaagctgttggaaagaatgtagaggacgagtaa

SEQ ID NO: 1932 - DNA, 576 bp, Staphylococcus capitis
atgaaaaaagagatattagaatggattattgcaattgcagtagcgcttatcattgttggattagtacagaaattcttgtttacttcctataccgtctcaggtgagtctatgcatcctacttttgaagacagggatagagtgatggttagccgtatttctaaaacattgaatcatattaattctggcgacgtagttatttttcatgcaactaaaaaagatgactatattaaacgtttaataggtaaacctggagatactgtagagtacaagaaagaccaattatatttaaataataagaaagtgtcggaaccatatttaaattataataagaaacataaagtcggaaagtatttaactgagaattttaaatctaaaacagttagaggcgctaatggacatatgaaaatccctaaaaataaatacttagtattaggggataatcgtcaaaatagtgttgatagtcgttacgatgtaggattagtcgataaagatcaacttgttggtaaagtattatttagatattggccgttaaataaatggaaaggcggatttaatccaggtactttccctaattaa

SEQ ID NO: 1933 - DNA, 162 bp, Staphylococcus capitis
ttgataaaaaaatttattgagaatgaacaaaaaagtggatatttaggtatcttatgtaccttagtatttggtttattatttagttcaatgttcacaccatttattggtatacctgcagcgttaggtgttggttaccttatccacacaactgaagaagaataa

SEQ ID NO: 1934 - DNA, 657 bp, Staphylococcus capitis
atgaaaggtaaaatattaaaatttataagtttaatgattattatcactacagcctcacttggtatgttatcaacggaattagacgctgcaacatcaggagggtctagtagttctagctcaagtagttcaagtagtagttcatcatcaagtgcttcctcgtcagctgcaagaggctcaacatcatctagttcatcaatgagtcgctcaagtgcagctaatgcgtcacgagctgcccaacaatcaagccaacgtgctgcgcaacaagcaactagaacaagtagtatagcttctagtagaaatgcttcgaagtataaacaaggtgcatatcacactaaatctcaacaagcacgttcaatgatggcaccaagacgacgatacagctcaggtgcgccatatacttcacaatatatggcgacgtcatactataataattggttgtatttctatatcattgcctctcaagagaatcagagtaagacaagtagtgtgaagtaccaaatgaatatgttaaaaaatcaaatgaaacctcatgaaaaattatacactgttactatacaaacgaataaaggtaaacgcgtcattgttgtaccaaagaaacaatacgataaaattaaaaccggtaagaatgtgaaaattaaaaatggtatagtacaatag

SEQ ID NO: 1935 - DNA, 381 bp, Staphylococcus capitis
atgaaaaggttaatactattaattagtttgttaagtttagcatttatcctcacagcttgtgggggaactggaaagcagaaagaaccttcgaaggaaagtcaaaaatcagataaatatgaatacgtatattatgaagtactaaatgatggtggagaagacacgcctaatgtagagattaaatataaagacaataaaggtaaatcacatttagagaaaacagatttaaaacatgtttatgaacatattttaagtgatggaaataaaaaaccatacatagttaaagatggtagtaaaattcatgtctatcgcccaccttacatgacatacggcgatgatgatgttgaaggtaaagcagtttctaaagatgaagtatctaaataa

SEQ ID NO: 1936 - DNA, 201 bp, Staphylococcus capitis
atggtggtgtctacaattttttgggtagtggtggcacttattttactagtattaggtttaatgaatggcttaaacaatgaaatggaaggatataaatttgcctttctatttataggaatatttcttgcgcctttgatttgccaattgatttggctaattatcaatattatagtcatcaaagattttaaagaaagtaaatag

SEQ ID NO: 1937 - DNA, 402 bp, Staphylococcus capitis
atgaaagcattaaaaatttcattaactactgtagtagttattatcttattactagtaggattacttttcggattaaaagtttatggcgatcatcatccaaataacaaagatgttaaaagtttaaatatggctaaccccttagaaccaacaaaagaatattatgtgaaaacgactaaaccaatgaaacataaacctaagcaatatgaagatgttgataacgtttataagactactggttatgatgataaaggcaacagtaaaaaaatcttatacacaggaatgaaaaaacttaaaccaaatcattatttaaaaattaaagaaaaattaaacacagtgagaagctatgacgaagttaaaaaagatgaaattcctaaaaaagcaatgagtaaattagagaaataa

SEQ ID NO: 1938 - DNA, 399 bp, Staphylococcus capitis
atgaaagctttgaagaaactatcaattacactaggcgtttttattcttctaattggtgcgctcatgctagtaggtaaaatttatagtgaacatcatccaaacgaccccacagtacgagatttaaataaatataattttatgatacctaaagaagattattttgttaaaactgataaacctgttaaaaaagaaaaattcggaacagacttctataattatacttataaaactgttggttatgataaaaaaggtgatggcaagaaaatcacctataccgcaactaagaaattaaaaacaaatcattatctcaagttaacaacaaaacaggatcaagttttaagttattcagaagttaaaaaaagagagattcctgaagacgccaataaaaatttaaattaa

SEQ ID NO: 1939 - DNA, 759 bp, Staphylococcus capitis
atgacgatattaaaagttaacaaattatcaaaagtatatggagacaaacaaaagtaccaagcacttaaagatatcagtttttcagttgaaaaaggagaattcgtagcaatcatgggaccttctggttcaggtaaaactacattattaaatgttcttagttctattgatactatctcaggaggttctgtagaagtcgatggtaatgaaataaacaaactaagtaataaaaagcttgcaaatttccgtaaaaaacaacttggattcatcttccaagattatagtgtactgcctactttaaccgttaaagaaaatattatgcttccactttcagtccaaaaaattcaaaaatacgaaatggaacagaattacaaagaagtgacagaagctcttggtattaatgacctgggaaataaatatcctagtgaaatttcaggtggacaacaacaacgtacggcagccgcccgtgctttcgttcataaaccaaatattatctttgccgatgagcctacgggtgctctagattcgaaaagtgctcaagatttacttaatcgattagaagatatgaataaacaatttaattcaacgattattatggttactcatgacccatcagcagcaagttttgctgagagagtaattatgttgaaggatggtaatattcattctgaaatttatcaaggagacgactctaaacaagacttctatcaagaaatcatcaaattgcaatcggcattaggtggtgtcactcatgacgtttaa

SEQ ID NO: 1940 - DNA, 1881 bp, Staphylococcus capitis
atgacgtttaatcaaattacgcttaaaaatttaagacagaacatcaaacactatggcatgttcttattctctttattattaagtatcgtactttattttagtttctcaactttgaagcattcacacagtattaataattcaacttctatggcaataattcaaaaaggatctagtttcggagcatcaattttattcattattattattatattcttaatgtacgcgaaccacttattcgttaaaagacgtacaaaagagtttgcattattccaacttatcggactcacaagaggaaatattcttagaatgttaagtattgagcaattcgcgatatttgtaattacaggtatcttaggcgtgctcattggaattttcagttcacaacttttacttgccattgcttctaaattgatgaagttaaaagttcatctttcaataggatttgaaccccaagcactaatcattactatcataatgttagtcattgcttttgttttaatacttgttcagaattaccttttcctaaaaagaagaagcatcttaacaatgatgaaagatagttctcaatctgaagcaactaaagcacgtatttcagttcctgaaattattggtggtatcctaggtatcttaatgatagctttagggtattatatggcaactgaaatgtttggtgtatttaaatcacttactatagcattagttacaccattcattattttattcttaacaattgtcggtgcttacttattctttagaagttcagtgtcactcatttttaaaacgataaaacgttcaaagaatggtcgtgtttcaatcacagatgtggtgtgtacatcttctatcatgcatagaatgaagaaaaatgcgatgtcattaacagtcatcgccatcatttcagcgttaactgttacaattctttgttttacagctattactaaagcaaattcggattataatattgaatcatcaacaccacaagactttgacttctcaaaaggtaagcaagcgcataaatttgaacagcaattagataaaaataatattaaacacgataaacatacttatgagtcaattaatcctaaaacagttaaagataacgttatgacattacaagatgattctgaaggtttctcacagaatacgtcaatgattgttaataaagatcttaaaggtagtaacgctcgattaacaaacactaaaaccgctatcggaatgatgaaatttaatatgaatcaaagtatcacagttaaaggtaagtctaaaacaactgtaaaagtaacagataaagacgattccaaagtttatccatctgaattatcatatgcagctcctatagtagaagtaagtcctaaagtatacaactcattaaaaacagataaaaatactgcgcacgtttatggatttaatattaaacatcatagcgatatgaaaaaagctgaacgtatcgcgtcgaaagttgatccaaatgtaacttctaaagatgaattgaaaaaagtggtggacgcaacaaatggtattttcatatttgtaacttcattcttaggattagcgttcttaatcgcagctggatgtattatttacattaaacaaatggatgaaactgaagatgaaatcgataattttaaagtcttacgacgaatcggatttactaattctgatatgtctaaagggttattattaaagattttattcaactttggattacctttaattatagctctactacatgcgttatttgcggcactagcctttatgcatgttatgggcaatgtaacaatggtacctgtattcctagtaatgattgtttacacagtcatctacctcatctttgctcttatagcatttatacactcaaatcgtgtcattaagcgctcaatttaa

SEQ ID NO: 1941 - DNA, 195 bp, Staphylococcus capitis
atgaaaattaaagatttaatcaaacaatcatatgaggatttaaaaaatttaactattaactggttcaatatcttaatgttagttgtcattgtatttgttttaagtaatattattacgcctatcgcaggtattcctgttggactattaggaggcgcatatttcttaaaacgtcgtgaagaaaaagaagatcaataa

SEQ ID NO: 1942 - DNA, 2304 bp, Staphylococcus capitis
ttgaaaaattataatgaaaagaaaagatttagtattagaaagtacgctgtcggagtcgtgtctattgtcacaggtataacgatttttattgggggacaacaagcacatgccgcagaagagacaaaccaacaaattaatacaccttcacattcaaatgaaacaactcaaactgctcaaaagaatttaaaagaaaatgaatcacggccaagtgagtctgagttatcatcttcaaaaacttctcaaccacagcaatccgaatcaacgcaacattctcaacctcaacaaaccgaatcaactcaatctactcaaacacaacaaacgaatccaactcaacatcctcaagataaagaaaactctcaaaatcaatcattagaaagcacgaaagaagcaactaatcataacgatactccagacacatcagaagcgattgatactaagaaggaagaattagataatcaagacgtccttccgtctaaaaaaacaaataatagtgaaagaaaagctgataacacttctacgcaagacaacgcaacatctactgataacaagcaatatgaatcagaaagtaaaccaacagaaaccaaatcagaaaatgataaagtaactcaaagtaactcaagcgataatccttctgaatctcaagaatcaactaagtcgcaagatcaacaagaccctcaagataaaccagattcacagcactcacaaaaatctgaggataatttatcaactcgtgatactacatacccaaaagaatctaaacaaaattcctcatcttcacaacctcaagaaacaacgcaagagtctcgaaacaacaaagacgaaactgacaatgataatcctcagtctaagggtgcccatcaatcatcacaaaatactcaacttcgatctactgaaaacaatgatgacccgaaagactcaactcaattaaaatcttcaaataaagaacaagatactcgggaacaaaataatgaaaaagaagtagaccaaccaactaagaaaactccatccatgaaacaagaaaataaaaatactacgaaacaatcagttaaaacagataaaacagaaagaccgacttccacagaaccaaaaacactacaatctcatcaaccgaacaaactttctaaacaaacgctacaagctcaatataaaaatcaatatcctgtcgtgttcgttcatggttttgctggtttagtcggtgaagatgcgtttacactttacccaaattattggggtggaggtaaatataatattaaaagtgaattgactaaacaaggttaccgtgtacatgaagcaaatattggtgcatttagcagtaactatgatcgtgcggttgacttgtactactacattaaaggcggtcgcgtagactacggtgcagctcatgcggctaaatatggtcatcatcgttatggtagaacatatgaaggtattatgccggattgggcacctggtaaaaaaattcatttagttggtcatagtatgggtggtcaaacgattcgtttgatggagcatttcttaagaaatggaaatcaagaagaaatagactatcaacgtcaacatggtggtacggtatcagatctcttcaaaggtggaaaagataatatgatatcaactatcactactgtaggaacaccacataatggtacgcctgctgccgataaattaggtacacgtaaaattgttaaagatgcaatgaatcgtataggacgtctaagtggtagtagattgctagatttaaatttaggcttttctcaatggggctttaaacaaaaaccaaatgaaagctatatagaatatgctgaacgcgttgcaaatagtagaatttgggatactgaagaccaagcaattaatgatttaacaactgctggtgctgaaaagttaaataaaatgacaaacttaaaccctaatattgtatacacaacttatacaggtgcagctacgcatactggccctctaggatttcaaataccagacgtaagacagttattcgcaatggatataacgagtcgtatcattggtagagataaaaataaaaatgtaagagtgaatgacggtctagtacctgtatcatcgtcaatatatcctactgctcaagcattcaaaaaagtaggcttcttgaacccagctacaagtaaaggggtttggcaagtcagacctgtacaaaacggttgggatcatgcagatttaatcggccttgatctccctgatttcaaacgtactggtgctgaattaggaaaatattatttaggtatgataaataatatgatgagagttgaggaattagatggtctaactaaaaaataa

SEQ ID NO: 1943 - DNA, 750 bp, Staphylococcus capitis
atgaaaaagttaataactagtttattatgtactacaatatgtggcacagttttaactacaggaagtatagacgctcaagttgagagctcaactaactctaattcgttgaaagaacttcaagatgaaggtgttgtgtctaaatcaattactgaagaacaatggaagcaaattcaagctaaaaatcgtgaagaagaagcaaagtttgagagaacagctgaagaacaatggcagaaacaacaaaaacaagaccaaatagatcgagaaaatcgtaaaagaaaaaagaaatttcatttgaaaaaaggtgactatttcatcacaaatggtgtaagcgccaaagggctcacaggtcatgctgcgatttacgtagggaatggatacattaaagaagctcgtggatatggaaaatctacaaggacaaaaagctttcgaaaatggaaatatagtactttaaaaaagaaaaaaggacaccccaaacatcgttatatcagtgtatatcgagcatcaaaaaaatatagaggcaaagctagaaactatgcgaaatctcattttaatcatgtgccctataatataacgccgaatccatattcaaaaggagctacatattgttcgaaacttgtttggcaatcttattattatggtgccggaccatcctcagttcgccctttctctcaaccacaattcattatttatccatatgctctccatcggtatatcaagtcaaaaccggttcggatatatacaagaggttaa

SEQ ID NO: 1944 - DNA, 411 bp, Staphylococcus capitis
atgaaaaaagaatatacattaaattatattattccaataagtattcttattgctttaattgttgtccctatattaattttcactttaggtaaacatatttatttaaattatcaaaaacatgaagaagataaactcgaagcaaaagttcacagtgtacttaagcaaaaaggttgggaaaacaaaattaaaacagagaaacccaatttcacgttgaatactggagaacgtgacgtagttgttacttttaaagatgagccctataatacatatcaatatgaggttaatgatgatggtaaagtaacgggagatgcagagttaaaaatgaaatatcaagagcgttttgataatgataaaaaatacagagaatatagaaagcgtcatcattttgaggaaaagtatgatttaaaataa

SEQ ID NO: 1945 - DNA, 1203 bp, Staphylococcus capitis
atgaataacttttctaatgttattgctgtcgcctttcgctcaattttaaagaataaacgtcgaaacatctttacgatgattgggattatcatcggtatcgcagctgtcattactattatgtctttaggtaatggatttaagaaatcaacaaatgaacaatttgatgaagcgggtgcgggtaaagatcaagcttctatttcatttatgactgagaatatggaggcacctaagaataatccgtttaaacaagaagatataagtgtagtagaacaagttaaaggtgttaagaatgccaaaataaaagaagacgatgatagcacgtattcagctaaaatcaccaattcacatggtggcggtgatgtcagtcttaaaaaacaaaacgagcttaccgatgtagacaaagggaaaggttttactaaagatgataatgacactgaagagaaagtcgctgtcattgatagtaaacttgcgaaaaaagtgtttaataataatgcgataggtaagtctatctatgtgaatggcgaaggatttaaagttgttggtgtatctgaaggttcaggaattgacgctggcggtatgggtatgcctgaagaatcaacagtacaactccctacaaagacattcaataaatatatgggtaacttgtctcagggtatgcctcaattattagttactgtggataagagttctgctaaaaaagacgttggtaaaaaagttgaaaaagaactgaataaaaaaggtactggcacatctgaggggcaatatagttatcaagacaatgaagaaatgatgaaaggtatcggaaaagtattagataccattacttactttgttgcagcagttgcaggtatttcactctttattgctggtattggtgtgatgaatgtgatgtacatttcagttactgagcgtacagaagaaattgcgatccgacgtgcatttggcgctaaaggtcgagatatagaaatacaattcttagtcgagagtgtggtcctatgtcttattggtggtattattggattaatactcggtattatcatagcgacactaattgatgctgtgacgccagaaatggttaaaagttccgtcagtctaggatccgtaatcttagctgttggtgtatctaccctaatcggtattgtgttcggttggatacctgcacgtgccgcatctaagaaagaattaattgatattattaaataa

SEQ ID NO: 1946 - DNA, 687 bp, Staphylococcus capitis
atgattgagttgaaaaaaatcaatcgacactttaaaaatggtaatgaatctaatcatattttaaaggatattgatattcatattgatgaaggagagtttatcgctatcatgggtccttcaggctcaggtaaaagtacgctcatcaacatattaggatttatcgatcgcggatatgaaggggaataccttttcaataaagaaaattatcaaaaaagttcagacaacaagcttgctgaaattcgaaatcatactgtagggtttgtctttcaaaactttaaattgattcaaaataataccattcttgagaatgttagtatccctcttatttataatggaatagggagtaaagagcgtaaaaataaagttttagacggtcttcaagacgtcggtcttaaaggtaaagaagatttattgccgaataaattatcaggtggtcaacaacaacgtgtggccatcgctagagcgattatcaataatccgaagtttattatcgctgatgaacctacaggtgcgcttgattctaagacgtctcaagatattatggaactcttcgttaaactaaataaagaaaaaagaacgacgatgattatggttacacatgaccgtgatgtagcggataaagctgatcgtattattcatattttagatggtcgtgtgcgagaggaagaggtgttgacgcatgaataa

SEQ ID NO: 1947 - DNA, 1116 bp, Staphylococcus capitis
atgaaaaagaaaatattgtggatcatcataggaattgcaatcattctattattaattatcgctgcttttatcgtgaaacaggtaaatggatcaggtaagaaagatagtgaaggttacgatacatatacagttaaaaaagaaacacctatcagtttagaggggaaagcttctcctaaatctgtaaagacatataataataacagttcaattgggacatttttaagtacatctgtagacgatggacagaaggttaaacaaggggatcgtttaattaattatgacacgaatgctagtaaacgtgaacaattagcgaataaggtgaaccaagcacaaagtcaagtgaatgatgattatcaaaagattaatcaaagccctaataatagccaattgcaatctaaacttactcaagatcaaagctcattaaacgaagcacaacagtcattagcacaacacgacagacaagtgaatgacagtatgtatgcttcatttgatggtaaagtaaatatcaaaaatgattcagatgttggtgatggacaaccgattttacaattaatttcagataaccctcaaattaatgcgaccgttacagaatttgatattaataaaattaaagagggggataaagtcgacgttactgtaaatagtacaggtaaaaaaggcgaaggtaagattatcaaaattgatgagcttcctactagttatgattccggtagtgagggtgaagcagctggtggtgctcaagcaggcggtgaagaaggtgaaggttcaggcgctcaagcttctaatccaactgtgaataatccttctggaggtaaagaaggcgacacatctaaatacagagtagttattggagatttagatatcccagttagatcaggtttctctatggatgcgaagattcctttaaatactaagaaattacctgacaatgtattaactaaagataacgatgtgttcgtggttgatgaaaatcataaagttcataaacgtgatatcaaaattgaacgaaacaatggtcaaattatcgttaaaaaaggtcttaaatcaggtgataaagtcattaaaaatcctaaaggtaatttaaatgatggagaaaaagttgaggtgtcatcatga

SEQ ID NO: 1948 - DNA, 651 bp, Staphylococcus capitis
atggaaaatcaaaatatcgatactaaacaactagaaaattctagcattccatttgtaaatcattttagtaagttaagagaaaatccaaaatggttagtgaagttgttaattttaatagttttagccataataactgcattcgtaagttactttgctacaaaagattctttattatcacaaactaatggtcagatgaattctggagtttacttgataataacaataataactggtttctttggcatgctttttaatgcaggaatagtttttgtgattttcttagttatttctaaaatatttaaatctgatgctaaaggtagcagtatcttttctgctgcactttcatactcaattataattaatgctttctctcttattatcattattatccaactattatttggattaagtattcttgaatataaattagacagtttaaacatcttcgctaaaggcaacaaatttttaatggcattaaacttaactaacttattaaaagcatttttaacaggcgtagtttattactcaacgagtcgcttatctaagaaaacatctattatattaggtatcgttgctctagttttattagttggatttggtttaataagtggagcttctggtcaatcaatgccaaatatgaacactaaataa

SEQ ID NO: 1949 - DNA, 126 bp, Staphylococcus capitis
atggttgatatcacttattttttctttttctcattcaagctaataataattggtaacataccacaacaaatgattatcaataatattaatcctgaattcatttttgtacctcttgtgattatttag

SEQ ID NO: 1950 - DNA, 198 bp, Staphylococcus capitis
atgattactatactaatagtttttttactacttcatttgttacctgccatatatcttggaataaaatactttaaattaaaaaacaataatgcctcagataaagaatttaaaaatctttctaaatcaatgatgagagcagaaagtatcattattccgatttcaatattattaatgttattactatattttattaaataa

SEQ ID NO: 1951 - DNA, 555 bp, Staphylococcus capitis
atggctggaagaccgaaagatccaacaataaataagaaaatttatgaagaaattaaccgtttattagaaacaatacattttagagacataacaattgatcagatttcggaaaatactggtatctctaaagcgacgatttatcgcagatggaaagataaatcgtcaattattatggatatgtttgttgaacaatcacaaaagatatttatccatgagagcgacaatttatatgaagatttgtatcattttttagtgaaaatcaaagatatttataagacgaaattaggtagtgcagtgattgaaattttaatcagtcatcaacagatcgaagcacgagaaacgtttatgacagattattttaatagtaatcgaagaacattaaaaaagattatcagcaagcatattaaagatgaagagcaagacttatttatagatcttatcttctcgcctatttacttcaatatattaatcaaacccgactcattagatgaaaattacattgaaaagatgttgaatagaattatcgaagcgtatgacccagaaacgaaagagtaa

SEQ ID NO: 1952 - DNA, 396 bp, Staphylococcus capitis
atgaaattagtattaataaaatttctcgttggtggattagcagtattagtgagttacattgtatcaatggtattaccttggaaagagttcggaggtatctttgcaacttttccagcagtgttcttagtttcaatgtttatcacaggcatgcaatttggtgataagatggcaatgcatgtgagtagaggcgcagtctttggtatgataggcgtattatttagtattttagctacttggggacttttacaatcaacacaaatgtggttaattagtattattggtggatttattgtatggtttgtaagtgcagtggttatatttgaaattgttgaatttattacgcataaaagaagggttaaacatggctggaagaccgaaagatccaacaataaataa

SEQ ID NO: 1953 - DNA, 360 bp, Staphylococcus capitis
gtgtttggtatatcgatttcaagtgctattctccattttgtaataggtggtcttgcagttgcgctcgcatcagtaatggcagataaagtcggtggtaagttaggtggtattatagccactatgccggcagtctaccttgctgcagtgattgctttagctatagatcatcgaggtcaacaactgattcaaatgtctatacatcttagtacaggtgcaattgtaggaattatatcttgtatagttactgtattctttacctcactatttataggtaaaagaaattacaagagtgggactatattttcaattgtatgttggcttgtcatttctatagcaatatttgtagttagacacatttaa

SEQ ID NO: 1954 - DNA, 636 bp, Staphylococcus capitis
atgtacaaaaatttaatctttgatttcgatggtacaattgcagattctaaagaatgtagtatagttgctactcaaaaatcttttaaagaaagagggctagaagaaccgacagtaaatctgattgagtattatatgggaataccaatagaaaagtcattcagtttaatgagttccgttgatttagatgaccatcagttagaagcgcttatcaaaacctttaggcaaaattataaagaggttgaatcatcttatttaaaactttataaacatatgactgaacaactccaatcactctcaaaagataaacagttatttgtagtatcaagtaagaaaacagatgtgctcattcgtaacttagagatcttagacatagatcacttatttacagaagtaatagggtcagacaaagttaatcattataaaccttcacctgatggcatcaactatatcttgaataaataccaattagaaaatgaagaaactatttatatcggggacgctatatttgatatgcaaatggcaaatagcgcaaaagtggcatcatgtgcagtcacttggggtacacacagtattgaggaattaaaatctgagaatccaacatatatcattcatgaggtaactgaattaaatttctaa

SEQ ID NO: 1955 - DNA, 711 bp, Staphylococcus capitis
ttgagtaaaaaagttttaattacaggtgcgaataaaggcataggctttgaaacagcgagacaacttggagagcaagattggtacatattactcggggctagaaatgagcaaagagggatggaagcagttaatacgcttcaacgagaaggaattaacgtaaaatgggttagaatagatttaaatcacgatgaaacaatagattcagctgcacaatacattagagcacatcacagtgatattaacgtcttaataaataatgcaggtgtttcaggaaatatgcaggctaagccattagatgtggatgttgatgagttaagatctttaacagaggttaatttcttcggtaatttccaaatgattaaagctttcacaccaatcttagcccgtaataaaggtagaatagtgaatttaaccatccctttgaaaccatcaagtttcttcgaaccatttagttacattgcaacgaaagaaccacttaactcaatgattaagctctttgcaagacaattcaagaaaagtaaaataccagtcgaaattttcggtattatgccaggtggagtgacgactgatttaaacaatcatcaaaaaggtctactcatgcgtaccgtcagtgaagctgcccaatccattgtaaaagtggtcacagacaaccgtaatcacaatggtaaaatcttacttagagtcacgccttttaaactatttaaaaagtaa

SEQ ID NO: 1956 - DNA, 840 bp, Staphylococcus capitis
atgaagaaacctttttcaaaattatttggtttaaaaaataaagatgacatcgttggttatactgaagaagagcgcaataataatgttgaatccattcatattgaacgtatcgtacccaatcgttatcaaccaagacaagtatttgagccaaataagataagagaattagctgaatcgattgaagaacatgggttattgcaacccatcgttgtacgtccgatagaagaggatatgtttgaaattattgctggtgagcgtcgattcagagcattacaatcattgcataaaccacaagctgacgtcattattcgtcacatgaatgatgaagaaacggcagtagttgcgttaattgagaatattcaacgtgagaatttatctgtggttgaagaagcggaagcttataaaaaattgcttgaaataggagatacgacgcaaagtgaattagcgaagagtctaggtaaaagtcaaagtttcatcgctaataaattacgcttattaaaacttgctcctaacgtgattaaacgacttcgtgaaggaaagataactgaaagacacgcccgtgctgtcttggttttacccgaagatgagcaagaagaattaattgagcaagtcattaatcagaaattaaacgttaaacaaactgaagataaagtacgtcaaaagacaggtcctgaaaaagttaaagctcagactttccaattttcacaagatgtgactcaagcgagagatgaagtgggtaaaagtattgaagccatcgagcagtctggcttacgtgttgaacataaagacaaagaccatgatgactattatgaaataaaaattagaatatataagaaatag

SEQ ID NO: 1957 - DNA, 720 bp, Staphylococcus capitis
atgagtgtagaatggctatctaagaaattaagtgaacatggcattgaattgtctgaaacgcaaaaagaacaattccaaacgtactatcaattacttgttgagtggaatgaaaagatgaacttaacaagtattacggaagaacatgatgtatacttaaaacacttctatgattcaattacacctagcttctattatgacttcgatggagaattaagcatttgcgatgttggagctggtgcaggatttccaagtattcctttgaaaatagtttttcctgaattgaaggtaacgattgtggattcacttaataaacgaattcaatttctcaatcacttagctgcagagttaggcctccaagatgtcagttttgtgcatgatcgtgcggaatcttatggtaagggagcctacagggagtcttatgatatcgttacagcacgtgctgttgcacgtcttactgtattgagtgaattgtgcttacctttagttaaaaaaggtggccaatttatcgcacttaagtcatctaaaggcgaagaggaattgcaagaagcgaactttgctattaatattttaggtggaaacgtgaaagaaacattttcatttgaattgcctgaggatgctggcgaaagacaaatgatagtgattgataaacgtagacagacttctaagaaatacccaaggaaaccaggtacgccaaacaaatctccactacttgagagctaa

SEQ ID NO: 1958 - DNA, 1878 bp, Staphylococcus capitis
gtggttcaagagtatgatgtaattgtcattggagctggtcatgcaggaattgaagcgggcttagcttctgcaagacgtggcgcgaaaacgttaatgttaacaattaatatagataatattgcctttatgccatgtaatccatccgttggtggccctgcaaaaggtattgtagtgcgtgaaatcgatgcgttaggtggacaaatggctaaaacgattgataaaacacatatccaaatgcgtatgttgaatactggtaaagggccggctgtaagagcattacgtgcacaagcagataaagtgttatatcaacaagaaatgaaacgtgtaatcgaggacgaagataacttagatattatgcaaggcatggtggatgagttaattattgaagaaaatgaagtgaaaggcgtacgtacgaatattggaacagaataccgctctaaagcagtagttgttacaacaggtacgttcttacgtggtgaaatcatcttaggtaacatgaaatactctagtggtccaaaccatcaattaccttctatcactttagctgacaacttgagacaacttggatttgatgtagttcgattcaagacaggtacgcctccacgtgtgaatgctaaaacaatcgactattctaaaactgaaattcaacccggtgatgatgtaggtcgtgcatttagttatgaaacgactgaatatattttagatcaattaccttgttggttaacatatacaaatggtgaaactcacaaagtgattgatgataatcttcatttatctgcgatgtattcaggtatgattaaaggtactggtcctagatattgtccatcaattgaagataaatttgttcgttttaacgataaacctagacaccaacttttcttagagcctgaaggtcgtaatacgaatgaagtgtatgtacaaggtttatctacaagtcttcctgaacatgttcaacgtcaaatgttagagacaattcctggtcttgaaaaggcagacatgatgcgcgcaggttatgcaatcgaatatgatgcgattgtgcctacacagttatggccaacccttgaaacaaaatcaattaagaacttatatactgcaggtcaaattaatggtacgtcagggtacgaagaagcggcaggacaaggtatcatggcaggtattaacgcagcaggtaaagtgctaggtactggagagaaaatcttaagtcgttctgatgcatatatcggtgtattaattgatgacttagtgactaaaggaactaatgaaccatatagattattaacttctcgtgctgaatatcgtttattactacgtcatgataatgcagatttacgtttaactgatgtaggttatgagttaggcatgatttctgatgaacgctacgcacgctttaatgagaaacgtcaacaaattcaaaatgaaattcaacgcttaactgacattcgtattaaaccaaacgatcacactcaatctgttatcgagtctaaagatggctcacgcttgaaagatggtatcttagcaattgatttattacgtcgtcctgagatgacttatgatacgattttagagattctagaagaagaccaccaactacctgatgcggttgaagaacaagttgaaatacaaacgaaatatgaaggttatatcaataaatctttacaacaagttgaaaaagtaaaacgtatggaagagaagaaaattcctgaagacttggattataataaagtagatagtttagcttctgaagctagagaaaaattagcagaagtaaaaccattaaatattgcacaagcttcacgtatatctggtgtaaatccagcagatatctcaattttacttgtctatttagaacaagggaaacttcaaagggtgaatcaataa

SEQ ID NO: 1959 - DNA, 1380 bp, Staphylococcus capitis
atggattttgatacgattactagtatttcaacacctatgggcgaaggagctatcggtattgtccgtttatcaggcccacaagccattgaaataggagatacactttataaaggaaagaaaaaattatctgaagtagatacacatacgattaactacggtcatattattgatccagaaactaatgaaactgtcgaagaagtgatgatatctgtgctacgtgcaccaaaaacatttactagagaagatatcattgaaattaattgtcacggcggtattttaacaattaatcgcatactggaattaactatgacgtatggtgcacgtatggctgaaccaggtgaatatacgaagcgtgctttcttaaatggtcgtattgatttatctcaagcagaggcagttatggatttcatacgctctaaaactgatcgcgcctctaaagtagcaatgaatcaaattgaaggtcgtttaagtgaccttattaaaaaacaacgtcaatccatattggagattctcgctcaagtagaagttaatattgattaccctgaatatgatgacgttgaagatgccacaactgagtttttacttgaacagtctaagaatattaaagaagaaattaatcgactgcttgaaacaggtactcaaggtaagataatgcgtgaaggattatcaaccgttatcgttggtcgtcctaatgtaggtaaatcttcaatgttaaataatcttattcaagataataaagcgatcgttactgaagtagctggtacgactagagacgttttagaagaatatgtcaatgtacgaggggtaccattacgattagttgatacagcaggtatacgtgatacagaagatattgtagagaagattggtgtcgaacgttcacgtaaagcattaagtgaagcggatctaatcttatttgttcttaacaataatgaacctctaacagaagacgatcaaacattgtatgaagttgtgaagaacgaagacgttattgtaattattaataaaacagatttagaaccacgtttagatataaatgaagttaaagaaatgattggtgacatgccattaatccaaacttctatgttaaaacaagaaggtatagatgaattagaaattcaaattagagatttattcttcggtggagaagttcaaaatcaggatatgacatatgtatctaactcacgtcatatttctttattaaaacaagctagacattcaattcaagatgcgatagatgctgctgaatctggtgtgcctatggatatggttcaaattgatttaacgcgtacttgggaaatacttggtgaaatcattggagaatcagcgagcgatgagttaattgatcaactgtttagtcaattctgtttaggtaaataa

SEQ ID NO: 1960 - DNA, 348 bp, Staphylococcus capitis
gtggaaaaagcatatcgtataaagaaaaattcagatttccaaactatttataaaaaaggtaaatctgtagcgaatagacaatttgtggtttatacctataataataaagaaaataaacattttcgtttaggtataagtgtttctaagaaattgggtaatgctgtaactagaaatagaattaaaagagctattagagaaaattttaaagttcacaaagaagatattatagctaaagatattgttgttattgcgaggcatccatctagagatatgacaactttagaaattcaaggtagtttagaacatgtactaaaaatagctaaggtatttaataaaaagataaagtag

SEQ ID NO: 1961 - DNA, 138 bp, Staphylococcus capitis
atggtaaaacgtacttatcaaccaaataaacgtaaacatagtaaagttcatggtttcagaaaacgcatgagcactaaaaatggccgtaaagttttagcgcgtcgtcgtcgtaaaggccgtaaagttttatcagcataa

SEQ ID NO: 1962 - DNA, 1356 bp, Staphylococcus capitis
atgtcagagaaagaaatttgggacaaagttttagaacttgctcaagaaagaatttcacataccagttatcatacgtttattaaagatactcaactctattcacttaaaaatgacgaagccattattttaacgagcctatcttttaatgcgaattggcttaatcaaaaatactctgaaataatgcaagctattatatatgatgtcattggttatgaagtgaaaccgctatttattactgaagatgaactcgccgactataacaatggtgcatctaatgaacctcaagaaccacaaacgtcaacatctacaattgaagataatgatggtggtaaagaacaatttaatattcataacacattcgatacatttgttattggtccagggaaccgcttcccacatgctgcaagtttagctgtagctgaagcaccagctgaagcttataacccattattcatttatgggggcgtaggtttaggtaaaacacacttgatgcatgcgattggtcatcatgttcttagtaatcaacctagtgctaaagtgatttacacatctagtgagaaatttactaacgaatttatcaaatctattcgtgataatgagactgaagctttccgtgagaagtatcgaaacatcgatgtattacttatagatgatattcaattcattcaaaataaagaacagacgcaagaagaattcttccatacatttaatgaattacatcaaaacaataaacaaatagttatttcaagtgatcgtccacctaaagaaattgctaaattagaagatcgattacgttcacgtttcgagtggggattaatcgttgacattacaccacctgattacgaaacaagaatggcgatattacaaaagaaaattgaagaagaaaaccttgatataccaccagaagcgcttaattatattgccaatcaaatccagtcaaatattcgtgaacttgaaggtgcactcactagacttttagcttattccaaacttcaaggcaaaccgataactacagaattagctgctgaagctctaaaagatattattcaagcacctaaatccaaaaagattacaattcaagatattcaaaaagtcgttggtcaatattatagtgtacgcattgaggatttcagtgctaaaaaacgtactaaatctattgcatatccgcgtcaaattgctatgtatctatcccgtgaattgactgatttctcactaccaaaaattggagaagaatttggtggacgagatcatacaactgtcattcatgcacatgaaaagatagctaacgacatcaaagcagatcctacttttaaacaagaaatcgaaaacttagaaaaagaaattagaaatcagtaa

SEQ ID NO: 1963 - DNA, 1134 bp, Staphylococcus capitis
atgatggaattcacaattaaaagagattattttattaatcaacttaatgacacattaaaagcaatttcacctagaacaacattaccaattttaactggtatcaaaattgatgctaaagataatgaagtgattttaactggttcagattcagaaatctcaattgaaattacaattcctaaacaagttgacggtgaggacatcgttgaaatctcagaaacaggatcagtagtactccctggtcgtttcttcgtagatatcatcaaaaagttacctggtaaagatgttaaattatctacaaatgaacagttccaaacattgattacttcaggacattcagaatttaacttaagtggattagatccagatcaatatccattattacctgaagtatcaagagatgacgcaattcaattatcagttaaagtacttaaaaacatcattgctcaaacaaattttgcagtgtccacctcagaaacacgcccagtgttaactggtgtgaactggcttatacaagataatgaattaatatgcactgccactgactcacaccgcttggctgtaagaaagttacaattggaagatacttctgaaaataaaaatgtcatcattccaggtaaagctttatcagaattaaataaaattatgagtgatagtgacgaagatattgatatcttctttgcatcaaaccaagttctatttagagtaggaaacgttaactttatctctcgtttacttgaaggtcattatccagatacaacgcgtttattcccagaaaactatgaaattaagttaggcatcaataacggtgatttctatcacgctatcgatcgtgcatctcttttagcacgtgaaggtggaaataatgttattaaattgagcattggaaatgagttagtagaattatcctcaacatcaccagaaattggtacagtaaaagaagaagtaactgcaaatgatgttgaaggtggaaacttaaaaatttcattcaactctaaatacatgatggatgctttaaaagccatcgataatgacgaagttgaagtagaattctttggaacaatgaaaccatttattttgaaaccgaaagatgacgattcagtaactcaattgattttaccaattagaacttattag

SEQ ID NO: 1964 - DNA, 237 bp, Staphylococcus capitis
ttggttcaagaagttgttgtagaaggaaacataactttaggtcaatttcttaaaactgaaggcattattgaatctggtggacaagctaaatggttcctccaagatttcgaagttttaataaacggccaacgtgagacacgtcgcgggaagaaattagaacataacgaccgaattgatatcacagaattacctgaagatactggttcttttctaatcatccatcaaggtgaacaatga

SEQ ID NO: 1965 - DNA, 1116 bp, Staphylococcus capitis
atgaaacttaatacactccaattagagaattatcgtaactatgaagaggttacattagattgtcatcctgaagtgaatatcctcataggagaaaacgcgcaaggaaagacaaatttacttgaatcaatttatacgctagcgctagctaaaagtcatcgtacttcgaatgacaaggaactcatacgttttaaagctgactatgctaaaatagaaggtgagctgagttatagacatggcacaatgccacttacaatgtttataactaaaaaaggtaaacaagttaaagtcaatcaccttgaacaaagtaaactgactcaatatgtgggacacttgaatgtcgttttatttgctcctgaagatttgaatattgttaaaggttcaccacagatacgacgacgtttcatagacatggagttaggacaaatttcagccgtttacttaaatgatttagctcaataccaacgtattcttaaacaaaagaataactatttgaagcaattacaaattgggcagaagacagatacgacaatgttagaagtgttaaatcaacaatttgctcaatatgctttaaaggtaacgttacgtcgtgagcattttataaaagaactggaagaacttgcgcaaccgattcattcagggattacgaatgagcgtgagaagttaggacttaaatatttaccaagtttaaagttaagtgattatgagaaggaagagtcagaattgctcgaggaggtcatcgaattattaaacgataaccttcaaagagagaaagaaagaggtgtgtgtctttatggaccacatcgagatgatttaggattcaatgttaatgacatggatgcacaaacatatggatcacaaggacaacaaagaactacagcattgtcgatcaaattggcagagattgaattaatgaacatcgaagttggagagtatccaatattattactggacgatgtactcagtgaacttgatgattcacgtcaaacgcatcttctaagtacaatccaacataaagtacagacatttgtgactacaacctctgttgacggtatagaccatgaaattatgaataatgctaagttataccgtataagtcaaggcgaattactaaagtaa

SEQ ID NO: 1966 - DNA, 1920 bp, Staphylococcus capitis
ttgtcagatgtaaacaacacagataattatggtgctggacagatacaagtattagaaggtcttgaagcggtgcgtaaaagaccaggtatgtatattggttcaacttctgaaagaggcttgcaccatttagtatgggaaattgttgataatagtattgacgaagcattagcaggttatgctaatcaaatagaagtcgtaattgagaaagacaattggataaaagttactgacaatggccgtggaattccagttgatattcaggagaaaatgggacgtcctgctgtcgaagttatcttaacggtattacatgctggaggtaaattcggcggtggcggatataaagtatcaggtgggcttcatggtgttggttcatcagtagttaacgcgctttcccaagacttagaagtatatgtgtacagaaatgatactatttaccaccaagcgtataaaaaaggtgtacctcaatttgacttaaaagaaatcggtgaaacagatcaaacaggtacggcaattcgttttaaagctgatggcgaaatttttacagagacaactgtgtataattatgaaacattacaacaacgtatacgcgaacttgctttcttaaacaaaggtatccaaattacgttaagagatgagcgtgaagaggaaggccgtgaggattcttatcactatgaaggcggtattaaatcttacgtagaattattaaatgaaaataaagagccacttcatgaagaacctatctacatacatcaaacaaaagatgatattgaggttgaaatcgctcttcaatataacagtggatatgcgactaacttattaacatatgccaataacattcatacgtacgaaggtggtacgcacgaagatggcttcaaacgtgcgttaacacgtattcttaatagttacggtattcaaagtaagattattaaagaagacaaagataaactttcaggtgaggatacacgtgaaggtctaacagctattatttcaattaaacacggcgatcctcaattcgaaggacaaactaaaacgaaattaggtaactctgaagtacgtcaagtagtggataaattattcgctgaatacttcgagcgtttcttattcgagcatcctgccgtaggtcgaattatcgttgaaaaaggtatcatggcgtctagagcacgagtagcagctaaaaaagcacgtgaggttacacgtcgtaaatcagcattagatgtatcaagtttacctggtaaattagcggattgctctagtaaaaatcctgaagagagtgagattttcttagtagagggtgactctgccggggggtctacaaaatcaggtcgtgattcaagaactcaagcgattttaccattaagaggtaaaatcttgaacgtggaaaaagcacgtttagaccgtatcttaaataacaatgaaattcgccaaatgatcactgcttttggtacaggtattggtggagaatttgatatttcaaaagcacgctatcataaaatcgtaatcatgactgatgcggacgttgatggtgcgcatatcagaacactattactcacattcttctatcgctttatgagaccgttaattgaagcgggctatgtttacattgcacagccacctttatacaaattaacgcaaggtaaacaaaagtattatgtatttaacgatagagagttagacaagcttaaagctgaattaaaccctactcctaaatggtcaatctctcgttacaaaggtcttggtgagatgaatgcagaccaattatgggaaacgactatgaatccagaacatcgttcaatgttacaagtaagacttgaagatgcaattgatgcagaccaaacatttgaaatgttaatgggtgatgttgttgaaaatcgtagacaatttatagaagataatgcagtttacgccaacttagatttctaa

SEQ ID NO: 1967 - DNA, 2673 bp, Staphylococcus capitis
atggctgaattacctcaatcaagaattaatgaacgaaatataaccagtgaaatgcgtgaatcattcttagactatgctatgagtgttatcgtgtcacgtgcattacctgatgttagagatggtttaaagccagtgcaccgtcgtatattatatggtctgaatgaacaaggtatgacaccagataaaccatataagaaatctgcacgtattgttggggacgttatgggtaaatatcacccacatggtgactcttcaatatacgaagccatggtaagaatggcacaagacttcagttaccgttatcctcttgtagatggtcaaggtaactttggttcaatggatggtgatggcgcagcagcaatgcgttataccgaagcacgtatgactaagattacgttagaacttttacgtgatatcaacaaagatacaattgattttatcgacaactatgatggtaatgaaagagagccgtcagtcttacctgcacgcttcccaaaccttttagttaacggtgctgcagggattgccgtaggtatggctactaatattcctcctcacaatttaacagaagtcattgatggtgtattaagtttaagtaagaatcctgatatcacgatcaatgaattgatggaagatattcaaggtcctgactttccgactgcaggtcttattttaggaaaaagtggtatccgccgtgcatatgaaacaggtcgtggttctatccaaatgcgttcacgtgcagagattgaagaacgcggtggtggacgtcaacgtatcgtagtaactgaaataccattccaagttaataaagcacgtatgattgagaaaattgctgaacttgttagagataaaaaaatcgatggtattaccgacttacgagatgaaacaagtttacgtacaggtgttagaatcgttattgacgtacgtaaagatgcgaatgcaagcgttattcttaacaacttatacaaacaaacaccgttacaaacatcattcggtgtaaatatgattgccttagttaatggcagacctaagttaattaacttaaaagaagcattaattcactacttagagcatcaaaaaacagttgtaagacgacgcactgagtacaatttaagaaaagctaaagaccgtgcgcatattctagaaggtttaagaatagctctagatcatattgatgaaattatcacgacaattcgtgaatcagaaacagataaaatcgcgatggaaagcttacaagaacgctttaagctatctgaacgtcaagcacaagctatcttagatatgcgtttaagacgtttaacaggtttagaacgcgataagattgaatctgaatataatgaattacttgaatacattaaagaattagaagaaattctagctgatgaagaagtattattacaattggttcgtgatgaactctctgaaatcaaagaacgatttggagatgaacgtcgtactgaaattcaattaggtggattagacgatattgaagatgaagatttaatcccagaagaacaaattgtaattactttaagtcataataattatattaaacgattacctgtttctacatatcgttcacaaaaccgtggcggacgtggtgtacaaggtatgaacacacttgaagaagatttcgtgagtcagttagttactttaagtacacatgataacgtgctcttcttcacgaataaaggtcgagtatataaacttaaaggttatgaagttcctgagctgtctcgtcaatctaaaggtatcccagtcgttaacgcgatagaacttgagaatgacgaaacgataagtacgatgattgcggttaaagatcttgaaagtgaagaacattaccttgtatttgctacaaaacgaggtattgttaaacgttcagcgttaagtaatttctcacgtattaataagaacggtaaaatcgcaataggcttcaaagaagacgatgaactaatagccgtacgcttaacaactggtaatgaagatatacttatcggtacatcgcacgcatcacttattcgcttccctgaatctgccttacgtcctctaggtcgtacagcagcaggtgtgaaaggtatcacactacgtgaaggcgacgtggttgtaggtttagatgtggctcacgcagaaagtgaagatgaagttctagttgttactgaaaatggctacggtaaacgtacaccagtagatgaataccgattatctaatcgtggtggtaaaggtattaaaacagcaactattactgaacgtaacggtaatatcgtttgtatcacaacagtcactggtgaagaagacttaatggttgttaccaatgcaggtgtgattattcgcttagatgtggaagatatctctcaaaatggtcgtgctgcacaaggtgtacgtctaatgagattaggcgaaggtcaatttgtttcaacagttgctaaagttaaagaggaagaagataatcaagcagactcagatgatactgatgcgagcgagacagcaactgaagaagttattgatgaccaaacacctggtaatgctattcatacagaagaagccgaagatgtaactaatgaagaaacagatgataacgctaatgatgatagaatcgatgttcgacaagactttatggatcgtgtaaatgaagatattgaaagtgcttcagacgacgatgatgacaacgaataa

SEQ ID NO: 1968 - DNA, 813 bp, Staphylococcus capitis
atggaaacgttagatacagttaacattcctataagaaaagatgaaacgcataaaggcgattatggtaagattttattaattggtggttctgccaatatgggtggcgcaattatgcttgctgcgcgcgcatgcgtctatagtggtagtggattaattacagtcgcaacacatcctaataatcatgcagcattacattcacgttgcccagaagcaatggtaattgatatcaatgatacgaagatgctaactaaaatgatcgaagctaccgatagtatcttaatcgggcctggattaggtgtggacttcaaaggtaataatgcgattacgtttttactacaaaatattcaaccacaccaaaatcttattgtagatggagatgcaatcatcatatttagtaaattgaaacctcaaattcctacatgtcgtgtgattttcactcctcatcaaaaagaatgggaacgtttaagtgggattcctatcgaagaacaaacatatgaacgtaatcgtgaagctgttaataacttaggtgctactgtcgttttaaaacaacatggtactgaaatttactttaaagatgatgcttacaaattatctatcggtacaccagcaatggctactggtggtatgggagatacacttgctggtatgattacaagcttcgttggtcaatttgatagtcttaaagatgccgttacaagtgcgacttacacacatagttatattggagagaaattatctgagtctatgtatgtcgtaccaccttctcgtttaatcagtgaaattccttatgttatgaaacaattggaaggttaa

SEQ ID NO: 1969 - DNA, 1506 bp, Staphylococcus capitis
atgacattaattttagatggagaggctttgactattaaggaaattaagacgtttttaagccaagacttacaaattgatatttcagaggatgccattgaacgagtgacgaaaagtcgccaagtcgttgaacgtatcatacagaataaagaaacaatctatggtatcacaactggcttcggtctatttagtgatgttttaatcgatccaggtcaatataacgaattacaagtcaatctcattcgttcacatgcatgtggtatcgggaaaccattttcagaagaagtggcattagtcatgatggtgttgcgcttaaatacattattgaaggggcattcaggtgcgacacttgagttagttgaacaattaaaattcttcattaacgaacgtattattccagtgattccgcaacaaggttcattaggggcatcaggggatttagcgcctctatcacatcttgcacttgcactcattggtgagggtgacgtttattataacaatgaacaagtcgacagtcgctacgtccttaatgagttaggacgtgaaccgttaaaactacaagctaaagaaggcttggcacttatcaatgggacacaagcaatgacagctcaaggtgtgattaatttcattgaggcagaggatttaggttatcaagtggaatggattgcttcactcacgcatcaagctttaaatggtattacagatgcgtataatcataacgtgcacaaagtccggaatattaaagaacaagtagatgtggcagcacgcatgcttaactggcttgaagattcacagcttacgacacgccaagctgaattacgagtgcaggacgcttatagtttacgttgtattcctcaaatccatggtgcaagtttccaagtgttcaattatgtaagagaaaaattagaatttgagatgaatgcagctaatgataatcctcttatcttcgatgaggatgatgaaacattagtgatttcaggtggtaacttccacggtcaaccagtcgcacttgcattagaccatctaaaattaggcgtgagtgaattagccaacgttgcagagcgacgtctagaacgtttgattaatcctcaattaaatggagatttacctgcatttttaagtcctgagccagggttacaaagtggcgctatgattatgcaatatgctgctgcaagccttgtctctgaaaataaaaccctcgcacacccagcgagtgtagattcaattccatcttcagcaaaccaagaagatcatgtatcaatgggcacaatcgcttcaagacatggttaccaaatgattgagaatacacgtcgtgtgattgcgattgaatgtgtcatcgcattgcaagctgtggaattaaaaggtgtagataaattatctcctaaaacacgtgagaaatatgaagaatatcgtaaaatcgtgccttcaatcaatcaagatcgacaattccacaaagatatcgaagcggtagcgcagtatctaaaagatgatgcttatcacagagcataa

SEQ ID NO: 1970 - DNA, 1287 bp, Staphylococcus capitis
atgttagatattcgtttatttagaaatgaaccagaaaaagttaagagcaaaattgaattaagaggagacgatcctaaggtcgttgacgaagttttagaattagatgaacaacgacgtcaattaatcagtaaaactgaagaaatgaaagcaagacgtaataaagtcagtgaagaaatcgctcagaagaaacgtaataaagaagatgctgatgacgttattgcagaaatgcgtaacttaggtgatgaaattaaagaaaacgatgctaaattaaatgaagttgataataaagtaagagatattttaatccgtattccaaacttaattaacgacgatgtacctcaaggggattcagatgaagaaaacgttgaattgaaaaaatggggtacaccacgtgaatttgatttcgaaccaaaagcacattgggacttagttgaagaactaaaaatggcagacttcgaacgtgctgctaaagtatctggtgcgcgtttcgtttacttaactaaagatggtgcattattagaacgtgcattaatgaactatatgattacgaaacatacaactcaacatggttacacagaaatgatgacacctcaattagtgaatgcagatactatgtttggtacaggtcaacttcctaaattcgaagaagatttatttaaagttgaaaaagaaggcctatacacaattccaacagcagaagtacctttaacaaacttctacagagatgaaatcattcaaccaggagtgttacctgaaaaattcactgggcaaacggcatgtttccgtagtgaagcgggttcagctggtagagatacaagaggattaattcgtttacaccaattcgataaagttgaaatggttcgtatcgaaaaacctgaagattcttgggatgctttagaagatatgactaaaaatgctgaatcaattttagaagaattaggattaccatatcgtcgagttatcttatgtacaggcgacattggcttcagcgctagtaaaacatatgacctagaggtatggttaccaagctacaatgattataaagaaattagttcttgctcaaactgtactgatttccaagcacgtcgtgctaacattcgctttaaacgtgataactcagctaaaccagaattagctcatacattaaatggtagtggtttagccgtaggtcgtacatttgcagctatcgttgaaaattatcaaaatgaagacggtacaatcacaattcctgaagcattagttccattcatgggtggaaaaactaaaatttctaaacctacaaaataa

SEQ ID NO: 1971 - DNA, 693 bp, Staphylococcus capitis
atgacccatctttcatttaagcaaggggtaaaagaatgtattcctactttatttggatacgccggagtaggtttatcatttggtatcgttgcagcctctcaaaactttagtatcttagaaattattttattatgtctcattatttacgccggtgccgcacaatttattgtttgcgctttagcgattacaggtactccaatatctgctatcgtgttgaccacacttatcgttaactcacgtatgtttctattaagtatgactttggcgcctaattataaacaatatggattatggaatagggtaggtctcggtacattattaaccgatgaaaccttcggagttgccattacgccatatattaaaggtgaaaagattaatgatcgttggcttcatggtcttaatatcacagcatatcttttttggactatttcgtgtgtggccggcgcccttttcggcaaatatatttctaatcctaatgcacttggattagactatgcgattactgcaatgttcattttcctaggtatatctcaatttgagtcagtgaagaaatcaagatttcgtatatatataattttaattatctgtgtaatcacaatgatgcttcttttaagtttagtgatgccttcatatgtagcaatattaatagccgcaacattcgctgcagccttaggggtggtgatggataaatga

SEQ ID NO: 1972 - DNA, 330 bp, Staphylococcus capitis
atgacaacagatttacacacactgatacttattattttatgtggaattgtaacgttactcgttcgaattattccctttatgatgatatctagagttcatttacctgaaattgtcgttaaatggctttcatttattcctatcacattatttaccgcacttgtcattgatggcgtcatacaacaacacgataacacctttggatatacgctcaatttgtcatatattattgcgattataccaacagtactccttgccattttcacacgtagccttactatcacaataattggaggtattattactatcgcttgtttacgtttaatcttttaa

SEQ ID NO: 1973 - DNA, 969 bp, Staphylococcus capitis
atgacgaattacagagtagatacgttagaattagggacatttacaactgaatcaggagaaaccattaataatttaaaattacgctatgaacacgttggatataaaggtcaaccattagttgttgtttgtcacgcattaacaggtaatcacttaacttatggaacagacgagaaacatggatggtggcgtgaaattatagatggtggttatattccacgtcatgattatcaatttctaactttcaacgttattggtagtccctttggttcaagttccaaacttaatgaccctaattttccacagcatcttacattacgagatattgttaaagcgattgaaaaaggtatcaaagcactagacttcgataagataaacatcctaattggagcaagtctaggtggtatgcaagcaatggaattgctgtataataatcaatttcaaatcgacaaagccattattctcgcagcaactggtaaaacgtcatcatacagtcgtgctttcaacgagatcgcccgacaagcaattcatcttggtgggaaggaaggcttaagtatcgctcgacaacttggcttcttaacataccgctcctctaaaagttatgaccaacgatttacaccagatgaagttgtaacgtatcaacagtatcaaggaaataaattcaagaaaaactttgatttacaatgttatttaacactgctcgacgtcttagatagtcacaatattgatagaggacgagatgatgttgatgaagtctatcaatcattagatacaaaagttctaacgatggggtttatagatgatttactttatccagatgatcaagtaagagcagtcggagagagatttaaatatcatcgccatttctttgtgccagataatgtaggacatgacggcttccttctaaactttaacgattgggctccaaacctctaccatttcttgaacttaaaacaatttaaaaggaaataa

SEQ ID NO: 1974 - DNA, 912 bp, Staphylococcus capitis
gtgttttcaaaaatacaacctaaagcaactattattgcaactatttcattactgatagtcgctttagtaacacatgtattacctattctcggcttaattttatgtttatttgcaacgattcctggcatcgtgctatggaaccgctctgtacaatcatttggaattagcgctttagtaacagtgattctgacaacgttattaggtaatacatttgtcttaagtatgatggtacttatcttaattttaagttttatcatcggtcaattacttaaggaaagaacttcaaaagaaagaattctttatgtttcaacggtttcattgagtttaataacattgattggattcatgttattacaaacattcgaaaaaattccaaaagcagccgtattaattaagccatttaaagatgcgatgtatgatgccatcttaacaagtggattaaattctaactatagacagattcttgaggaaggtttccgacaatcaacggtccaactccctagttatcttattatagtcattttccttttaatcttaattaatctgattattacatttcctatcttacgtaagtttaaggtcgcaactccgatctttaagccattattcgcatggcaaatgaatcgtgtactattatggatttatcttatagttcttatttgtgtaatgtttgcgaaccaaccaagtatattccaaagtatcgtcttgaactttgaggttgtgttatcattagtgatgtatatccaaggtttaagcgttatacatttcttcggtaaagctaagagatggccgaatgctgtaacgattttattaatggtggtggggacactacttacaccgatgacacatatcgttggtttacttggagttattgatttatgtattaatttaaaacgaattattaaaaaatga

SEQ ID NO: 1975 - DNA, 1968 bp, Staphylococcus capitis
atgaaccgtcaatccactaaaaaagcattgctcataccttttatactcatggtacttacagccattgcattagtcatcgtatggtttattttcaaccaaatcgtcgctggcattgctgcagcaatcctcgtcgtgatgattattattagtggcgtgttattgagacaagcttttcttaaaatggataattatgtggatgatttaagtggtcacatctcggcaagtagcaataaagcaatcaaacatttgccgattgggatgattgtgttagatgaagataaccacattgaatggatgaaccaattcatgacagaacacgttgaaactaatgtgatttctgaaaatgtaaacgaagtctttcctaacatattgaaacaattagaaaaagtacaagaagtagaaattgaacataacaattatcattaccatgtgcgatattcagagaatgaacattgtttatatttctttgatatcacagaaagcgtacataccaacgagttgtatgaagattcaaagccaattatcgcaacgttgttcttagacaactatgacgagattacgcagaatatgaacgatacacaacgttcagaaatcaactcaatggttacacgtgtcattagcagatgggcacaagaatacaatatttatttcaaacgttataattctgatcaattcgttgcatatcttaaccaaaagatattagcagaacttgaagattcaaactttgaaattttaagtcagttgagagagaaaagtgtcggttaccgtgcacaactcactttaagtatcggtgtcggtgaaggtacagagaaccttattgacctaggggatttatctcaatctggtttagacttagcactcggtcgaggaggcgaccaagtagccattaaaaatatgaatggtaacgttcgcttctacggtggtaagactgaccctatggagaaacgtacgcgtgtacgtgcccgagtaatttctcacgcacttaaagatatattaactgaaggcgacaaggtaattattatgggacataaacgccctgatttagatgcaattggtgcagcaattggtgtctcacgttttgcattaatgaataatttagaagcctttgtcgttctcaatgattcagatattgatccgactttacgtcgtgtcatggacgaaattgataagaaaccagaattgaaagaacgctttgtcacttcagatgaagcttgggatatgatgacgtctaagacgacagtcgttgtcgtggatacgcacaagcctgaaatggtcttagatgaaaatgtcttaaataaagcaaaccgtaaagtcgttattgaccaccacagacgtggcgaaagctttatttcaaacccactattggtatatatggagccatatgcaagttcaactgcagagcttgttactgaattattagaatatcaaccaactgaacaaagattgacacgtttagaatcaacagtcatgtatgcaggtattatagtagatactagaaacttcacattaagaacaggttcaagaacatttgatgctgcaagttatttacgtgcgcatggtgcagatacaatcttaacgcaacacttcttaaaagatgatgtagatacttatattaatcgttcagaacttattagaacggttcaattacaagatcatggcgtagcaatcgctcatggttcaaatgataaaatctaccatcctgttacggttgcacaagcagccgacgagttgttaagtttagaaggtatcgaggcatcttatgttgtggctaaacgtgaagataacctcatcggtatctctgcacgttcactaggttctatcaacgttcaattaacgatggaagcattaggtggtggtggacaccttacaaatgctgccacacaaattaaaggtgtcactatagaagatgctatagaacaattacagcaagcaattacagaacaaatgagtaggagtgaagatgcatga

SEQ ID NO: 1976 - DNA, 447 bp, Staphylococcus capitis
atgaaagtaattttcaaacaagatgttaaaggtaaaggtaaaaaaggcgaagtaaaagacgtaccagtaggttacgcaaacaacttcttacttaaaaacaactatgctgtagaagcaactcctggtaacttaaaacaattagaacaacaaaataaacgtgctgaagcagacagacaacaagaaattgatgatgcgaaagcacttaaagaaaaattagaaaacatcgaagttgaagtatcagctaaaacaggtgaaggcggtaaattgtttggttcaatcagtactaaacaaattgccgaagcattaaataaacaacatgatattaaaattgataaacgcaaaatggacttaccacatggtatccacgcgttaggttatacaaatgtgccagttaaattagataaagaagttgaaggtacaattagagtacacacagtagaacagtaa

SEQ ID NO: 1977 - DNA, 1401 bp, Staphylococcus capitis
atggatggaatgtatgagcaaaatcaaatgccgcatagcaatgaagctgaacaatctgtcttaggtgccattattatagatccagaattgattaatacaactcaggaagtcctccttcctgagtcgttttatagaggcgcccatcaacatatcttccgagcaatgatgcatcttaatgaagataacaaagaaatcgacgttgtcacacttatggatcaactatctagtgatggaagcttaagtgaagcgggtggccctcaatatctcgcagagctatcgactaacgttccaacaacgcgaaacgttcaatattatacagatatcgtctttaaacacgcgttaaaacgtaagttaattcaaacggcagatagtattgcaaatgatggctataatgatgaattagaactagatacaatcctaagtgatgccgaaagacgtatccttgaactttcttctacaagagaaagtgacgggtttaaagatattagagatgtcttaggacaagtgtatgagactgccgaagaactcgaccaaaatagtggtcaaacgcctggtattccaacaggttatcgagatctcgaccaaatgactgctgggtttaaccgtaatgatttaatcatcttagcggctcgtccttccgtgggtaagactgccttcgctcttaatattgcccaaaaagttgcgacacatgaagatatgtttacagtaggcatattctcgcttgagatgggtgcagaccagttagcaacgcgtatgatttgtagttcaggtaacgtagattcaaaccgcttaagaactggtacgatgacagaagaagactggagtcgttttacgattgcagttggtaaattatcaaaaactaagatttttatcgatgatacaccaggtattcgtattaatgacttacgatctaaatgtcgccgtcttaaacaagaacacggcttagatatgatagtgattgactatctacaattaattcaaggtagcggttctcgattctcagacaaccgtcaacaagaagtatcagaaatctcacgtacacttaaagccattgcccgtgaactagaatgcccagttatcgcactgagtcagctttcacgtggtgttgaacaacgtcaggataaacgtccaatgatgagtgatattcgtgaatctgggtctatcgagcaagacgctgatatcgttgctttcttataccgtgatgattactacaatcgtggcgaggatgaagatgatgacgatgatgcaggctttgagccacaaacgaatgatgataacggtgaaattgaaatcataattgctaaacaacgtaacggcccaacaggaactgtgaaacttcattttatgaaacaatataataaatttacagacattgattatgctcatgcagaaatgacataa

SEQ ID NO: 1978 - DNA, 1284 bp, Staphylococcus capitis
atgtcatcaatcgtagtagttgggacacaatggggagacgaaggtaaaggtaaaatcacagatttcttagcagaacaagcagatgttatcgctagattctcaggtggtaataatgcaggacacacaattcaatttggtggagaaacttacaaattacatttggtaccatcaggtatcttttataaagataaattagcagttatcggtaacggtgtagttgtagatccagtagcattattgaaagaattagacggtttaaatgaacgtggtatttcaactaacaacttacgtatctctaaccgtgcacaagtcatcttaccttatcacctagctcaagacgaatatgaagaacgtcgtcgtggagataataaaatcggtacaactaaaaaaggtatcggcccagcatacgtagataaagcacaacgtatcggtattcgagtagcagacttattagagaaagaaacattcgaacgtcgtcttaaagaaaacattgaatataaaaatgcttatttcaaaggaatgttcaacgaaacatgccctacgtttgatgaaatctttgacgagtactatgcagcaggtcaacgcttaaaagaatatgtcactgacacagctaaaatcttagatgatgctaacgttgcagacgacaaagtattattcgaaggtgcccaaggtgtcatgttagacatcgatcacggtacttacccattcgttacgtcaagtaacccagttgctggtaatgtcacagtaggtacaggtgtaggtcctacatcagtttctaaagtcatcggtgtatgtaaatcttatacgtcacgtgtaggtgacggtccattccctacagaattattcgatgaagacggccatcacattagagaagtaggtcgtgaatatggtacaacaacaggacgtccacgccgtgtaggttggttcgactcagtagtactacgtcattcacgtcgcgtaagtggtattacagacctttcaatcaactctatcgacgttttaacaggtttagatacagttaagatttgtacagcatatgagttagatggcgaagaaatcactgaatacccagctaacttagatcaattaagacgttgtaaaccaatcttcgaagaacttccaggttggacagaagatatcacaggctgccgcagtttagaagaactccctgaaaatgcacgcaaatacttagagcgtatttcagaattatgtggcgtacacatttcaatcttctctgtaggcccagaccgtgaacaaacaaacctattagaacaattatggtaa

SEQ ID NO: 1979 - DNA, 702 bp, Staphylococcus capitis
atggctagaaaagttgttgttgtcgacgatgaaaaaccaattgctgatattttagaatttaatttgaagaaagagggatacgaagtattctgcgcttacgatggtaacgatgcagtagatttaatctatgaagaagaaccagatatcgtactcttagacatcatgttaccaggcagagatggcatggaagtatgtcgcgaagtacgtaaaaaattcgaaatgccaatcatcatgttaacagcgaaagactcagaaattgataaagtattaggacttgaacttggtgcagacgactatgtaacaaaacctttcagcacgcgtgaacttatcgcacgtgtgaaagcaaacttacgtcgccattattcacaaccagctcaagaagtgagtggcgctacaaatgaaataacaatcaaagatatcgtcatctacccagacgcttactcaattaaaaaacgtggtgaagatatcgaattaacacatcgtgaatttgaattattccactacctttctaaacatatgggtcaagtaatgacacgtgaacatttattacaaacagtgtggggttatgattatttcggtgacgtacgtacagttgacgtaacgattcgtcgtttacgcgaaaaaattgaagacgatccatcgcacccagaatacattgtgacacgtagaggcgttggatacttcctccaacaacatgattag

SEQ ID NO: 1980 - DNA, 1833 bp, Staphylococcus capitis
atgaagtggcttaaacaattacaatcccttcacactaaactcgttattgtttatgtattactgattattattggtatgcaaatcatcggtttgtattttactaatagtttagaaaaagaattactagataattttaaaaagaacataacgcaatatgcgaagcagttagatgttaatatagaaaaagtttataacgataatgacaaaggtacggtaaacgctcaaaaggatatccaaaaccttttgagtgaatatgccaaccgtcaagaaatcggagaaattcgcttcgttgataaagaccaaattattatggctacgacaaagcagtctaaccgtagtctaattaatcaaaaagcgaatgacggttccgtccaaaaggcactttctctcggtgaaaccaacaaccacatggtccttaaagactatggtagtggtaaggaacgtgtctgggtttataacataccagttaaagtcgacaaacaaactatcggtgatatttacatagaatcgaaaatcaacgacgtatataaccaactcaataacattaaccaaatctttatcgtcggtacagctatatcattattcatcacagtaatcctcggtttctttatcgcccgaacgattaccaaaccaattaccgatatgcgtaaccagactgttgagatgtctaagggtaactatactcaacgtgtgaagatttatggtaacgacgaaatcggtgagctcgcacttgctttcaacaacctatctaaacgtgtgcaagaggcgcaggctaacaccgaaagtgagaaacgccgtctagattcagttatcacacatatgagtgatggtatcctcgcgacagatcgccgtggacgcgtgcgtattgcgaatgatatggcgcttaagatgctcggtctcgcgaaagaagacgttatcggctattacatgctcggtcttcttaaccttgaaaatgaattctcactagacgaaattcaagaaaataatgattccttcttattagatattaacgaagaagagggcattattgcacgtgtcaactttagtaccatcgtgcaagaaacaggattcgtcacaggttacattgccgtgttacatgatgtaacagaacaacaacaagttgaacgtgaacgtcgcgaattcgtagcaaacgtttcacacgaactacgtacgccactcacatcaatgaacagctatatcgaagcactcgaagaaggcgcttggcaagatgaaagccttgcaccacaattcttatccgttacacgtgaagaaacagaacgtatgatacgactcgttaacgacttactccaattatccaaaatggacaacgagtcagaccaaattactaaagaaatcgttgacttcaacatgtacattaataaaattattaatcgacatgaaatggcagcgaaagatacaacattcgtaagagaaatcccacaacaaacaatattcacagaaatcgatccagataagatgacacaagtattcgacaacgttatcactaacgcaatgaaatattcacgtggtgataaacgagttgagtttcatgtgaaacaaaatgcactttacaatagaatgaccattcgtataaaagataatggtattggaattccaatcaataaagtagataaaatattcgatagattctaccgtgttgataaagcacgtacacgtaagatgggtggtacaggactcggtctcgcaatttccaaagaaattgtagaagcgcacaatggacgcatctgggcaaacagcgtagaaggtcaaggtacgtctatcttcatcacacttccttgtgaaatcattgaagacggtgattgggatgaatag

SEQ ID NO: 1981 - DNA, 1338 bp, Staphylococcus capitis
atgaatagtaaagaacatattaaatcaattatcctaggtcttctcgtactcatcagtatcgttttgacatacttggtctggaactatacaccagacctcaataatgttactaactcagatagcagtaaaaagaacgagccgaaaccactaagtaaacctatgacagcaagcatggaaggcacggttacaccatttcagatcattcattcaaaggatgataaaccacaaggaacggtctcaacaggtgatgcacttgatagcattacgaagccattgaagaatcaagaagttaaatctgtgtcacatatgcgcggagatcataaccttgttataccagaactaagtaatgactttaccgtgctagatttcacatacgatttacctttaacgacatacttaagtcaggtattgaacatcgatgcgaacgtacccaaccactttaacttcaatcgattacttatagaccaagataatgacaatcacgtggtgctttatgcgataagtaaagaccgtcacgaagtcgtgaaattaaaaacatcagcacaaggtaaaaatatagatagcgccttagacagtattaagtcagatatgcaaccatatactgaaatcatcactaataaagacactatcgataaagcaacacacgtcttcgcgccaagtaaacctaaagacttaaaatcatatcgtatggtcttctcaacaatgaacgtcgaacgaatgaattccattctctttgaagattcaactatcgtacgaagctctcaaagtggtgcgacaacatataacaacaacacaggcgtcgcgaactatgacgataacagtgaaatgtatcattataaaaacctatctgaagacgcgaaaagctcaagcaatatggaagaaacaattccaggtacctttgaatttatcaacggccatggtggattccttaacgaagattatcgtttattcagtacagataataagacaggtaaactgacttaccaacgcttcttgaatggttaccctacattcaacaaccagaatttaaatgaaattcaagtcacatggggtaaaaaaggcgtcttcgattaccaacgctcattacttaagagcagcgttcaactgaacagtgaagaacctaagaccttacctacagccgaatccgttcgttcagcacttgccaataataataatattgactttgaaaaggtaaccaacattgcagtcggctatgatatggatgacaaaccagataaagatgatatagaagttcaacgcaatagtgaattcacaccacaatggtacgtagaatacgatggcaattggtacgcctataaagatgggaggcttgaataa

SEQ ID NO: 1982 - DNA, 789 bp, Staphylococcus capitis
atgaattggaaacgcacaaagacgctattcattttcgtatttattctcgtcaacatcttactcgtcatgatatacatcgataaagtcaataaagcacagattaatgacgcagaaagtgggaacaacgttaattttcaacaagaagaaattaaagtccctacagacgtacttaataagaaagttaaagatacgaaactcgcacaaatcacagcacgctctaaagacttctcgagctacgctaaagaacattcaagcttagatacatcagacaaaaacaagacattagaaggcgatatagacaaaactgtgaaagtaagcgataagaacctaaaagacattaaagattttattgcagatagtatttataacggtaaacaatatcaattgagtgatctaagttcagataaaatcacttacgaacaaacctttgaaggttatcctattatgaataacaataaagcccgtttaacctttaatttaaatgatggaaaagcaacaagctacaaacaaacagcgatgaataatatccatatcgcagaagggtcaaatagtactaagaaacaagtcattagcccacgtaaagccgtcgaagcactttacttcaacagatatctaaaacgaaacgaccaagtcatcgacgcacgcctaggctattactcagtcgtcaaagaaaccaacgtacaattactacaacccaactgggaaattaaagttaaacaccacggtaaagacaacatagaaacctattacgtcgaagccaccaccaaaaacccaaaagttataaattaa

SEQ ID NO: 1983 - DNA, 792 bp, Staphylococcus capitis
ttgatacgtatgagtgtattagcaagtggtagtacaggtaacgccacttacgtagaaagtgagaaaggtagcctacttgtagacgtaggtctaaccggcaagaaaatggaagagctatttagccagattgatcgaaatatcaaggatctaaacggcattctagtcacacatgaacatatcgaccacatcaaaggacttggagttctcgcacgtaaatataaccttccaatttatgcaaatgagaatacatggaaagccattgaaaagaaagatagccgaatcccaatggatcagaaattcatcttcaatccatatgaaacgaaatctatcgcaggattcgatatcgagtcattcaacgtctcacatgacgcgattgacccacaattctatattttcaacaataactataagaaattcacgatactgacggacacaggctatgtgtcagaccgtatgaaaggcatgattcgtggtagcgatgcattcatgttcgagagtaatcacgatgttgatatgttacgcatgtgtcgctatccttggaagacgaaacaacgaattttaagtgatatgggacatgtgtctaacgaagatgctggtctcgctatgacagacgtcatcacaggtaacacgaagcgtatttacctatctcacttatctcaagacaacaacatgaaggatcttgctcgtatgagtgtcggccaagtgttaaatgaacatgatattgatactgagaaagaagtacttctctgcgatacggataaagctcaagctacaccaatttatactttataa

SEQ ID NO: 1984 - DNA, 480 bp, Staphylococcus capitis
atgaaaattacaatcctgtcagtaggaaaactaaaagaaaaatattggaaacaagcaatagcagaatatgagaaacgactaggaccttataccaaagttgaaattatagaagttccagatgagaaagccccagaaaatatgagcgacaaagaaatagaacaagtaaaagaaaaagaaggccaacgactactcgccaaaatcaaaccacaatccacagtcatcacattagaaatacaaggtaaaatgttgtcatcagaaggattagccaaagaattacaaacacgtatgacccaaggacaaagcgattttgtttacgtcataggtggatcaaatggcctacaccaagatgtcttaaaccgcagcaactacgcactctccttcagcaaaatgaccttcccacaccaaatgatgcgagtagtcttaatcgagcaaatctaccgcgccttcaaaattatgcgtggtgaagcatatcataagtga

SEQ ID NO: 1985 - DNA, 2343 bp, Staphylococcus capitis
atggctccaggaactggaaagacatttactagtttgaaaattgctgaggctcttgcaaatgttaataaagaacaatacaaagtgttatatctagtacctagtattcaacttttaacccaaacattgagaggttggtacaatgatactgatttatcgataacaagtatggctgtaacatcagatcgtgatgcttcacggggagatgacggaaccgaagatattaaagcaactgatataggttatcctgctacaacttcatcaaataaattgttgaaaaattatgatgaaataaaagagagtaatagtaaagatgatttgttggttatatatagtacatatcatagtatagatgtcattgctgaggcgcaaaaacaaggatttcctgaatttgatttaataatagcagatgaagcacatagaactacaggagctcatgaaaataataaggatagcagtttttttacaaaagttcatgatgaaaaaattattcaaggagctaaaagattataccaaactgcaacacctaaaatgtatggtgaagatgcaaaaagaaatgccaaagaaaaaagtataattatatcatctatggatgatgaaaaaaaatatggtgaagtattttatagaatgggctttggccaagcagtatcttatgggattttaacagattataaagttatggttttagctattgatgaagccgcaatacaaaaagatatgcaacgtgctttgtcagatccagaaaatggattgaatattgatgatataggacgaattgtaggtatttggaatgggatgatgcgtagaaatggttataaaaatcctaaaaaaagtagttcatttgatgaagcaccattagagcgtgccattgcttttactcgcacaatcgaggattcaaaaaaagtctcacaccaattcgaaaaagtagttaatgaatatctaggacatcaagggaatcaaaatacgatacatttatctatgaaacatgctgatgggtccatgaatgctctacaaaaaggaaatactcttgattggctagctgattctgagaaacccagaaatgaagcaagaatagtttctaatgtacgatttttaacagaaggtattgatgtgccatctttagactctgtcatttttctagcaccaaaaaaatctcaagttgacattgtacaagctgtgggacgaattatgcgtaaatctgaaggtaaagaatatggttatataatcttacctgtagtaattccgactggtgaaactgcagaaacagttttagataataataagaactatgaagttgtttggcaaattatcaatgcattgcgttcagtagatgaacgctttgaggctatgattgacaaaataaatattgctaaaccaaaacaattaaaagtgataggcgtaggtagtgctcctaaagaaaataatgaagaggttaatactgataataaatctaaacatgttaaccatgtacaacctaaatttaattttgaatgggaaaaatttgagaatgctatatatggtaagatcgttcaaaaagttggaaatcgtaaatatttagaaaattggtcaagtgatgttgctaaaattgcaagacgtcaaattgattggattaaaaataaaataaaagataagcaagatcccataaaaaaagaatttaataattttgtcacttcattacaatataatattaatgaaagtattgatgagaatcaagcagctgaaatgttatcacaacatttgattacaaagccaatatttgaagctttgtttgatcaatatagcttcgtaaatcacaatccagtatctttatctattgaaaacattgttaaagaactagaaaaagctggattttctaaagaacaagaaaatcttcaaccattatatgagtctattagaatgagagctgaaggtatcgagcgagctgaagataaacaaaaatttattatttctctatataataaatttttcaaaacagcctttgaatcaactactaaacgtttaggaatcgtctttactcctattgaagtggtagattttattattaaatctgtcgatgacgtgatgaaaaaacatttcaacaagtcattagcggatgaaaatgtacatatattagacccatttactgggacaggtacttttatagtacgcattttatcttatttaaaagataaaatagatacgaaagagattactttgtctgatattacacgtaaatatatgaaagaattacatgctaatgaaatagtgttattaagttactatattgctgctattaatattgaaacaactttcgatgacattaataaaacgactcaaattatataccttttgaaggtattgtattaa

SEQ ID NO: 1986 - DNA, 1758 bp, Staphylococcus capitis
atgtattttagttctaataatgaacgtttaaggaagcaacaaaagtcagatatcacaatcataattggaaatcctccttattctgctaagcaaaaaaatgaagatagtaatcaagagaaagttaattatcctaaactagataaatctctacaaaaaaaatggataaaaagttcaactgcaactaataaaaataatttatttgattcttatattcgcgcacttcactggtcggaaaaacgtattaatgggaatgggataattggttttattacaaataactcatttattgatggtaatgcaatggacggcatgcgtaaatctttactaaaagaattttcagatatttatattcttaatttaaaaggtaccattcgagataagacaaaaaaacaaagaaaatttgaaggtggaaatatatttgatattatgaccggtgtaactattgttttactaataaaagatgaatcacatgtaggtgaaggagtacttcattatttagatattgggaacaatctatctaaaaatgaaaagctttcaagattagctaattggtcaagatttaaaaatatagaagataaatttaaaattattaaacctaatgatcaaggagattggattaatcagcgtaattccaattttaatagcttaattcctttaggagaaaagaaatctgaaaatgcattatttattgattattcaggtggaattaaaactgggcgagatgaatgggcttggggattttctagagataaagttaaaagaacaatgcaacgtagtattaattattataataaacatattggtaatacttcgctatattccaaggatatagaagagctttcttggacccagtcattaaaaacaagatttgaacgcaaagaaaagcaatattttgatgaaaaccgtatttatatcggtatgtatcgcccttttactaagaaatatgtttattatagtaaagagtgggttgatagacagtatcaaatgtctaaaatatttcccgaatcttactctaaaaatatattaatatctttatctaataaaacaaaaggaaaagactttagttcattattattaaatgtgttacctgatgttaataattttagtggtggttctcaaaatttacctatgtatttatatgatgaatttggaaagtattctgcaattcgaaacaatatattggagaaactagatgatttatcagaaaatgaaatactattttatgtgtatggtgtttttcactcaaaagaatatgcaaacgaatattttgatgatttatccagggaatttcctcgtttacccaatttaaaatataagaagaaatatgttgaaattggacgtaagcttgcaaatttacatttgaattatgaaaatcaaccaaaattagaaaatattataatagatattaattatcaaaatcttgattatcgagttaaaagaatgaaacacccgaagaaacgtaatgaaaatggaaaattagttactgattattcgacaataatatttaatgaatcaataactattaaaaatataccagaaaaagcatatcaatatttagtgaatggtcgtcctgctattgaatggattatgaatcaatatcaaattaataatgatagaaaatctggagttatagatgatcctaatgaatttagtgataatcccaaatatattttaaatttgctaatttctattataactgttagtgtcgaaacgctgaacttaattgatgaacttcctaagtttgaaatgagtgaatag

SEQ ID NO: 1987 - DNA, 222 bp, Staphylococcus capitis
atgaaccatgaaaccacacactcagactggcgaacggttgctagttgcttagcatcgcatgattacgtttcaatagtaaaaggtctggtgcatcatttcacagccatcgatgacgaggaaatacttgataaaatctatgaagagtttataaatgatgactctattacaacagtacttaacaatgatttacaaacaattattaatcattatctatcaaaatga

SEQ ID NO: 1988 - DNA, 504 bp, Staphylococcus capitis
atgaatacaatcaaaagtacgatacacacagaagccatttttagcgacgatgaacaacaccgctacttactcaagaaaacatgggatgaaaagaaacccacatgtaccgtcataacgatgtaccctcatttagatggcgtactttccctcgatctaacaaccgttctaattcttaaccaattagcgaattctgaacaatatggtgctgtatatcttgtaaatctattctctaatatcaaaacaccagaaaacctcaaacatatcaaagagccatacgatgagcacacagatattcacttgatgaaagcgataagcgaaagtgacacagtgattctagcttatggtgcttatgcgaagcggccagttgttgtcgaacgtgttgagcaagtgatggaaatgttgaaacctcataaaaagaaagtcaaaaagcttataaacccagcaacaaatgaaatcatgcatccactcaatcctaaagcacgtcaaaaatggacattgaaataa

SEQ ID NO: 1989 - DNA, 312 bp, Staphylococcus capitis
atgaaaatcaatcgatacatcacaagaggcattagtgaacaactatctctagagctccaaatcttactttggaatatggtaaaagaaagagattatcaaggccatacagattacctacacattttcaaaatacaagaagatgataatatgttgtcagtcatacatgaacaagaacaacccgcatacaaattggaatatcactatacaaactatgtaaaaaatcaaaatgcattacctaagaaagtctacgtcattcgtgaagatgacgtggacattttttattatgtaatgcttttacccgaagaatactaa

SEQ ID NO: 1990 - DNA, 351 bp, Staphylococcus capitis
atgaaaacaactactcaagaactcaaacaatatatgactcgtttattccaattatctaacaatgaaacatgggaatgtgaaacactggaggaagcggcagaaaatattctaccggaacgttttattaataattctccacttgcgcatcttacacttgaaacttatacctactataatgatgagctacatgagctaagtatctatccatttcttatgtatgccaacaaccaacttatcagtgtcggttacttggaccattttgatatggattttctatacctcacagatactaaaaatacgattatcgatgaacgacatctactaaaagaaggagggaatgaccatgaataa

SEQ ID NO: 1991 - DNA, 684 bp, Staphylococcus capitis
atgaaaaaattatctgtaatattgatgactagcgctttattactttcagcttgttcacatcaatctgaaagccacaatgacaaaaatgaaagtaaaactgcacatacaaatcaagcccaaaataacgataacaaccaaaagaagcatcgaaaagttgttaaggatggtcggacgtatgcagatggaattttaattgtaaacaaaaatattgatttaccctcctcttataatccaggtgaaaatccaaaagcacaaaaagccttaaaacaattatttgatggtgcacaaaaagatgatattcacttatataaaataagtggatatagaagctatcctacacaagttaagttatataataattatgcgaagcgtgatggtaaaaaagcagcagacaaatacagtgcacgtccaggctattctgaacaccaaacaggtcttacatttgatgttggtggcgtcgattcaaataaaaatctatatactagttttggtaaaactgaggaaggacgctggatagctaagaatgcccataattatgggtttattataagatatcctaaaaacaaagaaagcatcacaggatatcaatatgaaccttggcatttacgttatttaggaaaaaagaaggcgacaaaagtgtacaaatctggtgaaacattagaggaatttgtaggcttaaaatga

SEQ ID NO: 1992 - DNA, 1173 bp, Staphylococcus capitis
ttgactcctgttgaaatcactaataattcaaaagcacaacttgatgaaggattgaaccctagaggagcagtcgtgacaacaacgaatggacaaatattatataagtatcataaggataagaaagttgatcctgcatcaacaacaaagttgatgacaatgctagttatatatgacgacattaatcatagtaaagtgagcttaaaagacaaggttaaaatatctgagagatatcaaaaaatgtcacaattacctaatttaactacctttccattaaaaaaagggcaaacatatacgattgaacagttactaaaacaagctgccttaaattctagtaatgcagcaacgctagtattagcagaacatatagatggagatatttcaaaattcactgatagaatgaaccgtgaagcgcaattattaggtatgaatcaaacgcactttactaatcccagtggtgccaacaataaaattataaaaccctatgaacccaaaaaatataaggatgaaactagctcatatacgacagcaaatgatatggctattttaacaaatcacttattacgcaagtatcctaatattttaaaaatgactcaattggaaacagatactcaatacaatcaacaattacataacacgaatttatcactgcctcatcaatcactcggcatgaaaaatgtggatggattgaaaacggggacaagcaaagaagggtataatttagcattaaccgctaaaaaagatcaattaagagtgaatacaaatttatttaatatccagccatatcctagtgaaaaagctaaatttgcacgccacaaggttgctaacgcactcacccaaaacgcatttaaaaattatacgtatcgcaaagtgatatcgaaaggtgcacatcaaattgatggtaaaacttacaacgtgaaagaagacttatatgatgtagtacctaaggataacagtaaatatgaattaaaaatatcggaaaaaaaccaactatcagttaaatacaatcgacaatttactaaaggggagcatattcctagcgttaaagtagaaccaaagtttaacttcttgtctgtattatttcaaatcactttagcaattgtcggtataatattggtttctgtcattgttattatagcgatcaaagtgtacataaaaaaatatagtaaaaattaa

SEQ ID NO: 1993 - DNA, 1629 bp, Staphylococcus capitis
atgcaacaacttaaaacaaaacgtgtcggtatctatgtgcgtgtatcaacagaaatgcaaagcacagaaggttatagtatcgacggacaaatcaatcaaatcaaagaatactgtgacttccatcattttgaggttaaagatatatacgctgaccgtggtatttcaggtaaatctatgaatcgacctgagctccaacgtatgttgaaagatgcaaaagaaggcaatatagattgtgttatggtctacaaaacaaaccgattagctcgtaatacatcggatcttctgaaaatcgtcgaagatttgcataaacaaaatgtagaatttttcagtctatcagaacgtatggaagtcaatacttcttctggtaaactcatgttacagatacttgcgagtttctcagaattcgaacgtaataacattgtcgagaacgtatttatgggtcaaacgagacgtgctcaagaaggctattatcaaggcaatttgccgctaggctatgacaaaatacctaatagtaaacatgaactgatgattaatcaacatgaagctaatattgtgaaatatatattcgagtcctatgccaaaggacatggctatcgtaaaatagccaatgcattgaatcacaaaagttatgtcactaaaaagggtaaaccttttagtattagttctatcacatatatattagctaacccattctatatcggcaaaattcaatttgcgaaatacaaagattggagtgaaaaacgtcgtaaagggctgaatgataaaccagtgatagctgaaggtaaacattcccccattattaatcaagatttatgggataaagtgcaaatgcgtaaaaaacaagtcagtcaaaaaccccaagttcatggtaaaggaacgaatctgcttacaggcattattcattgtcctcaatgtggcgcacctatggcagcaagcaatacaacgaatacacttaaagacgggaccaagaaacgtattcgttactattcatgtagtaattttcgcaacaaggggtccaaagtatgttcggcaaacagtgtaagagctgatgtgattgaagattatgtgatgaagcaaatacttgaaatagtcaaaagtgataaagtcattcaacgcgtagtaacacgcgtcaatcaagaaaatcaagttgatggcgctgcacttcatcacgatattgcttataagcaacaacaatatgatgaagtacaaaccaaactaaataacttgattaaaaccatcgaggataatccggacttaacatcagtaatcagaccaagtattcaaaaatatgaaaagcaacttaatgacattatgagtcaaatcaatcaactcaaaaaacaacaaaatgaagataagtctttatttgatgccaaacaaattggtgaaatattgcgacacgtctttcataatattgagaaaatgaaaaaatctcaacttaaagcactgtacttagcagtgattgatcgcattgatattagaaaagatagcaatcacaaaaaacagttttatgtaacactcaaacttgataatgaagtaattaaacaggttttcaatgatattcctctcgacgaagtgctccttagcacttcgtctttatttttaccccaacctttttatttaacaatataa

SEQ ID NO: 1994 - DNA, 1350 bp, Staphylococcus capitis
atgaaacaagtcataggctatttacgtcaaagtacgatgaaacaacaatctcttgcagcacagaaacaggctatcgaagcaatagccgaaaaacatcatattcaacatatcaacttttatagcgacaaacaatcaggacgcaaagataatcgtagtgggtatcgacaaatgacgcaattaattcaacaagggcaatgtgacatattatgttgttatcgtcttaatagattacatcgtaatctgaaaaatgcattaaaactcatcaaattatgtcaaacataccatgttcatatcttaagcgtacacgatggttactttgatatggatcaagctttcgaccgactcaagcttaatatcttcatcagtttagccgaacttgaatcggataacattggagaacaagtcagaaatgggcttcaagaaaaagcaaagcaaggtagattgattacaacccatgcgccctttggttacgaatatcacaacggaacattcatcatcaatcaaaatgagtcaccaacggtaaaggctgtattcaattattacattaaaggtcatggttataagaaaattgcacagttattagaagaagataacacgtatatcaatcgacaaccctatcaagttcgtaacattattatcaatcctaattattgtggtcgtgtcaacaatcaatatggtcaattcgacaatatgtttccttctattgtttccacaagtatatatgagcaagcgcagagacttcgattgcaaaaacaaaccaaacagacaccttcggataatcaactcaaacaaaaaatcaaatgcccatgttgtaatgcaacacttacaaatatgaccattagaaaaaagaatcatacattacgttactacgtctgtcctaaaaacatgaatgcttcacgctttgtctgtgattttaaaggcatcaatgcacaaacacttgaagataaagtattagaagtgtgccgagacttttatcaaaatcaacgcatctacacaaaaattaaaagtgcgattgacaaacgcatcaaaagacaaagaaacatagaaaaacatcacacattgactcaagaacaactgatagaaaagttggcacaaggcatcattgatgcagaaacgttcagagaacaaacgcaatcattacgtcaacaaccgcaacgcactacatctatcaatgggcatcaaatacaacacaccattcaaaatattattcaaaaacgtttcacgttaaacatattgtacccctatattgaaaccattcacattacgaaagataaaaatcttataggaatctatttcaaaaatgaaccactcaatatcgtcaatcaaaccatgcaatcatcgattgcataa

SEQ ID NO: 1995 - DNA, 1794 bp, Staphylococcus capitis
atgactcaaactaacccttcatttaatccttcaccacgatacaaatcaaaaaaaggttggtataaagacaagcctcccaaagaaaaaggaggaatgcctattgaagttgaaattgcaggtcctatcgttatcgaaaataaatttattgaccctaaaactaacactgaaaaagtaattattacagacgaggatcaaaaagtaattgttgaatctagtgatattttaacaacacaaaaactgccctctttaatgaaatatggatttagtattaatgaaaaatatacaaaagatttaggttatgcgttgcaacaaatgcgcaaccaattacccatttcctacttatatgaaggggtaggtatactggaaacaccgtttggtcctattgtatcgttaaatgaaatctatactactacggaatttgataataaatctccatctgacgccatttgtgagaatacttatgacttagcacctaggggaacatttgataattggtttaacatgtatattgacgaggttaaagatcatcttcttttagaattgacagtcatatttgggatttctgccttagtgacaagttttctgaagcataaacatgaaatcgaatttgcaggaattctctttagttttacaggtcaatcctcaaccggtaagtcaaccgcagctgctttagctgtatcagtcgctggtaaccctaccaaaggtaatgaaactctttttagaagttggaatgccacacgtaacgcacttgaaggttatttgagtaacaattatggcgttcctatagtatttgatgaactttcatctacgacacttaaagataccacgggtttgttatattccatcgctgaaggtcaaggtcgtcaacgttccaatgtacacggagaagttaaagcgcctaagaattggggtacatctgtgatttcaacctcagaatacagtatatttaatgattctgctcaaaatgatggtttacgtgtgagaaccatcgagattaatgaacaattcactacaaatgcgaccaatgctgacaatattaaaaaagctgtagcactaaactatggtcatgttttaccgttagtagctaaatatcttataaatcgtgaagatgaagtcattcaatggttttacaaggaagtagattggtttgaagctaaattgaaagatgataaaagcaacacaggcaatcgtatgtttaagcgttatgcagtcattacaacatctgcgaaaatattaggtcgtgttttatctacagatattgatatcgctaaaataagagactactttattgattatcatactcatacagtctctgaacgctcattagctgataaagctatcgatgtcatcattcaatttgtagcacaaaacagaggtaagttttcagatgaaggtgctttgaaaaatatgtttgagaactatggattaatctcattaaaagatgaccatatcgaagtaaaaatgattgcgaacgtttttaaacatatgctaaacaatcatcaatttcaagatgttaataatgttgtcaacgccttaagagataaaggtttcatattagctgatcgtggacgccaaacaactaaaagaagtgtcaaagataatagcggtaaaaaacaatcacttgtattttaccatctaaaattagatgtagagtttgcgtctatcctcggattaactaaagataagtcgttacttcaaaattggacaccgtcaaatgataacaaagctgcgaaagaactttttaaatccgctaatgaggggataggcccttcaggagttcacgaagatttctga

SEQ ID NO: 1996 - DNA, 297 bp, Staphylococcus capitis
atgccttacaaacaggaagatgattttaaaatgttaaaaaatagaactttaggtattgcatttaatacatcggagggacaaacatttacatttcatgacttgaacagtcgtgcaaatgtacaatgttcaaaagctgtacaacaaaatgttggacgttggttcgcatattttgtaaaacatgcgccacgtgttccatttattattatcggtaaggatactcacggtcacttagtttatcttaaaacaggtcctaatccacactataacagcaacccttcgaaaggaggtgttcgctaa

SEQ ID NO: 1997 - DNA, 1578 bp, Staphylococcus capitis
gtgtatgattttttagaatacttacatcgttattgtataaaatcaattaataattgggaggctgttgcagacatatcatgcaaagttgaacgtggaaatgttagtacgggctattatgttaaacaagatagagttgtaatagatgataatgatatacctctaatcattaaaataagtggaagttatatagcagcagatatattagttactagatatttaggtggaatgggtgaatttataaaggtatcagaattagataagtcgagttattacgaatggtttatgtttgttgaagaaacaagaagaatatttagaggtacagaaatagtttatcaatttttaaaatatctatttacgcatacctatgaacataaaaatgaagaacaaagaataaaaaaacatatgaaaaacattatcatagataaccaatttagaggggggcatagtaatgatatcgttcgtttagatatgaaagatgataatgtgttattttacaattttgatatatacgatacaaatattctttatgaagaaatagacgaggaaaaattacttagaattttagatgaaataagtaatactgataattacaaagtgctatttaacattgtaagtgagaaccaaaagaaattttggaaatcaaatattaagccaatagtaagtgaatgtttagaaggtatagatacgataccatttgatttatatgtttatgtaaataagtatataagtaataaaatatttgactgtgataactatttaattactaaaaatgaggttgtggatttttattttaatcatggtagtgattttaatagtttcaagatgggacagaaatggacaaagtctaaatttaatcaggaaaataaacttaaaatacacgaatatattattgcagtaacttatgtgaatttattaaatcattcatatatgaaatatatcaatgctgaaaattactatgaccctagcaaaaaaataacaaaaggaatgaaaaataactatcataaatttacagattcattcagtgattttgtagaaatggtggacgatataacatggagaatccgtgattcgttttattatattggaggattcaaaaatcaagaaattaacgaagaggagcatgaatatatcgaacaattaattaaattttttatattatctaaattcggctatatgaatgtagaaaatcactttgattatattgagaacttaaatacgcttaataatgaattaacgactatattaaaaagtgaattcgcgcatatttcaaatgatatgtataataatttatttagtaatttattcgatgttgtaaatacatggaaaaaagattattcaaataatttttatgataatactcagaatactataactacagaaaagttagatataatatcttcatttataaaacaatatgataaaccatttgaacgagacgaacatggcaaacacgttaaagcagaagtgtttgaaggtataagtgattttcataagcgtgtaaaagatgaatttgctgcaaatggtgtattattacaattaaggttagaaatgagtgtacatgaaaataggtatgattaa

SEQ ID NO: 1998 - DNA, 1329 bp, Staphylococcus capitis
atgttttttaaacaattttatgataaacatttatctcaagcatcttatttaatcggttgtcaaaaaactggagaagccatgattattgatcctattcgtgacttatcttcatatattcgagttgctgatgaagaaggtttaaccattactcatgcagctgaaacacatatacatgcagattttgcttcaggaattagagatgttgctataaagttaaatgctaatatttatgtatcgggtgaaagtgatgacacattaggttataaaaatatgcctaaccacactcattttgttcaacataatgacgatatttatgtaggaaatataaaattaaaagtgcttcatacacctggtcacacgccagaaagtataagttttttacttactgacgaaggtgctggagcacaagttccaatgggactattcagtggtgattttatttttgtaggagatatcggtagacctgatttactagaaaaagcggttaaagtagaaggatcatctgaaataggcgctaaacaaatgtttaaatcgattgaaagtattaaagacttaccagactacattcaaatttggcctggccatggcgctggtagtccttgtggtaaatctttaggtgctattccaacatctacgcttggctatgaaaaacaaacgaactgggctttttctgaagataatgaagctacctttatcgataaactcatttctgaccaacctgcaccaccacatcattttgcacaaatgaaaaaaattaatcaattcggtatgaatttatatcaaccttatacggtttatccagctacaaatccgaacagattaacttttgatctccgcagtaaggaagcttatcatggtggacatattgaaggtacaatcaatattccatatgataaaaatttcatcaatcaaattggctggtatctaaactatgatcaagaaattaacttgattggagactatcaccttgtttcaaaagcaacacatactttacaacttattggatatgataatgtgtctggatatcagttaccacatgctcaaattcaaacacaatctgttcatagtaaagacataactggtaatgaagcacatgtcttggatgtacgtaatgataatgaatggaataatggccacttatctcaagcggttcatgtaccacacggcaaacttttagaaacagatttacctttcaataaaaacgatgttatttacgtacactgtcaatctggcattagaagttcgatagctattggtattttagaacacaaaggttatcacaacattattaatgtaaatgaaggttacaaagatatacatctttcttaa

SEQ ID NO: 1999 - DNA, 1068 bp, Staphylococcus capitis
atgtcacaatatgaaacaaaacacattaatgatttcactaaaaaggaattagaagaattgggttctaagggtcaattaattgacgttcgacagcctgaagaatttgaattaggacacattaaaaatgctttattacattcagttgaaaatatagagacttttaaacaaagcaaaaataaaacttactatatctattgtaaaagtggtaatcgaagtagaaaagccagtcaatttcttgcacaacgcggatacgatgtggtgaatttagacggaggttataccgcatacgaacaacaacatcataatgataatttatctaaagtaaaagaagatagagaaattaaagataatcgtaagatgttcaattatagtaatctacaatgtccaggacctattgttaatattagtaaagaaatcaaaaacatcgctattggtgatcaaatagaagttgttgtgactgatcacggatttttaaatgatattaaaagttggatcaaacaaactggacatacacttgttagactcaatgattctggtaatgaaattcgcgctattattcaaaaagaagaaaataaaaatatagaagtgaatcacacgaaaagtggaacaacgattgttttatttagcggcgagctagataaagcagttgcagcaatgattattgctaatggtgctaaagccgcaggtagagatgtaaccattttttgcacattttggggcttaaatgcacttaaaaagattcaaagtcaacgcattaagaaaaaaggtattgcaaaactttttgacttcatgcttccaaattcaccaattaacatgcctatttctaaaatgaatatgtttggtttaggcaatctaatgatgcgttatgtcatgaaaaagaaaaatgtcgatgatttaccttctcttattgatcaagcagttgagcaaggtgttaaacttatcgcttgtacaatgagtatggatgtgatgagcattacaaaagaagaactacgcgatgatgtagaatacggtggcgtaggtgcatatattggatatacagaacaagctaatcacaatttatttatataa

SEQ ID NO: 2000 - DNA, 261 bp, Staphylococcus capitis
ttggaatataataaaaagatgattaatcgtattcatcgcatacaaggacagcttaatggagtcattaaaatgatggaggaagaaaaaaattgtaaaaacgtcattagtcaattaagtgcctctaaaagttctattcaacggttaatgggtattatcattagtgaaaacttagtagaatgcgtcaaaatgtctgaagaaaatagtgaagattctcaggcactaattaatgaagcagttgaattattgataaaaagtaaatga

SEQ ID NO: 2001 - DNA, 732 bp, Staphylococcus capitis
atgttagttattggtatcttaggaggatttatttctggattagtcggtatagggggagccattgttatttacccggctatcttattattaccaccattatttggtttacctacttatagtgcttatattgcttcaggattaacttcaagtcaggtgttttttagtacattgagtggatctttaaacgcatataaaaataaaaatttttctagaacgcttatacttaatatgggaagtggaatggtaataggtagtatgctaggtgcaatcttagcgaatttaataaatgttcagtttgttaatacggtttatattattattgcattactagctcttattctaatgtttataaaagttacaccatctactagtcatattaagtttaatcgtctacttttaattacaataggtggtatcatcggtttggtatctggtattgtaggagctggtggcgcatttattattattccagtactacttgttatatttaaattaccaatgaacatggttgttacaaatagtattgtaattgcattcatttcttctattggagcatttatgattaaattattacaggggtatattcctatcaatagtgcaataccgttaattttaggtagtatactatttacacctctaggtatgaaaatgggccagaaaatacctgactatattcaaaaaacgataatatgtattttaatcgtcgttgcaattattaagttgatattttaa

SEQ ID NO: 2002 - DNA, 2064 bp, Staphylococcus capitis
ttgaataataatagtgaagcgcataatcatcaaaatcacatgaatcattctaatcacatgcatcatgataaccatgaatcacataatcatcatagtggccatgcacatcatcatggaaattttaaagttaagttttttgtttcattaatttttggaatacctatcattcttttatcgccactgatgggtgttaacttaccttttcaattcacatttccaggttctgaatgggtagtgttaatattaagtacaattttattcttttatggtggtaaaccgttcttgtctggtggtaaagatgaaattgctgaaaaaaaaccaggcatgatgaccttagttgccctaggtatctcagtagcttatatttatagcttgtatgctttttatatgaataactttagtagtgcaactggtcatacaatggactttttttgggaattagcaaccttaattttaattatgctattaggacattggatagaaatgaatgctgtcggaaatgctggagatgctttaaagaaaatggcagaactgttacctaatagtgctattaaagttatggataatggccaacgcgaagaagttaaaatatcagacatcatgactgatgatatcgtcgaagtaaaagccggagaaagcattccaacagatggtattatcgttcaaggacaaacatctatagatgaatccctagtcactggagaatctaaaaaagtccaaaaaaatcaaaatgacaacgtcatcgggggttctattaatgggtctggaacaatacaagtcaaggttacagctgtgggagaagatggatatctttctcaagttatgggacttgttaatcaagcacaaaatgataaatctagtgctgaattgttatctgataaagtagcgggttatttattctactttgctgtaattgttggcgtgatttcttttattgtctggatgctcattcaaaatgatgttgattttgcattagaacgtcttgtaactgtgttagtcattgcttgtccacatgctttaggcttggcaatacctttagtcactgcacgttctacttcaattggtgcacataatggtttaattattaaaaatagagagtctgtagaaatagctcaacatatcgattatgtaatgatggacaaaactggtactttaactgagggtaacttttctgtgaatcattatgagagctttaaaaatgatttgagtaatgatacaatattaagccttttcgcctcattagaaagtcaatctaatcacccattagctataagtattgttgattttgcgaaaagtaaaaatgtttcatttactaatccacaagacgttaataacattccaggtgtcggattagaaggtctaattgataataaaacatataaaataacaaatgtctcttatcttgataaacataaacttaattatgacgatgacttatttactaaattagctcaacaaggtaattcaatcagctatttaattgaggatcaacaagtcattggcatgattgctcaaggagatcaaattaaagaaagctcaaaacaaatggtagctgatttactatcaagaaatattacaccagtcatgcttacaggtgacaataatgaagtggcacacgctgtcgcaaaagaattaggtattagtgatgtccacgcacaactcatgccagaagataaggaaagcattataaaagattatcaaagtgacggtaataaagtcatgatggtcggagacggtatcaatgatgcgccgagtcttataagagcagatattggtatagcaattggtgcaggcacagatgttgcagtagattcaggtgatatcatacttgttaaaagtaatccatcagatattattcatttcttgaccctttcaaataatactatgagaaaaatggtgcaaaacttatggtggggtgcaggttataatattgttgctgtacctttagcagccggtgttttagcatttattggcttgattttatcaccagctgtaggagcaatattaatgtctttaagtacagttatagtagcgattaatgcttttacattaaaattaaaataa

SEQ ID NO: 2003 - DNA, 1434 bp, Staphylococcus capitis
atgtataataaagtttttgcaattttaattataattttttccataataattattgcgtctaatgatactttcgcagaaagtaagaatgatatgatgaatatgaaagaagataagaaaaatacaatggatatgacaaatatgaaacatcatgacgaaagaaagaaattaaattcttcacaaggaaaaaatgaaataatatttcctaaagttgcagagtcaaaaaaagataacaatggttataaaaattatacattaaaagctcaggaaggaaagacagagttttacaaaaataatttttctaatactctaggctacaatggaaatttacttggaccaactttaaaattaaaaaaaggagataaagttaaaattaagttaataaataacttagatgaaaatacaacatttcattggcatggattagaagtaaatggaaaagtggatggagggccttctcaggttataaaaccaggaaaagaaaaaactataaaatttgaggttaatcaagattctgctacgttatggtatcacccccacccctctccaaatacagctaaacaagtttataatggcttatcaggattattatatatagaagatagtaaaaagaataattatcctagtgattatggaaaaaatgatttgcctataataatccaagataaaacatttgtatctaaaaaattaaattattcaaaaacgaaagacgaagatggcactcaaggtgatactgttcttgtgaacggaatagtaaaccccaaactgacaacaaaagaagagaaaatacgtttgagacttttaaatggttctaatgctcgagatttaaatcttaagctaagtaataatcaaagttttgagtatattgcttcagatggcggtcaattaaaaaacgctaaaaaattaaaagaaattaatttagctccttcagaaagaaaagaaatagtaatagatttatctaaaatgaaaggcgagaaaatcagtctggttgataatgataaaactgtaattttaccgattagtaacaaagagaaaagttctaacaaaggtaatacaccaaaagtaagtaaaaaaataaaattagaaggtatgaatgataatgttaccattaatggtaataaattcgatcctaacagaatagattttacacaaaagttaaaccagaaagaagtatgggaaattgaaaacgtcaaagataaaatgggtggtatgaaacatcctttccacatccatggaacgcaatttaaagttttatctgtggatggggagaaacctccaaaagatatgaggggtaaaaaagatgttatatctttggaacctggacaaaaagctaaaatagaggttgtatttaaaaatactggaacatacatgtttcactgtcatatacttgagcatgaagataatggaatgatgggtcaaataaaagtaacaaactaa

SEQ ID NO: 2004 - DNA, 483 bp, Staphylococcus capitis
atgatgaaaaaagataaagacactaatgaccaaaaaagtgagagccatatgaagcataatgatgaaagtaaagttcctgaagatatgacatcgactaatgagggtgaatttaaaataggagataaagtaacgattacagcaggacatatgccaggtatgaaaggtgcagaagctactgtaaaaggtgcgtataaaacatatgcctatgttgtaagttataaacccacaaatggaaatgaaaaagtaaacaatcataaatgggtcgtaaacgaagagatcaaagatgcacctaaagatggatttagtaaaggcgatactgttaaattagaagcaagtcatatgtctggtatgaaaggtgctacagccaatatagataacgtgaaaaagacgactgtttacgtagttgattacaaatccaaagataatggtaaaatcattaaaaatcataaatggatgacaggaaatgagctgaaagcacgataa

SEQ ID NO: 2005 - DNA, 396 bp, Staphylococcus capitis
atgacaaagaaaataatttattttatatgtacaggtaattcatgccgtagccaaatggctgaaggctggggtaaaaaaatcttaggtgatgaatggcaagtatattctggcggtattgaggcacacggtgtcaatccgaaagcaatcgaagctatgaaagaagttggaattgatatatcaaaccatacttctaatttaattgacaacaatatactaaaccaatccgatttagtagtaactctatgtagtgatgctgatcaaaactgtcctatattgccgcctaatgtaaagaaggaacattggggatttgatgatccagcaggcaaaccttggtcagaattccaacgtgttagagatgaaatcaaaaccgccattgaatcatttaaagatagataa

SEQ ID NO: 2006 - DNA, 1290 bp, Staphylococcus capitis
atgacgatattagcaatcactatttttatattaacgttaatttttatcatatggcaacctaaaggtttggatattggagttacagctttaatcggtgctgttattgctatcattacaggtgttgttagcttttcagacgtactagaagttacggggattgtttggaatgcgacgttaacctttgtcgctgttatactcatttcattaattttagatgaaattggatttttcgaatgggcagctatacatatggtcagagcttcaaatggtcatgggtttaaaatgtttgtttacattatgttgttaggcgctattgtagcagctttctttgcgaacgatggagctgcattaattctcactccaatcgtgctagctatggtaagaaatttagggtttaatcaaaaagtcatttttccttttatcattgcaagtggattcattgcagatactacgtctcttccactaattgtaagtaatttggttaatatcgtttctgctgactacttccatattggatttattgaatatgtaagccgcatgatcattcccaatctattctctttacttgcaagtattattgtattatggctatatttcagaaaagttattcctaaccattttgaaattaacaatcttaaaacacctaatcaagccattaaagatccaaaattattcaagttttcatggattgttttatcaatcttactcattggttatatagttagtgaatttattcaaattccagtatcgttaattgcttgtttgattgcgtttatatttactgtattggcctataaatcgagagtagtaaatacaaaacaagttatcaaaggtgcaccatggaatattgtgctcttttctataggaatgtatttagttgtatttggtctgaaaaatgtgggtattactgcattattagctaatatgttatcaactatatcagactatggactgttcagtagtattatagggatgggcttcatatctgcatttctttcagcgattatgaataatatgccgactgtactaatcgatgcaattgctattggacaatctacaacaactggcctaatcaaagaaggcatgatttatgctaatatcattggcgcagatttaggacctaaaatcacacctatcggctccttagcaacattactatggctacatgttttaacacaaaaaggagtaaaaatttcgtggggcacatattttaaaacgggtattgttattacgattcctgttctgtttattacattagttggtttgtacgttacacttattatattttaa

SEQ ID NO: 2007 - DNA, 1731 bp, Staphylococcus capitis
gtggagatggatgctgttaaatacttaaataaattgaatctagataacattgagttaacaaaatatttgttttttactggtaaaggtggcgtaggcaaaacaacgatatcaagttttattgctttaaacttagcagagaatggaaagaaagtagctttagtaagtactgatccagctagtaatttacaagatgtatttcaaatggaattatctaataaattaactaaatatcaacctatacctaatctctctatagccaattttgacccgattgctgctgcagacgattataaagcacaatctatagaaccttatgagggtattctaccagaagatgtgctttctgaaatgaaagaacagttaagtggttcatgtacagttgaagtagcagcatttaatgaatttacaaattttttatccgataaaactttagaacaagaatttgatttcattatatttgatacagctcccacaggtcacaccttgagaatgcttgaattaccttctgcatggacagattatttaaatacaacgagtaatgacgcttcttgcttaggtcaattatcaggtttaaatgataatagagttaaatataattcagcacttgaaaaactacgtaaccaagatgatacgaccatgatgttagttgcgagacctactcactcttctatatatgaaattcaaagagcgcaacaagaattacaacaactgtcaatttctaaattcaaagtaatcattaacaactatatagaagaaagtcacggtttaatttcgagtcagatgaaatcagaacaagataaaaacattaatcattttactgaatggttaaataacaatcttgcttattacgttccatataaaaatcagaaagaagaaggtatagaaagtttaactaatctattaaatgatgataacttaattgaaaatgatgactttattgttgaagatcatccgcaattcaataaattaatcgatgaaattgaaaatagtaaagttcaatatttatttacaatgggaaaaggtggcgttggtaaaacgacagtagcaacgcaattagctacaacgttatctaataaaggatatcgtgttcttttagcaactactgaccctactaaagaaattaatgttgaaactacaagtaatttaaatactgcttatattgatgaagaacaagcattagaaaagtataaaaaagaagtactagccacagtgaatgatgatacaccacaagacgatattgattatattatggaagatttaaaatcaccttgtacagaagaaatagcatttttcaaagcctttagtgacattatggagaatcaagacgacatggattacgtcattgtagatacagctcctacaggccataccttgctgttacttgattctagtgaaaatcatcatagagaattaaagaaaaaatcaactcaaactaccagtaatgttgaaacattattacctaagattcaaaataaaaatttaacacagatgataatcgtaacactagcagaaaaaacaccttatttagaatctaaacgtttagtagaagatttaaatagagctaatataggccataattggtgggtcgttaatcaatcgttagttacgctaaatcaacgtgatgacctttttagtaacaaaaaagaagatgaatcattttggataaacaaaattaaaaatgaaagttttgataattactttgtcataccttatcgaatatcagaatattaa

SEQ ID NO: 2008 - DNA, 348 bp, Staphylococcus capitis
atgttaaatattgaaatatacgaagaagctatgtgctgttctactggagtatgtggtccagaaccggatgaaacactaataaaagcgaaccaaatcaatgaatatttaaagcaaaatcaaatagaagttcaacgttataatatgaataataatccgaatgaattcattaaaaatcaagaagttattcgtttaattcaagaaaaaggtgatgaagttttaccaatcacttttatagaaggcggtatagctaaaacgggcgcttatattacccaagaagaagccgatgaaattattacagttaatcaaatgagaaatggaggatgctgtggtggagatggatgctgttaa

SEQ ID NO: 2009 - DNA, 195 bp, Staphylococcus capitis
ttgcgagtaaaccatgcaagtactttaactgtgggttattttgtaagttatttaaatcttgttatgctatcaagagaaatcaatttaaaagaagctacaatatatatggaaaaggagttctttaaagggaacattaatcagtatggcgaatcaacaaaaaataactataaacaagcaattcaagaattgaagtaa

SEQ ID NO: 2010 - DNA, 321 bp, Staphylococcus capitis
atggaagttatcaaagcaaagactgatatgagtgaagatcaacaatttgacttttatgaaaatatgtttaatgcacttgccgataaaatcagattaaaaatactaaatcaaattagccaaagcttcaataaatcattatgtgtatgtgatttagaagagttattagatataaaacaatctaaactttcttatcatttaaaaaaattagtagatgcaaatgttcttattgctgaaaagcatgggacatggaattattataaaattaatgagcagcaaatacaggttgttttaaatgaagatacttgttgtaagatactttaa

SEQ ID NO: 2011 - DNA, 885 bp, Staphylococcus capitis
atgttagattcaattatggaatttataaaaacatttgtgatgttgttttttgaattattaatactattcatcatcgtgagctttattgtaagtataatccagcagatagtttcagaagaaaaaataaaacactttttaagtaaacctaatcaagctattaattatattttgggaatggcttttggtgcgatgacaccattttgttcttgttctacaattcctatacttgcaggtttattaaattctaaagttccatttggccctgcaatgagttttttaattgcgtcacctttaatgaatccattaatgatatttatgttatgggccttattaggttggaaagttgcaatagtttattttattgtactagcaatctttagtatcttaacaggttttgtattttcaaaaatgaatttagctgaaacttataaaggtgtaaatgttaaaggcgatgggtttttcgctaataaaaatggatctcgttttaaacaagcattaaatgatgcgtgggcatttttatatccaatgcttccttacctatttattggtgtatttattggagcgttcatatatggatttgtacccgaaacatttattactaaatatgcgagtggaggtggcattatatccgtatttattgcttctattataggtattcctatgtatattagacctgaaacaatgttacctatagctgaagcattagcttcaaaaggaatgtcgcttgggacagttgttgctttgatcattggtggtgctggtgcaagtattccagaagttgtattattatcgaaactattcaagaaaaaatttgtaatctcattcgttatcgccattttagttgtagctatttctacaggtttgatagtgaacatcgttatttaa

SEQ ID NO: 2012 - DNA, 129 bp, Staphylococcus capitis
atgggagtcaaagacgtattaaaaaaattaaaacctcaggaacaatcttgttgttctgtagaaattgaagaaaaaaaagagaaaaatgaaaaagagcaacaggataataattgttgttgtaacaattaa

SEQ ID NO: 2013 - DNA, 1896 bp, Staphylococcus capitis
ttgagagagaaattgcaaaaaagtagagaatcgatacttactaagcaaaatactattgagagttttgaaaatgaaattttaaaggaaacaggcaaaataaaaaatagggtttggaatgttaaaaaaaggagtggtaaggatttttcaaaagctttagttggctataagaatagtaaaataaaattcttagatcgatgtattcaaacttataacaaatatagttttgaaaacttggaagcaaaatcagaagatagtttagaaaaattgaaaaaaaagtatgatataagtttttctgaggatattcaactatatgcaaattttaatctcaatgatatgtcaaatattactgaaatagaaaaaacaaatttatttgaaaaagtgattactggaagtcatgaaagtccaataagtcaggttattcaagcactaaaaaacagtgattggattaaacaaggattacattacctagagaaatcaaatcaaaaatgtccattttgtaatcaaagtatttctaaagaaattgaacaagaaattaaagattattttgatgaagaatatgaaaaagatatagaaaaattaaataaaatttatcaaagatataacgcttcttttaaagatattgaaagcaatatattgtttatattagaaacaccaattccctatcttaatataacgaatcttagtagagagttcgaagtatttaagaaacaatatgaagttaataaaaagcaaattgaagaaaaattaaggaatccctcacagaaaaaatatataaaaagcctcactcctattattcaaaatatgaataaaatgattaactcttttaatgaatcaattgaaaaaaataatattgttattagaaataaaaaaagagaacaaaacaaatttgtagaaatgctatggatttattttgttaatgaaactaaggaagaattaaaagagtatattaaatttaaagatggtagaagtaaagctattgataatattaataaaaaaattacaagtttaaataatgaaataaaacaaattaataataaaatagacgaaatagaaataaatattactagtgtgacgcctaccgttaaaaatattaatgaaattttaaaaaagtttgattttaaagggtttaaacttgaagagaatactaaacaaaaagggacatatctcattttaagagaagatggaacaattgctaatgaaacaatgagtgaaggtgagtacaactttattacatttttatatttttactatttagtttatggtagtcatgaaagtacaggtgttacttcaaataaaattattgttatagatgatccgatctccagtttggatagcaatgtattatttattgttagtactttagtaaaaaatttaataagtgattgtagagataataaaaacggaattcagcaaataattaatcttacacacaatatctactttcacaaagaaatcacttttttaggaagtagagataaattttcaccaagtgaagtgatgtttggaattattcgaaaaaaagataatattagttattttgatgtttatgagaataatcctatagaatcttcctaccaactaatgtggaaagaattaagctctgataatatatcaacggtaacgtcgtttaatactatgagaagaatattagagtattactttaatattattggagacatggattacgaaaaatgtattaataaatttgatggaatagataaaattttatgtaaatctcttatatcaggaataaatgatggatctcattttataagtgatgattttgttctagtacatgatgaagataatataaaaaattataaaagagtttttaagtcagtatttgagaagcttggacatatccaacattttaatatgatgacgaggaatatataa

SEQ ID NO: 2014 - DNA, 855 bp, Staphylococcus capitis
atgaagccaataattaaatatcgtggtggtaaatcgaaagagatacctaattttaaaaattatattcccgttaaatttaatacttattatgaacctttctttggaggtggagctacattttttgatttagaacctgatagagcttatatttctgatattaataaaaatttaataaaattttatgaagatttaactaataattactacatagttaaagaagaattaaaagaattagaaataaaatatatagaaaatagagaaatttttttaaagaataaaagaaaaaaccctgaattgaaagttaacgaccctaatgaagaactttattattggattagagatcaatataaccaaaaattgctccctgtttatagttatgctacattatattattttattaacaaaacatcttattctggaatgattcgatataattctagaggggagtttaatgtgccatatggaagatatgctaattttaatacagatttgttgaatgaaaatcatctcaagttgttaagaaaatccaagataaaaaatgaatcttatgaaaaaagttttgatttagcaaatgaaaaagatttcatcttcctagaccctccttatgatacggtattttctgagtatgggaatgaagtgtttagtggagattttaaagaaaaagatcatcatcaattagcacaaaattttaaaaatttaagttcacctgcactcatgattatttctgaaactaagctaattaagaatatatataaaggttatataaaagctagttatccaaaaaactattcagtgaatattagaaacagatttaaatctgaagctaatcatttaataattactaattttaattag

SEQ ID NO: 2015 - DNA, 1710 bp, Staphylococcus capitis
atgggtagatttgaaagtagaactatatttttttccacatctccaagaaatccagaattaattcctaaatatctaagactaataagagaaaaagatttagaaaataaattatacaatgaaactttacaaataaaattttacgatatgttgtctcaagctaatttagcaggagttagtaatggtggtaaatcaaaagataaagcatttgccgggcgagataaattgactagagctcctcaagcattaggctttttaattcctaaaagaaataaacctttaaagataactgaagctggaaatttattaatgaaagaggctctatttgaagatgttatgattcatcaacttttaaaatttcaactaccgagtgcacttcataaagaaactaaaaataaaaatgaaggtagatttaatattaagccgtttttagaaataatcaggctagtttatgaacttgaatatttgacttatcaagagctttcaatatttggtataacgatgacagactaccgtaaatttaatgaaactaaacaagatgttttagaataccgagctaaacgaaaaaatagtagaggaaataaaagcttaaaaaaattttatgaagaaaaaagaaatgaaatatttaaagagctatatatagatatattagataataaaaattacaaagttagagagaatactgaaaattctcaagaaaaatttttgaaaactaaactatcgaattctttagattacactgattcaatatttagatttttaagagccactggtttatttgttttaactaagggcaagtcaatttctatttcaaacgaaagaataaaagaagtacaatatatcttaaaaaatgttgagagagatattgtaagtccagatatctctatagataaatattttaaatatttatctaaccctaatatacctaaattaaaaaatgatgacttacgagaaatacaatttgaaattgaatctaaagggataaaggttgattctgatgatttatatagtcttaaggaagaattaaatagacagagagtactaaaaagggaacaaaagttacttgaaataacaaaaaaattaaaaagaaaagacaaagaagacgttgaagatattattgaaacatattcacaaattataaaaaatgaaattcctgaccggtcagcagttatggaatggaatacttggagagcagcagttatgataaataatggagatataactggtaactttatacctgatgataatggatatcctatttctacagctggcggatctaaaggagatatagtaggagattatggttcttttaatatcctatatgaagttactttatctcaaggaaaaaaacaatatgatatggaaggtgagcctgtcccacgacatgtaggagaattaaagaagaaatctggtaaggatacttttggcttttttatagctgaaaagataaatccagaatcagtatatcatttttatttaaccaccggaacgaattcaaaaatatataatggaaatattagcgtcatacctattaatttatctgattttattcatatctttaagttaagtattgaaaaaaatatacaaccatcggacttcctagatttacataattattcaattaatatgtcgcgagagagtattattaatggtgaaaatgaagaatattggtatgataaagtcatgaaatatattctaaataaagtttcgtag

SEQ ID NO: 2016 - DNA, 2238 bp, Staphylococcus capitis
atggaaaatataagaattagtgatttaaacttatcaaagagcgcccgtaacattctatttaaacaaaatataaaacatgtaaaagcacttattactctaactaacgatgatattaataatttagaaacctttagcgaaaatatgcgagaagaaatatttaattatagaaacaaattaattaatattaataattctaattatagtaatcttgaagaattatttgggagcaattttttagcgcttttaagagcagagaacataaaaaatataaaagagctaaataaaatagatgttaatgaagtgatttataaaaaagcagataatcaattcataatgtactcgcctttgtctaatcgttcaaaaaatcaattaattaaacatggctatgtttataattaccagattgaagatttaacagatgatcgcttggaaaaaattagaaatttaggaacaaaatcaatcaaagaaattcaagaatttagaaatcaccttatttctaaaattgaagaagaacattcaattattcaaacgttgtcaattgaagaagtacggttgcttaaaattgaggaagtacttaaagatagagaaattttaaaaatattaaaaatgaataatatccatttaataggaactttaattgaattgaattatgaagatattcataagttaagagatataaataataaaactagcttaattattaaaaaaataattaaccaattaagagaagaattaaaattatctaagaaggatttatatactttagttattcaaaatccagagttatctattgaagacatcattaaaattaatacacctaaatcaaagtttaatatagctataagatatctgagcggaagcaaatatctaaatgaaatttcaaccaatcatcaaggatttagtaataaggagaaagctataattactaggtataatttaaataatctaaataatttgttatcaagctcttattcaaggctattatcttattcttatgttggcaagaaaaatttaatctctattcttaagaaattgcttcaacaagttgtggtttataataagcatgaaatttttatgggggatacttctagactttattttaaattttcaagacaaaaatttttattaaatttgaaagaagttttgctaaatgacttaattgaaaaatttaatgtaattaaggagaaagaattattagatgagaagatgtcattaactcaagaattagatttattagtaaataataatattgttacggaaaaattaatgaatttagatgtatcaaaactagcagaagatatagcttatatatttataaaacaaagtgaatttttatacgatatagatgaattaactaataaactaagtaatgaatttaaacggattgattgggacattactataaaacaactactagaacaagatttaataggtaagaataaattcggaaaaatattttcaaaaaagccttcgattttgctttatgcagctgaaaacttcgatgctactaaatttgaaatgataagacttagattaaaaggaaagactttagaagaaattggaaaaactttaggtgtaactagggaacatgttagacaaatagtaaaaaagattttagatagtactgatgaggtgtttagagaagatgataattcatattggttcaaaacatataatttagacgcaaaacaatatgcgttattttttagagatgatttttataattatttatccatccgttacaaaaaagggaaccattcatgggaagatatcatttatgatgataaagcctctgttgaattaaaaaagagcgttagaaatgagttgcttaaaggtaaaatcgaattaggtaataaagtaataaatagaaatcgaacagggattatcgattatatattagaagaattctgtcaagatgcagtgcatatttccgatgttttacaactttataatttatttattgaagaacaaggtctaaataatcaagaattcaatatagatattagatacttagaaaatagattaagtgatacttcaagttctgtaagtcaaggtaagaagatatatagatattataactataatcaatatgactgggatagtttttataaaaatataaattttgaagaatggaaagatttagaaatttcttcattgataatttttaaacaatatccaatactcatgaaaagttatgatattagacatgctaatgaattacacaatattattaagtga

SEQ ID NO: 2017 - DNA, 942 bp, Staphylococcus capitis
atgttcgagtatgcaccaattcatattaataattttgtagatttatactatgaaaattatggaataaaaaaacaaacaattaaagctaattatttacaattcatagataactatatatctggtgaaattattaatgtaagttatgattcattaagtaagaaagatattgattatgttcagagaattattaaagatcaagatttcatatttattgaagacatcaaagctgagttaaaatatgaaattaaagaaatacaacttatattaaaatatttaggctataaaatatttagttcttacatattaaaaaatcattatgaaactagtgtaagttattttaataagaatttttacgatcaaaaaaatatactagattttactaatatagataaaagactatggagattaagcacatttacctcttggttattttataaatttaaggaaatgaaaatatttgagttttttccaaaaaaatttataaccatcaaaaaacttgatgagattggtttaacttataaagttttgaatgattttagagaggaagcaattataaaactaagtgaccatagagtgtggtctattaacacactaattgatttaattgacagtgaggatatagatcaatatggttttgaaccattattttatcgttcaattttacgaggcgtagacaatatatatagtaagaagatgggaggtaattatcttttgaaattagatgaagactttagcttaacaagtttaattgaagaagaaataattggagaaaaagtaattgacatctttgatttaactcaaataattaatgataaatatgatgttcaatttaattattctaaattgattgaatcaatcaaacatacaaacatgtattatgatgaaataatggaaaaagtttatttggatttagattactattatgaggagtttgaagcttga

SEQ ID NO: 2018 - DNA, 1227 bp, Staphylococcus capitis
atgaatgaaataaatgaagataatttaattaaaacaggattaacaaacaaattaacagttgatggcattactaaagcatatgatgtttataaaattaaactaaatgaattatattataatgatcaaaacgacagaatagcgacatggattagtaaatacaaagcggaaaatgaattagaaaattttgatttaaatgatattgagtattataacgatataattcacgaatttatcaagaaaagcgatgaaaaagcttttaaaaaaactaaaaataatataaaagcattagaacaaactgaacctgccatcatattaaaagatggtcgaattattgatggaaatagaaggtttacatgtttacgcgaattatcgaaagagaatcctaagttcaattatatagaagctatgataattggcaaggacattcatgaaagtaaaaaggaaataaaattattagaattatatttacagcatgggcgggaagagagagttggatataatccgatagataagttagtgggcgtttataatgatattgtgaaacatcaactaattactaaagaagaatatgccaaaaatactgaacaaagtttaacagaagttaataaaatggttaatcgagcagaattaatggttgagtttttagaatttattgagatgccagaacactattacttggcacgtgagtgggatttagacggtcctttgggcgaaataactgcagtacttaataaaataaaaactgaagaagaccgtatagatatgaaaaatattatttttactagtttgttaaataaacctgacactgatatgacaagatatgttcgtaaaatgaaagatttagttaatacacctcagttcaaaccatttgtcgaagaaaaccgtgaattgagtgaagaagttcttgaaaagtttgaggatgaggaagatgtaacgcttgattttattaataaagagatacgtgggaatgatgacttaaaagaaagttttaaatcaatttatactaaatatcaagaaaaaattaaaaaaagagtgacacttgatgcacctaaaaaacagattgaaaaagctatagatgtattacaaaatattgattttaatattgttcttagattagatgatgaatcggattaccctcaatttttaaattctttggaagaattagaacaagaagtaaatagaataaaaaaagaggtttatggtaatgatacaagttcttatcaataa

SEQ ID NO: 2019 - DNA, 1869 bp, Staphylococcus capitis
atgatacaagttcttatcaataaagataatcaattgattattcgttcaacatctgatgttttaaatcaatttaagaaaaaaacaggatttaaactttatttaagaagctatgttgaaataaattcagaagaattgattatttttagggcggatatctactataaaaacctaaaagaaataattaagagaattaaaaaaattggaagtaaaatcaatgaaaaagtgttagttgattcaaatgttactaattatttagctaatattgattcatacattaactataagtatacagtaggtaatgatattaaaaatgatgatataagatttgatgaccgatatgaagaatttcaaagtgtagtaaataatcagttagaaagaaagttaagaagcaagcaaatgaaagatgcgttttatttgtctatgatgcaaaaagctggcaatttttctgtaccaggatcaggtaaaacatctacagtatatggtatgtatgcatatttaaatgtgaagaaaaatgtaaacagaatcgtaatgatagggccattaaactcattcgggtcatggataagtgagtatcaatcttgttttggaaaaaaaagaaaattaaactacctaaatattaaggatcttaatacatctaatgaaaagaaaatggtacttaaatatgagagtggcaacaaagaattgattcttcttaattatgaaattttaactagattagaagatgaaattaaaaatttaattaataatgaaactttagtagtgtttgatgaggtacatcgcattaagaatcccaaaggggaaaacgcgggagcagcattaagaataactgaaaatgccaaatacatggttactttaactggaacacctataccaaatggatataaagatatttataatttattaaatttgatgtatccagctgattataatcactttttcaattttgaaatatccttattagcaaacccaacaaattcagaagtaaaagtaattaatgataaaattcaaccattttttactagaaccactaaaaatgaattaggagttcctcctactaataacgataaaattataaaagtatcatcaagttcagaagagttgcaactttttaatatattattttctagatataagactaatcagttagccttgtttgctaagattatgcaattggaaagttcgccttcaatgttattagagaaattagatttaaaagagtttgaagaactattagatttgagtggaaaccatgaagatttagttgaatatatagattactctcaagatatcgaagatttagtaaatcaaatagaaatcacttcaaagatgcaagcgcttttatctcttataaaagatattgtcagtcaatctaaaacagcaatcacatggtgtatttttgtaaaaacaatgtatgatttaaaacattatttaaattctatgggtattagagctgaagttatttcaggatctgttcatcaagaagaacgtaacgagataattagtagatttaaaaataaagaaatcgatattttgattacaaatccccacactctggcagaatcggtttctttacatcagacttgtcacgatgctatttactttgaatatagttacaatttagttcatttattgcaatcgaaagatagaattcatagattaggattaaaagatgatgattatacacaatattattatttccaacaaaattactcgttagaaaatggcaattattcgttaggtgaaagaatttataatagactatctgaaaaagagcaattgatgttggatgctattgataagcatgaattagaaatattacctacggaggatgaagatctagtattcttctttaaaaacgttatagattaa

SEQ ID NO: 2020 - DNA, 990 bp, Staphylococcus capitis
atgaggtatttgaactggccacgcaaatgtttaaccactacattcctaattgtaagcagtttattattagcattttccacaattacacatgctaatgaaagtaagtctgaagacagtcttaaaattacaacacataacgtttatttcttgcctacagcattgtatcccaattggggacaatcgcagcgcgctgatttaatttcaaaagctgattatatacaaggtcaagacgtcgttatttttaatgaattattcgataaaaaagcatccaatcgtcttttaacaaatttacaatctcaatatccttatcaaacgcctattgttggtaaaggtacagacggttggcaacagacttcaggtacttatagagaagtaaaaccagtgagcggtggcgttggtattgtaagtaaatggccaatcgtcgaacaagaacaacatatttacaaaaaggggtgcggcgctgataaagctggcaataaaggtttcgcatacattaaaattaataaaaatggtaaataccaacatataattggaacacaccttcaagctgaagatccaatttgtattaaaggaaaagaccaaaaaatcagacagagtcaaatggatgaaattaaacaatttatcaaagataaacatattcctaaaaatgaacccgtatatatcggcggtgatttaaatgtcattaaaggttcagaggaatatcaacaaatgcctgagaacttgaacgtttcattacctacacaatttgatggcaacgcctatagttgggatacacaaagcaatggcattgcgaaatataactatcctaaattagaaccacagcatttagactatattttactagatcgcgaccatgctcaaccaagctcatggcataataatgtacacaaagtgaagtcaccagaatggtctgtgaaatcttggggcaagacatataaatataatgactattcagaccattatccactttctgcatatgcatcaaattag

SEQ ID NO: 2021 - DNA, 519 bp, Staphylococcus capitis
atggcaaaagaggtatgtgcttatctagctgtttcagtagatggttttatagcagataaagatgaatcagttcagtttctagaggaggttaaaggcgaaggagataatggctattctgacttttataatagcgtagatattgttgtaatgggaggccgtacctttagatggttaattgataatggtgtagaagagaatccatatcaaggtaagaaggtagtagtaatctcatcaaaagtcacagatattgattgggatattgaattctatagtggtgacttagacgaactttttaatagatttaatgataatgaaaaaatatggattgttggtggaggtaagttgatttcaactttaattaatttgaagatcataacatcgttaaagttgaccatagcaccaacaatacttacccaaggtgttgagttattcaattcaatagatgagaaagtaaaactccacttacgtgaggttacacaatataatcagtttgtcgaattagattatgaaatcatttaa

SEQ ID NO: 2022 - DNA, 495 bp, Staphylococcus capitis
atgattttaactattttacttatctttttctgcatcagattaattagtttaaagatatctattaatcattcacaacaattaataacaaatggcgctatcgagtatggcgttaaaaattcaaaatttctagcaatcactcatgttttaatctacgtttgtgcaggtgtagaagcacttataaacaaagatacttttagtttagtgaatagcatcggtttaatgatattagtttttgcttatatcatgttatttatagtaatcaaaactttaggtggtatttggactttgaaattattcattttaccaaatcatcctattattaaatcaggattatataaagtgacgaagcacccaaattacttcttaaatatcattccagagttaattggggtgttattattaactcacgcaacttatacaacggtattactaataccttatgcatatttcctatttgtgcgtattaaacaagaagaaaaattaatgaatatgtaa

SEQ ID NO: 2023 - DNA, 978 bp, Staphylococcus capitis
atgaaagaaaatttttggagtgaattaccacgtccattttttattttggcgccaatggaagacgtgacggatattgtctttcgtcatgttgtgagtgaagctgctagaccggatgtgtttttcactgaatttacaaatactgagagttattgtcatcccgaaggtatacacagtgttcgtggtcgtctaacgtttagtgaagatgaacaacctatggtcgctcatatatggggagataagcctgagcaattccgtaaaatgagtattggtttaaaggagatgggcttcaaagggattgatttaaatatgggctgccctgttgcaaatgttgctaaaaaaggtaaaggatctggcctaattttacgtcctgaaagagcggctgaaattattcaagccactaaagaaggtggactacccgtaagtgttaaaacacgccttggttattatgaaatagatgagtggaaagattggctcaaacacgtctttgaacaagacatcgcaaacttatccatccacctccgtacacgtagagaaatgagtaaggtagatgcacattgggaattgattgaagctattaaaacaatgcgtgacgagattgcaccacatactttattaacgattaatggtgatattccagatagacagaaaggtcttgaacttgctaataaatatggtgttgatggtgtaatgatcggtcgcggcatcttccataatccctttgcatttgagaaagagccacgtgaacatacaagtgaagaactattagacttgtttagattacatttatcattgtatgaaaagtattcaaatgaggagacacaacaatttaaagctttacgcagattctttaaaatctacattcgtggcattaaaggcgcgagtcaattgcgccataagttgatgagtacagaaacgatagacgaagcacgtgaactgcttgatgaatttgaagctaaaggaaataatacagaagtttaa

SEQ ID NO: 2024 - DNA, 1050 bp, Staphylococcus capitis
atgtttcttgcatggaatgaaattaaacgcaataagctaaagtttggcctgattatcggtattttagttcttataagttatttactcttcttactttcaggtttagctaatggtttaattaacatgaatacagaaggaattaaaaagtggaaagcggatgctatcgttttaaataaagatgcgaatcaaaccgtgcaacaatccattttcgaaacatctaaatcgaacgataaatttaaagagacctcctcattaaaacaaatgggcgttatcgcctctaatggtgatagtgaagagaatgcactactctttgggattaaagcagattcatttttaatgccgaaaatagttaaaggtaaaaaatttgctaaagacaatgaagtcgttattgatcagacactcaaagataaagggtttaaagtaggagataagattaaattatctcaatccgatgaaaaattacgcatcgtaggtgtctcagaaagtgcaaaatataatgcttcacctgttattttcactaataataaaacgatgcaaaaaatcaatccaacattaactacagataaaaccaatgcaatagttgtgcgagataaacactggaaagataaaaaagtagacaaagatcttgaagtggtaggtattaataaatttattgaagatttacctggatataaaccacaaaatctaacaatgaactttatgattacattcttatttatcatttcagcaacagtgattggcgtattcttgtatgttataacattgcagaagaaaaacttattcggtgttttgaaagcacagggctttactaatggctacttaatgaagatggttttatcacaaacatttatcctagcattgattggtacattgataggtcttgtacttactatcctcacaggatttgtcctaccagaagcggtaccggttgaatttaatattgtgacgctcatagtgtttggggttgttttaatattaacgtccttgattggcagcttattctcggtattatctattagaaaaattgacccactcaaagcaatcgaataa

SEQ ID NO: 2025 - DNA, 663 bp, Staphylococcus capitis
atgttgaagtttgatcaagtatcgaaagaatttaaagatggtaaccaaatgattgaagctgttaaatccacatctttgacctttgataaaggcgaattaatagctattgtagggccttctggttccgggaaaagtacattcctaacaatggctggcgcactacaaacgcctacacacggggaaatatacattaatgataataaaatttcacaattgagtcagaaacaacttgctaagatgagaatgaaagaaattggttttattttacaatctacaaatctagtgccatttctaactatcagacagcaatttcgtttattgaaaaattataaaaaagaagttttaagcactggcgaatttgaaaaattattaaatgatttaggtttgaaagaaattgaaaataaattaccatctgaagtctcagggggacaaaagcagcgtgtggcaatcgctaaagcaatctatacccaaccgtctattattttagcggatgaaccaacagcttcgttggatacagaaaatgcgatggcagtaatgagaattcttaaagaacaatctaaacaacgtcataaaacatgtatcattgtgacgcacgatgaacgtttaacaaaattctgtgataaaatgtatcatatggaagatggctatttaaaagaaaagtag

SEQ ID NO: 2026 - DNA, 1500 bp, Staphylococcus capitis
ttgggaaaattcatttacacttcaattgtgatgctagttatttttagtctctctgcgttattacatttcaacaaggcagatgctgctactaaaggtaatactgtgatcgtaaaagagacacctaaacaccaagtagctaaacagtatacaaatcaaacacctaaaactaaaaatggcattcaaccaacacaaataactcataaaagtaatcagcctactagaacgaaaaaatatacaaagccaacaagacaaacaacaacacagtatgttaaacgtacgaaaccatcttcgactcatgtagtaacaaacaatcttcacaaacaaagtactactaaacatgtgggaaagtcttattcaaagcaaacgactcaaccaaaacaacgtaaaacacttaaacacacaattattcatcacaaagtttcaccaactaaagttaaacctcaaaagacaacgaaagctatcaaaccgggtaacaagaaacctcattggttatcaacagcaactaaaacgaaaaagacaccatcaacttcaaaagttactaaaacgacaccgaagcgcacttcctcaactgtaacaaaaaagaaatccacaaaaccgagtgtcaaaacttcaatcaaaacaacgactaagtcaaaagcaaaaccaacctcaacagtaaaagtaaaatcaaaatcaacatattcgcaacctaaaaagaattactacaataaaccacctaaacgttggccatccaatgtaccaggtggggataacgtgcgtgatttcggtcaaacgacaaaagaatcaggtattgatgatgctttaaaaattatgaagaaatcgggtaataagggcgttacaatcgagcatactaaagcgaaagatgctaatatcgcaactgtatttaattggaatccgacagctaaacaattaacttacggcacgggtacagcaattggcagacatacgattttaactgcgaatcatgtagtgaatgatcaacgtgcacataaaccactaacacctgcacaacctgagaacatgagaatcaacttattacaagaaggttccaaagtagttcgttcgctccaagtatttggcgttcaaatgttgcaatacggagatgtcgcattggtttatacatatgaagacatttctaaatatatgaaaatacgtaagattgcatcagaaagtaccattaaatcaatgaaagctaatacgccaattcatatgtatcactatggtacgccatatggaaaatataaaaatgatccagctgatacgatgtatcattctaaaggtaaatattctatgactgcacgaaatgtaaatcctatcggctactatcaaatgatggctgaacccggttcatctggtggagctgttttaaatagtaaaaatgaaattatcggcgtacacgcgtttagagtggatgctggagattataagaaatatcatttaaacacaatggcagaaattagaggtaaattacgtaaggaaattatagataatatcgtgtaa

SEQ ID NO: 2027 - DNA, 921 bp, Staphylococcus capitis
atgaaaaagcaattattagggactgtattattaagtacgttcttactaggggcatgttcactcaatatcggtacagacgataatcaaggtgaaggtaaaaagaataatgaagaaagtagtgaacatagttcaaatcagtctaaagacaagcagagtaataaagataccaaggtagataaccaaacaaatcaagctaatcaaagacaagcaaatggttccgaaaataatgatgcttcaaatccaggcaatgaaggaaacaataacgagacaaattctgaaaaccaatcaaataatgggacgatttcagaagatgaagcgattcaaaatgctaaagagcactttaaaaattcagccacaaatgatgattacaaagttgattcaaaccaatctaatagtaaagaatactacattacctttacagcacgtgatgccacaggctttccaatgagtgcggctactactgttaataagcagacaggtcatgttaatggttatatagatagaagaactaaagcagagaaagaaagacatgttcaacatgctaatgaaagttcgttatataaagggccgaatagtcaaaatagaaaattattcggtaaagatttaagccatccaaattacaatgatcaaaatgcgcaacaatcgcaaaatgaaaataaccaacagaaacaaaataacgaagatcaatcacaacaagaatcgaataatgatgatagtagtcaaagtaaggaaggcacatcagaaaccgaagctgctcaaaatagtgaacaagaacaaaatcaatcggtagaagaaaatcaggataatgatacacaagcggagcaacaacaaactgacaacgcttctcaagatgctgataacaaccaaaataacgaccaacaaaatagtgttgaaaaacctcaatcagtaagtagagactaa

SEQ ID NO: 2028 - DNA, 150 bp, Staphylococcus capitis
atggaaaatattttaatcaacggatatagtcactatacatcatcaaataatattcaacgaagtgcaattgaagaaagagatttaggtgatggtcgtacatcatcaatttctgcatccgtttcttatacagttacttggagtgcagcttaa

SEQ ID NO: 2029 - DNA, 957 bp, Staphylococcus capitis
atgcaaaaagttaaagaaggtcgtaatatcatcagtcttgaagaagatggaacaactcaatatttacataaagtaattaaaggacctaaagttgacgcgctcagaagatacaataattgcttgaaatgggaagacatacgcacagatactattcgattgaagtctccaaagttgattgaccatgatgaagacagtttatcgcttaaatatcaatggattgaacatgctacatcgttagaagaagaattagaacaaccatccccaaattttaaacacaaaatcgcaaaagctgcagatatgttagtgacattacatttatctgatatcaatgatgtggatatagattcagaagaccagttaccgcagcgtgaatcgttgttatatgcattaaataaatatgaatatgccggctgtacgggcgcagaactagagttgtttagtttattgcaacaagactcagaactcgtagaaacgataatgcagcaatctcatgataatgacgtctgtatttgtcatggtgatattcgtttggatcagtttatatttacagatgatgatatttggattatagattttgaagaattacgtaaaggggatccaagtagagatttagcgggactaattggttctatttattttgattgcttattaaaaacttttaccgaaacgactcaagaaacttcagatgctaaggagatagaagatcagtttatggaacgaggtcttaattacattgaacaaatgagacctttaattcaattagcttatcaaacatatgtatctaagaaaatgattaataacatacatcttgctcgaaatattggatggtttctcgtggaaagaatcatgagcagagctaaattttcatttcgtttaactgccatagatagagcgattcttgggataggtagagaagtaatagtgtttccaaaaaatctaatagaactatttgaataa

SEQ ID NO: 2030 - DNA, 879 bp, Staphylococcus capitis
atgacagaaaaagtgaatacgttagaagatttagcacaaaaaatagaattagaaacggatttaaacaaagttaaaatcgataatgaaacatatgatgacgtccttgaaaatcaaaaaagtaagttaaaacagtggttatattcgatgttacatactggaaatttgaacaatcaagtcaaacaatcatcaaaaacatttaatgatttaaacgaacaaattgccagtagcattaaagatcctgggattcgagtagagacgagtacacaaaactttaacggtcaaatctaccatgttattcaagggattcgaatcaaagaagaagtaaatgaagataatagtattgttgtgccttgttctagacctaatttgacgcctggatttttcatgttcgtacatacaaataatggtttacatattaataaggttacacgtcattatatttatgcagacacgcctcaatatgctatagagttatggagtaaatgtgtaaatgagttagttgaaaagaacgtgagtttttctgctaaaattttatcctcctctgatagttatccaagaaatgacgcactcgtgttttacagtagtgaagataaagacaaagttgaaaaagtattaattgaacatgttaaaaaggctcctataaagattaaaaaagcctctcaactagcgagtcaattaacatacaacctctttacagctgaagagcctattcaaactaatggtattcaacagagctttggtgaacatcgttgtagtgctatagccgacgccattcaagactactttattacaggtgcttccttcaaattattactaaagcaaagattcattgcgaatcagatagatattaatgatttgtctaaaaataaagtgaagtga

SEQ ID NO: 2031 - DNA, 1113 bp, Staphylococcus capitis
atgaaagttttagctttaattaatacaaatttagtattagaagaagatgtaacgatgttacctgatgtaagtattgcaggaacacccattcattgtggtttgattgaattagaacgaccaagttttaacgaagatgcatcagagaacgaacatttcgtgttagtaaaagttgatgcgttttcttgcaattatagagataaagccattattctaaaagccgctttaaaaatgcaagaagatgtaaattctcaagctccaccattcgattattttggttctgactttgtagggagaattgtagctaaaggatattcagttgatgaatttgaaattggacaacgtgtgatacccaactgtgcgtatcccgaccctccttttccaggggtggcacctggagcagtcacaaacgaagcttcaaaaggatggctcagattgcataaatcaaagcttatcaaaataccagaacatatgaataacgcagttgcagcaggcttctcaataggtagccaaacttcaacaagcatggtaaggcgtgtaaatcttaagcagaatgaacgtgcactagtactgagcggtcgctctaatacgtctatgtttattattaataacttaatcagtaaaggaatcgatacgacaatattaactacatcggaatggacgcctgaagaacaagcactcattcggccagctaaattacataaagtagataggaacatgcagaagtgggaagaagacttaggtgaatttgacgtcgtatttgatccttattttgatttgcatttagaaaaagcagtgaatcaaatgaaagtaggcggacgctatattacatgcggttataaaaaccaacatcccgccttttctgaaaatgaagatgaaaaaacacctaaccatctgaaaaatattatgttaaaagttatgctcaataatctatcattaataggtaattgtatcggaacttggggagacttagaaaaaggtatttcagattataatgaaaatgagtttattgttccaatcgatagaagctactctatagaggaaggtagtgcatttgttgaccgtacctataacacacgaggacgtctaggcaaagcaatcatgttatatgattaa

SEQ ID NO: 2032 - DNA, 702 bp, Staphylococcus capitis
atgaaatctacacttttagttgttgaagatgatgaagcaattttacatttaatcgatgtagcattaactatgagttactataaagttattaaagcgaaaacaggtagagaagcggacttccgcattagaacagaacatccagatattatattacttgatctaggtttgccagatattgatgggctttctttaattaaacgattaagagaatgtgtggacacccctattatcgttatcagtgcgcgaacagaagaggaaactattgtaaaagcgttagactacggggcgaatgattatatgactaaaccctttaatattgatgaattacaagcacgtatcagggttgcacttcgcgtttcgaaacggcctgacacgatgcaaaataactttgagaacggcccgttaatcattgatttcagcggtaattctgtttatatgatgggacaggctattcacctaacaccttatgaattccaattattagaaattttaagtcagcacgttggtaaggtattaacatatcaggttttattaaaagcactatttggatacgtcaataagtgtgacatgtcatcattacgagtacatatggcctcactgcggaagaagcttaataacagtgatacaacgtatgaaagtagtatgaaaaaactcattatcacccatccaagaattggttatcaaatgcaacatttggagtga

SEQ ID NO: 2033 - DNA, 2682 bp, Staphylococcus capitis
atggaaagttcacatagacacagaggtaaactcaccatttatttaggttatagccctggtgttggaaagacatatgaaatgctatcgaacggtatcgacctttataaagaaggtgtcgatattaaaattggctatatagagccacatcaacgtcctgagacaagtgcgcttgctaaacaactaccagaaattaagacctctagccgaaaatttgggagtcatctctttcactttatcgatgtgaatcaaattgttgaggcgcatccagatgttgtgcttatcgacgagttggcccatacgaatatctcaaaaacacgacatttaaagcgttacatggatattgaagaaattctttctcatggcattgatgtttggacgacacttaatattcaacatattgaaagtttgagtggacaaatagcactgatgacaggtatccaagtatcagaacgtgttccagatcaatttataatgtctgctgatgcttatgaagtcgttgatatttcgccaaatatgttgattcaacgccttaaggctggaaaggtatacaaaagggaacgcttggatactgctttttccaattttttcacatatgagaacctgacagagttacgtgaacttacgctaagaactgttgcggatattatgagtcaaaaagagcaacagtataaaacgaagcatactgatgttacgcctcatattgcagtagctgtaagtggaagtatttataatgaacgtgtgattcgtgaagcaagacgcgcagcttataaagagcatgcaaagtttactgctatttatatcgacacctttgaaacacgttctgaaagtcgtgcgcaagatcattatgttcataaaaatctgatgcttgccaaatcactaggtgctgagattaaggtgttatatgcacaagatattgcgaagacattgattgattcgtgcgataaatcatttgtgactaaattggtgctcggtcagtctgaacaaccaccttggaaagagtactttaagaagtcattaattgaacagattaatcatactacgcatcactttaaattagagattgtcccgatacatcagatttattcggataagcaaaatcgtgatcggagtagccgtaaaaaagataaaaaaccataccaactcacgttatcaatcgatatcgttaaaatgttaaccatccaaattgtatgcgtactattaggaatgtggatttataagatggataagaatgagtctagtgctattattcttttaatgttttttattggcattatcgtactttccatttggacacagtcatatttaattggtttcttcgcatcgatattaaatgtcttcgtctttaactatttctttactgtgccgaggtttacgctagaaatgtatcgctttgaatatcccatcacttttgtgacgagcatatttgctagcattttcacgagtggcatattgaaaaatttaaaatatcaacactccctcaccgaacgtcagttatatcgtacagatattatgttgcaatttaatcagtcgattaaggaatcatatgcgactatgaagttgttgagtgtggctggtgatcaaattcaccaattattaaagcaggatgttactgtatttcaaatcgaagctaagaaattgatgcagtccgcgtcgtttggagttagctcgagtgagcataaccatgggactgaggatgctgaaacgttaagttgggtaatagagaatgaaagacgtgcgggtagactaaccaacaccttcccaggtagtaaatttctatgtattccaattggtacaagaccagttaagggtattatttcgattcagtttacagatgaggattacatcgatacatacgacaattctatcttagattcaatgttaaacgatttgacccttgccgttgaaaatgtcgccctactcaagcaaacgagacagtcgatggtaatagctgaaagagaagctacaagatcaaatttcttacaatctatttcacatgatattagaacgccattaacatctattatcggtaatttagatgtagtgaaatatcataatgatggcttggataaaaatgaacgcgcgcaactgttaaccgcttcatacgaagaggcacaatatttatatacgttagtcacaaatatactttctctaacgaaattagagcgttcagatattcaaattaagcgcacctcataccttgtagaggagctactcgaagaatttgaagatggactcgtgcgtcgtcatcaaaatcataaagtcactattgaagataatggaacattcgcactggtatatatcgacagcaaattaatgctacaagttttatttaatttggtagaaaatgcattaaagcactctgaatcgcattctgttatcaccttacgcgtgcatgaacaagactcaaagatattatttgaaatcattgataatggtaaaggtatacctaaagaagagcgagatttaattttcaatccatattattcgggggattactttaaagataataaaaaggatagcctaggactcggtttgtatttagtccaacttatattaaaacagcatcacagtaaattagaatatcaatccaatgaaccaagtggcagtatattttatttttatttagataaagaacaaataaaaatggaaggggatgatgaaatctacacttttagttgttga

SEQ ID NO: 2034 - DNA, 1683 bp, Staphylococcus capitis
atgagtatgattctatttttaatcacatttatcgtgctctcatacgtaatgagtcgatacttatatacagtggctttaattgtaccgtctaagatggatgtcttattttcacctatagaaaagggactctacaaattgattggtacgtcactagagcacatgtcaggtaaaacatatttaaagcactttttatgttttaacagtttaactggcgcattagcatttatcttactactgacacaacaatggctatggttaaatcccaatcacaatttaagtcaatcagtgtctctcgcatttaatacggcagcctcgtttttaacgaatacaaatttacaacattatgcgggcgaaacgggattaacgtatttcacgcaaatgggtgtcattacgtgtctgatgttcacttcagccgcttcaggttactcagtatgcatcgcaatgttgcgtagactaacgggtatgacagacgtcataggtaacttctatcaagacgtcgtgcgatttatcatacgtgtcttaattccattcgcattcgtgttaagcatatttcttattagtcaaggtacacctcaaacgttacatggcaatctagttgttgaaaccatgtcaggtgtgaaacaaaccattgcatatggacctatggcttcattagagtcaattaaacatcttggaacgaatggtggagggttcctaggtgccaactcatccacgccatttgagaacccaacctattggtctaatttcgcagaggcattaagtatgatgttaattcctggatcgcttgtttttttatttggcagaatgctgaacgctaaacagcacatccatccccatgcggtaatggtctttattgcaatgtttacgatgtttgtcttgcttttacttatttgtctacattatgaaactgcaggaagtccgattttacaccacttaggaatcgatggaggcaatatggagggcaaagaaacacgtttcggtattgctcaatcagctttatttacaactattacgacagcttttacgactggtactgttaacaacatgcatgacagtctcacacctatgggtggcatggctccaatgattcttatgatgttaaatgccgtttttggtggtgaaggtgtcggtctgatgaatatgttgatctatgtcatgttaactgtctttatttgcagtttaatgattggaaagacgcctagttatttaggtatgaaaatcgaatccaaagagatgaaatggatagcactcacatttttagtccatccattattgatattaatattttcagcattggcatttatcattcctggcgcgaaagatgcgataacaaacccacaattccatggcgtttctcaagtcatttatgaatttacatcttcatctgctaataatggttcaggttttgaaggtttaaaagacaacactgtattttggaatatttcgacagcaattgtgatgctcgtcgcacgttatatccccatcgtcttacaactgttgattgtgtctagcttggtcaacaagaaaacatatcaacataccgatgactcacaagatgtaccgattaataacctgttctttagcaccgtgttgattatcttcatcattttactcagtggtttgaccttcctaccagatttaatgcttggaccaataggagaacaactactgttgcattcgtga

SEQ ID NO: 2035 - DNA, 2022 bp, Staphylococcus capitis
atgatgaaaacatcaaaaatatttgaatcaagtttggttagacaagcactgaaggaaagtgttgttaaattaaaccctaaatatatggtgaagaaccctatcatgcttgttgtagaagtgggcatgctactatcatttttattaatttttgtacctcatttatttatacaagaacatgtatcgcgtatgtatgtgttaagtatcttcatcatcttattgctgacacttatttttgctaacttttcagaagcgctagcagaagggcgagggaaagcgcaagcgaatgccttacgccagacacaaatagaaatgacggcgcgattaattaaagaagacggcagctacgaagtgataaatgctagcaatttgaaaaaaggagacatcgttcgtgtagaaactggagaacaaatacctaatgatggccaagttattaaaggtttagcaactgtcgacgaatctgcgattaccggtgaatcagcgccagtgattaaagagagtggcggagatttcaataatgttattggaggcacctctgtcacttctgactggttagaaatagaaatcacttcggaaccaggtcaatcattcttagataaaatgattcatttagttgaaggggcgacaagaaagaaaacaccgaatgaaattgcattgttcacgctcttaatgacgctaactattatctttctcgtcgtaattatgacgatgtaccccttagcacaatttcttcatttcaatttatcaattgtgatgttgattgccttaacagtctgcttaattccaacaacaattggagggttgttatctgctattggtatcgctggaatggatcgtgtgactcagtttaatattttagcgaaaagtgggcgttccgtagagacatgtggtgatgtaaatgtgttgattctagataaaactggaacgattacttatggtaatcgtatggcagatgcatttattcctgtggcatcaacgagttatgaaagattagtgcgagcagcatatgaaagttccctagaagatgatacacctgaaggaagtagtattgttaaacttgcacaaagccaaggcatcacattacctcaagaaagaggcgaatatttcccatttactgcggagactcgtatgagtggtgcgaagtttgaagatcatgaagtgtataaaggtgcacctaatagcatgattaagcgtgttaaagaagcgggtggatctattcctaatgatttagatgaacgcgtcactgaagtctctaaaaaaggcggcacgccactcattgttattgaaaataatgaaattttaggtgtcatctacttaaaagacgtaattaaagacggtcttgttgaacgatttcaagaattacgcgagatgggtatcgaaaccgtcatgtgtacaggtgataatgcacttactgcagcaacgattgcgaaagaagcgggtgtagatcgttttatcgcagaatgtaaaccagaagataaaattaatgttattagagaagaacaagctaaaggtcatattgtggcgatgacaggtgatggtacaaatgatgcacctgctctagcagaagctaatgttggtttagctatgaactctggtacaacaagtgcgaaagaagcggcaaatttaattgatttagattctaatcctacaaagttaatggaagtcgtattaattggtaagcaattattgatgacacgcggatctttaacaacgtttagtattgcgaatgacatcgcgaaatatttcgcaattctaccagctatgtttatgtctgcaatgccagcaatgaatcgcttaaatattatgcatttacattcacctgaatcagcagtgttatcggcactcattttcaatgcattaattattgtgttactcataccaattgcgatgaaaggcgtgcaatttaaaggcgcttcaatgcaaacgatattaatgaaaaatatgttggtctatggattaggcggtatgattgtgccatttataggtattaaattcatcgatgtaattattcaatacgttgtctaa

SEQ ID NO: 2036 - DNA, 561 bp, Staphylococcus capitis
atggcaacgatacgaaaaagtgttggacttgtagtagtactatttgtcctttgtgggtttatatttccgctaacagtgactgcaataggtcaagtcgcatttccctatcaagctaatggaagtttaattaaacaagatggtaaagtaattggttcagaattaattggtcaacaatggaacgattctaaatacttccatggtcgaataagtgccgtgaattataatatggacaagaaacttttgaaagcgaacggtggaccttcatcaggtggttcaaatctagcaaattctaatcctcaatttaaacagcgtgttgaagattcgattcataaagaaggacatcatcttactgcagatgctgtgactgcttcagggtcaggattagatccagatatcaccgtttcaaatgccaatgctcaagcgaaaaggattgcgaatgaacgtggtatcgaggaagcaacaattcaacgcatgattcaacaatataaacaatcctcacccatgactgaagattacgtgaatgtacttaaaatgaacattgcacttgataaaatgaaataa

SEQ ID NO: 2037 - DNA, 843 bp, Staphylococcus capitis
atgcatcgacagatagttgaattttctaagtataatccatcaggaaatatgactatacttgttcactctaaacatcatcctgaagaatatgcatcaatcgctaatcaattaatggagacgacacatgtgtgttgtgaacaagttggttttattgaatcttgtgattataccaatggggatcaatttcatttagtaatgagtgggaatgaattttgtgggaatgcaacgatgtcatacatacattatttacaagaacatcaattgcttgaaagtgagcagtttcaattaaaaatatcaggttgttctcaaaccgtgtcatgtaccgttcataaccagcaatattatgaggtcgggatgcctcaagtgcaaagtattgtaccaagacaattaattatcgctggtcaaccatacgatgcgctcgaattaatttatgaaacttacatacactatgttattcaaacgcaagagactacaatgaacttcaaataccaagtcgaacaatttgtcagagaacaacaatggcatactacatttaaaactattggaatcatgctatttgattcacgacaacactttttaatgccacttatttatatacctgaagtgcaaagcttaatttgggaaaatagctgtggctcaggtgctgcttcaattggtgttttccaacaatatcaaacgaatcaaccatgtaaagatttcaaagtgaagcaaccagggggaagtatagtggtttcttcgacatacagtaataaaaagggatacatcacatcaatcaaaggtcaagtttcaactgtcgcaacaggactagcatatatagaacaggagacaaagacacaattatga

SEQ ID NO: 2038 - DNA, 816 bp, Staphylococcus capitis
atgaacccaaaacacggtataaacaaacagttacaagaatatctaaggcaatttgaaacactatattaccaagtattagaagatgagcattatatccaggcattggaaacgctagttgaccattatagtcaatttattttaaatcccattgctaaacatcaatttgaagactggagcaacaatgaagcaaaagcaagtttaactcaccagcttcaagatataacgtcacagtgtgtaaaacgtgttgaagaaatacgtgctaaaagattactagatggacgatcctctacatctggttactttgacaatgtagaacagtgtattcatgaagaattcggccaatttcattttggtaaagaagataaattattactaattgggtcaggtgcttatcctatgacgcttgttcaagtagctaaagaaacaggtgcttctgtaataggcattgatatcgattcacaagcagttgatttaggacaacgaattgttcaggtgcttgctccaaacgaagatatagttatcaccaatcaaactgttgaagaaatagacgatatgcagacgattacgcacatcattttcagctctaccatccctgttaaatacgatattctaaatcaattacacgctataacaaaagataacgtggttgtagcgatgcgttatggagatggtattaaatcgctattcaattatccatctcagcaaacagaggaaacaaaatggcgttgtgtcgaacggctctcacgacctgaacacatctttgatattgcattgtaccgcaaagcttctaataaaggaggtgcgatgcatgtctaa

SEQ ID NO: 2039 - DNA, 1311 bp, Staphylococcus capitis
atgtctaatactttaatagttggaagtggacctgtggccattcaacttgctcaaatatatagccaaatggcgcatcaaactattgatatggtaagtcgtgttaagacttcagccagctcccaacgtgtttataatgcgtatcaacgtgacggttattttaaggtcaccactcaaaatgctgcacatcaacaactttcaggtgaatttaaagtgcgacaattttataaagatatacaggaagtgagtagtacttacaatactctaatcatggcgtgcacggctgatgcgtatcgctcaatattaaatcgacttgcaaaggccacagttgagtgtctacaacacattgttctagtatctccgactttaggttctcatatggtaatagaacaactgttgtcagagttaaatctagatgtagaagtagtgtccttttcaacatatttaggagacacacgagtagttgatactactcaaccacatcaggtgctcacatcaggtgtgaagtcaaagttatatgttggatcgactcataccgattcaagatttatagatcgtatatgtgtactatttcatcatttgaatatccaaatcgctgtaatggatacaccgttacatgctgaagtacataacagctcgctctatgttcatcctgcattatttatgaatgacttttcattacaagcagttttcaaagggacaacagttcctgtttacgtctataagttatttcctgaaggacctatcacgatgaaactgatacgagaaatgcgtcaaatgtgggtagagatgatgaaaattttaaacgaattaagagtgccgtccgtcaatcttttaaaatttatggtcaaagagaattatccggtcagaccagaaacgctaagtgaacaagaaattaatcaatttgaagacttaccagcgatacatcaagaatatttactctatgttcgttacactgctattttaatcgatccattttctgaaccagattcgaatggacattactttgacttctcggcagtaccatataaacgtctttatattgatgaagaaggcgttacacacattccgcgaatgccaagtgaggatagctatcgaacagctatgattcaagctgtagggagggcgcttaacgttaaaacaccaatgattgatcaatttttagcacgttatcgtagctattgtgatggctaccgtgcagaacaccctaaacaatctctatcagctcaatttgactcacatcagtacgatgaggacattgctttggtaaaacaatttttaaaaaataaaactgaacataatgcgacacattaa

SEQ ID NO: 2040 - DNA, 1599 bp, Staphylococcus capitis
atgaatagattaacaaagatgagtacgattttacttgcatcagggatgttattagcaggttgcggtggtagtgagggattagaaaagaaaaaagaacaaaagacattatcttatacaactgttaaggacatcggagatatgaatcctcatgtctacggtggttcaatgtcagcagaaagtatgatttatgaacctctggtacgtcatacgaaagaggggattaaaccattattagcaaagaaatgggatatttctgaggatggtaaaacatacacttttcatcttagagaagatgtaacttttcatgatggtacaaaatttgatgctgaggcagtaaagaaaaatatcgatgctgtacaacaaaataaaaagttacattcttggttaaaaatttccacacttatcgacaatgtgaaagttaaagataaatacacagtgcagcttcacttaaaagaagcatatcaaccagccttagcagagcttgctatgcctcgtccatatgtatttgtgtctcctaaagactttaaaaacggcacaacaaaagatggcgtgaaatcatttgatggtacaggtccgtttaaaatgggtcaacatcacaaagatgagtcagcagaatttaataaaaataatcaatattggggcgaaaaagctaaattagataaagtcgaagcgaaagttaaacccgctggagaaacagcattcttatctatgaaaaaaggtgaaactaactttgcgtttaccgatgatagaggaactgacagcttagataaagatagtttgaatcaactcaaggacacaggacaataccaaataaaacgaagtcagccaatgaatacgaaaatgcttgtggtgaactcaggtaataaagatagcgccgttagtgataagacagtaagggaagcactaggatatatggtaaatcgagataaaatatctaaagacattctagatggtcaagaaaaaccggcaactcagttatttgcgaaaaatgtgacggacattaacttcaacatgccaacacgtcaatttaatactaaaaaagcagaagcgctattagatgaagctggttggaaattgttcaaaaacaaaaaccttcgtcaaaagaatggtaaagttttaaccttatcaatgtattacgataaaggatcctctaatcaaaaggagcaagcggaatacttacaagcagaatttaaaaaattaggagttaaattagatattaacggagaaacgtcagataaagttgctgaaagacgtacatctggagattatgatttaatgttcaatcaaacttggggattattatatgatccacaaagtacgcttgcagcacttaaaaccaaaacaggatatgaaagtgcaacctctggcattaagaataaatcaaaattatataaagatatcgatgaggcattcaaaatacagaattcaaaggatcgttctaaagcatatcaacacattttaaaacaagtagatgaagaaggtatcttcattccgatatcttacggcaggatgactgtggtagcacctaaggacttagacaaagtgtcgtttacacaatcacaatatgaattaccatttaacgaaatgcaatataagtaa

SEQ ID NO: 2041 - DNA, 933 bp, Staphylococcus capitis
atggtcaaatttataataaaacgtattgcactcatgttccctttattgattgtagtgagttttatgacattcatgatgacatacctgactaaaggtgatccagctgttacgattttacatgctcaaggcacaccaaacattacacctcagttaattgcagagacgagagagaagtatggattcaatgaacccatattgattcaatatatgaattggcttattgaagctatacagtttaagtttggttcgagttacattactagagaatcagtttcagagcgcattgggcctgccttcttcaatactttcaaattaacgttgatttcaagtatttcagttattatcacatctattttactaggggttataagtgctctaactaaagggaaactgacagatcgcattattcgctcaatcgcatttttcttaacagcactaccatcatattggattgcgtcgatgttaattatttatatatctgtaaaattaaatgtattaccaacttcaggtttaacaggtccagaaagctatattttacctgttcttgtcgtcactattacttacgcaggtatttatttcagaaatgtgagacgtgcaatgattgagcaactgaacgaagattacgtgttgtatttaagagcaagcggcgtgcatacgttgacgttattgtcacatgttttacgtaatgctttacaagttgcagtgtccatcttctgtatgtcagtgccaatgattatgggcggtcttgttgttattgaaaatgtctttgcctggccaggtcttggacaattaagtattaaagcgattgtcgaacatgacttcccagttatacaagcgtatgtattaattgtcgctgttttatttatcatatttaacacattggcagacattatcaatgcatacttaaatcccaaattaagggaggcaatatga

SEQ ID NO: 2042 - DNA, 867 bp, Staphylococcus capitis
atgatacttaaaagattattgcaagataaaggtgcagtaatagcaatgaccattatctgtgtatatgtggcattaggtttactagcacctatcgtcacattttatgaacctaatcaaattgatacggtgaataaattcgcaagtataagttggtcacattggttagggactgatcatttaggacgagatgtacttacacgaataatttatgctattagaccgagtttattatatgttttcattgccttaattatttccgttgcgataggagcaatattaggatttatttctggttatttcccaggttatatagatggcatcatcatgcggttatgtgatgtcatgttagcttttccaagttatgtggtgacattagcattaattacattgtgtggtatgagtgtagaaaatattattttagcattcatacttacgcggtgggcatggttctgtcgagtcattcgcacaagcgtcatgcaatatactgaatcagatcatgtaaagtttgctaaaacaattggtatgaatcatatgacgatcatttggaaacatattttgccactcacgctagcggatatcgctattatttcaagtagttcaatgtgttcaatgatattgcagatgtcggggttttcatttttagggttaggtgtcaaagcgcccactgctgagtggggaatgatgttaaatgaggcacgtaaagtgatgttcacgcaccctgaaatgatgatcactacaggaatcgtgatcgttattatcgtaatggcatttaacttcttatcggatgcgttacaagttgcaatcgacccgcgcattacttctaaagagaaacaacgtgctttaaagaaaggtgtgatgtcgtcatga

SEQ ID NO: 2043 - DNA, 831 bp, Staphylococcus capitis
atgacacttttatcggttgaacatcttcaaatcatagatagttggacgaacattaaattggtagaagatgtgcactttagtgtagctcatggtgaaacattagggatgattggggaaagcggtagtggcaaatccatttcatgtaaagctttgacaggtttaaaccctgaacgtcttcatgtgacaggtgatatttattttgaaaatcaaaacctcatgcacttatccaaaagggatttacgtcataaacgaggaaaggatattgcgatggtgatgcaacagggtacacgtgcatttgacccttccactccagttggtaaacaaatgtttgaaacgatgcgtatacatacaatgttatctcaattgcagattaaacaaacactagtagaatatatgacatttatgaagctgaaagagccagaaaagattttaacgtcatatccgcatatgttgtcaggtggtatgttgcagcgtttgatgatcattttagcattagcgttaaaacctaaattgattattgcagatgaaccaactacagctttagacacgattacgcaatacgatgtgctcaaagcatttcaagatattaaacatcactttaattgtgcaatgatttttatttcacatgacttatcagtgattcatcatattgcagatcgagtcatagtgatgaaagatgggcgcgtgattgaattaggagctacagacgctatactgaaccaacctaaggatgcatatacacaatatttgatatccgctaaaaagaaaataaatgagcattttgaacgtgtgatgagaggtgaaatacatgctaaaagtaaccaatgttga

SEQ ID NO: 2044 - DNA, 750 bp, Staphylococcus capitis
atgctaaaagtaaccaatgttgagaagtcatatggtaagaaacctttatttcgttctgattcccaattaattattaaaggtatctcatttgaatgctcagtgggtgagagtattggtattattggagaaagtggaagcggtaagtctaccctcagtcggatgattttaggtattgaaaaaccggacaaaggactagttacgctaaatgagcagcctatattccgaaagaaagtaagacgacatcaaataagtgcagtatttcaaaattatacgtcttcgttgcatcctttccaaaaagtacaagaaatcatgtttgaagtgatgtgtcgttgtcaccataagcgaaaagatgagttagaagtagaagtgattcgactattagaagaagtagggctatcagcagaatacttagataaatatccgcatatgttatctggtggagaagctcaacgtgtggcgattgcacgtgctattagtataaatcctcaatatattttatttgatgaggccattagttcattagacatgtctattcaaactcagattttagacttattgagacgattaagacgtacacgtcatttgagttatatctttatcacacatgatattcaagcagcaacttatgtgtgtgatcggttaatcatttttaagggcggtcaaatcgaagaatgtatagcgacgcacgatttacatttaagtcgtcatccttatacgacagcattgattcataaacaattgatattctaa

SEQ ID NO: 2045 - DNA, 1179 bp, Staphylococcus capitis
atgaaaggagccatggcttggccatttctaagattatacatactgacattaatgtttttcagtgcaaatgcaatattaaatgtatttattccattacgcgggcatcattggggtgcttctaattcagttatcggtattgtgatgggggcttatatgttaacagcaatggtattccgtccatgggcaggacagattattgcgcgtgtaggtcccattaaagtattgcggatgatcttattaattaatgcgtgtgcgttaatattatacggtttcacagagatagaaggatactttatagcaagagtgatgcaaggtgtatgtacagcattcttctctatgtccttacaacttggtattatcgatgcactaccggaagagcatcgttcagaaggagtatccttatattcgttattctcaacaattcctaatttaataggaccgttaattgctgttggtatatggaattatggacatatgtctatttttgcaatagtgatgatagggattgcagcgatgacgacattcttcggttaccgagtgacctttgttgaatcagagcccgacacaagtgataagattgaaccattacaatttaacgcttttacagtatttgcccatttctttaaaaataaagaactttttaatagtgggttaattatgatgattgtatctattgtctttggggcagtaagtacatttgtgccactgtatacaatacaatacgaatttgcaaatgcaggaatatttttaacgattcaagccatagcagtggtactagcgcggatgtatttacgtaaatatataccatcagatggacgctggcacccattatatatggtgagtgtactgttgttactcgccattgcgtcattgattgtggcaataggacctcatgtacatgtagttatcttttacctaagcgctatattcattggtgttacacaagcacttgtttatccaacacttacatcgtatttaagctttgtgttgcctaaatctggacgaaatatgttacttggattgtttattgcctgtgcagatttaggagtttcactaggtggaagtataatgggacccatatcggacttagttggattaagttggatgtatgtgatttgtggaatattagtcatgtgcatgatgttgatgagtatcatgaaaagaggtaatgtcatttaa

SEQ ID NO: 2046 - DNA, 183 bp, Staphylococcus capitis
atggcaattggtacgattgtattattcggattcaatactcctattaaatcaattatcacgattgctgcagttgcagtaactggattgatcttagcatctattattggctcattaattaaaaattcgacttattacacttacatattccaatgccatggaaataaaggtaaaagtcaatcgtaa

SEQ ID NO: 2047 - DNA, 549 bp, Staphylococcus capitis
atggctagagtatcgaaaaaacaatacattcttgaatccgcggccagtattattaatgagcaaggtgcagactatttaactttagatgctgtagcaaaaaaagctggtgttagtaaaggtggtttactttatcatttcaaaagtaaagagggactcattcaagagcttgtgaattatgcaaataatctttaccaagaaaaagttaataaatatgtcaattctgattctgatgagtctggacaatggttaaatgcatttatagaagcgacacgtgaacatagaacggaaaatgcgcctattacatcaggaatgcttgctgcccaaggttctaataaactattattatcacctttacgtgagtcttatcaagattggcaaaatcatattgagagtgatggtttagacgaagtggatgcgacaatcattaggctagctgtagatggtttatggttgtcagaaatatttggtattagtgcaatagatgaaaaaatgagagaacaagtcattcaaagattaaaagaacaagttcaaaaaaataaaaaaatttaa

SEQ ID NO: 2048 - DNA, 891 bp, Staphylococcus capitis
atgaataaagttctattaacagcagccatcacaggtgctggcgatacaattcaaaaaaatgaaaatgttccagttacaccacaagaactcgctgattcagcaattaaatgtgccagagcaggagctacagttgctcatattcatgttagagatccagaaactggaggcgtaagccataatccagaactttacgcagaaacagtaagacttataagagaagcagaagaagatattattatcaatattacttctggaggtgggggtgactttattccaagtctagaacatccagaaacaggtggagaaggcacttggattcaaaccccagaagaacgtcataaacccgttggagatttattaccagagatgtgtacattagattgtggcagtgtcaatatgggtgattctgtttatttaagccccgcatcttggttacgtaaacaagctgaaatggttaaaaatgctggggttaaacctgaactagaatgttttgatacaggccatgtcagtttcgctaaacaaatgattgaggaaggccttatcgatggcgatccaatgtttcaattctgcttaggcataccttggggcgctgaaaatgatccagaaacaattgattatttaaaatcacgtatccctgataatgcacattggtcagcatttggtattgggaaaatgcaattaccgacagtgagagaagttgctcaacgtggcggaaacatacgtgtgggcttagaggataatatttacatttctaaaggtgttaaagcaacaaacgaagcacttgtcgaagaagctaaaaagatcttaaaagaactagatatcgaaccattaacaccagcagaagctagagaaaaattcaatctcagaactcctaaaggaggccaatcatga

SEQ ID NO: 2049 - DNA, 963 bp, Staphylococcus capitis
atgaaagtagcagttgtaggaacaggtgttataggaggtggttggattactcgaatgcttgcccacggacatgaggtcatcgctacagatccaagtgaaggcgcatatgagagaatgttggcgcaagtgaaacagaattggccatatgctgaacaaatggggcttgccgacaacgcatctctagagaatttgacatttaccacagatttaaaagaagctgttaaagaagttgaacacatacaagaaaatgtacctgaagttgaggaaattaaagatacagttttaagagagattgatttttatgcatcaccttatgcaacaattggctcaagtacttcaggaattatgccttcagaattacagaaaaatttatcacacccagagcgcttagtcgttgcacatccattccatcctgtgtatatcttgccacttgtagaaattgtacctggtaaacaaacttcagaggaaaatactataaaagctaaacaattctatgaaggtattggaatggacgtgttacatgtacgccatgaaattgaaggtcacattgccgaccgtctaatggaagcattatggagagaagcattacacattgttaacgacggtatagcaacaactgaagaggtagataaagctttcactcacgcagccggtttacgttatgcacaatatggcccatttatgactttccacttagctggaggcgaaggtggtatgcgtcatatgcttaaacagtttggtccggcgctcaaaaagccatggacgaaacttgttgcacctgagttaacagaagatttatacgacaaggtagttacaggaagtgaagcatcttcacaaggttatacaatgtcagaattagaccaaaaacgtaatgaattcctaataaaagtcaaagcgttggcagaacaatattggcctgaaggttcagatatacttaaaaattcgagtcaggaggtacgttaa

SEQ ID NO: 2050 - DNA, 468 bp, Staphylococcus capitis
atgaagcagtatcaatatgacacgaaagtgattcaagaatgggtggatcataatggacatatgaatgatgcagaatacaatcgcgtattaagtgatgcaacagatgattggttagcacatctaggtttaactctagagaccattaaaacgttgcattatactgtcttcactttagagaatcatttgacctttttaaaagaaatgaaacttgatgaagatattagtgttaaagtccacctttacgattatgacagtaaacgactccatgtatttatggaaatgttgaattctgaacaagcgcttacatcgacttatgaagtgatgttaatggggatagatactgaaaacggaagaccttcgccattccctgattcaatagctcataatattgaggcatattacaagaaagatgagatgacaactcgacctaaacaattaggtcatcaaattggtattacaagaaaatag

SEQ ID NO: 2051 - DNA, 1188 bp, Staphylococcus capitis
atgttaagtattaaaaacttatcaaaagtctatgcaggtaaaaaaagagctgtagacaacatgaatatcgatattgaagaaggagatttcgttgcgtttataggtacaagcggtagtggtaagacaacggcattaagaatgattaaccgcatgattgaatcaacagaaggtgaaattactatcaatggcaagaacattcgtcagatgaacgcagtggaattacgtcgcagtattggttatgtcattcaacaaattggactcatgccacatatgactgtcaaagacaatattgtattggtacccaaattattaaaatggtcgcaagagaaaaaagatcaaaaagcgaaagaactaattcgtttagtagacttacctgaagattacttaaatcgctatccttcagaattatcaggcggacaacaacaacgtatcggtgtagttagagcacttgctgccgaacaggatatcattttgatggatgagcctttcggagcacttgatcctattacaagagatacattacaagatttagtaaagaaacttcagaaacagttaggtaaaacctttatatttgtcacacatgatatggatgaagcgattaagcttgctgacaaaatttgtattatgtctgaaggtaaagtcattcaatatgatacacctgataacatcttacgtcagccagcgaatgatttcgtccgtgatttcataggacagaaccgtcttattcaagatagacccaatattcgtacagtcgaagatgccatgattaaaccaattactgttcatgtggatcgttctttagatgaggcagttaatatcatgagacaacgtcgtgttgatacgatatttgttgtaggtaatgatgagcatctattgggttacttagatattgaagatattaatcaaggtctacgtaagaaaaatgaattaatagacacaatgcaaagagatatttatagcgttcgaattgatagtaagttgcaagattctgttcgtacaattttaaaacgaaatgtaagaaatgttcctgtagttagtgatgacaataagacacttgtaggtttagtaacaagagcgaatcttgttgatattgtctatgacagcatttggggagaagacggtaacgtgagttcccaggagaatgatggaatcattgaacctcatacatcaggggttgatgaacgatga

SEQ ID NO: 2052 - DNA, 636 bp, Staphylococcus capitis
atgattaaatacttaaccgacaatgcaagtgcactatttgagaaaacgctagagcatctttatatttcagtatttgctttgttaatagcaattattatagctattcctttaggtattttactgtctaaaactgataaactctcgaaaatttcgttaacaattgctggtatattacaaacgattccaactttagcaatcttggcacttatgattcctttatttggtgtcggtaaaacaccagcaattatagctttatttctatatgttttactaccgatattaaataatacgattattggcgttcaaaatatcgatagtaatgttaaagaagcgggacgtagtatggggatgacaggtattcaactaatgaaagatgttcaattaccacttgcattaccaatgatattgagtggtattcgtttatcttcagtatatgtaattagttgggcaacacttgcaagttatgttggtgctggaggactaggtgactttatttttaatggtttaaacttatttgaaccagcgatgattataactgcaacaattctcgttacattattggcacttatcgtagacttctgtttatcaatgattgagaaatggttggtccctaaaggtttaagaattaccggataa

SEQ ID NO: 2053 - DNA, 963 bp, Staphylococcus capitis
atgaacaagtataaaaagtatatagtagttttagtattatgtttaaccgtgttatctggatgtaatttacccggtttgaaaaatagtaattcagatgacgacgttaaaattacaagtttaggtactagtgaatcacaaattatttcacatatgatgagattacttattgaacatgacacacatggtaaaatcaaacctactttaattaataatttaggatctagcgtcatacaacataatgcagtggcaagtggtcaagcaaatatgtcaggtactcgttataccggtacagatttaacaggtgcacttaatgaaaagccaattaaagatcctaaaaaagcaatgaaagctacacaaaaaggctttgaagagaaatatcatcaaaagttctttaattcatatgggtttgctaattcgtattctcttatagtgacaaaagagacagctaaaaaataccatttaaacacggtctcagatttgaaaaaacatgccaaagatctacgtgtaggtatggacagctcttggaaagatagaaaaggagatggctaccctgcattcaagaaggagtatggcttcgactttggtacagtaagaccaatgcaaattggtttagtttatgatgcattgaattcaggaaaattggacgttgcggtggggtactcaacagatggacgtatcgcagcttatgacttaaaggtattaaaagacgacaaaaaattcttccctccatacgatgcaagtccactcgcaactgatcaactattgaaagaacacccagaactaaaaccgatattaaagaaaatggaaggcaaaatttcaactaaacaaatgcaaaaattaaactatcaagctgatggtaaaggtgaagagcccgctacagtagctgaaaaattcttaaagaaacataattattttgaagatgataattctaagaagaaaggtggtcaaaataatgaaaggtaa

SEQ ID NO: 2054 - DNA, 648 bp, Staphylococcus capitis
atgaaaggtaatttacttcaacagttgggacattattatcaaacgaactttggctacctttgggaattatttgttaatcacttacttatgtcagtttatggtgtgatatttgcttcaattgttggtataccacttggaatacttattgcgcgtttcggtaaattatcaacgccaataatgacacttgctaatattattcaaacggtaccagtaatcgcgatgttagccatcttaatgttaagtatgggactcggtatgaatacagttatatttactgtgtttttatacgcacttttacctattatcaagaatacttataccggcataaatggtgtagacgcgaacattaaagatgctggtaaaggaatgggaatgacacggaatcaggtacttcgaatgatagaattgccattatcattgtctgtaatcataggtggtatacgcattgcacttgtggttgctattggtgtagtggctattggttcatttattggtgcgcctacattaggtgatatagttattcgtggtacaaacgcaactgatggtacattatatattcttgctggtgcaattccgattgtaattattgtcgtacttattgatgtaattttacgtttgcttgagaagaagttggaccctgcaaattaa

SEQ ID NO: 2055 - DNA, 762 bp, Staphylococcus capitis
atggcacttttacaacttaattatttatctaaaacgattggagcacaccattctctaaatgtgatacttccagaagatgagagcttttttgatacaaatcgagaagccaaacctttaaaatctatgctagtgctacatggactatcaagcgacgccaactcttatattagatatacaagtattgagcgatatgcaaatgatcatcaacttgcaattatcatgcctaatgcagatcatagtttctatactaatatggtttatggccatagttattacgactatattttggaagtgcatgactatgtccatcaaattctaccattatctaagaagagagaagataattttatagctggtcattcaatgggaggctacggtacgtctaaatatgctttaacacaaagccaacgattctctaaagcagcaatgttatctgctgcattcaatgtttcattacttagagagtatgagtattatgacttttgtccagaagccattgttggtgaaaatgaggacatcaaaggtactcctttcgatccttattacttagttgataaagctgttactaataatgtagacttacctgaattattaatcatgtgtggcactgaagatgcattatatcaagataacttagactttattagatatttaaatgaaaagggtgtgaactaccactttgagaaaagttcaggtgatcatgattatgcctattgggataaggcaattaaacaagtcatcgagacctttacacgtggatag

SEQ ID NO: 2056 - DNA, 1038 bp, Staphylococcus capitis
atgaatatattattaggagtaggaacattagtcgtagttttaatcattatgacattgttcttaaagtttgcaccttatggtaaggaaggtctacaagcactgtcaggggctgcttgtgcaacatttctaccacaggctttcttaagttacgctattggaggcattttccatattaaattcctacaggagattggtgaccttgcaggaagtcttggcgggattgcagttggtatccttgcatgtattaatttaggtgtttcacctgtattctcagttatcgtagggttagtattaaaggactttagcttactacctgcatttatcgcagcatacctcacagcatttgtgattaaatttattgaaaagaaagttccagaaggcttagacttaatcgtcgttatatttatagctccagcgctcgtatacggtttagcatcattgattaatcctagcgtaactgcagtattaaatcaaattgcgaaagctgtaaactcagttggtgatagcagtccatatgccttagctattatcttaggactcatcatcccagttacaagtatgacaccattaagttcaatggtacttgcaagtattttaggactaacaggtttaccaatggcaattggcgcaattgtatgtactggcgcatcatttgttaactttacgttatttaatatcctaaaaattggcgacaaaccaaatcgatttgcagtatttatcgaaccattgacacaaattgatttaatcgtaaaatacgctcccgtcttatacggaacgaatgcaattatcggtatggtgaacgcttgtatcatcgcattcagcggattaaaaataggtgtcactggtatggcaacacctatggcaggtgcaattgtactattcggattcaatagtccaattaaatcaattatcacgattgctgcagttgcagtaactggattgatcttagcatctattattggctcattaattaaaaagttcgacttattacacttacatatcccaatgccatggaataaaggtaaaagtcagtcgtaa

SEQ ID NO: 2057 - DNA, 1359 bp, Staphylococcus capitis
atgatgaaaaacaaactcacgattaaagaaaatatttttattggatcgatgttatttggcttattctttggtgccggtaacttaatcttcccaattcatttagggcagactgccggcgctcatgtgtttactgctaatttaggatttttaatcacagcgataggattaccatttctaggtattattgccattggtgtgtctaaaacgaacgggattttcgaaatttcctcaagagtaagtaaaatatatgcgtatttatttacgattggtttatatcttgtgattgggccatttttcgcattaccaaggttagcgacaacgtcatatgaaattgcattctcgccttttatttcgccagtccaagctaaatttgtgctaccaatatttagtattttattcttcttggttgcatggttctttgctagaaagccttcaaaaattttagattatataggtaaattcttaaatcctgtatttttagttttacttggtattgtagtgttacttgcgtttattcatcctatgggaggcgtgagtcatgcgccagtgagtgcgcagtataaagaaggtgctctacttaaaggatttattgatggttacaatactttagacgctttagcatctctagcattcggtattattatcgttacaacaattaagaaactaggagtcactcatcctaacacaatagctaaagagacatttaagtcaggtacgattagtatcgtaggtatgggacttatttatagcttgctagccattatgggtacgatgagtttaggtaattttaaagttagtgaaaatggaggcatcgcactcgcacaaatcgctcaacattatctaggtgactacggtatcatagtgctttcacttattattgttgtggcatgtttgaaaacagctattggtttaattacagcattttcagaaacatttactgagctctttcctaaacagaaatacattatgttcgcgacagtagtcagtgtattagcatgtatatttgcgaatgttggtttaaccaagattattatgtattcaacaccagtactgatgtttatctatccactcgcaattacattaattctgctgactttagcaagtccattattcaatcattctaaaattgtgtatcgatttacaacattctttacaatgattgctgcatttatcgatggcgtaaaagcgagtcctgaattcttcgtgaagacaagtttcgctcgttttattatttctttaggtgaaaagtatttaccattctttacgataggaatgggttggattattccagcattgattgggttcattatcggattgatagtgtttaaagttcgaggaagtaagcaaccacaatcataa

SEQ ID NO: 2058 - DNA, 1557 bp, Staphylococcus capitis
ttggaagatgctatcaaaccagataaaaagaaaaagcgattcaagttgcggatgcccggggcatttatgattctattcttattaactgttgttgctgtaatagcaacatggcttattcctgcaggagcctattcaaaattatcgtacgaacccgcttcacaggaattaaaaatcgtcaatccacatcatcatgttaaaaaagtcccaggaactcaaaaagagcttgataagatgggcgtaaaaattaaaattgaacaatttaaatctggcgcgattaataaacctgtttcaattccaaatacgtacgagcgtttaaaacaacatcctgcagggctcgatcaaataacgagtagtatggttaaaggtaccatagaagctgtagatattatggtattcatacttgtattaggtggacttatcggcgtagtccaggcaagtggttcgttcgaatccggtttacttgctttaactcaaaagaccaaaggtcatgaattcatgttaattgctttcgtcgctattttaatggttcttggaggtacgctttgtggcatcgaggaagaagctgtcgccttttatcctgtactcgttcccattttcatcgcactaggatatgactccatcgtgtctgtgggagccatctttttagcaagttctattggtagtacattttcaacgattaatcctttctcagtagtcatcgcgtctaacgcagcaggaaccacatttacagacgggttgtactggagaataggtgcatgtgtcgtcggaacgatattcgttgtttgttatctctattggtattgcaaaaaaattaagcaagaacctaaagcgtcatacgcatatgaagacaaagctgaatttgagaaacaatggtcagtgatggatcaaaacagttcatcagaatttacattacgtaagaaaatcatcctcaccttgttcgttatacccttccctatcatggtatggggcgttatgactcaaggctggtggttcccagttatggcatctgcattcctaatatttactattattattatgtttattgcaggcatgggcagatatggtctaggagagaaaggtactgtagatgcatttgttaatggcgcatcaagtcttgtcggagtgtcactcatcatcggtctagcacgcggtatcaacttagtgttaaataaagggttaatctcagacacgattttgcacttctcatcttccatcgtgcaacatatgagtggcccattatttattatcgtactattagtcattttcttcttcctaggttttatcgtaccgtcatcatctggtttagccgtactatctatgccaatattcgcaccacttgccgatacagttggcatacctagattcgttattgttaccacttatcaatttggacaatatgcgatgttattccttgcaccaacagggctcgtcatggcaaccttgcagatgcttaacatgcgctactcccattggttgaagttcgtctggcctgtggtcgctttcgtgcttgtcttcggtggaggtctactcatcgcacaagtattaatttattcttag

SEQ ID NO: 2059 - DNA, 930 bp, Staphylococcus capitis
gtggcaaaaattgttgtagcattaggcggtaatgcgttaggttcgccaaaagaacaactcgaattagtaaaaaacactgctaaatcactcgtcggactcataactaaagggcatgaaattgttattagtcatggtaatggtcctcaagtcggtagcatcaatttaggattaaactacgcggctgaacatgatcaaggtcctgccttccctttcgcagaatgtggtgcaatgagtcaagcgtatataggctatcaactccaagaaagtttgcaaaatgaattacatgtgttgggcatagacaaacaagtggttacactagtgacgcaagttgaagttgatccagatgataaagcctttagtcatcctacaaaacccattggtctcttttatgataaagagactgctgaacgtattgaaaaagaaaaacattatagcttcattgaagacgccggtcgtggctacagacgtgtggtcccttcacctcaacctaagtccattgttgaattagaaagtatcaaaactttaatcgagaatggcacacttgttattgcagcaggaggcggtggcgtaccagtcattcgtgaacaacacgatagctttaaaggcgttgatgcggtcatagacaaggacaaaacaagtgctctccttggcgcagatattaactgtgatcaattaattattttgacagctattgactatgtttacgttaactataacactgacaatcaaaaagccctcaaaacggtaacacctgaagaattggaagcttatattaaagaggatcaatttgctaaaggtagcatgcttcccaaaatagaatcggccatttcatttattaagaataatcctaaaggtagcgttttaattacttcactagatcaattagacaacgcacttgaaggtaaaattggtacacttatcaaaaaataa

SEQ ID NO: 2060 - DNA, 1002 bp, Staphylococcus capitis
atgcaaaatttacgcaacagaagttttcttactttattagatttttcacagaaagaggtggagtttctattaaatcttgctgaagatttgaaacatgccaaatacataggtaatgaaaaacctatgcttaaaaataaaaatattgctcttctttttgaaaaagactctacaagaacacgttgttcatttgaagtcgcagctcatgatcaaggagctaatgttacgtatttaggccctacaggctctcaaatgggtaaaaaagaaactgctaaagataccgcaagagttctaggaggcatgtacgatggtattgagtaccgaggcttctcacaacgtacagttgaaacgttggctgaattttcaggagtgccagtatggaatggcttaactgatgaagaccacccaacgcaagtccttgcagatttcttaactgctaaagaagtattgaagaaagactactccgaaatcaacttcacttatgtcggtgatggccgtaataatgttgcaaacgcattaatgcaaggcgctgctatcatgggcatgaatttccaccttgtttgtccgcaagaattaaatcctactgatgaattacttaaccgttgcaaacgtatcgccgatgagaatggaggcaacatccttattacagatgatatcgataaaggggttaaagactctgacgttatctatacagatgtatgggtatctatgggtgaaccggacgaggtatggcaagagcgtcttaaattattagaaccataccgtgtaaacaaagaattaatggataaaacaggcaatccaaatgtgatttttgaacattgtctaccttcattccacaatactgacactaaaatcggcaaacagatttatgaacaatacggcataagtgaaatggaagttacagatgaggtatttgaaagtaaagcgtctgtagtattccaagaagctgaaaatagaatgcacacaataaaagcagttatggttgctactttaggtgaattctaa

SEQ ID NO: 2061 - DNA, 225 bp, Staphylococcus capitis
atgaagatttataggttagattatcaacatcataaagatattgtagatgacaatgtgttaactgtatttgtagcggctaaaaataagagtgaagtagaggcatttgctaaaaagttaagttattctattgaaacaattactaaattaacgcataaagaatttgaggaacaaaaagctgaaatcgagcattataaacttgaacatgctgatcaatatttagattaa

SEQ ID NO: 2062 - DNA, 666 bp, Staphylococcus capitis
atggctaataagcaattcgaaacattaacggaaatcgcaaatggtttatatgtaacacctacatcagaattgccatttgataaacgtttccgttttaaatcatttttacttcaacgttcagaaggtaatgtaatgatttatcattctggtagaattgatgaggctgcaaaggatatacaagaattaggtggcgttgataaagtattaatgaatcatcaacatgaatcgttaggtggagagacaaattttgatgcaccttactatattcacgaagatgataaacaggacgttaccgatacccttcaagttactggtacatttaaagaacggcaacatttacatgaagatttagaggtgatacctgtccctggacacacacctggaacgacattatatttgtgggataatggcgagcatcgctatttattcactggtgacttcttatgctacgaaggtgatgaatggcgaactgtaatacttccttcaagtgacagagaggcttcgattaagagtcttgaattgattcgggatctggactttgacgcacttgtaccatgggtgtcaattgaaggtgattcacctgtgttctttgttgaagatgacgaggataaaaaacaacgtgtacaaaaaattatcgaccgtgtaagtgacggggaaaatacttaa

SEQ ID NO: 2063 - DNA, 1200 bp, Staphylococcus capitis
ttgcaaaattctaaacatcaaaatcataaagtaaactggggattaatcagtgcagcctatgcatttcttattgtgatgatggggacgacattacctacaccactctatccaatttatagtaaagtatatgatttatcaccattaatgattacaatcatttacgctgtctatgctgctggtgtgattggaggattactcgtatttggtcaattgtcagaccgcataggacgccgttatgtacttattccaggagtgattttatctgcaatcagtgcgctagtgttcttatttgctaccaatgtaggtttattacttgctggacgagtgatttccggactgtcagcgggactttttacaagtacagcaacgacaacgattgttaatttagctgctgatgataaaaagggcagagcctctacaattgcaagtaacgtgaatatgcttggtttaggctttggtccattgctatgtggcatactcgcacaatatcttccatatgcgatgcgtttaatctttatcgttgattttattcttatcattccggcatttattggaatatggtttatgccagagcctgttaagaataaacaaaaatttaaaattgaagttcaaaagttgagtgtaccgtcagacattcgctctacatttatttatgctgttattcctgtattcgtaggattttcaatgcttggtttatttactgcgatttcaccaaactttttaggagacatattgaacattacaaataaagcagtcataggtgtcatggtattcttgatattctgtgcatctacgctaggccaattattgtttaaaagtaaatctgattatcacatattgatgttaggtagtggcacattaattgtaggcgtaatattagtaggtttatctattcaatttgaatcattcttaattttatttattggagctatcatttctggatttggacaagcattcagtttccgagctggattgtccacagtgaatgccgtagcacctgaagacaaacaagccgaaattacatccactttctttaccattgcctatatagctatttcaataccagttgtaggtgtagggttattagaactaggattaggcatcaaacttgcaggtattgtgtttagtatcataatcgtgatacttgcgatactttctttaattcttctactagctaataagaaaaaatcaaattcttaa

SEQ ID NO: 2064 - DNA, 411 bp, Staphylococcus capitis
atgaaaattagtgaagtttcatctatgttgaaaataccaaagtccatgattagatactatgaagaaaaagaaataattaatattcctagagatgaaaataattatagatattttgatgaggaaactatatcgtacttgaaactaattattgatttaaagcgattgaatttacaattaaaagatatagcatatgtaataaatctttttaaaaaacctgtttctaaggactgtaataacaaaacgctgaattacctagatgatcttataaaacaaatcaaaatagatattaatcgtcaaaacacaattttaaatcgattggaatcagttaaagatttatcaaaagatatgaattatgaaaaaaataagagtttgattttaaataaactttcaggggtggaagaaattgattag

SEQ ID NO: 2065 - DNA, 558 bp, Staphylococcus capitis
ttgattagtctaatatatggtggaaatcaaaaaggtgttggctttgatatctataataagttaaaagaggagctttgtaataaaaaattagaaattttcaatttacaggagatggttggcgacattcctattttatccgaaggctataattcagaaataagcgaagctcagtttcgaaatactgaaataatagataatagtaatatgttgatttttatttaccctatctattggttgaatgtgcctatgctattgaaaggttttattgatagtaccttttggcctaataaagcatttagttttaataataaacaatactttaaaagaggattatggaaagataaagatgcaatagttatatatactattggaggttcagagtggtttcataagtttaaaggacatctaggttataaagttattaaatatccattaaatctcgttggaatttacaatattaaaagattttatatagataatttaaataaatcgaatgctcaaagtataagtaataaagttgaaaaaatcgtaaatcaagtaacgaagttagttgattaa

SEQ ID NO: 2066 - DNA, 423 bp, Staphylococcus capitis
atgaatattcaaggtattaatcatatatgtttttcagttagtaatttagttgaatcaattaaattttatagagatgttttaaaaggggaattattagttagtggcaaaactactgcgtattttgatattggtggtctatgggttgctttaaatgaagaggttaatgtacctagaacagaaattaaatattcttatacacatattgcattttcaattaatgaaaatgagtttgaagaatggtacaaatggcttcaaaaacataatgtaaatatattagaaggacgaaagagaagtcatcaagataaaaagtcaatttactttactgatccagatggtcacaaattagaattacacactggtactttaaacgatagattagattattataaaaaagaaaaaacacatatgactttttattactag

SEQ ID NO: 2067 - DNA, 966 bp, Staphylococcus capitis
atgaatttaaacttagctgaacgtgttctttatcacgaaggattatcacaagatgaatgtttgaagatatatgaagatccaaatatcgatacgtttgaactcttgaatgaagcgtacatcgtaagaaaacattactatggtaaaaaagtgaaattaaatatgattcttaatgcgaaaagtggaatttgttctgaagattgtggttactgcggtcaatcggtaaagatgaaggaaaaacaacgctatgcattggtagatcaagatcaaattaaagcgggagcacaggttgctacagacaatcaaattggcacatattgtattgtcatgagtggacgaggacccacgaatcgagaagtagatcatatttgtgaaacggttgaagatattaagaaagtgcacccacaattaaaaatttgtgcatgtctaggacttacaaaagaagaacaagctgaaaaacttaaaggagcgggcgtagatagatataaccataatttaaatacaagtgagcgatatcacgatgaagtggtgactacgcatacatatgaagatcgagtgaatacagttgaaatgatgaaagctaataacatttctccatgttctggtgttatttgtggcatgggtgaaacgaatgaggatgtaatcaatatggcatttgcattgaaagaaattgatgcagacagcattccgattaatttcttacatccgattaagggaacaaaatttggaggtctagacttattgtcgccaatgaaatgtttaagaatcatagcaatgttccgtttaatcaatcccacgaaagaaattagaattgctggtggacgagaagttaatctgcgctcactacaagcaatagccttaaaagcagctaattctatttttgttggagactaccttattacgggtggtcaacctaacgaagaggattaccacatgattaaagatttagggtttgaaatagatagttaa

SEQ ID NO: 2068 - DNA, 615 bp, Staphylococcus capitis
atggaggattatatactatctttaaatctattagataatcgtttaaataaattagttcatattcataatgatttacatgatgaagtagaccaaactttagatgaaaaagaaccaaataatataacatacattaaaaacgcgactttgattttaataaagctttatttatataaactctctaaaaacaaagcacgttatggtaaagcaacatctaaaaacagcttaatacatatgttaaaggatgaagaagcttattatgcattttatgagtttaatagtgatttagaaattgaagagcttgcacttacaccaaatttagaaaaaaagtatgaagaagatgcattgagtttgttaaatattagaggcaaactaacaccttttatgaatgtaagtgaagatgtttgggaatttgagaaatttaacgaagatataactctagttataagaaacattataaaaaataatgatggcatcctgacagaaattctagaagataactatagaaaagaaaaattagacgaggttattaaacttacatttatagacacataccaaacaagaaatatgaataataaagctagcaatgtagctgaaaaattaatatctgattcataa

SEQ ID NO: 2069 - DNA, 246 bp, Staphylococcus capitis
atggaatatttacataaatttttaccgataatcatttatgttcttattatggcaattcattatgctttatctagaacaggtataaaacttttaggatttgtagtacctgtgattgttacggctggattaatctatacttataagaccggagatttacaattaaatttagttggaacgattataatgatagttatttcactactaattttatctgtagaatgggaagatgctcaaaaacgtaattaa

SEQ ID NO: 2070 - DNA, 876 bp, Staphylococcus capitis
atgaagaaaataataatactcatcacagtattttcactatttttaggcgcatgtaacaccgacaattctacagaacataaaaatgataaagcagaaaatccgactaaaaaagataaagacaacaaaacatcccacaaagaagcttcatcaaaaaatactaatactgatatcaaagctaaagataaagtggagaatttatcagaaaagatgaaattagcacttatcttttgcgctgatgataaagggaaatacacattaactaaaaataatattttgataggttcttttagaaatgataaagatgaatatcgaaagataggacaatttgtattagttaactatccaaaattcaccaacgcgcctaaaggtatgaagttttattcaatataccctagtaatcatgaagcccaagcaatagttggtattagtgacaaaaagattatcctaagtggatctcaaattcgtatcaaagattatcaacagttattagagcatggcaaagagtatagtacccaaaaggtctatgacaaagttaaaaataatagggcgcttccagaacttgcgaataagatgcacgtgagcaatcaattacctatctcaaacgatgaatggaaatacaatggattatcaccaagagaattgtatgaacgtggtggagtcatggctcatggaagtagccaagtatataaatttatttctgaacttgaaggcggttcattagataatgataaatatctatgggatgttgttcattggctaaaagatggaaactggaaagttaattgtcgtaataaagatggtgaaattgtagctacttatacaactgttaatggcaaagtagctaagtttgatgaaaatggtaaaagaattaaataa

SEQ ID NO: 2071 - DNA, 1446 bp, Staphylococcus capitis
atggcgagtaatgaaatgacaaccgccaaacgtaacaccattgtgttagtgatgcttattagcgcatttgtggcaatgttaaaccaaacgatcttaaatactgcattgcccgcaattataaaaggattgaacattacagaaacaactgcacaatggttgatcacaggctttatgctagtgaacggaatcatgataccactcacagcatttttaatggataaatatacgacacgtaaactttatatcttttctatggcagcgttcctcattggttcaattatagctgctttatctccaggatttgaaatcctaatggttgctcgtattatacaagcaatcggtgctggaatattacttccactaatgcaatttacagtgtttacactattccctgtagaaaaacgcggattcgcaatgggtctcacaggtatagtggcgcaaacagcaccagcgattgggccaacacttacaggattacttatcgatttctttagttggagaatgccattctacatcgttgcagcaatcgcacttatcgcattcgcaattgggttcttctttgttgagaataacggtcaaactaaagaaacagtactcgataaaatatcagtcgtttattcaacatttggtttcggcttaattctattcgcatttagtagtgtaagtacatttggaatcgcatcgatcccagtcatcactacatttattctaggtttaatcgtgattgcaatttttacattccgtcaattaaaaatcgaccatccattattaaacttaagcgtatttaaaagcaaagtatttacattatctgctatagcttcaatgcttgtctttataggtattgttggacctgctctacttattcctatgtacgttcaaactggattaggtcactcagcattactttcaggtttagtgatactaccaggtgcagtgttcaatgcatttatttcagtttatactggtaagatttttgataaatatggcatcaaggtacttgttattcctggatttacagtattaatcataatgacgatattacatgcattcttaactacagaaacgccattctggtatgttgtagtgatttacgcaatacgtatgatttctgtaggtttacttattatgccacttaatacagtaggtcttaatgcgcttaaaccagaagaaatttcacacggcacagcaattatgaactctctacgtatcattgcaggtgcgatgggaactgctatcagtattacaatattatcaattgtagctaagaattatacggctacgcatcatacgatgtctaaagtgaaattagcacgagaatcaacagttcaaggtgtcgatgcagcatttatcttcaccacagtattaattgtgattggctttatacttgcgttatttattaaagagaatcgcaacgccaaagatacagattcttcctctgaaaaataa

SEQ ID NO: 2072 - DNA, 213 bp, Staphylococcus capitis
atgggctatatattgctatggatttttgcgatttatggtatgattcgatttgttttcggtattggtaaagggattacaagttttgttaaaggcatgtttttaggtgcaatcgatggttataaacaccctgagaaatacccaaatcacctttcgaaagaagaacaaagacgtcaaagacatagagaagaacgagcacgacaaaaagatgcttaa

SEQ ID NO: 2073 - DNA, 777 bp, Staphylococcus capitis
atgattaaagatcaagtagctattattactggctcagcgagtggtattggtttagaaattgctaaatcctttattgaacaaggcgccaaagttgtcttctcagacattaatgaagaaggccttaataacgtcttccaccaatttcagcgacaaggctatgactgtcgggctatcaaagcggacgtctctaatgaggaagatgtgaagcatcttatcgctgagacgagacatcaatatggtcgtatagatattgttattaataatgctggtttacagaatgtagctaatatagaagactttccaactgaaaagtttaaacagatgatagatatcatgcttgttggtgcctttttaatgacaaagcatgttcttcctattatgaaggcgcaacactatggcagaatcttaaatatgtcatctattaatggtgtcatcggtttcgcaggaaaatcagcttataatagcgctaaacatggaattattggtttaacaaaagtaacagctttagaaacagctgaggacggtataacagtgaatgcgatttgtcctggatatatcgacacaccacttgttagaggacagatggaagacttagcacaaatgcgaaatgtagacgtagcgcaagtgatggatgaagtgttgttcccattaattcctcaaaaacgattaatcgatattcaagaaattgccgattatgccatatttttagcaagtaaatcgacgaaaagtgtgacaggacaagctattattatagatggtggttatacagtccagtaa

SEQ ID NO: 2074 - DNA, 1248 bp, Staphylococcus capitis
atgagaaaaatgagcatcaccttaaaagtaagattaatatgtagtttctttgaaaatttaattgttatggcatttttgccttttatagctttatacctaacggatatggtcaatcaggccttttcaggtatatttctttttattttagttttaatcaattttccaatttcgatgatttcggggcatattattgagcgttatcctaaaaaacgcacaatgcttatatatcaaattattgagtgtataagtttgcttgcaatggcattttcagtctctaatcagacattgcttatcatcatattttgcatagcttatacggtttttagtatttcgtctggtatgattgcaccgcttatagaaacgatgatcatggacgcgattacgccagaagttgaacattacatatataaagtaagttattggcttactaacgtagccgttgcttgtggtgcatttttaggaggagccatgtatcacgcgaataaatcggcgttgtttttgatcgcttttgtgattttcgtacttgtattcgtggctttatatatttggattcctaatgataacgccaaaccgttgaataaagagggacaaacttttaataatgtattaagtttgaaaggctttttacgtaattatcagcttgtgctaaaagataaattatttatgtatttaattatcggctcaagtattcttttaatgggtgaattatccacgtcatcttatgtttcaattagacttaaaaaggaattcgaaactttatcaatgtttcatgtctcaattgatggagttaaaatgtattcaattttaattatgactaatacgctagttgtaatagctttaacgtattttgtatctaaatatatcttgaaaatgaataatcaaaaagcgttatttgtaggtctcatcatgtatgtagtaggttattcaggcattacctatttaaatgattttactttacttatgatagttatggttatagccacgttaggtgagatgatttactctccgattactgaagaacatagatataagatgattcctgcacagaagagaggcacatattctgcaatacgtgcattaagttttaactttgcgcaattaattgcaagactgggtattattttaggcgtattgatgaacgccctaggtatgacgatttatatggcgctgattcttactttaggaagtatattgctctatcgtgcggtgtaccaatttaatttaaaggctaataatgaaaatcattaa

SEQ ID NO: 2075 - DNA, 7167 bp, Staphylococcus capitis
atgactattgaaacattgcattttcaacactatttttatcaaaaatatttacaatcaacttcaactacaaagagggtgacgtactgggttcgattagatcaagatatcgagcgtcatcgattgatgtatgcactgctagatgtagtacaacatcagccacagttgagggcgacattcaagcattgtaacgaccaattgcgcatcaatgtgcgagaatttttcccatttatacagattaaagaagtgaatcaatgttctaaaaaagttgatatcacgacttacctcaaccaagagttgaattcctactatttcaatcaattacctctatttaattttacaatttatcaatttttagatgaaacgttcttacttttagatttccattccatgattttcaatgatagccagttagatgatttctttaaacaactaaatatcgcgtatagctatggtctatttcatgaacatactgtatcggatttttatcacatgattaaagaaatgaatgtagcgactgatgcttcaaatgaggacaatcaacaacatttaaatcactttgaaatggctcatgccgatcaagattgtgaatcatacatgcctataaaacgaaattcagaacaaccacaagttgaacatacaagtgtagatcttgaatcatttgatatgactcgtctagttacaagcacttatttagcgaattactttttgagtcagtccaatcaagtgacgttgggaattcattttccaatggaatatgacaaaactgacgatatgatgttacttaacacacttgtagcaccactgagtttaaatatagacactacgctttctgcagacgtaattatgaatgaatgggaattagcgatagatgatatgaaagccaacgggacaggtttcttaagtgaacctaatgcaagtgatatggaattcgaaacaatcatacatgcaacgcaatttaacgagtactttgagttaaatcacaccgaacataaagttcatcgattgcatagtgatagttctttattagctgacatagaaatatatccacgtcctcaccaaggctttgatattgtatacaatacaaatgcctatgatgagctaacgattcaaacattagttagtttaattagaagtattaatatgcaattaacacataatccttcaaagataattaaagatatagaattatgtaatgaaaatgattttgaaatctatcaaaacatcaaccattcaacaagttcatcactttatcaaacggtaatggaacgttttgaatatcaagtagaacagtatccaaatcaaatagcattgcaatatgaacaacaatccatgacatatgcggaattgaactaccatgtgaatcgtttggcacaatatttgcgacacacttatcatgtacaacccaatgatattatcgcgctcttggcagaacgaagtatcgaaatggttataggtatgttaggtattttaaaggcaggcgctggatacttaccgattgatccagattatcctgaagatagaacaacctttattattgaagatgcacagcctaaagcaatcgtgacatatcaagcgacaatacagtctgacgttcctcaaattgaactagacacatttgattggaatggcgacgaagcggaaactgacaacccaagtcatatcaatactgatgaggatactgcatacatcatttatacttcaggtacaacaggtaagcctaaagggacagtggttcctcatagagggattgatcgtttagttcatgaacctaattatgttgaattaaatgatcaaacggttattttattatcgggaactgtagcgtttgatgctgccacatttgaaatttatggtgcgctattaaacggtggatgtttagtattaacgtcgaaagatactttacttaaccctgttcaattaggtcaaacaattgtgaatcaacaagtcaacacgatgtggttaacgtcatcccttttcaatcaaattgcaagtgaacgtatcgaggcgctagaacccttaacgtatctattaattggtggtgaggtgctaaatgcgaaatgggtgaatctattaaactcacgtcaacgccatcctcaaatcattaacggttatggtccaacagagaatacgacattcacgacgacttatgcgatacctgatgagatgccaaatcgaattcctattggtcaaccaatcaatggaacaacggtttacgtgatgcaaggtgagcacttatgtggtgtaggtgtgcctggggaattatgcataggaggcgctggtctggcgaagggatatttaaatcaaccagagctcactgctgaaaggtttatcacctctccctttgaaaatgagcgcctataccgcagtggggatttagtacgtcttcaagaagacggtcatattgattatctcagtcgtatcgataagcaagttaaaattcgtggctttagaattgaactatcagaaattgaaaaagcaattgaagcgattagagatattaataaagcagtcgttattgtgcgtgaagaggagcaagacaagcaaattgtggcatattatgaagcgcaacaatctcaatcgacgagtcacttgaaagaagtgttaagtgaaacattgccacaatatatgattccagttcatttcatgaaaatagataaaatacctatcactatcaatggtaaattagacaagcgagctttaccggatattgatagagttgatttatcaaactatgtggcgccacgtaacgaaggtgaacgtattatatgtcaaatctttgaagatatcttacatgtcgaccaagtaggtattaaagataatttctttgaacttggtgggcactcattgcgtgcaacgtcagttgtgaatcgtatcgaatcccaacttaagaaacgtttaaaagtcggagatattatgaaattaccgactgttgaacaattaagtcaacacattatggaaatgcaaaatgaagactatgaagtcatacctaaagcgcaaagagctgagcaatacgaattaagtgctgttcaaaaaagtatgtacttattgtggagtgtcaatcctgaagacactgtttataatattccgttcttatggcgattgtcttctgaattaaacgtagagcaattgaagcgagcgttgaaccaacttattgctcgtcacgaaattttaaggactcaatatatagtggatggcaatgaagtgaaacaaagagtagcagacaatgttgctgctgattttaaagaagtgacgacacgacttacagatgaacaacaaattattcaggcctttatgcaaccgtttaatttagagcaacctagtcaaatgcgtgtaagatatatccatggtccacatgaggattatctgtttatggatacgcatcacagtatcaatgacggtatgagtaatacgattttattagcagatttaaatgctttatatcaagaaaaatcacttcctaatctatcactgcaatataaagattatagtgaatggatggctcatcgagatttatctattcaacgtcgctattggttacaacaatttgaagatggtgttcctgtattaaatatgtcaacagattatccaagacctagtattaagacgacacatggtcaaatgttgacgttccattttgataagaacttaaaatcacagttgcaaaattatgtggagaaacatcaaatgactgatttcatgttctttgcaagtgcaataatggtattgcttcataaatatacacgccaagatgacattgtcatagggagcgttataagtgcccgcactcatcgtgacactgaaaatatgcttggtatgtttgcgaatacactactttaccgtggccatccaacgaacgataaaacatgggaacaattgatgtctgaagtgaaagaaacaagtctcggtgcgtatgaacatcaagagtatccatttgaaagtcttgttaacgatttgatggatgaacgagatgcttcgcgtaatccattattcgacgtaatgcttgtattacaaaacaacgaaacaaaccatgctaactttggacatagtcaactgacgcacattccacctcaaacgacaacagctaaatttgacttgtcgtttatcattgaggaagatcgagacgactatgtggttaatattgaatataatacagatttatatgcggaagagacgattcataatcttgcttaccagcttgaaaatatcatccaacatgtgacatctactcaagctttaaaaattcaagatattcaagaatctccggatatgctggaatgggttgaaacaaatgttaatcatcataccctatatttcccggaaaataattccctacagcaattattcaatcatgtagttaatgagaagaaagatgagattgcactgaaaatgaacgggcaatcaatgacgtatgatgaattaaatcattatgcaaatcgtatagccaatgagcttatgaaaaatggagtgacatatggagagcgagttgcattattaatagatagaagctttgaaatgattgcgagtatgattgcatcatggaagataggtgcgtcgtatgttccaattgatatcacgcatcctgataaacgtattgagttaatgattgaagatgctcaagtgtcagccattttaacttatggtaaggagtttgattctaacctattaacgattgcattagagtctattgataaagaatcgcccgttgaaaagtcattttctgaatatgagggtagtctagaagatgaactttatagcatttacacatctggaacaactggcatgccaaaaggtgtggcggtaagacaacgtaatgttttaaacttggtaaatgcttggacagagagacttgaattatcggaagatgaaacgtttattcaatatgcgaattacgtcttcgatgcatctgcgatggatatctattgcagtctgttaaatggttatacacttgtgattgcaaacaatgaagaacgtactgatacagagcaactacaacgactgattgaaagagaacgtattacggttgcatctataccacttcaagtttgtaacgtcatggaagatttctatatacctaagttaattactggtggtgcaacaagtactccaacgtttgtgcgtcatatttcagagcattgcgatacgtactttaatgcgtatggaccttctgaatccacagtgattgcttcaaactggtcatacactaaaggtgagcctattccatcagcaatacctataggacaacctttagctaacattcaagtatacattttatcgggtatgcaattgtgtggtgtaggtgtttcaggagaattgtgtatcgcaggtgaaagtttaacggctggttatttaaatagacctgaacttactgctgaatctttcatagataatccatttggtgaaggcaaattatatcgcagtggtgaccttgcaagatatacacatgatggtcaaattgaatttatggggcgaatagataatcaagttaaagtcaatggttaccgtatcgaacttggagaaatcgaaaacattatcaatttagtagagggcgtttctgatagcgtagttatcgttgatcaacaaggagaacatgaagttctacatgcctattatgtaggcgataaagacattaagtcagacatcgtaagacagttaaatcaatacttacctaagtacatgattccaaaaactgtcacagcaattgatgttattccgttaacacgtaatgataaagtagatgaatcaaaattacctcgtccacaaattcaaagaaatggatatgtagaacctagaaatgatatggaacgccaattcgcttcaatatttgctgacgtgttagagcttccgacgataggcatagacgatgacttcttcgaaataggtggtacgtcactagatgcgatggttgcggtatctaagcttaaatctcatgatataaatctcactatgcaagatatatatcaatataaatcaataagacatttggcagaagtctttgaaggcggaaaagagctagtggaagttgaacttccagatcacttgtctcaacttcaagcattagtcaaacgtcgttaccaattgaatgtaagtaatgagactcaaaactcacttggaagagttctccttactggaggtactggtttcttaggtgcatatctaattaatgagttacaagaccaagctactaaagtgacatgcttagtaagaggtcaagttatcaaagatgcacgtgctaaagttgaagcgaatttacttagctacttcgaggcagataaagttgaagaactcatggataaggtagaggtagttctaggagacttagcaaacttagatgcatttaacgttgaagatacaattgatacaatcattcatgctggggcgcgtacagatcatttcggagatgatgaaaactttattcacgtaaacgtacagagtaccgaagctttattagctctagcacagcaacatcaagcgaaatttatatacatttcgacaattagtgttggagcagtctttgatgtccacaccgaggataaggctttttctgaaaaagatgtttataaacaacaattatttacatcaccttatacaaaaagtaaattctatagtgaaatcaaagttttagaagcggttaatgatggtttagatgctcaaattatgagactagggaatttaacaagtgcttattctggcgcgttaaacatgacaaatcttacgacaaaccgtttttcaattatgatgcatgaattattaaaaatatcatctattggagaatatttcggtaaaacatctgtagacttatcatttattgatattaccgcacgtcatgttatgaagattgctgcatcccaagcgcaatcaattatttatcatatttattctcctcatacgagaactatgcaaagcgtattagagaatgcaaaacaaactcagatgaatatcattagtgacgaggaatttgaacaaatgttgcttaataatggtatgcatgaggttatcggtttaagtagcggagatacaacccaagttcccgcacaaatcgaatctgagatgacccaacatgttatagcacagttaggtgacggatggcctcatgtcacttctcaatggttacgtgcttggagagatttactcattgaaaaatttaaagaatctgaggaacatgaatga

SEQ ID NO: 2076 - DNA, 624 bp, Staphylococcus capitis
atgacactatttttaacgaaaataaatgatgacataacaaatattgaacatcgtttatttcaatcatatcgacaattaaagaaacctgaacgttcaaaatatcgttttaaaaaagatcgtgtcatgcatcaaataggagatatgttgattcagtactgtatcgagcaatgttatggtctgaacataaatcagtggaagtatcatgttacaaagaatggtaagattgagattcaaagtaggaaacatattaatgtgaatctttcatacagttttccgtatattgtatgcgctattgatcaacatccagtaggcgtcgatattgaagaaattaaagatttgaattatttaaacttggctacacaattttccgtaaatgaatttaaccaagtacgacaattaaaagatttttatacaatttggacgaaaaaagaaagttatacgaaattgataggagaagggttactcaaaggcttagatgtttatgacgtaacacagcccttatactatcaagatgacaaggtgttctttcaagaatatatatgccaagatagaatgattcatttgtgttcaaatcatagtcgtaaacatgagatagttaaaaaatcactagattgtttactttaa

SEQ ID NO: 2077 - DNA, 2331 bp, Staphylococcus capitis
atgaaaaacagaaagaactcttacagtattcgcaaattaagtgttggtgcgtcttcaatcattgtcgcatcgatgttatttattgggggcggcgctgcacacgcggcagaacaggatgtacaagggaattctgaaagtcatacagcacaatcacacggggcagataatgaaaatttaagtgagccacaaacgaatgatcaaaaagatagccaaacagtagaaactaagaatgatacttcatcagctatacataaagatgaaacacaaaaccaagcgcaaacaaacactgcgaaccatccatcaaacaatgataatcaatctaatgaagacctaacgacagatcaatctacttcggaacagacagataaagatcaatcaaaagaacaaccagttgataatcaaactacagaagataaacaatcaaaacaagatattaatcaatcaaacttacaaaagcaatcacctgaaaataatgatggacaagaaagtaaaactcaacaagatacagtcaataagcaggaaagtgcagctgtaacgacacctgcaaaagaaaatcaagataataagcagcaaaatttagatgaaactgctaataaaacaacacaagagtcaagttcagaagtagcaaaggttcgtaataatgaggaaactgcaaaatctgaagatactcaatcagataatgaaaaagagcaaacaacctctgaggacgtgaaagatcaagcatcttcatatgaaaatacattagagtcttctcaaaataataaagctgatgcaacaacacctaataacgacaaagataaaacaaataaaactcaaccagagcaacgtaatcataaagtatcaacttcaactcaaaataaagaattaaatcgtgaaacaacacagcaatctaaagataatgaacaacaaagcgatgttgcagaaaaagaagctccagtagaagctttaaataatgatcaacagtcaaattcatctcaaaaagatgcaaaagataaacaacttaaagtaaatgatttaaagaatgataaagcgacagaccattcttcacctagtgacaaagatgatcaatctaaaaaaggattaaatacgttaacacgcaatgcgattgctacacctaaaaagaaatcagcacaacaatctgaaacaaaagttaaaaagcaaggcgataaatccttcccacaaattcaatataaaaaccatgatccaatcatacttgttcatggcttcaacggatatactgcagataatggtccagtactaggtcataactactggggcggtaaacgaattaaacttacacaagagttaagagctaaaggttacaacgttagtgaagcgagcgtgagtgcattcggcagtaactatgatagagccgtggaattatattactatattaaaggcggtacagttgattacggtgctgcacatgctgctaaatacggtcatgatcgttatggtaaaacatatgctggggcgtatcgcgattggaagcctggtcaaaaaattcatttaattggtcatagtatgggtggacaaactgttcgtttactagaagaaatgcttcgaaaaggtaatcctgaagaagttaaatatcaaaagaaacacggtggcgacatttctcctttatataaaggtggccaagataacatggtttcttcaatcacgacattagcagcaccacacaatggtactcatgcagctgatatcggcaacgaaccatttattcgccaacttgcatatgattacgctaaattccaaggtagtaaacattcaaaagttgacgtaggtttaaaacaatggggtcttgctcaaagagacgatgaaacgaatgctgaatatctaaaacgtgttaagaatactagtaagatatggaaaacgaaagataatgcattctatgatttaagtcgtgaaggtacaagtaagttaaatcaccatacgtcactcaatccaaatattgtatataaaacatacagtggggaatcaacaagaccagcattgaatggtagacaaaaagctgatattaatatgggtatgtcctatatcgttacaggcaatgtgattggtaaagttcctgagaaagaatggagagtgaatgatggcttagtttcagttgtttcagcacaacatccatttaaccaagcatacacacctgcaacgaaagatattaaaaaaggtgtatggcaagtaatgcctgtaaaacatgaatgggatcacggtgatttcgttggatcagatggtacagaagcacgtatttcagtagatgatttaagagcattctgggacagcattgctgaagaaattgttcaaaatgaaaaagtaacagataaataa

SEQ ID NO: 2078 - DNA, 1341 bp, Staphylococcus capitis
atgaaagtgaataagtatttaatattcatattgggagcattgggaggtttattatacggttatgacaacggtgtaatctctggtgcattactttttatacataaagatatacctctaaacagtacgacagaagggattgtcgtatcatccatgttaattggtgctattatcggggcaggaagtagtggtccattagccgataaactaggacgtcgtcgtcttgtaatgttaattgccgtcgtcttcattattggtgcattaacacttgcattctctacaaatcttgcacttctaattgtgggacgattgattattggtttagcagtcggtggttctatgtctacagtaccagtgtatctaactgaaatggcccctacagaatatcgtggctcactcggttcattaaaccaattaatgattactattggtattttagcagcatatcttgtgaactatgcattcgctaatattgaaggttggcgttggatgcttggtttagcagttgtaccatcagtgattctacttattggaatttactttatgcctgaaagtccaagatggttacttgaaaatagaagcgaagaagcggctcgtaaagttatgaagattacttatgacgatagcgaaattgaaaaagagcttaaagaaatgaaagaaatctcagctattgctgaatcatcatggtcagtaataaaatcgccttggttaggtagaacacttattgtaggttgtatctttgcgatattccaacaatttatcggtattaatgcggttatcttctattcttcatctatcttcgctaaggctggtttaggtgaagcggcatctattttaggttcagttggtataggtataattaatgttcttgttacaattgcagcattatttgtagttgataaaattgaccgtaagaaattattagtcattggtaatattgggatgattgcatcacttatcatcatggcagtattgatttggacaataggtatagcatcgtcagcgtggattattatcttatgtttatctctatttatcgttttcttcggtatttcatggggacctgtgttatgggtcatgttaccagagcttttccctatgcgcgctcgtggtgcagcaactggtatctcagcattagtgcttaatattggtacattaattgtgtcattactattcccaattttaagtgatgcgttaagtaccgaatgggtcttcttaatcttcgctgtaattggtatacttgcaatgctatttgttattaaattcttacctgaaacacgtggacgtagtcttgaagaaattgaacatgatttacgcgaacgtacaggcgctaaaacacattaa

SEQ ID NO: 2079 - DNA, 1710 bp, Staphylococcus capitis
ttgaaaagtgctcaagcgctagaacgcactttaaagtcattagatgggcaaaaatatggtgcctataaacgtacgaaaggtgtgtatgaattcgatcaatttagacttgctatagaccatgtacaagtcgatccgtttgcaccaccttctaaaatgagatgtatcgtagctagggatgaggcaggcatacctgatcaattattagatgacaaatataaacgtattgctgtgagtgatttcttaacgcgagcagtgcacaataaggtgagagagctaacaaaaaaggataaaaaatctgggaagatacaaatcgatcgctgtggacaagagatgttagagcggacctctgtggtgattaatgatactgacattgaagcgcgtatcgaagtgggattacctgcagcaggtcgtaaaattcttggtaaagcagctgcacatacaattatcgataccttaccagaaattgttgatcaagcattacactatcaacatcttgaccattctaaacttcaagatcaagtcaatctcattaaagatcagatgtatattcgagaagaattagacaaacgcaaccttgtttcgtttgttgctaacggcgcaatcttacctcgacaaagtggagtatctgaccgtcctatgcaccacgctattcagtttcaaagtccagaaaaatttgagattcaattagacttgcctagtggaaaatctattaaaggtatgggcatacctaaaggaattactttaatcgtaggtggcggttatcatggtaaatccacattactcgaagcacttgagcgtggtgtatataatcacattgacggagatggtagagagtatgtcatcacacaacatgatgcgatgaagattcgtgctgaagatggcagaagtattgagaaagtcaatattcaaccatttatcgatcacttgccaggtaagaaagatactacggaattctcaacagaaaatgcaagtggcagtacgtctcaagcagcaaatgtgatggaggctttagaagctcagacatcgcttttacttatcgatgaagatacatctgcgacgaattttatgattcgagacggacgtatgcaaaagttgattgctcgtgagaaagaaccgattacaccattttcaaataaagttaaaccattatacgaggattacgatgtctcaacaattcttattgttggtggctcaggagattactttgatgtggctgaccaagtattaatgatggatgaatatcatttgaaagatgtgacagttgaggcaaaagacatcgcacaatctacaggatatgaaagacttgatatgtccaacagtgaatttggtagcattccgtctagagtccctcttaaatctagcttcaataagaaaggcaaagatggtcgttttaaagctaaagggcttcatgcagttacttatggtaaagaacctatccaaatctctggtttagagcaacttgtcgatgatagccagactaatagtttagcagtgatgttagattatcttaacaacgaattactcaatgataatgatacattgattgaagcaacagatcgtttatatcaacgtattgaagcagaaggtttagaagttatttcacatcatcaaggtcacccaggtaatttagccttaccacgtaaacaagagttgataggtacaattaatagatatagaggattacacattcgtagcgataaaactgaatag

SEQ ID NO: 2080 - DNA, 1659 bp, Staphylococcus capitis
atgactaaaactgtacatatcatcggtgccggtttaagtggtctcgtagctgcaacggaacttcttaagaagggataccatgtgactttaatcgaccaagaacctagacaagctattggtggccaagcatactggtcattcggaggcttattcttagtcaattcaaaagtgcaacgtcgttatggtgtcaaagattcttatgaattagcactcaatgactggttaggctcagcacagtttgaccgtcttgatggagaggactattgggctgaacaatgggcaaaagcttatgttaaattcgcaacatatgaaaaggaagactacttaaatcgtatgggcgttaaattaactccaattctaggttgggctgaacgtggtggcgcttcagcatcgggtcacggtaattcagttcctcgtttccatattacatggggaacaggccctggacttgtagaaccatttagtaattatgtccttcaacaagagcaagaaggtcgcgtcactttcttacctagacatcaagtcacatctatcgacattgaagataatcaagtacgccatatctctgggaatattctcgaagatagtgatgttgaacgtggcaccccttcctctcgacaagtgattgatacattttcatatgatgtcgaacatcttgttattacatcaggcggtattggggcaaatatcgaattaattaagaagtattggcctaaacgtctaggccaagcccctgaacatatgattcaaggtgtgccagactctactgatggacgtttgattggtatttctgaaaatgcaggcgtcaacatcgttaataaagatcgtatgtggcattatacagaaggcgttaaaaaccatagtccaatttggactcaacatgggattcgtatcattcctggtccttcatcaatgtggtttgatgctgaaggacatcgtatgtctgcaccagattatcctggttttgatactttacacacgttggaaactattatgaaaacaggatatgactattcatggtttattttgactgaagatatcattaaaaaagagtttgtgttatcaggttcagaacaaaatccagatttaactaacaaagacattcagttgttaattaaagagcgattaagcaaacaagcgacttcaccagtgaatgcatttatggaaaaaggtgaagactttgtggttgccgatgatttaggcacgctcgttaagaaaatgaatgaactcgtagatgatgatcttttaaaatacgaagatattaaagctgaaattaaatcacgtgatttgcaaattaccaattcatttagtaaagaccctcaagtagcatttattcataatgcacgacagtttttaggagataaaattgtacgaactgcaaaacctaaacctttcctaagtaatcaaagtggtaaattaattgcagtaaaacttaacattattagtcgtaaaacactaggtggtattcaaaccgatttagatggacgtgctatcaaccaacaacgtgaacctatacaaggattatatgctgctggtgaagcatctggctttggtggcggtggtcttcacggttatcgtgcacttgaaggtaccttcttaggtggttgtatctttagtggtattagagctgctgaaggtatcgataaacataacttataa

SEQ ID NO: 2081 - DNA, 423 bp, Staphylococcus capitis
atgacacaaatcaacggaatagacgagtgggttgaagttacagaatattttcgatacatcgaggacatgattgagcgtaatttcaaacaaaactatggtgttagtttaagagagttctatgtacttcatgaattatataaagcgaaagacaaaaagtataaaattaatgatttaataaaagaagtgaaattgagtcagagtgcgatgtcgcgtctcatagatcgactgcgatctccgaagaaagcattaatatgtaaggatataagtgatgaagatcaacgtgcgacgtatatttatcttacaggcaaaggcaattctattgttcaacaactcatgaaagattatagaaagttaattagcaaagtcgatatcgaaagtattgaacgacaaatacaaagagctaaacgtgctaatttatcttaa

SEQ ID NO: 2082 - DNA, 495 bp, Staphylococcus capitis
atgacatttaagtctgttcaattgatggaagatttagtgagaaatttaaatataaactttgaaatatatgctaatgaaaaatggaataaagaatatgaagcacttgatttgagtattaatcatataaaatgtaaaagcagattagctaagaaaacgaataaaaaacagggatatttcgtaacattatggactaaagattcgatgtcagttaatcaaccatttgagtatgctaattttcctgagaaattaatagtaaatgtgattgataaggacaaacttggccaatttatctttccaaaagatgaattattaaaacgagagatattaagtaatcattttaagaaaggtaaaatggcctttagagtttatcctagttgggttacacacttaaattctactgccctaaaaacgcaagcatggcagagtaaatattttatagacttaacggaaaacattgataaacagactatattaaggttatatggggagatatga

SEQ ID NO: 2083 - DNA, 1149 bp, Staphylococcus capitis
atgaagaaaatactaatattagccttgggaatgttttcattaggtatggatacttatatcgtcgcaggcttaatccctgaaatgagtagaagtttaaatcaatcaagtactgcaatcggacaaggtgtaacaatatttacacttgtatttgcaatttctgcgccattattttctatctttttagctaaaattaatgttaagcaaacacttatattcgctctaatcatctttatttttgcgaacatcatgacatctttggcagttaatttacctatttatctcttggcaagagcaattgctggattaggtgcaggcatcttttctccaatggcagttagtacaggcagtcaattagtagagaataaaaatagagggaaagctcttgcgactgtggttggaggcttgagtataggtactgtcatcggggtacctttaggtatccaaatatcaaatttaagctcttggagagtcactttattatttattgtcttaataagtaccctaacgtgtgtacttatagctattcactttagagcaatatttgccccgactccaccaagtatcaaagaaagatttaagctatttatacatcctcatattattcgaataatgacagttacagtgtgtgcagcaatcgctagtttaggtttatatacctatttaagtaaaattgttgaacattatcaaagtatctattctcttactacttatttgatgttgtggggtattggaggcttgataggaagctttagtatcgggtttattatagatatgtttaagtttactaacctaattgtgctaagtataatgatacttcttttatttagcttcatacttctacctatctcaatccacacacctatcgcgagctgcctcccttttttactttggggcgctatgggttgggctacacaggctcctcaacaacatatacttattaaaaattataaaagttatggtgagactgcagtagcattaaatagctcagttaattacttgggaagtagtattggatcagctttatgtggttcattattatttatcactcacaatataaacatgctagtttatctatctatttttatttgtggtattggtttattagtccaactaacaaatatattaatagataaaaagcagtcattttaa

SEQ ID NO: 2084 - DNA, 816 bp, Staphylococcus capitis
atggagacagattatattagagatatattggaagtggctaaatataatagctttaacaaagcatcagaggtaatgaatatcagcacgcctgcaatacgaaaaagagttacttcagtcgaaaatgaattaaatcaacaaatattcataagaaacagaaaaggtgtgttcttaactaaagaaggtcaatcaatactagagaaactaaataaaatttatgaagaagttgaaaaagtaaaaattagtaactcacagataaacaaaagagacataaaagtaggattacttccgagtattaacccacataatattaaaaaaattgaagaaactgaggatttgaattttcaatatataattaatgataatacagctagcttgatagaatcattaaaaattaaagaaatagatgtagctattggcgatatcggtaacatgtcgataaagaacttttatgctcaaaagttttatgaagaagattacttcatagtctattctgaaagacgagaaaagttgaataattctttgttaaatcttggtaatgaaagaatttacattcaaacaccaccatgtgacacactgcattttttaaacaaagttttaaaaattaaagaagatctattagtttacaacgattattttgagacaattttagccaatgtctctgcaaataaaggtataactcttttaccagaatcatacttggataaggtaagtgataaccttaattatataaagcttgaagaatacgtacgtgaaataggtctcatatcatctagtgaatcgttaaacgcgtatgtaaatgagatattaagcaattag

SEQ ID NO: 2085 - DNA, 510 bp, Staphylococcus capitis
atggatgttagatttcctataggagaattagagttaccgaacaaagtaactttagttgatgtgaaacaatggatgagtgaagtagaaacatatattgatcaactaaaaaatgttgttgatgacctatcagatgagcaactaactaaaaaatatcgagaaggtagttggacagtcagacaacttgtacatcatattgcagactctcaaatgcaattatttagccgcttaaagttagctttaactgaggaacacccatcagcacctgagtttgaccaaaatcagtgggtggatttagcagactcaagtttacctatcgaaatttctatacaattactagatgccctaaatcaacgtgttgttgctattggtgaaaacgtatcaaactcggaccttgaaaggaaagttaatttagagggaacagatgacttaaccgtagcattcttattggctaaattatcatggcatgagcgtcatcatctagaacacattaaaattgcactttcaaattaa

SEQ ID NO: 2086 - DNA, 990 bp, Staphylococcus capitis
atggataagaagcgtatagttgagttagatattattcgaggcatagcgatttcagtcgttctttttgcaaatgtttcagaagtattgcccattttcgaagatgaaaagaaacctcattttacaagtctagattatatgattaaacaatttttctcactatttatagatggacgttttattatgttgtttactttattatttggtatcggaatgggcatatttatgaataatgcgcgtaaaaaatcactttcaccgttaaagctgatgtttagacgtttactctttctatttgttgtaggtatctttggtatgattttatcattaccatacgcagaatatgcaatatgtggcgctgtcatcatgtggttattcttgttacctcaagcacgctataatttatggatttcaattcttacactattaagcatcaatatcatgacatttgtagatacgaattccaacttatatttaattgatgcaatggcagtgatgctatttgggatgtacatgtcacaaagtggtatgatttatagatttaagcaccatcgtaagtttttcttaaatacattccttatttgcttagcagctattattgttttaatcggaataaagtatattggttctaatttatcatggatgaatatagaagacttagtcacaccattccaaacgctcatttacttcataatactattattcattactgataaagagagtgttcaacgtcttttagtaccttttgaaaagttaggtaaaacagcgtttacgaattttatggctcaaatgttattactatatttctttataagatttgtgttcccatataatcatccaacaccaattcaatcaatctgtattgcgctacctatcctcataataagtatgttagtgacacattggtggcttaaacgttatcgtcaaggccctcttgaagcgttgtggcgtaaatggacctataaaaatgtacctaagaaagtaaaaagtcgctaa

SEQ ID NO: 2087 - DNA, 210 bp, Staphylococcus capitis
atgactgaagaaaaaggttgcgtgaagtgtggtcatacggaaatagaagaaggaacactatctgctacaggatcaggtttatcgaaaatgtttgatgttcagcacaataactttaaaacaatcacatgtacgaattgtggttataccgagttttacaaagaaagtgctaaccgtgcaagtgacttcatagacttattctttgggggataa

SEQ ID NO: 2088 - DNA, 903 bp, Staphylococcus capitis
atgacatctgagtataaaaagggaatattttttgcgttaggtgcttacgttttatgggggatactccctatttattgggaacttatagatcatattggtgcatttgaaattcttgcttttagaattattttctcaatgatatttatgattcttctgcttgtagtagggcgcaaacaacgagaggcgttccttagagatgtgaatcaattatttacacatcctgtacaacttgtagcaattattgtagcgggatatgtaatcacgataaattggggaacttttatttgggcagtaacaaatgggcatgtacttcaatcaagtttaggttattatattaatccacttgtcagtatcgtgctagcgctcattttcttaaaagagagatttaacaaatttgaatggttagccatcatctttgcattaatcggtgtactctatatgactattaaaataggggaatttccattcgtatctatcatgctcgccttatcatttggtttgtatggactccttaaaaagattgtacatatcgatgcgattagcagtatagcgatagaatgtattgtcactgcgccagcgggaataatttatgttatctacttatggcaacaacatcacatgacgtttggatttaatatgtcgtcattttggcttgtcttctcaggggcagtaacagcaatcccactaatattgttctcagcaggagcgaaacgtataccattatcacttacaggttttattcagtatgtaggaccaacaattatgtttattctcggcattttcgtctttaaagaaaagtttgatgtccatcaattaattacatttatatttatatggattggaattattctatatagtatttcgcaatatatgaatattaagagaaatccaattgcgaaataa

SEQ ID NO: 2089 - DNA, 114 bp, Staphylococcus capitis
gtgattcaacaagcgcaagtacgtctgaatcactcagtacgtcaacatctgacagtacatcagagtcaacaagcacatcagcatcagaatcagaaagtgaaagcacgtcaataa

SEQ ID NO: 2090 - DNA, 909 bp, Staphylococcus capitis
atgaatcaacgtattgaaattattggtgcaccttccacattcggtcaaaagaaacttggtgtaaacttaggaccagatgcaattcgttatgcaggattattgtcacgtcttaaaaaaatgggacttgatgttatagataaaggtaatatagaagtaccaacattagatgtagagaaatttaactctgatcaagaagggttaaggaactatgatgaaatagtaactgtttctgaaaatcttagcaaagctacatcagaaatagtagagaaaggaaactttccacttacacttggtggcgatcattcaatagctgttggttcgatttcaggtattagtcaacattacgaaaatctaggtgtcatttggtacgatgctcatggtgacttaaatgtacctgaagaatctccttctggtaatgttcacggtatgcctttaagaatattagcaggtgatggaccagatgaacttgtcaatataaatgattttacgcctaaagttaaacctgaaaatatcgtattaattggtatgagggatttagatgaaggtgaaaggaaatacataaaggataagaatattaaaacttttactatggcggatatcgaccggttcggaatacaagaggtgattgaaagatctcttgagtatctaaaatctagaaatatagatggccttcatttctcactagacgttgatgctttagatcccgctgaaactcctggaacgggtacaagagtaatgggtggtttgagctatagggaaagtcactttgcactcgaattgttaaatgaatcaaaattagttacttcaatggatatagttgaggttaatcctcttattgacaattcgaatcatactgctgaacaagctgttgcgctattaggtactttctttggtgaaacacttctataa

SEQ ID NO: 2091 - DNA, 807 bp, Staphylococcus capitis
atggatttttccaacttttttcaaaatcttagtacattaaaaattattactagtgtacttgatttactgattgtttggtatgtactttatcttctcataacagtttttaaaggcactaaagcgattcaattactaaaagggattgtcgtaattgttatcggccaacaagtcagtaagatgcttaatttaacagcaacctctaaattatttgatatcgttattcagtggggagtacttgcactaattgttattttccaacctgaaatacgaagagcattagaacaattaggtagaggtagctttttaaaacgttataccaacacttatagtcgtgatgaagagaaattaatacaatctgtttctaaagctgttcagtatatggctaaaagacgaataggtgcacttattgtttttgaaaaagaaacaggattacaagactacatagaaactggtattccaatgaactcagatatttctcaagagttattgacaaacgtctttattccaaacacaccattacatgatggtgcgatgattattcaaggtagtaaaatagctgtagcagcgagttatttacctttatcagacagtgttaaaatatctaaaagtttaggaacaagacatagagcagcagttgggatttcagaggtatctgatgcttttacagttgtagtttcagaagaaactggagatatatctgtaacttttgatggtaaacttagaagagatatatctaatgaagttttcgaagaattacttgctgaacattggtttggcgcacactttcaaaagaaaggtgtgaattaa

SEQ ID NO: 2092 - DNA, 933 bp, Staphylococcus capitis
atgttagaaagtaagtggggattaagatttgtagcgttaatcctagctatatttttctttttatcagttaataatgtatttggaaatgtgtttaatacagacgatatatcacagaaatccactaaaacaattcaggatgtacctgtagatgtaatttacaataataaagatttacatgttacgaaagcgcctgataatgtcgatgttaatttatcaggcccccaatcaaagttaattaaaattgaaaatccagaagaccttaaagtaacaattgatttatccgataaaaaagctggagagtatcacaagaaatttcaggttaaaggtatagatgacgatgtaagctacagtgtaaaacctaaaagcgcagatgttcatctagagaaaaagattactaaaaaaatgcatgttcaacctgatgtaagtcaaagtgatattgatgcaaagtataaagtaagtaaacaaagcatttctcctgaaactgttaaagtgacaggtggggagcaacagcttaaaaaaattgcttatttaaaagctacatttaaaaaggctagtaaaatttcaaaagatacaaatgatgtagctgaagtcaatgcatttgataaagaattaaataaattaaatgtctcaattaatcctagtgaagtagatttaaaagttgcagttgaaccttatagtaaaaaagtaaaagttcgtactaaatcaacgggtaaactagataatgatagagaattagataatatcaaattaaacgataaagaagttgagatttacggtagtagagacgatttacaaagcatcaatgaagtaacagctgaagttgatttagatggcgtatcagaatcaactgagaaaacagtaaaatttgacttgccagacaatgttacaaaagtaagtcctaaggaaacgaaagcatatataaacgttaaataa

SEQ ID NO: 2093 - DNA, 1359 bp, Staphylococcus capitis
atgggaaaatattttggtactgatggtgttcgaggcattgccaaccaagagcttacacctgaattagcttttaaattgggtagatatggtggatatgttttagcacataataaaggggagaagcatccaaaagtactagtgggtagagatacgcgtgtttcaggtgaaatgcttgaatcagccttaatcgcaggtcttatctctattggcgctgaagtcatgcgtttaggtattatttcaacaccaggtgtagcttatttaactaaagaaatggaagctgctttaggtgttatgatttcagcttctcacaacccagttgcagataacggcataaaattctttggttcagatggttttaaattatctgatgatcaagaaaatgaaatcgaagaattgttagatcaagataatcctgaattacctcgtcctatcggtgaagacattgtacattattcagattattttgaaggtgctcaaaaatatctaagctatttaaaatcaactgtagatgttaattttgaaggacttaaaattgctttagatggagctaatggttctacatcatcactagcaccgttcttatttggtgatttagaagctgatactgaaacaattggatgtaatccggatggatataatattaatgaacaatgtggttctacacatcctgagaaattagcggaaactgtcttagagactgaaagtgattttggtttagcctttgatggcgatggagatagaattattgctgtagatgaaaatggtcaaattgttgatggagaccaaatcatgtttataattggtcaagaaatgcataaaaaccatgaattaaacaatgatatgattgtctcaacagttatgagtaatctcggtttttataaagcattagaaaatgaaggtattcaatctaacaaaacaaaagtaggagatcgttacgttgtcgaagaaatgagaagaggtaactataatcttggtggcgagcaatctggtcatattgtgatgatggattataatacaacgggtgatggattacttacaggtgttcagcttgcttctgtaattaaaatgagcggtaaatcactaagtgaattagcatcacaaatgaaaaaatatcctcaatctcttatcaatgttaaagtaactgataaatatcgagtagaagagaatattcatgtacaagaagtgatgactaaagttgaaactgaaatgaatggggaaggtagaattttagttcgcccttcaggtacagaacctttagtaagagttatggtggaagcaaccactaatgaagacgctcaacgttttgctcaagagattgcagatgttgttcaagataaaatgggattagataatgcgtaa

SEQ ID NO: 2094 - DNA, 1113 bp, Staphylococcus capitis
atgaaagcagttcattttggtgccggcaatatcggcagaggttttattggatatatattagctgacaataacattaaagttacctttgcagatgtaaatgaagatataattaatgcactggatagtgaacatcaatacgatgttattttagctgatgaagctaaaacaacaactcgagtgaataatgtagatgctattaattcagctaaaccctcagatcaacttaaagaagcaatacttgaagcagatttaatcacaacggctgttggagtaaatattttaccaattattgctaaatcatttgctccatatttaaaagaaaagaaaaatcatgtaaatattgttgcttgtgaaaatgctattatggccacagatactttgaaaaaagccattctggatattactgggccattagctgacaatatccattttgcaaattcagcagtggatagaattgtgccattacaaaaaaatgaaaatatattagacgtcatggtagaacctttctttgaatgggttatcgaaaaagatgcttggtacggtaaagaattagaacatattaaatatgtagatgacttaacaccatatatagaaagaaaattgttaacagttaatacaggacatgcatttttagcttacgctggtcattttgaaaataaagctactattttagattctatcgaagataaacaaatagaagcaggccttcgccaagctcttagtgaaacgagtcaatatatcacagatcaatttgatttctctaaaaatgaacaaaagcaatacgttgagaaaattattgatcgtttcaataatcctaatctatctgatgaagttacacgtgttggtcgaggaacaatacgtaaaataggtcctaaagatcgtattatcaaaccattaacttatttatataataaaggtttagaacgtgaaggtttagttaaagcagctgctcttcttcttgcatacgatgacaatgctgatcaagaaacagtagaaaaaaataactatattaaagaacatggtgctaaggccttcttaaaaacatatgccaaagttgacgatcaaatagctgatgaaattgttaaagaattagaattattacagaaaaagtaa

SEQ ID NO: 2095 - DNA, 435 bp, Staphylococcus capitis
atgagtgaattatttagtaatgacaatatctttttaaatgtatcagcatctgatcaaaatgatgcaatcgaaaaagcaggacaagttttagttgatagtggtgctgtaacaccaaactatatcgaagctatgaaagaccgtgaaaacgtagtatcaactttcatgggtaatgcattagcaattcctcacggcactgaagaagctaaaggtaatgtgattcgttcaggtttaagcttattacaaattcctgaaggtgttgactggaatggcgaagaagtaaaagtcgtagttggcattgcaggtaaagatggcgatcatttagatttactctctaaaattgcaattacttttagtgaagaagaaaatgttgatcgcatcgtaaatgctacatctgcagatgaaattaaacaagtattcgaggaggctgacgcataa

SEQ ID NO: 2096 - DNA, 1833 bp, Staphylococcus capitis
ttgtctggagaagctaacaatattagacgattgaaggaagcagttacaactcaacaaacattagatttatcaattgaagaacaaaaagtaatcattctttatgctcttatacaaactaaacacgcaataaaacaatttagtttagcacacgaaattggtgtttcaattcaagctctagctaaacttttagatgatttagaagaagaattattatcttatcaactgtcactttcaagaaaacgtggcgaaggtgtctacttaaagggtcctgagtctaaaaaaagagaatttcttagtcaacttatggtaaataacttaaatagtacaagcgtttattctgtaattgaaaatcactttgtttaccaatctttgaatcattctcaacaatctctcgtagatttagatagaatatttaaaattgaacgtatattgatggactatttaggtcaactgccctataccctaacagaatctagttatttaactttgacgattcacattgtgttaagtattacacgtatgcaaaatggtgaatacgtctcactaaataaagatatatatgaaacagttaaagataccttcgagcatgaagttgcaacagaaattgctaaacgtcttgaagaaatatataacgttgagtttaaccaagctgaaatcacttttataacaattcatttgcgtggtgctaaacgtaaaggtacaaaggattctaattctgaggaagataatagtagtaaaaagattcgtcaatttgttaatacagttacacgaatatcaggacaacattttaaagataaggaaaacttaatcgaggggttaacattgcatattaatcctgcaattaatcgtttgaaatctaacattgaaacctacaatcctttaactgaaatgattaaatttaaatatccacgtctttttgaaacgattcataaagcattgcatatggtgtggtctgatttaatttttcctgaaagtgagattgcttttatagtgcttcactttggtggatccattaaaaatcagggaaatcgctttttaaatatcctagtcgtatgtagcagtggcattggaacaagtcgtttattagccaatcgtcttgagcaagtctttagtgaaattgaaagaattactcaagcttctgtaagcgacttgaatgtattagatttaaataactacgacggaattatttcgactgtaaatttagatatcgaagccccatttctaattgttaatccattattaccagaacatgaagtgtcttatgtagcttcttttctaagtacgaattcaaatcaaactcttctagctgaaaatgataactcaaatacctttacaaatcctgaagaaacaattcaagatatgcgcataggtttagaggtattagattcagtgaaaatagaatataaattagtagataattggaagcaatatttagaaacttacttattaaatgaaaatataattgaggacaggcaatcattcgctgatttactgcaatcaaagtttgaacaaaatcctaattgggtgttacatccttatccggtagcaatcccacatttaaaagataacatgttcaaaaaaccttccatacttattactattttggaagaaccgatacaattgcaacgtaatcaaaatgatttaaattcagttcattatttgataagtatgtttattccagataatcaaaaaatggctcaattcgtaagtgccctctcagaggcggtaagcgagcatttgaatgacatcgaagaatttatgcaaaatccatatgaatttaaaactattttaagaaacaaattattaaatcaaatgaaaaatcaattacaatag

SEQ ID NO: 2097 - DNA, 1569 bp, Staphylococcus capitis
atgtcacaaactcaagagaaaaaaggagtcggtcgtaaagtccaagcgtttggatcattcttaagcagtatgattatgcctaacattggtgcatttatcgcatggggttttattgccgcaatcttcattgataatggttggttccctaacaaagatttatctcaattagctggaccgatgattacgtacttaattccattactcatcgcatttagcggtgggcgtttaattcatggtttacgtggtggtattattgcagctacagcaactatgggggttattgtagctttacctgaaacaccaatgttacttggtgccatgattatggggccacttgttggttggttaatgaaaaaagtagaccaattcgtgcaacctagaacaccacaaggttttgaaatgttattcaataacttttctgcaggtatcttaggttttattatgacaattattggttttgaaattttagctccaatcatgaaattcatcatgcacatcttgtctgtagctgttgaattcttagttcaccttcatttactacctatagtaagtattattgttgaaccagctaaaattttattcttaaataacgcgattaaccatggtgtatttacaccacttggtaccgaccaagcagcacatgctggtcaatctatcttatttactattgaatctaaccctggacctggtctaggtattttattggcctatatgattttcggaaaaggaactgctaaagcaacttcatatggtgcaggtattatccacttcctaggtggtattcatgaaatttacttcccatatgttttaatgcgtccattactatttattgcagttattttaggtggtatgacgggcgttgcaacttatcaagctactggcttcggtttcaaaagtccagcgtccccaggttcatttatcgtttactgcttaaacgcacctagaggcgaattcttacacatgttacttggtgtagtacttgctacattagtatcatttgtcatcgcagcacttattatgaaattcactaaagaacctaaacaagatttagaatctgctacagctcaaatggaagcgacgaaaggtaaaaaatctaacgtttcatctaaactaacgcattctgataaagaagcaactcgttcaaatgcacagaatgcgagcacagctggaacaacaggtgttactacgtcttctacagaaaatgagaaagaaaatgatgaagataatactgaacaacttttagataactacaatactgagaatgttgatgcacacgattatagcggtgtaaatcatgttatattcgcatgtgatgcgggtatgggttcaagtgctatgggtgcaagtatgctacgtaataaatttaagaaagctggtattactgacgtcaatgtgactaatacagctattaatcaattacctcatgatgcacaacttgtaatcacgcaaaaaacgctaacagatcgtgccattaaacaagttccaaatgctattcatatttcagtggataacttcttaaattcaccaagatatgaagagttattaaataatttaaagcacgaagattaa

SEQ ID NO: 2098 - DNA, 1806 bp, Staphylococcus capitis
atgtgtggaattgttggttatattggatacgacaatgctaaggaattacttttaaaaggtttagaaaaattagaatatcgtggttatgattcagcaggtgttgctgtagttaatgatcaagggactaaagtatttaaagaaaaaggtagaattgctgaactacgtaaagtcgcagataacagtgatcaagatggaacagtaggtattggtcatacacgttgggcaactcatggtgtaccaaactatgaaaactctcatcctcatcaatcagcaacaggtcgtttcacattagtacataatggtgtgattgaaaactatgaggagttgaaagctgagtacctatcagatattaaattcctttctgaaactgatacagaagtgattgttcagttaattgaacacttttcaaatgaaggactttcaacagaagaggcctttactaaagttgtgactttattacatggttcatatgctttaggtttattggatgagcaagataaagatacgatttatgtagctaaaaacaaatctccattgcttgttggcgtgggtgaaggtttcaatgttatcgcttcagatgcattagcaatgttacaagctactaaccaatataaggagattcatgaccatgaaatcgtaattgttaaacgcgatgatgtggtaatcaaagacactgaaggtaatgttcaagagcgtgaatcttatactgctgaaatcgatgcttcagatgctgaaaaaggtgtttatgatcactatatgttgaaagaaattcatgaacaaccagcagttatgcgtcgcattatccaagaatatcaagatgaagagggtaacttgaaaattgataaagacattatcaaagatgtcgcagatgcagatcgtatttacatcattgcagcaggtacaagttatcatgccggtttagtagggaaagagttcatcgaaaaatgggcaggagtaccaacagaagtacatgttgcttcagaatttgtttacaatatgcctttattatctgaaaaaccattattcatctatatttcacaatcaggtgaaacagcagacagtcgtgccgtactagttgaaacgaaaaaattaggtcataaatcattaactattactaatgttgctggttcaacgttatctcgtgaagcggatcatacattactcttacatgcaggtcctgagattgctgtagcatctacaaaagcatatacagctcaaattgcagtattatcaatactttcacaaatcgtagctaaaaatcacggtcgtgaagctgatatcgacttattaagagaattagctaaagtaacaactgctattgaaactatcgttgatgatgcaccagtaatggaagaaattgctactaatttcttagaaacaactcgtaatgcattctttataggacgtacaattgattataatgtaagtttagaaggtgcattaaaacttaaagaaatctcttatattcaggctgaaggatttgctggtggtgaattgaagcacggtacaattgcacttatcgaagagggtacgccagttatcggtttagcaactcaagagaatgttaacttatctatccgtggtaatattaaagaagttgtagctcgtggtgctaatccttgtatcatttcaatggaaggcttagacaaagatggtgatacgtatgttatccctcatgtacatgagttattaacaccattagtttctgttgttactatgcaattaatttcatattatgctgcattgcacagagatttagacgttgataaaccacgtaacttagctaaatcagttacagttgaataa

SEQ ID NO: 2099 - DNA, 858 bp, Staphylococcus capitis
atgaataacgttaaagcaatattcctagatatggatggaacaattttacatgaaaataataaagcatctaactataccaaggatgtggtagatgaattacgtgaaaagggttttaaggtatttctagccacaggtcgttcatattctgagatacatcaactcgtacctgaaggttttaaagttgatggaattattagttctaatggtactactggtgaaatcgaggatcaaaatttgtttaaacacagcttatctttagaacaagttaaaaaaattgttaaattagctcaacaacaacatatctactatgaagtatttccttttggagcacaacgtatcgttttaaaagaagattatcaatggatgcgtgacatgattactggtgaaacgccacccaataatgtaagtcatagtgaatggacttcaagactagacgctatgaaagataaaattgattggcgtgacgagttgccggacttagattattctaaaatctatttgtttaatccaaatcttgataaaattaccacattcagagatgaacttattcagaataaagttttgctaagtatcagtgtttctaactcgtctcgttataatgcagaaacaatggcgtataataccgataagggtacggggattaaagaaatgattgaacactttggtattcagcaagaggaaacattagtcattggagatagtgataatgatcgtgcgatgttcgactttgggcaatatacagttgcaatgaaaaatgcacgacaagaaattaaagatatcacagatgaagtgactgaggaaacaaatgaagaagatggggcagctaaatacttaaaatcacgattattagacaaataa

SEQ ID NO: 2100 - DNA, 1200 bp, Staphylococcus capitis
ttgtttagatattataaatcggcatttaaaaatgctaaaccgcaactactcaaagctttattattcgctttaattagttttgcagtttgttttattgtttatcgatttgcatcagcatttatagctcaattttctactcagatgcaaatgttacaacaattcggacaatccgtttcattaacaatgtacatccctattattattatttatcttattttagctttactatttattttccttggatatcaactattagcaggtgctattaatgttatccaaaaggctatgaagcacgaaaaaattaaatttagtgatttattttttgcctttaaaaaaggccgttatgcaacatctttattattagcattgatctcagttgttgctattatgattatgtttatcattgcatacttactaaaattattgtacaacgtcacttttattcaattgtatgcgtggatacaacaatcagtaagtaatgtggataattcaattgctattttaattatttctcaaattgtaattattttactaatgggattcattacttcaatcgtttattggttcttcttaatcttcatgattaattacacagttgcatttgcagaaaatccacatcgaaaagcaatgagtaatgttaaagaaggatttaatggaattaagaatggtaagaaaacttggttaaaattctttattggtattttattacttaacctagttgttcttattacaggtcaaccattaattaccctatttagttatttaactagtcatatgtcacaatcagttgctcaaattcttgcatacgttgtgcttattttaatcattctaattagaattgttatttactttatcattcttatgggtatcatttattacttcatcacacgtggtgataaaattgataaacctggtaagaaagctcgcaaaggtaagaagaatgacaaagattcattagctacatctaaagacgataacaaaggtaaaacatctaacgtaaaagaaaaagttcaagataaagtgaacgacaatgactctaaaggtgataatcttaaagataaagctgaaaatcaatttagcaatcaaaaagataacgcttctagtaagggtcaagatttaaaagacaaagcttctgaaaaggtgtctgacaataaagacgacattacagatagagctaaagacacttttgacaagaaataa

SEQ ID NO: 2101 - DNA, 906 bp, Staphylococcus capitis
ttgcggtttagcatttttaaatgccgatttataatatctaaacaaattttaagcactcctttaacgtataaatacaatatcaaaaatcttattttttttaaattaatatctaacataaaagggtatgaagtgttaaaatatgctagtaaattcacattgaaaggagatatcatcatgaaatttgcagttattactgatatccatggtaattatgatgcattagaaaaggtgttagatgatattgatagtagagaagatatcgataaaatttataatcttggcgacaatataggtattggacacgagacaaacaaagttttagatactgtatttgatcgtgatgatatggaaatgattgccggtaaccatgatgaagcaatcatgacactagttaataacacacaatatcctgaagatcttaaaggcaaattttatgagcatcatcaatggatagaaagccacctcgatgaatcatattatgatgaattaaatcaattaccacgatacattgagaagactattaaaggtaaaaaggttttatttattcattatgaaattcctaatgaaaaattagaagtaggaattgaagggcaacctttcgcaccgatggctagtgatgatgagcaagagatttctaagctttttgaagataaagacgcggatttaatactatttggccacaatcatcgtttacatttatttgatgataaatctacaatttactttaatccaggtgcagtgggattaaataacggagctcatactgtatatggtattgttacaattaatgaacaaggcatttctgttgaacgtgtaaaactagactatgatgaagaagaatttattgaaggttttgctgaaaaacaagtaccagcaagagactttatttttaaaaactttatgtaa

SEQ ID NO: 2102 - DNA, 981 bp, Staphylococcus capitis
atgacaaatcacaatcatcaacatcatagtcacaatcatgcacatggtcatgtccatacaaataataagaaagtacttttaatctctttctttattataggattatttatgttagtagaaatcatcggtggatttattgccaatagcttggccttactctctgatggatttcacatgttaagtgacaccatctcacttggcgtagcacttatcgcatttatatatgcggaaaagaatgctacacaaactaaaacctatggctataaacgctttgaagtgctcgctgctttattcaatggcgtaactttatttattatcagtcttatgattattatcgaagctattcgtagatttttcgcccctccagaagtgcaatctcaagagatgtttattataagcttaattggcttaatcgttaatattgtagttgcagcgttaatgtttagaggcggtgatacatctcataatttaaatatgcgtggcgcctttatccatgtattaggtgatctctttggttcaattggtgcaatcgtagcagcattattaatttgggcgtttaactttactcttgctgatcctatcgctagtattctggtgtcactaattattttaaaaagtgcttacggtatagcaaaatcttcactaaatattttaatggaaggtacacctagtgatgtagacctagaagcagtgatatctacaatcactaaagacgaacgcattcaaaatgtacatgattatcatgtttggactatatcaaatgatatgaatgcactcagttgtcacgcagttgtttcagagcaattaacagttaaagaatgtgaaaatcttttagaaaccattgaacatgatttattgcatcaaaatgttcaacacatgacaatacaacttgaaacacctaaacataaacatgatgattcaacattatgttcaggtattcatgaacacatacacactcatacacatgccaatagtcattaa

SEQ ID NO: 2103 - DNA, 354 bp, Staphylococcus capitis
gtgaatgacattgatcaaaataaacataccgatgtagatactttaagcaaagtcactgagatattcaaagctttaagcgatctcaaccgtttacgtattatggaattattagaatttggagaagcaagtgtaggacacatttcacatacattgaatatgtctcaatcaaatgtgtcacatcaactaaagttattgaaaagtacacacttggttaaatcaaagcgacaaggtcaatctatgatatattctttagacgacaagcacgtatctacattactcaaacaagccattcatcatgctagtcatccaaatgaaggtggaagttatgacaaatcacaatcatcaacatcatag

SEQ ID NO: 2104 - DNA, 654 bp, Staphylococcus capitis
atgagtattttattaatcggtgctaatggtggcgtaggttcaagattagtacaacaattaaagtcagataatattgattttactgcaggtgttcgtaaagaggaacaagtgaaagaattaaaggaccaagatgtcgatgcaacgttggtagatgttgaaaaagccactgttaaagatttaactcaactcttcaacaattacgataaagttattttctcagtaggttcaggtggcagtacaggcgatgataagacaattatagttgatttagacggtgctgttaaaactattgaagcaagtaaagaggcggacattaagcactatgtaatggtttcaacttatgattcaagaagagaagctttcgattctgctggcgatttaaaaccgtatacaattgctaaacactactcagatgattatttaagaaattctggtcttaattatacaattgtgcatcctggaagacttactgatgatgaaggtactggtaaaattgaagcagatttatactttgataaacgtgcgtctattcctcgagacgatgtagcaacagtgcttaaagaagtagttacatcagataaatttgctaatcaagaatttcaaattcttagtggcgataaagaaattaaagatgcgatacaaaaatatgaataa

SEQ ID NO: 2105 - DNA, 942 bp, Staphylococcus capitis
atgatgccgttatttttaaagcctatttttcatgaaaaggtttggggtggaagtaaactccaacaatttggatatcatcttccaaatgagcatataggtgagtgttggggaatatccgcacatccgaatggtaagagtgaaattctcaatggaccttatgcgtggcagacactagatcaagtttggaacgaccatagagaactatttggcgagtttccaagtaaagatttccctttaatggctaaaattgttgatgctgaggcacctttatcaatacatgttcatcctgatgattcatatgcttatgaaaatgaaaatggtcaatatggcaagtccgaatgttggtacattatcgaatcggaggaagatgctgaaattaccattggcactaaagcatcatctcgtgaagaatttgaacaacaaataaaggaaggcaagttccaagaaaacttaagaaagattaaagttaaacctggagacttttattttattcctgctggcacaattcattctataggcgctggaatcatggcatatgagacaatgcagtcatctgatgtatcatatagagtatatgactacgatcgtaaacttaataacaatgaacaacggacactaaatgtctctaaagcattagacgtaatggagtactctagtgaactgccaaatattgtacctcagaacgaagtgatagagaatcacaattgcacccacgtagtgtctaatgacttctttactatagtaaaatgggaaatttcaggtacattaaattatatgaagccacgtgaattttgcttaatttctgtattagaaggtaatggtaaaattattattgatggtgaaatttttgagattgaaaagggaactaattttgttttaacatctgaagatttagatagcgtattcgaaggtgattttacgcttataattagttatatttaa

SEQ ID NO: 2106 - DNA, 231 bp, Staphylococcus capitis
ttgaagcaatttttatatatttctctcatttgtggaatgatttcaggagctggaatatttttacatatgccacattaccctacattaattctaccgagagttgtagcaattgtaggtattattagtgctttgattacgattaaagataaagatattaatgctatgcttaaattaggtggagtaatgattaacgtcattccgttattaggtagcatgattacacctcattaa

SEQ ID NO: 2107 - DNA, 1377 bp, Staphylococcus capitis
atgactgaggaaattaactatttttggctaaactgtggttataatagatggaatcacaatgaaccccttgtaggtcaaacaactttatttgaatcgggtgcacatttcaatccttctcaaggatttcgtgcttttaaaaaggccaaagcaggagatcaagtcatcttttatcaagtacaaaccgattctggtttattaggtataggcgaaatcataagtgttcaagcaggcgctcaaaataaaatcagggtagaatttaaattcaatgaagaactgaaatcattgacaaccgactatttaaaacgaagtgaagctttagattttcgtatgaataatatgaaagaaacgttgtttaatcaaattaaacaatcagaatttgatttaattgtaagtttaggaaaaggggaaactaaaatcccaagatactttttattatctgaaacagatgactttgaaccaggtaaaaattatacaatttttacgcatacttacaatggaataaaaagaaatggttatcacttctatacacaacttgaagttggagataatattattatctataataaagaaaaagatcaatcagtagtaggtatcggcgaagtggctcgtcatattcatgagaaacctccaattccaggtagaacgaatagtacggctatagaaatcttgtatggcaagaatattgacccaatttctttaggtcatttaaataaacatcagaaattaaagaatttatatttcttacaagaaaatgctaaacaagctatcgcgagtatgtcacaaacacaatatgatgctatattagaaatgagtgacaataatggtattaaaaatccattcgagacagttcaaaaatcagaagtcactgaatatcaaaatgatgattcactcaaaccatttatattattagttgttgatagaaaagaagaaggcttaaaaacagctaatgatttattgcaaaaaacaaatgcaaatcctgtcattactagtggacatcctgattttacagaggatatgttatatggcaaatatttaccaaatgaatcaggcgctctatattatcgcgaaggatttattacgcaattaatgcctaccaaagataaaaattatttagttattgataattttaatcgtatcgatccagatatcttccaaacgtacattaatgtattagaaggttatgaggtgacattacctaggtacaataaagatggaagtatgattaaatggtctaaaaacaaagattccttctatcactttaatcctaattggcatattattggtgtaacatatgattctatagaggacattaaacagaagtattctcaacagtttcttaagtatacgcgcattgtacgcgttaatcattcagagtaa

SEQ ID NO: 2108 - DNA, 411 bp, Staphylococcus capitis
atgcctattatatattatgacggtaattgcatttattgttataattatgcgatttggcttattcaaaatggactttctaagagctatgagttcgcaactataaaaggtgagattggcgaacaattttttaatcaacatcccgaagccaaaaatagaaatagtgtaatcttgcaaaaaggtgagcatttagaatataaatcagacgcgattgctacgcttattacttcgttgccaaacaataaaaaatggttaggtataggtctaagagtactgccgaaaacaatacgtgatttaggttataatttatttgctaataatagagacaaaatgtggaagacacactggcataagcctactgaatatgaaaaatcattctttttagatgataatgctaaaatcaagttaacttaa

SEQ ID NO: 2109 - DNA, 447 bp, Staphylococcus capitis
atgagtaatcaacaagatgtagtaaaagaattaaatcaacaagtagcaaactggacagtagcatacacaaaattacacaatttccattggtacgtaaaaggaccaaacttcttctcattacacactaaattcgaagaactttatgatgaagctagccaatatgtagatgatttagcagaaagaatcttagctattggtggtaacccaatcggtactttaactgaaagcttagataaatcaattgttaaagaggctggaaaaaattatgcagctgaacaaatggtagaagaactttcacatgatttcactaatatttctaaacaattagaacatgcaatagaagtagcaggtaatgcaggtgatgatgtatcagaagatatgtttattggcatgcaaacttcagttgataaacataattggatgttacaatcttatttaggtaaataa

SEQ ID NO: 2110 - DNA, 711 bp, Staphylococcus capitis
atgacgaatggtacacctcatattcaaccaaatggtgtaaaaattgctaaaactgtattaatgccaggtgacccgctacgtgcaaaatatattgcggataacttcttagaaaatgttgaacaatttaatgaagtacgcaacatgttcggttatacaggaacatataaaggtaaagaaatctcagttatggggtcaggaatgggaattccaagtattggtatttactcttatgagttatataatttctttgatgtagaaacaattattcgcgtgggttcatgtggtgcacttcaagaggatgttaatttatatgatgtaattattgctcaagctgcatcaacaaattcaaattatgtagatcaatttaatattcctggacattttgcgccgattgctgattttgacttaattactaaagctaaaaaagcagcagacgaaattggtgctacttcacatgtgggaaatgtattatcatctgatactttttataatgcagatgcaacatttaacgatgcatggaagaaaatgggtatattaggaattgaaatggaatcagcaggtttatatttaaatgccatcaatgcaggtaaaaaagcacttggcgtcttcacagttagtgaccatattttacgtgatgaagctacaagtgcagaagaaagacaaacatcattcactcaaatgatggaaattgcacttgaaattgctgaataa

SEQ ID NO: 2111 - DNA, 663 bp, Staphylococcus capitis
atgaacgtagcaaaatatatagatcatactttactaaaacctgattcaactagagaacaaattgataaaattcttgaagaagctaaaaagtatcaattcaaatcagtgtgcattaatccaactcatgttagttatgcaagtcaacaattactagatacagatgtacttgtgtgtactgtaatcggatttccattaggggcaactacgactgacgtaaaggtcttcgaaactgaaaatgcaattaaaaatggtgcttcagaaatagatatggttattaatattggggctttaaaagatcaacgctatgatgaagtgcaaaaagatattgagggtgttatcgcagctgctaatggaaaaacagttaaagtgataattgaaacagtacttttaactgatgaagaaaaagttaaggcttgtgaattagctgaaaaagcaggcgctacttttgttaaaacatctacaggatttgctggtgggggagctacaccagaagacgtcaaattaatgaaagatactgtaggcaaccgcttagaagtaaaagcgtctggaggagtgagaagtctagaagactttgaaaaaatgattgaagcaggtgcgacaagaattggtgcaagtgcgggagcccaaattatagagggtcttgattccaactcagattattaa

SEQ ID NO: 2112 - DNA, 1302 bp, Staphylococcus capitis
atgagaatgatagatattattgagaaaaaacgtgacggacatgcgctaacagaagaagagattgaattttttattaatggttatacgaaaggtgacatccctgattatcaagcttcgagtttagctatggccatctttttccaagatatgaaccaagaagaaagagcagcaatgacgatggcaatggttaattcaggagataagattgatttatctcaaattcaaggtgtaaaagtggataagcactctactggtggtgtaggagatacgacaacactagtattagcgcctttagtagcgtcattgggtgtacctgtagctaaaatgagtggtcgtggtttaggtcatactggtggaacgattgataaattagaatcagtaaatggttttaatgtagagataagtgaacaagaatttattaaacttgttaatgaaaacaaagttgctgttataggtcaatctggaaatttaacaccagctgataaaaaactatatgcactaagagatgtgacgggttctgttaattctatttcattaatcgcgtcatcaattatgagtaaaaaaatcgcagctggtgcagatgcaattgttcttgatgttaaaaccgggagcggtgctttcatgaaaacgttagaggaagcagaagcattagcagatgcaatggtaagtataggtaataatgtaggtagaaatactatggcgattatttctgatatgagccaaccattgggtcgtgcaattggtaatgctttagaattaaaagaagcgattgagacactaaaaggccaagggccaaaagatttaacggaacttgtattaacattaggctcacaaatggtagtgttagctcaaaaagctcaatcattagaagaagcacgtcaaatgcttgaggaagctattcaatcaggtaaagctttagagaaatttaaaacctttattagtcaccaaggtggtgattcgtctattgttgataacccagataagttgcctcatgcacgctatcaaattcattttcaagcgaaaaaggatggcgtgattaccaagatgattgcaaatgaaatcggtgttgcttcaatgatgcttggtgcaggacgtcaaactaaagaagataaaattgatttaggtgtagggattgttctaaataaaaaagttggggattctgtcaaacaaggagataatattctcactattcatagcaataaagaaaatgttaatgaaatattagacaaattagacgagagtattacaattgaagaaaaaggtgaaacaccaaccttaattcacaaaattataaccgagtag

SEQ ID NO: 2113 - DNA, 1191 bp, Staphylococcus capitis
atgactacagcgtttaatcgaatccatcttatcgttatggactcagtaggtattggtgagggtccagatgcggctgcatttaaagatgagggttctcatacactcaaacacactttagaaggatttaatcaagaacttccaaatttacaacgacttggattaggaaatattgattctttaccagtagtttctaaggttgaaaaaccaggtgcattttatacaaaattgagcgaagcttctgttggtaaagatacaatgactggacattgggaaattatgggtttaaatattatgcaaccatttaaagtatatcctaatggtttcccagatgaacttgttaaggaaattgaagagatgacaggacgtaaagttgttgcaaatcgtcccgcttcaggtactcaaatcatcgatgagtggggcgaacatcaaatgaagacaggcgatttaattgtttacacaagtgctgaccctgtacttcaaattgctgctcatgaagatatcattccacttgatgaattatatgatatatgtgaaaaagttcgtgaattaactaaagaccctaagtatttaattggacgtattattgcaagaccatatgtaggtgaacctggcaactttacacgtacatcaaatcgccatgattatgcattgaaaccttttggtaaaacagtgatgaatacgttaaaagataatgattacgatgtcattgctattggtaaaattaatgatatttatgatggtgaaggtgtgacagaagccattcgtaccaaaaataatatggatggtatggacaaactcattgaagtagtacaaaaagacttcaaagggattagtttcttaaatttagtagactttgatgcgctttatggtcaccgacgagataaagaaggctatgctcaagctattaaagactttgataatcgtttaccggaattaattgaacacttacaagaagacgatttagtgattattacagctgatcacggaaatgacccaatagccgatggtacggatcatacacgcgaatatataccagtattaatgtttagtcctaagattaatcagtatcatgaactatctcaagacacgacatttagttcaatcggtgctacaattgcagataacttcaacgtagaattaccagaatacggtaaaagttatttaaaagaaatgggagttgaacataaatga

SEQ ID NO: 2114 - DNA, 351 bp, Staphylococcus capitis
atgaaattcttaagatttctattaggaatcgcatttggaacagctggtgtattacattttacgaatgaacgtcaatttagaaatattgttccagattatttacctttacaaaaaacagctgtattagttacaggtgtttttgaaatcttctttggaatgatgctattaattcaaagaccagcaagttggttgaagaaaggaattaacttattcctattagcagtattccctgcaaatatttatatggcacgtaaaaaattaccattgggtgataaagaagttcctaaatgggcactttatttaagattaccattacaatttgtattaatgggtattgttaagaaactataa

SEQ ID NO: 2115 - DNA, 129 bp, Staphylococcus capitis
atgaaacaaatgtttgtcgatatttttgaagcaagtgttgatggtgattttgatgaatcttcttctttattggaagatttattgggacgtaaacctcaagatatcgttgaaattctaaataataaataa

SEQ ID NO: 2116 - DNA, 471 bp, Staphylococcus capitis
atgcctaaaatgaacgttgaaagttttaatttagatcatactaaagttgttgcaccatttatccgtttagcgggtacgatggaaggattgaatggagatattatccataaatatgacatccgtttcaaacaacctaataaagaacatatggaaatgcctggtttacattctttagaacacttaatggccgaaaacattagaaatcacactgataaagttgttgatttaagtcctatgggttgccaaactggtttctatgtatcatttattaatcatgacgattatgatgatgttttaaatattgttgaaaagacattgaacgatgtcttaaatgctacagaagtgccagcttgtaatgaagtgcaatgtggatgggcagcaagccattcattagaaggtgctaaagaaattgctcaagctttcttaaataaacgcgaccaatggaatgatatttacggtacggaaaaataa

SEQ ID NO: 2117 - DNA, 1185 bp, Staphylococcus capitis
atgagtgcaaaacaagagatattagattttatagaaaataaaaaatatgattatgttgaaatcagtcatcgtattcatgagcgccctgaactaggaaatgaagaaatatttgcgtcaagaacgttaatcgatattctaaaattgcatgaattcgaaatagaaacagatattgctggacatgctacaggttttattgcctcatacgagtctgataaaccaggtcctacaattggtttcttagcagaatatgatgcactacctggactaggacatgcatgtggtcacaatattattggaacagcaagcgttctagggggtacagctttaaaacaagttatagacgagataggtggtaaagttgttgtactaggatgtccggctgaagaaggtggagaaaatggttctgctaaagcgtcttatgttaaagcaggcattatagaagatatagatgttgcgctcatggtacatccaggtaatgaaacatatcgtaccatcaacactctggcagtggatgtattagatattcaattctatggacgaagtgctcatgcttctgaaaatgcaaacgaagcacttaatgcccttgatgccatgatttcttatttcaatggtgttgcacagttaaggcaacatataaaaaagggacaacgtgtacatggcgttatattagatggtgggaaagctgcaaatattatacctgattatacacatgctcgtttttataccagagctacatctcgtaaagaactagatgtattaacagaaaaggtgaaggaaattgcgcgtggggcagccattcaaacaggttgtgattatgaatttggtcccattcaaaacggtgtgaatgaatttatcaaatcgcctaaattagatgacttatttgaaaagtatgctgaagaaatgggagaggaagtcattaatgatgacttcggttatggttcaacagatacgggtaacgtgagtcacatagttccaactattcatcctcatattaaaatcggttcacgtaatcttgtagggcatacacatcgtttcagagaagcggctgcaagtgttcatggtgatcaagctttaataagaggagctaaaatcttagccttaatgggcttagaattaattgaaaatgagaagttattcaatgaaattgttgaagaacatactcatataaaggggcatgttaaataa

SEQ ID NO: 2118 - DNA, 1191 bp, Staphylococcus capitis
atgaatgaaaaagtaaatggtccgatgttgactttaagtgatttatacaatgatgatgtggtttatacatctagaccttcatatatctctaatccatggttaaaacctgatgaacatcaatctaattttttaactggaagagaattactcatcgctaatcgctttccagttattgtgcatgaagcaagtgttactgagaaattagcatacctatttaaattagtaggaaagcaaattccaactcacatttacaagtttaataataaagagacatatgaagaattattacaaactttagctcataaagatggtaagaaaatttattttcaatatatacatgatgaagatattttagagaaagagtattatgcacttaataaagacatatttgttgctttaaataataaatcaaggatacctgaatggacgaacaacaaatatttacctgatagagagattgtacctatagaagaatttgaaactcgaattaagtcttggtcttatccattcgtaattaaacccggagatgacttacctacagcaggtggctatggtgtaatgatttgctacaatgatcaagatttagaacaagctaaaattcgcattaaagaagccactgaagctacagattatttaataattgaacaaaaaattgaagcggttaataactactgcgttcaatatgcttatgctcctgatttgggaattaaatatttaggtacagcccaacaactaacgaatgagtatggtttttataacgggaatgaaaatgttaatgatgtacctcagcatgtcattgatgccggcaaagaaattatggagataggtgtgagtaaagggttctttggggttgctggatttgatttgttagtagataaaaataatgacgtctttgcaattgatttgaattttagacaaaatggttcaacaagtatgttgttgctcgcaaaggatttagcaaaaggatatcataaattttatagttatttttctaacggtgataatacacatttttataatacaattattaaatatatcaagaagggtgttctttatccactttcatattatgatggcgattggtatggcaaagataaagtgaattctcgatttggatgtatatggcacggatcaagtaaagaagaaattattcagcatgaaagtgagtttattaaagaattaggtttataa

SEQ ID NO: 2119 - DNA, 666 bp, Staphylococcus capitis
atgtcgtacaaatatgaagcatttttcaaggatattttaataaacgaatatatttattttgcttcaaaaaataagaagttagtaaggttaaatcaaaaagaacaatcttatattgctatgtggacagatgaagctatggctgaatcatatttatctcaacattctatagattatgataaggttgttcgagctgatattgacagattcgtcacttatgaattagatgatttatttgatgaaggtgatgaaatcttagttaatgtaaataatgaagaagatggacaactagtggatgttattaaaatgactgatgaattgatgtcagaacttgatgacatcagaattaaagaatttgttaaagatgtagctaaatatgatgaagtttatggtttaactaataaaaatgagaaaaactttgtcatgattagtgatgatgaacatcaaaaacctcatattatgccggtttggagtattaaaaatcgtgcgtctaaggtacgagatgaagattttgaggaatgtgaaattatcgaaattgaaggtaaagtttttggagagtggttagataagttacgtgatgatgataaagcagtagctattgacttaaaacctggagtcgtgggcacagttgtatctgcacaaaaattatctaacgaaataactttttaa

SEQ ID NO: 2120 - DNA, 798 bp, Staphylococcus capitis
atgaaggtaggtattgatgccggaggtacattaataaagatagttcaagaacaaggtaatgaacgcttttatcgaacagaacttacaacaaatattgataaagtcattgactggctaaataatgaagacattgagtcgcttaacttaactggtggtaatgctggcgtcattgctgagcatatcaaaatttcagcccaaagctatgttgaatttgatgcatcgtccagaggattgcgtatattgttggaagaacaaggtcatcatattgatacttacatatttgctaatgttggtacagggacttcattgcactattttgatggtcaggatcaacaacgtgtgggtggtgtaggcaccggtggcggtatgattcaagggttaggttacttgttatcaaatattactgactatacagagcttactaatttagcacaaaaaggcgaccgggattctattgatttaaaagtcaaacatatatacaaagacagcgaaccacctatttcaggagatttaactgctgcaaactttgggaatgtgttacatcacctagataacaatttctcatccgcagataagctttcatcagtgattggtgtagttggtgaagtcattacaacaatggctattaccttagcgcgtgagtatcaaaccgaaaatgtagtatatataggttcatcatttaataataataatttactacgtgaagtaattgaaaattatacagtattgagaggttttaaaccttattatattgagaatggtgcattttcaggtgcactaggtgctttacatttgtaa

SEQ ID NO: 2121 - DNA, 861 bp, Staphylococcus capitis
atgtttatcaaaaaagaatttgaaggtattacagtccaagtgtttgaagaaaagtatcgtgaagcagtgaatgaatttaaattaagtgagagacagcagatttattcctcattacctaaaacagttttggatgatgctttaaatgatgaaaacagagtagccaatattgcaatgaatcaagagggacaagtggtgggattctttgtcttacatcaatattatcaacatgaaggctatgatacacctgaaaatgtcgtttatgttcgatctctatcagtaaatgagaaatatcaaggtcatggttatggaacgaagatgatgatgttcttacctcaatatgtgcaagaattattcccagattttaatcatttgtatctagtagttgatgctgaaaataaaggagcgtggaacgtttatgaacgcgctggctttatgcacactgctactaaagaggaaggccctattggtaaagaacgactctattatttagacttagattctaaacatgtttcttcacttcgcttagttgaaagcgaaacttcaaatgaggctaatattcatgtaattaatttacttaaagataatgaaaaagttggatttattgctattgaacagattgaagatagaatgagaatttcagcaatagaagttaataaagagcatcgtaacgaaggtatagcggaaagtgctctaagacaattgccaacttatattcgtaaacattttgatgatatcaaggttttggctataacgttatatggagagaataatgaattaaaacctttatgtgataatagtaattttgtggttattgaagaagctgaagactatgttctatttgagaagtatatcaactactag

SEQ ID NO: 2122 - DNA, 537 bp, Staphylococcus capitis
atgaaaattcaagattacacaaaagaaatggttgatgagaagtcatttatcgatatggcttacactttattaaatgataaacaaacaacaatgaatttatacgatattatcgacgagttcaaatctctgggtggttatgagtacgatgatattgagaatcgtgttgttcaattctatactgatcttaatacagatggtcgtttcttaaatgtcggcgaaaatcaatgggggcttcgcgattggtactctgtagacgatattgaagaaaagattgcacctacaattcaaaaatttgatattcttgatgacgatgatgaagaagatcaaaaccttaaattattaggtgaagatgatattgatgaggacgatgatattcctgctgaaactgatgatcaagaaactttaaatgatccagaagacgaagaagtagaagaagaaatcaatgattcagatatcgtgattgaagaagatgacgatgatgatattgctgaagaggaagaagaagaatttgaagatgaggaagacttcaacgactaa

SEQ ID NO: 2123 - DNA, 1608 bp, Staphylococcus capitis
atgacaaaatttatttttgtaacaggcggagtagtgtcatcattaggaaaagggattacggccgcttctctaggaagattgcttaaggatagaggtcttaaagttacaattcaaaaatttgatccatatttaaatgtggatccaggtacaatgagtccatatcaacatggtgaggtatttgtaactgatgatggcgcagaaacagacttagacttaggtcactatgagcgttttatcgatattaatttaaataaatattcaaatgtgactgcaggtaaagtttactctcatgtattaaagaaagaacgtcgtggtgattacttaggtggcacagtacaagttatcccacatattacaaatgaaattaaagaaagattattattagctggagaaagtacaaacgctgacgttgttattacagaaataggtggtacgacaggtgatattgaatcacttccattcttagaggcaattcgtcaaataagaagtgatttaggccgcgataatgtaatgtatgtacattgtactttattaccttacattaaagcagcaggtgaaatgaagacgaaaccaactcaacacagtgtaaaagaattacgtggattaggaattcaacctgatttaattgttgttagaacagaatacgaaatgactcaagatttaaaagacaaaattgcattattctgtgatataaacaaagaaagcgtgattgaatgtcgcgatgctgaatcactttatgaaattccacttcaattaagtgaccaagatatggacgatatcgtcattaaacgtctacaattaaacgctaagtatgaaactcaacttgatgagtgggagcacttattagatacggtaaatcatcttgatggtaagattacaataggattagttggtaaatatgttagcttacaagacgcatatttatcagttgttgaatcattaaaacacgccggctatccattcaagaaagatgttgttgttaaatggatagattcaagcgaagtgactgataataacgttgaaagttatttatctgacgttgatggtatcttagttccaggtggtttcggtttccgtgcaagtgaaggtaaaatttcagcaattaaatacgcccgtgaaaacaacattcctttctttggaatttgtttaggtatgcaactagctacagttgaatatgcacgtaatgttttaggtttggagggcgcacattcagctgagttagatccaagtacaccatacccaataattgatttattacctgaacagaaagatattgaagatttaggtggtacacttcgacttggtttatacccttgtcatattaaagaaggtacacttgcagaatctatttattctgaaaatgacatcgaagaacgtcatcgtcatcgttatgaatttaacaatgaatttagagagcaattagaagataatggaatggtattctcaggtacaagccctgatggacgtttagtagagattgttgaaattccggaaaatgacttcttcattgcatgtcaattccaccctgaattcttatcaagaccaaaccgtcctcaaccaatatttaaatcatttattgaagcttcacttaaatatcaacaacaataa

SEQ ID NO: 2124 - DNA, 522 bp, Staphylococcus capitis
atgtcaaaaattctaaatacacaattgactggtatctttaataggcttgaaaagcaagcattagatatacaaatggcagcacaatgtttaatacaagctattggcggtgagggttatgtttatgttaaaggatatgaagatttaaaattttatgaagcttttgtattgaatagtaatgaaaagctcgaatcaagccgttcactagatgacttaaaatctatgagtgaaattgattctacagatagagtgtttttattctcacctttttacaatgaggatgtagagcaagacgttcaacgtttaattgaattagatgtcgattttgtattagtttgtaacaatccaaaacgtgatgattttccagaacatttaatgcattacgttaacctttcaacacctagacctattgtttatactgaagattacgataagattgttcaacctcatgcgatggcatttaattatgtatattatgaaatttacactcaaatgatagagatgacacgagatttaaatctataa

SEQ ID NO: 2125 - DNA, 861 bp, Staphylococcus capitis
atgcctttagtttcaatgaaagaaatgttaattgatgcgaaagaaaacggttatgcagttggtcaatacaacttaaataaccttgagtttacacaagctattttagaagcttcacaagaagagaatgcaccagttattttaggtgtatctgaaggtgctgctcgttatatgagtggtttctacactgtagtaaaaatggttgaaggtttaattcacgatttaaacattacaattccagttgcaattcacttagaccatggttcaagtttcgaaaaatgtaaagaagcgattgatgctggattcacttcagtaatgattgacgcttcacatagtccattcgaagaaaatattgaaattacttctaaagtagttgaatatgcacatgaaagaggcgtttctgtagaagctgaattaggtacggtaggcggacaagaagacgacgtagtagctgacggcgttatctacgctgatcctaaagaatgccaagaattagttgaaaagactggcattgatactttagcacctgcattaggttcagttcatggtccttacaaaggtgaaccaaaattaggatttaaagaaatggaagaaattggtgcttctactggattaccattagtattacatggtggaactggtatcccaactaaagacattcaaaaagcaattccttatggtactgctaaaatcaatgtaaatactgaaaaccaaattgcttcagctaaagctgttcgtgatgtattaaataacgataaaaatgtttacgatcctcgtaaatatttaggaccagctcgtgaagcaattaaagaaacagtaaaaggtaaaattagagaattcggaacttctaaccgagctaaataa

SEQ ID NO: 2126 - DNA, 1260 bp, Staphylococcus capitis
atggttcaagaggtaataaaaataagaggtggacaaacactaaaaggagaagtagaaattagtggagcgaaaaatagtgcagtagctataatccccgcaactttattagctcaaggacatgtaaagttggaaggtcttccccaaatctctgatgtaaaaactttagtaagtttgttagaagatttaaatattaacacgactttaaaaggcaaagaattggatgtagatacaactgaaattgaaaatgcgccgttacctaataataaggttgaatcattgcgtgcatcttattatatgatgggagcgatgctaggacgttttaaaaaatgtgtcattgggctaccaggtggatgtccattaggaccacgtcctattgatcaacatataaaaggtttcaaagcattaggggcagaaattgatgaatcaagcgatacttctatgaaaattgaagctaaagaattaaaaggtgcaaatatctttttagatatggttagtgttggtgctacaataaatattatgcttgctgctgtacatgctaaaggtcagactgtcattgaaaatgcagctaaagaacctgaagttgtagatgtcgctaactttttaatgagtatgggagctaagattaaaggcgcaggaacaactaccatcaaaattaatggcgtggaagagttgcacggttcagaatatcaaattattcctgatagaattgaagctggttcttatatgtgtatggctgctgctatgggtgaagaagttgtattaaataatattgtacctaagcatgtagaagcgttaactgttaaattgagagagcttggtgttgatatccaaatagatgatgagaaagcaattattcgtaaacaatcaccatataaaaatgttgatatcaaaactttagtttatcctggctttgctacggatcttcaacaacctattacaccattattatttatgactaatgggccatcatttgttacagatacaatttatccagctagatttaaacacgttgatgaactacaacgtatgggcgcaaatatttatgctgatgaaggtacagcaactattaaaccttcgcgtctggaaggaacagaagtatatgcaagtgatttacgtgccggtgcatgtttaattactgcgggattaatcgctgaaggtgtaacaacaatattcaatgtaaaacatatatacagaggttatacaaatattgttgaacatttaaaatcacttggagcagatatttggactgaagaaatttaa

SEQ ID NO: 2127 - DNA, 333 bp, Staphylococcus capitis
atggaaatctgtccatatcttgaagaaaccttcaaaattgttggtcgtagttggaatgggctaattattaattatttatcaagatgtgaaagtcaatcagctcacttttccgatatgaaaagagatctaaagacgattactcctagagctttgagcttaaaattaaccgacctaggagaatggaaactagtagagaagcaaattatttcatctagcccattagaaattgtttatcaattgactgataaaggacaagctttagccgaagcattaaagcctatggaagcttgggcacaaaaatacgttgagttagaagcaaattcttcaaaataa

SEQ ID NO: 2128 - DNA, 1428 bp, Staphylococcus capitis
atgagaaatttcactaaacaatatattaatggcgaatgggttgatagtgcgagtggcgaaacaattgacgtaatcaatcctgcaactgaagaagtgatgggatctgtagctaacggaaatgaagaagatgttaacaaagctgttgaagcggcagacaaagtttatttagaatttcgtcatagttcagttgaagaacgtagaaacttgttagataaaattgtaaaagaatatgaaaatagaaaagacgatattatacaagcgattacagatgaattaggttctccattatctgtttctgaaaatgttcactatcaaatgggactaaatcactttacggcagcaagagatgctttagataattttgaatttgaagagcaacgtggagatgatttagtagttaaagaagctattggtgtctcaggattagttacaccttggaatttccctactaatcaaacatcattaaaattagctgctgcatttgctgcaggtagtccagtagttcttaaaccttctgaagaaacaccatttgcagctattatcttagcagaaatctttgataaagttggcgtacctaaaggtgtattcaatttagttaatggcgatggtgaaggtgtaggaaatccattaagtgaacaccctaaagtgagaatgatgtcatttactggttctggcccaacaggatctaaaatcatggaaaaagctgcaaaagacttcaaaaaagtgtctcttgaattaggaggaaaatctccttatatcgttcttgacgatgctgatatcaaggaagcagctaaagctacaactggcaaagttgttaataacactggccaagtatgtactgcaggtacacgtgtacttatacctgaaagcattaaagaagatttcttaacagcagttaaagaagaatttagccaagttaaagtaggagatcctcgtgaagatggtacacaggtcggaccaattatcagcaaaaaacaattcgatcaagttcaagactatattgataaaggcgtaaatgaaggtgctgaattattctacggtggccctggtaaaccagaaggccttgataaaggttatttcgcacgtccaactattttcatcaatgtagataaccatatgacaattgctcaagaagaaatcttcggtccagttatgtcagtgatcacttataatgatttagatgaagcaattgaaattgctaatgatactaaatatggtcttgctggctacgttattggtaaagatcaagagactttacgtaaagtagcatgttcagttgaggcaggaactattgaaatcaatgaagctggcagaaaacctgacttaccattcggaggttataaacaatcaggtttaggtcgtgaatggggcgactatggtatagaagaattcttagaagttaaatcaattgctggttattttaaataa

SEQ ID NO: 2129 - DNA, 1317 bp, Staphylococcus capitis
atgcctgaaagagaacgaacatctcctcagtatgaatctttccacgaattatacaaaaacaacactactaaagagctcactcaaaaagctaaatctttaaaattaacaaattatagtaaattaaataagaaagaattagttttagctatcatggaagctcaaatggagaaagatggcaactactacatggaaggtatccttgatgatattcaacaggatgggtatggtttccttagaaccgttaactattctaaaggtgaaaaggatatatatatttctgcaagtcaaatccgacgttttgagatcaaacgtggagacaaagtaactggtaaagtacgtaaaccgaaagataatgaaaaatattatgggttacttcaagtcgattttgtgaatgatcaaaatgcagaagaagttaaaaaacgccctcatttccaagcgttaacgccgctctatccggaagaaagaattttattagaaacgcttccgactaattattcaactcgaattatggatttagtgacgccgattggtttagggcaacgtggtttaattgtagcgccacctaaagcaggtaaaacaagtttattaaaagagattgctaatgcgattgctacaaataaacctgaagctcaactatttattttactagtaggtgaacgacctgaagaggtaactgatattgaacgttcagttgaatctgcggaagtagtgcactccacttttgatgaaccgccagaacatcatgtcaaagtagcagaattattattagaacgtgctaaaagattagttgaaataggtgaagatgttatcatcttaatggattctattacacgtttagcacgtgcttataaccttgtaatcccaccgagtggacgtacgctatctggtggtttagaccctgcttcactgcataaacctaaagcatttttcggtgcagcaaggaacattgaagcaggtggtagtttaaccatattagctactgcacttgttgaaactggttcaagaatggatgatatgatttacgaggaatttaaaggtacaggtaatatggaattacaccttgatcgtaaattatcagaacgccgtatcttcccagcaattgacattggtcgtagttcaacacgtaaagaagaattacttattacgaaagctgaacttgactcattatggcaattacgtaacttgttcacagactctacagactttactgaacgttttattcgcaagttaaaacgctctaaaaataataaagacttcttttcacaattacaaaagtcagcagaagaaagtacaaagacaggtaaaccaattatctaa

SEQ ID NO: 2130 - DNA, 258 bp, Staphylococcus capitis
atgaaacaaggaattcatcctgaataccacaaagttatctttttagatactactacaaactttaaattcttaagtggttctactaaaacatcttcagaaactatggaatgggaagatggaaatgaatacccagttattcgtttagacgtatcatctgattcacatccattctatactggccgtcaaaaattcgctgctgcggatggtcgtgtggaacgcttcaacaaaaagtttggtttcaaatcaaacaacaactaa

SEQ ID NO: 2131 - DNA, 600 bp, Staphylococcus capitis
atgtatgaaatgtaccattccggatggattgaaacaattactggaagtatgtttagtggtaaatcagaagagttgattcgtcgtttaagacgagggatttacgcgaaacagaaagtcattgtttttaagccagctattgatgatcgttaccataaagaaaaggtcgtctcacacgatggtaatgaaattgaagcgataaatatttctacgtcaagagaaattttaaaccaagatttagacaatgtagacgttatcggaatagatgaagtgcagttttttgatggtgaaatagtaaatattgtagaacaactggctaaaaatggtcacagagttgttgttgcaggtttagatatggattttaggggagaaccttttgaacctatgccgaaattattagctgttagtgaacaagtgactaaattacaggcagtttgtgctgtttgtgggtcaccttctagccgtacacaaagattaatcaatggagagccagctaaaatagatgacccaattatattagttggtgcgaatgaaagttacgaaccacgttgtagagcacatcatattgtggctccaagtgaaaatgagaaggaggaaatgtag

SEQ ID NO: 2132 - DNA, 1077 bp, Staphylococcus capitis
gtgtttgatcaattagatatagtagaggaacgatatgaacaattaaatgagatgttaagcgaccctgatgtcgtgaatgattcagataaacttagaaaatattcaaaagaacaagctgatttacaaaaaactgttgaagtttatcgtagttataaatctaaaaaagaagaacttgaagatattgaagaaatgttaaaagaaacttcagataaagaagaagtggatatgcttaaagaagaaagtgcgtctttaaaagctgaattacctgaaatggaagaagaacttaaaatcttattaattcctaaagacccaaatgatgaaaaagacgttatcgttgaaatccgagcagctgcaggtggtgacgaagcggccatatttgctggggacttgatgagaatgtattctaaatatgccgaagcatatggttttaaaactgaaattgttgaagcttctgaaagtgaccatggtggttataaggaaattagtttttcagtatcaggtagtggagcctatagtaaattaaaatttgaaaacggtgctcaccgagttcaacgtgtaccagaaactgaatcaggtggccgtatacatacttctacggcaacagtagctgtattgccagaagtagaagatgttgagattgaaattcgtaacgaagatctaaaaattgacacgtaccgttcaagtggtgcgggtggtcaacacgttaacacaactgactcagcagtgcgtattacccacttacctactggtgttattgcaacgtcatcagaaaaatcacaaattcaaaaccgtgagaaagcgatgaaagtcttaaaagcacgtttatacgatatgaagttacaagaagaacaacaaaaatatgcgtcacaaagaaaatctgctgtaggtacaggtgaccgttcagaacgtatcagaacatataactatccacaaagtcgtgtgactgatcatagaattggcttaacgctacaaaaacttggtcagattatggaaggtaatttagatgaaatcatagacgcacttactctatctgaacaaactgagaaattgaaagaacttaataatggtgaactataa

SEQ ID NO: 2133 - DNA, 837 bp, Staphylococcus capitis
atggtgaactataaagataaacttcaagaggctattcaattaacattagataaagggtatgagcagactagggcagaatggctactgttggacctttttaaatggtcacgaacagactatcttatccatcgtgaagaacagatgtcacaagctgatttagcaaaatttgacctagctctacatagaatgttgagtggtgaacctattcaatatatcgtaggctttcaatctttttacggctataccttcgaggtagataataattgtctaatccctcgtcctgaaactgaagaagtgatgcttcattttctaaatcaatgtcatcatcaagatacagttgccgatattggtacaggaagcggtgcgattgctattacacttaagttgcttaagccagatttaaacgttctcgctacagatttatatgaagatacactgaatgttgcacgcaataatgcaacattacatcagcaagaaattcaatttctacaaggagacgcattgaaacctctaattgataataatattaaagttgacggattaatttctaatccaccttatattgatgaaggtgaagcaagagatatggatgatactgtacttaaatatgagcctcaccatgctctgtttgctgaaaatgaaggctacgccatctatgagggtattttaaaagatttaccacaagtaatgaaagaacaaggacatgtcgtgtttgaaattggatataatcaaggcaaccaactaaaagcattaattaattctatgtatcctaacaagttagtcaaagttattagagatattaatggtaatgaacgcatcgtgtcattcaaatggtaa

SEQ ID NO: 2134 - DNA, 1044 bp, Staphylococcus capitis
gtgaatactcaaatatgggatcttagaaaatatgaagagaatgtagttaaatatcctaagttaaacgagattaaagagacattattaaatggtggattagtagcgattcctacagagacagtttatgggcttggtgcgaacgcaagaaatgaacatgcggtaagaaaaatatatgaagctaaaggacgtccttctgataatcctttaatcgttcatatacatcaaagggagcaacttgaagagtttgtagatggaattgatgaacgtgtttcaaaattaatggatgccttttggcctggaccaatttcatttattttacctcttaaaacaggttatttatgtgaaaaagtgacaggtggattaaactctattgcagttcgtatgccaagtcataaaatagggcgggcgttacttcaatatattgacgaacctatagctgcaccaagtgccaatttaagtggtagaccttcacctacaaagtttgatcatgtttttcaggatttaaacggaaaagtggacggaattgttaatggagatcaaagtgaagaaggtcttgagagtacagtgttagattgtactcaatatccttttagaatagcacgcccaggttctataaccacttcaatgatagaacaagttttaccggggagtattcaaaaggctaattattttgaaaaggacaaacctattgctcctgggatgaaatataaacattattcgccagatacgccactaacaattgttgaaaatttaactcacaaaattgataataatgaaaaatggaatgatgtagtatttatttttcctattagtatgaaatatttattgcctgagaatgctcaatttattccactatgtgatgatgagcaagatattaaaggggcaaaccataatttatatagtgtattgcactctatagatagctctaatgatattaaacacgcttatatttatagttttgaaaaaaaggatcagtctgaagcgattatgaatagaatgttgaaagcagcaggtaatgaagtgatagaaggtgacgaattatga

SEQ ID NO: 2135 - DNA, 417 bp, Staphylococcus capitis
atgaaattaatatttgtttgtacaggtaatacgtgtagaagtccgttagctgaaagtattgctaagaaattgttgccaaacgatgacattcaatcacgtggtttatttgctatggaaggacaaaaaatctctaaagaatcattacaattgattcatagccatcatctacctaagccttcaaatgctcaacaatttactttggaagatttagaagcagatttaattctcacaatgtctccttcacataaagatttaattaagtctcaatacggtcaatattcaaatgtgtacacgataaatgagtatgcaggtattgaggggcatatagaagacccatttggatgttcttttgaagtatatgaaaaaacttttcaaaatatctacgatttattgaaaaaaattgaaatgaatcgataa

SEQ ID NO: 2136 - DNA, 525 bp, Staphylococcus capitis
ttgcgtgatttacaaaagctacttattgaattaaaagatatgtcattctttaagaaaggcgaattgtgtattgtcggttgttcaacatctgaggtcattggcgaacgaattggttcagttggatcattagagatagctaaagagatttttgatgctttgaaacaaattgaagaggatacaggtgtgtcatttgtctttcaaggatgtgaacatattaatagagcaatcacgattgaaagagcagattttaacccactgtctatggaagaggtaaatgtagttccagatgtacatgcaggtggtagtttatcaacgtatgcctaccaacatatggatgatccaatggttgtagaacatatcagtgtacctaaaggtattgacattggccaaacattaattggtatgcatatcaagcatgtatgtgttccagtcagaacaagcgttaaacaagttggagaagctatcgttaccatagcgacatcacgacctaagaaaattggtggcgaacgtgctaaatatcaataa

SEQ ID NO: 2137 - DNA, 1281 bp, Staphylococcus capitis
gtgctaaatatcaataatttaatgaaagaaggggaattatttatgtcttacattgaaaaacaggataaagtgatttttgaagcaattcaaaaggagtatgaccgtcaaaatagtaatatcgaattaattgcatctgagaattttgtgtctgaagctgttatggaagctcaaggttcagtattgactaataagtatgccgaaggttatccaggccgtcgttattatggtggttgtgaatatgttgatgtttctgaaacagtagcaattgatcgtgctaaagcactttttggcgctgaacatgttaatgtacaacctcactctggttcacaagccaacatggctgtttatttagttgctcttgagatgggagatactgttctaggtatgaacttaagtcatgggggacatttaactcatggatctccagttaactttagtggtaagttttataatttcgttgaatacggagttgataaagaaacggaattaattaactatgatgaagtacgcaaacttgcactagaacataaacctaaattaattgtagcgggtgcctctgcttattctagaactattgattttaaaaagttcaaagaaattgcagatgaagtaggtgctaaattaatggtggatatggctcacattgctggattagttgcagctggtttacatccaaatcctgttgaatatgctgattttgtcactactactacacataaaactttacgtggccctcgtggaggtatgattttatgtaaagaagaatataaaaaagaaattgataagacaattttccctggaattcaaggtggcccactagaacacgtaattgcagcgaaagcagtagcatttggagaagcattacacagtgacttcaaatcgtatcaacaacaagtgattaaaaatgctcaagttttagctcaaacattaattgatgaaggattcagagtggtttcaggtggtactgataatcatttagttgcagttgatgttaaaggttctattgagattactggtaaagtcgctgaagaaactcttgataaagtaggtattacttgtaataaaaacacaattcctttcgatcaagaaaaaccattcgttacaagtggaattaggttaggcacaccagctgcaactacacgtggattcgatgaatcagcattcgaggaagtggcaaaaattattagcttagctttaaaacatactgacgatgaagttaaacttaatgaagctaaagaaagagtgcacgcccttacttcaaaatatccattatatgaataa

SEQ ID NO: 2138 - DNA, 630 bp, Staphylococcus capitis
atgagtaaagtacatgttttcgatcatcctttaatacagcataaactaagttatattagagatgctcataccggtacaaaagagtttagagaactagttgatgaagtaggtatgttaatggcttatgaagtgactagagatttagaattacaagatgttgaaattcaaacacctgtaactaaaatgacagctaaacgactagcgggtaaaaaattagctatagtaccaattttaagagcaggattaggaatgactgatggtgttttaagtttagttccttcagcaagagtaggtcacattggcttatatagagatccagaaacacttaaagcagtagagtactttgctaaactacctcaagatatcgatgaaagacaaattatcgttgtagaccctatgttagcgactggtgcttcagcaatagaagccatttcatcactgaaaaatcgtggtgcgaaaaatattcgttttatgtgcttaattgctgcaccagaaggtgtggaaaagatgcaagaagctcacccagacgtagatatttatatcgcgacacttgatgaaaaattaaatgacaaagcttacatcacacctggattaggggatgctggtgacagattatttggtactaaataa

SEQ ID NO: 2139 - DNA, 1134 bp, Staphylococcus capitis
atgaaaaaaattatgaccatcttcgggacaagacctgaagctattaaaatggcaccactagtaaaagcattagaaaaagatgctgaattagaacccgtcgttgttgttacagctcaacatagggaaatgcttgattcagtattaaatacatttgatataacaccttgtcatgatttgaatattatgaaatctgggcagactttgtctgatattacatcaaaatcgatggttcttttagaagaagtaattaaaaaagaatcaccagatatggtactagtacatggtgatacagttactacgttttctgggtcactagcagctttttataatcaattacctattggtcatgttgaagctgggttaagaagttatgataagtattctccttttcctgaggagatgaatagacaaatggttggggtaatggcagacttgcattttgccccaacttttaatgcagctaagaatttgcttgatgaaggcaaatcatctaacaatgtggtaataactggtaatacagcgattgatgctatgaactatacaattaatgataattatacttctcaaatcatcgataaacatcgtaacaagaaatttattttattaactgctcatagaagggaaaatataggtcaacctatgattaacgtgtttaaggcagttagaaaattaattgatcagtatgaagatttagcattagtatatccagttcacatgaatccgagagttagagaactcgctgaagcgtatttaggtcaccatgatcgtatagagttaattgaacctttagatgtgatagactttcataattttgctaagcacgcttacctaattatgactgattctggaggaatacaagaagaagctccatctctacataaacctgtactcgtattgagagatagtacagagagacctgaaggggtagaagcaggtactttaagggttattggtactaatgaggactctgtttatgaggaaactaagcgtcttttagacgataaacagctttataaacatatgagtgaagcaaacaatccctatggagatgggaatgcaagtaataggatagtaaatcatattaaatattattttggattaattagtgataaacccaatcattttgaaaaataa

SEQ ID NO: 2140 - DNA, 351 bp, Staphylococcus capitis
atgagtcgtttctacatcatttttaaacaatatatccaatattatctttatctcttaatagtattaggaatattgtatctaattataccccgaccctttattttaggattaatgataggaacatgtggttctttggttaatacatacatctttgaaagttattttgcaaaggcacaacaacaagatgctatacatatttcaacgggcaatatatggagatatcttgtagcaatcatttcgtgtttgttatggtttttcttcaaagaccacatcaatatcataggtgtattaattggtttaatgatttcttatattgtaatcatattgcgccctctacttaaaagggagtaa

SEQ ID NO: 2141 - DNA, 729 bp, Staphylococcus capitis
atggatcacaaatccccactcgtcagttggaacgtgtttggattcgatattgtctttaacatggcaagtgttatgatggtgctcattacggcgattttagtttttatcatagctttaatatgcacgcgtaatcttaaaaaacgaccaactggaaagcaaaacttcattgaatgggtatttgattttgtaagaggcatcatagaaagtaacatggcttggaaaaaaggtggaaactttcacttcttagcaatgacattaattttgttcatctttgtagccaatatgcttggtttaccgtttgctattgttactaaagatcactatctatggtggaaatcaccgacagcagacgcaacggtaactcttacgttatctacaactatgattctactaacgcattattacggtattaaaatgcgtgggcctaaagcatatgcagccggatactttaaacctttctggccacttgcaatcattaatgtatttgaggagtttacatctacattaactttaggtttacgactatacggtaatatctttgctggtgaattattacttggtttactagcaagtttacttttccaacaaccagcatggggttggattataagtattccaggattaatcgtttggcaagcgttctcaatattcgttggttcaatccaagcgtatatcttcatcatgctttcaatggtttatatgtcacataaagtggcagatggacactaa

SEQ ID NO: 2142 - DNA, 213 bp, Staphylococcus capitis
atgaatttaatcgcagcggcaatcgcaattggtttatcagcattaggtgcaggtatcggtaacggtcttatcgtatctagaacagttgaaggtgtagcacgtcaaccagaagcacgtggtcaattaatgggtattatgttcattggtgttggtttagttgaggctttacctatcattggtgttgtaattgcgttcatgacatttgctggataa

SEQ ID NO: 2143 - DNA, 516 bp, Staphylococcus capitis
gtgactgcaacagctaatatgttcgttttaggtgcaggagtcgaatggggaacaacaattgttacacttgtcacattcgtaattcttcttgcgctattgaagaaatttgcttggggtccattaaaagaagtaatggacaaacgtgagcgagacatcaataaagatattgatgatgctgaacaagctaaaattaacgctcaaaaacttgaagaagaaaacagaaagacacttaaagaaactcaagatgaagttcaaagaatcttagacgatgctaaggttcaagcacgtaagcaacatgaagaaattattcatgaagctaatgtaagagctaacggcatgattgagactgctcaaagtgaaattaacagtgaaaaagaacgtgcacttgctgatattaataatcaagtatctgaactatcagtattaatcgcatctaaagttcttagaaaagaaatttcagagcaagatcaaaaagatttagttgaaaagtatttaaaagaggcaggggataaataa

SEQ ID NO: 2144 - DNA, 540 bp, Staphylococcus capitis
atggtaaaggtagcaaataaatatgccaaagcattatttgatgtctctaatgatacaaatcaattagatgtagtttatgaagatttagaaacaatcagccattcatctttcgactataataaaagtttaaaagcaattgatagtaatccttcattaacagcagatgagcgtaaatcattcgttaatgaagtatatagtggtgcaaatcaatacgtcgttaatacgctaaaagttttagctgataatcgtcatttatcattaattgaagatgtatttagagcttttcaaagtttatataatgcgcatcataaccaagactttgcaattgtagaatctacttatgaattaaatgaagatgaattagcaaggatagaacaattgattaaagatcaaacacatttatctagagtaattgttagcactaaaatcaatccagatttaattggtggatttagagttaaggtcggcacaactgttatggatggtagtgttaagaatgaccttgttcaattacaaagaaaatttgaaagagctaattaa

SEQ ID NO: 2145 - DNA, 1512 bp, Staphylococcus capitis
atggccatcaaagctgaagaaatcagtgcattacttcgctcacagattgaaaattatgagtctgaaatgtccgtaactgatgttggtactgtacttcaaattggtgacggtatcgcattaattcacggattaaacgacgttatggctggtgagctagtagaattccacaacggcgtattaggtttagcacaaaaccttgaagaatcaaatgttggtgtggttattttaggaccatacaacgatattagtgaaggtgacgaagttaaacgtacaggccgtattatggaagtaccagttggagacgaattaattggaagagtcgttaatccacttggtcaacctattgatggacaaggtcctatcaatgcaactaaaacacgtccagttgagaaaaaagcaactggtgttatggatcgtaaatcagttgatgaaccattacaaacaggtatcaaagcaattgacgctttagtaccaattggtcgtggtcaacgtgagttaatcattggtgaccgtcaaactggtaaaacaactgttgctatcgattcaatcttgaaccaaaaagatcaagatacaatttgtatttacgtagctattggtcaaaaagattcaacagtacgtgcaaatgttgagaaattaagacaagcaggcgctttagattacacaatcgttgtttctgcttctgcagctgatccagcaccattactttatatcgcaccatattcaggtgtaactatgggtgaagaattcatgtttaatggtaaacatgttcttatcgtatatgatgatttaactaaacaagcagcagcttatcgtgaattatcattattattacgtagaccaccaggtcgtgaagcttacccaggtgacgttttctacttacatagtagattattagaaagagcagcgaagcttaatgatgaattgggtggcggttcaatcactgctttacctattattgaaacgcaagctggtgacatttcagcttatgtcccaacaaacgttatttcaattactgatggacaaattttcttacaatcagatttattcttctctggtgtaagaccagctattaatgctggacaatcagtatctcgtgttggtggttctgctcaaattaaagctatgaagaaagtagctggtacgctacgtttagacttagcttcttatcgtgagttagaatcattcgcacaattcggttctgatttagatgaatttactgctcaaaaattagaacgtggtaaacgtactgttgaagtattaaaacaagaccaaaaccaccctctaccagttgaatatcaagttttaacaatttatgcattaactaaaggttatttagatgatattccagtagaagatattactcgatttgaagacgaattaaaccactgggcagatgcaaatgcaactgacttattaaatgaaatcagagaaactggtgcattaccagatgctgataaatttgattctgctattacagaattcaaaaaaggttttagtaaatcagaacaataa

SEQ ID NO: 2146 - DNA, 867 bp, Staphylococcus capitis
atgggctctctaaaagagattgataatcgaataaaatcgactaaaaagatgaagcaaatcactaaggcgatgaacatggtttctagttctaaattgcgtagagcagaaaagaatacgaagcagttcagaccttatatggaaaaaatgcaagatgctattactgcagtagcaggtgctaatagttcttctaaccatcctatgcttaaagctagagatgtaaaacgtagtggttatttaatcattactagtgataaaggacttgcaggtgcttatagtacaaatgtattaaaacgtttagtgaatgatattaaagcgaaacataatgacagtagtgaatacagtattattgttttaggtcaacaaggtgttgatttctttaataatagaggttatgaaatcgaaagttctttagttgaccttccggatcaaccttcatttaaatcagttcaagcgattgctaagcacgcaattgatttatatagcgaagaaaatattgatgaattgacaatttattatagtcactatgttagtgttcttgaaaataaaccaacaactaagcaagtattaccattatctcaagaagattctagccaaggtcatggtcaaatgtcatcttacgaatttgaacctgacaaagaatctattttaagtgttattctaccgcagtatgtcgaaagcttaatctatggaactattttagatgctaaagcaagtgaacatgcttcacgtatgactgcaatgaaaaatgcttctgataatgcgactgaacttattgatgatttatcattagaatataatagagcgagacaagcagcgatcactcaacaaatcactgaaattgttggtggttcagcagctcttgaataa

SEQ ID NO: 2147 - DNA, 1413 bp, Staphylococcus capitis
atgggaattggccgtgtaactcaagttatgggtccagtaatcgatgttcgttttgaacataatgaagttcctgatattaacaatgccttacacatcgaagttcctaaagaagatagcacacttcatttaactttagaagttgcacttcaattaggtgatgatgtagtacgtacaatcgcaatggactcaactgacggcgttcaaagaggtatggaagttaaagatacaggtaaagatattagcgtacctgttggtgatgcaactttaggaagagtatttaacgtattaggagaaacaatcgatttagatgaaaagattgatgattcagtacgtcgtgatcctattcatagacaagcacctggcttcgatgaattatctactaaagtagaaatcttagaaacaggtatcaaagtagtagacttattagcaccttacattaaaggtggtaaaattggattattcggtggtgccggtgttggtaaaacagttttaatccaagaacttatcaataatatcgctcaagagcatggtggtatttcagtattcgccggtgttggtgaacgtacacgtgaaggtaacgacctttactatgaaatgagcgatagtggtgtaattaagaaaacagcgatggtattcggtcagatgaacgagccacctggtgctcgtatgcgtgttgcattatcaggtttaacaatggcagaatatttccgtgatgaagaaggccaagacgtattattattcattgataatatcttcagattcacacaagcaggttctgaagtttcagcattacttggacgtatgccttcagccgttggttatcaaccaacacttgctactgaaatgggtcaattacaagaacgtattagttcaactaataaaggttctgttacttcaattcaggcggtattcgttccagccgatgactatacagaccctgcgccagcaactacattcgctcacttagatgcgacaactaacttagagcgtaaattaactgaaatgggtatttatcctgcggttgatccattagcttctacttctagagcattagaaccatcaatcgttggtcaagaccattacgatgtagctcgtgaagttcagtctactttacaaaaatacagagaattacaagatattattgcaattcttggtatggatgagttatcagatgaagataaacaaactgtagaacgtgctcgtagaattcaattcttcttatcacaaaacttccacgtagctgagcaattcactggtcaaaaaggttcttatgtaccagttaaaacaacagtatcagatttcagagatatcttagatggtaaatacgatcatattcctgaagatgctttccgtttagtaggtagtatgcaagacgtaattgaaaaagccaaagatatgggtgttgaagtctaa

SEQ ID NO: 2148 - DNA, 405 bp, Staphylococcus capitis
atgaatacattaagcctaaatattgtcactcctaatggttctgtctacgaacgagaagatgtagaactagctgtattacaaacaacagctggtgaaatgggtatcatgagtggacacattccaacagttgccgcattaaaaactggctatgttaaagttaactttcataatggtaacgaatatgtagcagttagtgatggttttgttgaagttagacaacataaattatcaattatcgtccaaacagcagaaactgctagcgaaatcgatgttgagagagctaaattggctaagtcgagagcagaatcacatttagaagatgatgatgataacagtgacattaatagagccaaaagagcgttagaacgagctaataaccgtttacgtgtggctgaattaaaataa

SEQ ID NO: 2149 - DNA, 1266 bp, Staphylococcus capitis
atggataaaatagtaataaatggtggaaaccgattaacaggtgaagttaaagttgaaggtgcaaaaaatgctgtattaccagtattaacagcttctttattagcttcagaggggcaaagtaaacttgttaacgttccagctttaagtgatgtagagacgataaataatgttttatcaacacttaatgcagatgtttcatataataaagaagaaaatgcagttaaagttgatgctactcaaaaattgaatgaagaggctccatatgaatatgtgagtaaaatgagagcgagtattttagtaatggggccattacttgctagactcggacatgcaattgtagcgttacctggtggttgtgcaattggtagtagaccgattgaacaacatatcaaaggatttgaagcactaggagccgaaattcatttagaaaatggtaatatttatgctaatgctaaaaatggattaaaaggtactcaaattcatttagattttccaagtgtaggagcaacacaaaatattatcatggcagcttcacttgcatcaggtaaatcaattattgaaaatgctgctaaagaaccagaaattgtagatttagccaactatattaatgaaatgggtggtaaaattactggtgctggaacagatacaatcactatacacggtgttgataaattacatggtgtagaacattcaatcattccagatagaattgaagcgggaacattattaatcgccggtgcaatcacacgtggagatatctttgttcgaggtgccatcaaagagcatatggcaagcttagtatataaacttgaagagatgggggttaatttagacttcaaagaagacggtattcaagtttctgctgaaggtgacttaaagcctgttgatgtaaaaacattaccacatccaggtttcccaactgatatgcaatcacaaatgatggctttattacttacagcaaatgggcataaagttattactgaaacggtctttgaaaatagatttatgcatgtagccgagtttagaagaatgaatgcaaatattaatgttgaaggtagaagcgctaaaattgaaggaaaaagtcaattacaaggcgcgcaagttaaagctacagatttaagagctgcagcagcattgatcttagcaggtttagttgcagatggtactacacaagttactgaacttaagcatttagatcgaggttatgtaaatttacacggaaaattaaaagaccttggtgcagatattaagcgtattaatgattaa

SEQ ID NO: 2150 - DNA, 438 bp, Staphylococcus capitis
atggaaacaatttttgactataatcaaattaaacaaattatccctcatagacaaccgttcttattaattgatagagttgttgaatatgaagaaggaaaacgttgcgtgggtttaaagcaagtttctggtaatgaaccatttttccaagggcattttcctgaatacgcagtaatgccaggtgtattaataactgaagcactagctcaaactggagccgtagcgatgttaaacaatgaagagaataaaggtaaaatagctttattcgctggtattgataaatgtcgtttcaaaaaacaagtgacacctggtgatacgttaatgttagaagtagaaattactaaaattaaaggaccaatcggtaaaggtagtgcgaaagctacagtcgatggtcaacttgcttgtagctgtgaactaacatttgctattcaagatgcttaa

SEQ ID NO: 2151 - DNA, 444 bp, Staphylococcus capitis
atgaaaacatttaaggctgttcggtttcaaattgtaaatgagaatggtggcgtttcagaatatgaaatcgaagatggcgttattataaataaagaaggtagtggaacaggctggttacttgagattgttatttcaaatgagcactatgaaacatttaaaacatatatggaagataaacaattattagatattagagtagtcatcactagacctgcaaatgatccagctttatttgatgctacggttaaaaatgtcgctaattttaaaaaatcaatgtctgttgtttttgaatgtcatatttatactttaagacaagtctatgccgaaagcttgctagaggaattggtagatgatggtttaactggtgaagagctcaagaagacctttaatcgaatgatgcaatctaaacctaaactaaaagaagaaaaattcgagagaaattaa

SEQ ID NO: 2152 - DNA, 396 bp, Staphylococcus capitis
atgttaaacaaaatagtaatagtaggaaggttgactaaagatgctcaaatttatgagaaggaggatagtaaggtcgcaacattttgtgtagcaactgaaagaaattacaaagatgaaaataatgaaatatcaagtgattatttattgtgtaaagctttcggcaaaacagcaaccaatatcgaaaaatatactagtcaaggtacattagtaggtataacaggacaaatgcgttcaagaaaatatgaaaaagaaggacaaacgcattttgtaaccgaactatatgtagaaacaattaaatttatgtctccaaaaactaaacataatgaaatcctctctcaaaatcaatacgatgaagacacttatcattcagacgacattgaaattattaatatctaa

SEQ ID NO: 2153 - DNA, 726 bp, Staphylococcus capitis
atgaaaaagacaattattgcatcatcattagcagtaggattaggcgttgtagcaggtaatgctggacacgacgcacacgcaagtgaagcaacaaacgttgataaagcagaattagctcaaaaagctcaatcaaatgaccaatcattaaacgaaagccctatccaaaaaggtgcttataacgtaaactttgattacaatggtttcaattatcactttgaatcaaatggtactcactggagctggaactatgcacaaaatggtcaagctactccacaacaagatgtaagcaaccaaacttcagctgaccaagtaagttcacaacaacaaactagccaagctcaacaagctcaaccagaacaaacttctgctccacaaactgagcaaactcaacaaccacaagctaaagcaactacttcttacagtgcaccaactaacaacactgcaagtagtcaagcttcatcaaaccaagcttcaagtggttcatcagtaaacttaaattcacacttaaaacaaattgctcaacgtgaatcaggtggcgacatccacgctatcaacccttcaactggcgcagctggtaaattccaattcttacaatcaacttgggattcagtagctccagaacaatataaaggtcaatctccagctaacgctcctgaaagcgtacaagacgctgcagcagttaaattatacaacactgcaggcgctagccaatgggtaactgcataa

SEQ ID NO: 2154 - DNA, 690 bp, Staphylococcus capitis
atgaaattttcacaagaattaagggaagaagctcaaccaattattgaaagaatttacaatgataactttattcaagaattattagttgggactttacctaaacaagcagtacgtcaatatttaagagcggatgcatcatatttaaaagaatttacaaacttatatgccttacttattccaaaggttcacactatgcaagatgtaaaattcttagttgaacagattgaattcatgttagatggtgaagtagaggcacatgaagtactggctgattatatcaatgaatcttatgaagaaattgttaaagaaaaagtttggccaccaagtggagatcactatattaagcatatgtattataatgcttatgctcacgaaaatgcagcatacactatagctgcaatggcaccttgtccttacgtctatgcagttatagctaagcgtgcgattaaagatcctaaattaaataaagattcaattaccgcaaagtggtttgatttttatagtactgaaatggatccacttgttgatgttttcgatcaattgatggaccgtttaacagaagaatgtactgacaaagaaaagcaagaaatcaaagaaaacttcttgcaaagtacagtacatgagcgtcatttctttaatatggcttatatcgatgaaaaatgggattttggaggagaaaaccatgaataa

SEQ ID NO: 2155 - DNA, 822 bp, Staphylococcus capitis
atgaataaacctaaaatagcattaacgatagctggaacagatcccactggtggcgcaggggtaatggctgatttaaaatctttccattcatgtggcgtatacggtatggcagcaaacactagcattgtcgcgcaaaatactctaggtgttcagagcattcataatttggaaacaagttgggtacaagagcaacttgatagtgtttttgatgatgaattaccacatgctataaaaacaggaatgattgcgactaaagaaacaatggaactgatacaaagttatttgaaaaagtattcagatattccttatgttattgatcctgttatgttggcgaagagtggagattcactcatggacgatgatactaaatctcacttacaaactaccttattacctttagctgatgttgtaacaccaaatattcctgaagcagaggaaattactggtttgaaaatagatagtgaagacaatatccgcaaagcaggagatatttttatcaatgagattggtagtaaaggcgttgttattaaaggtggtcattctgctgatttaaataacgctaaagatttcttatttacgaaggacgatgtttatacttttgaaaataaacgcttcgatactaaacatacacacggaactggttgtacattttcagcagtaatcactgcagaactagctaaaggtcgttctatatatcaagcagtagaaaaagctaagtcgtttatttcaatgagtattgaacatacgcctgaaattggtaaaggaagaggtccagtgaatcactttgcatatttaaagaaagtaggtttagatgatgaataa

SEQ ID NO: 2156 - DNA, 792 bp, Staphylococcus capitis
atgatgaataatttagaaagattacgttcagaaaatccacttattgtttgctataccaatgacgttgttaaaaattttacagctaacgggttacttagtttaggagcaagtccagcaatgagtgaagcacctgaagaagcagaagaattttacaaagtggcaagtgcattagtgattaatataggtacactaactcatgataatgaagaagatattatgaaaatagggagaatcgctaacgaacaaggtacgccaattgtcttcgacccagtggcagtaggcgcgtcttcttacagaaaacaattttgtaagagatttttagaacaaattgaagtttctgtaataaagggaaacgcatcagaactacttacgcttgttgactctcaaactacgatgaaaggaacagatagtgatagttcacttgatgcagttgaaattgctagaaaggcccataaaaatctcgaaacagcaattgtcattacaggtaaggaagacgttgtcgcacaaaataatcaaattgttaaacttgctaatggctcacctcttctagctaaaattaccggtgcaggttgccttttaggaggagtagtggcaagcttcttatttagaaatactcgaccagaaattgaacagttaattgaagcggttagtgtgtacaatattgctgcagaattagctgaaaataaaaaccatgtccatggccctggatcatttttaccagaattgctcgatcaaatgtatcaaattgatgagacaacatttgaaaaatatgtacataaagtagaggtttaa

SEQ ID NO: 2157 - DNA, 639 bp, Staphylococcus capitis
atgtttagctcagagcaattacaagtatattttatttgtggaactcaagatataccagaaaatagaaccattgaacaagtacttgatgaggctttgaaagccggaatcactatgtatcaatttcgtgaaaagggcccatcatctttaataggtgaagagaagaaacagttagcaataaatttaaaacgaaaatgcgagagatatcacgtaccattcattgtcaatgacgatatagagttagcaaaagatattgatgctgatggcgttcatgttggtcaggatgataaagaagttaaagattttgctatgcagtttagaaataaaattataggtttgagtgtgggtaatttagatgagtatcaacaatcggatttatctcaagtggattacataggtgtagggcctatgtataccacttcgtcaaaagatgatgctaacgctcctgttggtcctcatatgattacaaaattgcgagattatgttggagaattacctattgtagcaataggtggtattaatgaaacaaatattgaaccaattgctgaagccggtgctgatggcgtttcagtaatttctgcaataactagaagtaagaatattgacaagactgttaagcattttcgtaaatactttaattaa

SEQ ID NO: 2158 - DNA, 873 bp, Staphylococcus capitis
atgaagaaaaaagcgttactacctttgtttttagggataatggtttttctagcagggtgtgactactctaaacctgaaaagcaggacggattcttctttaatacattcgttcagccaatgaaacatctcttacaatggttaggaaatgatgtatttaataacgactatggactagcgattattatcttagttcttgttatacgtttaatcttgttaccattcatgttatcaaactataaaaatagtcatatgatgcgtgaaaaaatgaaagtagctaagccagaagttgatggtattcaagaaaaagttaaacgtgctcgtactcaagaagagaaaatggcggcaaaccaagaattgatggaagtttataaaaaatatgatatgaatccgatgaagagcatgctcggttgtttaccaatgcttattcaaatgccaattatcatgggattatatttcgtattaaaagataaacttgttaatggactttctgatcatccacatttcttatggtttaatttaactaaaccagatatttggattacgattattgccggtgttctttactttgttcaagcatatgtttcaagtaaaacgatgcctcaagagcaacgccaaatgggatacatgatgatgattgtttcaccaatcatgattatttggatttcattacaagcgtcatctgcacttggtttatattggtcagtcagtgccttattcttagtaatacaaacgcattttgcaaatatgtattactctaaacttgctaaaaaagaagttcaacctttcatcgaacaatatgaaaaagaacataatccgtcttctaataaaaaaggcaaaaatacgcaagttgtttctaaaaagaataagaaatag

SEQ ID NO: 2159 - DNA, 663 bp, Staphylococcus capitis
atggaaaatgaattaaaaattaaacacgcatgtaactatatgaaaatggttcataaagatgatcacactgggcacgatatcgcgcatgtagaacgggttcatacattagcaaagtatatcgctttaaatgagggtttagtacatacaacgattatagaacttgccgctttattacatgacacagtggatagcaaaataacgaatgaacaacaagcatatgataaactttctacttttctagaaacgattgacttaacccaagatgatattcaacatgttttacatatcatacaaaatatgagttaccgtggtgggaaaaacaatcaagccacattatcaattgaaggacaaatcgtgagagatgctgatcgtttggatgcgctaggcgcaatcggaattgctcgaacttttcaattcgctggatatttcggcgaaccaatgtggactgaatctaacgtgccattcgaatcactacatactgataatattgaagcatttgatccttcagcaattaagcacttttacgaaaaattattaaaacttaaaagtttaatgcatacctcaactggaagaaagcttgctgaagaacgtcatcattttatgcttcaattcttaaaacaatttttacacgaatggaatttcaataacaacacaaatttgtaa

SEQ ID NO: 2160 - DNA, 1485 bp, Staphylococcus capitis
atgttagaagtctttactatggcgcttcaccattcaaatataatcattaatgttatcttaattggcgctttcattttaaacttgatctttgcatttacaattatctttatggagagacgtacagctaattctatatgggcatggttacttgtgctcgtatttctacctttaattgggttcattttatatctattgctaggtcgtcaaatccaaagagatcaaatctttaaattaaataaagaagataaagtcggtttagaaatgattgtcgatgagcaattggaagcgctcaagaaacaagatttctctaaaggtaaccatcaaatagttaaatttaaagaaatggtgcaaatgttactttataataatgctgcctttctaacgactgataatgatttaactatttatactgatggtcaacaaaaattcgatgatttaattaatgatatccgtaatgctcaagactacatacatattcagtactatatctttcatagtgatggacttgggaaacaaattcttagtgaacttgaaaagaaagccgaagaaggcattgaagtgaaaatgctatatgacgatatgggttcgagggatttacgtaaaaaagatttaaaacattttagaaataaaggtgggcatgctgaatcattcttcccatcaaaattgccattaattaatttacgtatgaataaccgaaaccacagaaaaatcgttattatcgacggtaaaattggttatgttggtggtttcaatgtaggtgatgaatatttaggtaaatctaagaagtttggttactggcgtgacacgcatctacgtattgtaggtgatgctgtaaatgcattacaacttcgatttattttagattggaattcacaatctacccgagacaatttaacttatcaagaacgatatttccctgatgttaattctggaggaacaatcggcattcaaatcgcttctagtggacctgatgaagattgggaacaaatcaaatacggttacttaaaaatgatatcatcagctaaagaatcaatttatattcaatccccctactttataccagatcaagcatttttagactcgattaaaattgctgcacttggtggtgtggaagtcaatattatgattccaagtatgccagaccatccattcgtatactgggctacacttaaaaatgtcgcatctttacttgaggccggcgtaaaggtgtatcattacgagaatggcttcctacattctaaagtattggtcatcgatgatgaactcgcaagtgtaggtactgctaatatggataatcgtagtttcacattgaattttgaagtaaatgcctttatttatgatgagagtgtcgcacgctcccttaagcaagcatttattaacgatatgaaagtgtcatctagacttacagaagaaagatacgagcaacgcagtacttggattaaatttaaagaaggtatttctcaattattgtcaccaattctataa

SEQ ID NO: 2161 - DNA, 294 bp, Staphylococcus capitis
gtgactgaaaatgaaactgcacatcactcagagcaaacgaaagcaaatttaaagtcacgattaaatcgtatcgaaggtcaagtacgtgcaattaatcgaatgattgaagacgatgtgtattgcgatgatgttttaactcaaataagagcgacacgctctgctttaaacagtgtggctactaaattgttagatcatcatatgaaaagttgtattatgaataaagtgaataatggtgcacaagaagaagcgatggaagaactattggttacttttcaaaaattaattaaagattaa

SEQ ID NO: 2162 - DNA, 207 bp, Staphylococcus capitis
atggaaaatggaattgtttatgttgctaatattgagactatagaggaagaaaaccaattaaagacacgtttagaaaatatgattggtgtcgaaaaagtagatattgatagtaaagtaggagaaataaaggtattatttgaaacacctgcgaatttaaatagtattgaaaaagaagtatatgattctggctttcgcgtgcgttattag

SEQ ID NO: 2163 - DNA, 138 bp, Staphylococcus capitis
gtgaagaatccagataagattcaaaacgtagtcaaattattgtcatcattaggtgtgaatattaaaaaaactaaatctcgtttagatattattaatactttacctacatctaatcaagtaagtcatgagttaaaataa

SEQ ID NO: 2164 - DNA, 1212 bp, Staphylococcus capitis
atgaattattcatctcgtcaacaaccaagcaaacattggtttcgtaaagtcgactggatattagtactggtaattactgtgttagcaatcataagcgtaacactaattagttctgcaatgggtggcggacaatatagtgcgaacttcagtatcagacaaattatttattacattctcggagctattatggcatttctgattatgatagtttcccctaagaaaattaaacataatacatatctcttatatttcattttttgtattttactcataggattgcttattttacctgaaacagccatcacacctgtgatcaacggtgcgaaaagttggtatagctttggacctataagtattcaaccttcagaatttatgaagattattttaattttagccctagctaaaacagtttctagacataatcaatttacctttaacaaatcgttccagtcagatttaatgctatttttaaaaattataggtgtctcaatatttcctatgctattaattttattacaaaatgacctcggtactacgcttgttatttgtgcagttatcgccggtgttatgatggttagtggtattacttggagaatccttgcacctatatttatcgcagcaattgtaggtggtgctagtattattttagctatcattttcaaacctacattaattgaaaatctattaggaattaagatgtatcaaatgggacgaattaattcttggttggatccttatacttatagtagtggcgatggatatcatttaactgaatcacttaaagcaattggatctggtcaattaataggtaaaggttacaatcacggtgaagtttatatccctgaaaatcatacagactttatcttctcagtagtaggcgaagagatgggcttcattgggtctgttgtgctaattctcatattcttatttttagtgtttcatttaattagattagcaagcaaaatcaatagtcaatataataaagtctttattatcgggtatgtttctcttatcgtcttccatgtacttcaaaatgttggaatgacggttcaattattaccaattactggtatacctttaccatttattagttatggtgggagctctctttggagtttaatgacaggcataggcgtcattctatctatttattatcatgaacctaagcgttatcaagaacctgatactttagatactgctaaaactgcataa

SEQ ID NO: 2165 - DNA, 1071 bp, Staphylococcus capitis
atgacaaaagagaatatttgtatcgtttttggaggaaaaagtgctgaacatgatgtttcaatattaacagcacaaaacgtattaaacgcaattaacaaagatcaatatcaaatagatattatttatattacaaatgatggtgaatggaagaagaaagaaaacatcactgatgaaattaaatctactgacgaattagttttaaataatgttgaagcgggagaaatatcacaattattaagtaaaggtagtactggacgttcttatgatgcagtattcccacttttacatggacctaatggtgaagacggtacgattcaaggattattcgaagtattagatattccatatgtaggtaatggtgtgttagcagcttcaagttctatggacaaattagttatgaaacaattgtttgaacatagaggattacctcaattaccatacattagtttcttaagaagtgaatatgaaaagtatgagaacaacattattaaattagttaatgataaattaacttacccagttttcgtgaaacctgctaacttaggttcaagtgttggtattagtaaatgtaataatgaagaagaacttaaatcaggtattgaggaagctttccaatttgaccgtaaacttgtaattgaacaaggaattgaagcacgtgaaattgaagtggctgtattgggtaatgactatcctgaaactacatggcctggagaagttgttaaagatgtggcattttatgattacaaatctaaatataaagatggtaaagttcagcttcaaataccagctgatttagatcaagacgttcaaatgacattacgtaatatggcgttagaggcttttaaagccactgattgttcaggtttagtacgtgcagatttctttgttacagaagacaaccaaatctatattaatgaaacaaatgctatgccaggatttacttcattcagtatgtatccaagcttgtgggagaatatgggattatcatatccagatttaattgcaaaattaataaatctcgctaaagaacgtcatgaagataaaaagaaaaataaatataaaattgattaa

SEQ ID NO: 2166 - DNA, 1356 bp, Staphylococcus capitis
atgattaacgttacattagaacaaatcaaacattggataccttgcgaaattgatgaacaatatttaagccattctatcaatggtgtaactattgattctcgtaacattgaaaaggatatgctttttatcccattcaaaggtgagaacgtagatggccatcgatttgttgcacaagctttaaaggatggtgctggtgcttcattttcagaaaagggaactgagttaagcgagcatatcgaaggtccaattatttgggttgaagatacacttaaagcattacaagacttagccaaagcatatcttaaatatgtgaaccctaaagtgattgcagtaactggatcaaacggtaaaacgactacaaaagatatgattgagagtgttttaacgacagaatttaaagtaaagaaaacacaaggtaactataataatgagattggaatgcctttaacaatattagacttagatgaagatacagaaatttctattcttgaaatgggcatgtctggcttccatgagatagagttattatcttcaattgctcaaccggatattgcagtcatcacaaatattggtgaatcacatatgcaagatttaggttcaagagagggtattgctaaagccaagtctgaaattactattggtcttaaagagaatgggacattcatatacgacggtgatgaaccattactaaaaccgcatctcgaacaattaaataaagcaaaattaataagtgtaggtttaggtaatagtaatacgctcgtatgtcatgttgatgatatagaaacagaaggtatcgcttttacaataaatgataaagaaagctttacactacctatcctaggtacgcacaatatgaaaaatgcgacgatagccattgcgataggacatgaacttggtttgtcatatgaaacaataaaagacaatattaatcatgttaagttaacaggtatgcgtatggagcgtcaccagactactaataacgtaactgtcattaatgatgcttataatgcaagtccgacaagtatgaaagctgccatcgatacgctaagtagtatggaagggcgaaaaatccttattctagcagatgttttagagctaggtgaaaatagtcaatctatgcacgaagaagtcggggcttatctcaataataaagcaattgatgtattatacacttatggtgatgaagcacgatttatttttaacacaggtcaaaatgaagtacctactgcacaacactttgatgataaaagtgaactgattaaagaattgaagactattgtgaaagaaaacgataaaatattggttaaaggttcacgaggtatgaaacttgaagaagtagtcgaagcattaatttaa

SEQ ID NO: 2167 - DNA, 1536 bp, Staphylococcus capitis
ttgcaaaattttaaagaattagggatctcggatagaacggttcaaacactggaatctatgggatttaaagaacctacacctatccaaaaagacagtatcccttatgcgttagaaggagacgacatccttggtcaagcccaaacaggtacggggaaaacaggggcttttggtattcctttaattgaaaaagttgtaggccaacaaggcgtacaatcactcattttagcgccaacaagagaacttgctatgcaagttgcggaacaattaagagagtttagtaaaggccaaaatgttcaagtcgttacggtcttcggtggaatgccgattgaacgacaaataaaagcacttaaaagaggaccacaaatcgtagtaggaactccaggacgtgtaattgatcacctaaatcgtcgtactttaaaaactaatggtattcatacattaattttagatgaagctgacgaaatgatgaatatgggattcatcgacgatatgagatttattatggacaaaattccatctgaccagcgtcaaacaatgttattctcagcgactatgcctaaagcaattcaagacttagttcaacaatttatgaagacgcctaaaatcattaaaacaatgaataatgaaatgtcagatccacaaatagatgaatactatactattgttaaagaattagagaaatttgatacatttacaaatttccttgatgtgcatcaaccagatttagcgattgtatttggacgtacgaaacgtcgtgttgatgaattaactagtgcgctattatctaaaggttataaagcagaaggcttgcatggtgatattactcaagctaaacgtttagaagtcttgaagaaattcaaaaatgaccaaattgacattttagttgctactgacgtagcagctagaggtttggatatttcaggtgtaagtcacgtttataactttgacatccctcaagatacagaaagttatactcatcgtataggtcgaacaggacgtgcaggtaaagaaggtatcgcggtaacatttgtaaatccaattgaaatggattatatacgtcaaattgaagatgtcaatggacgtcgaatgaacgctttaagaccaccacaccgtaaagaagtacttaaagctcgtgaagacgatattaaagaaaaagttcaaaactggatgtctaaagacagtgaacctcgtttacaacgcatttcaagtgaattacttgaagaatatgacagcactgagttagttgcatcattgctacaagaattagtagaagcaaacgatgaagttgaagtacagttaacgttcgagaaaccattagcacgtaagaatcgcaatagtagaggtggcggttcaagaagaggtaacaataacaaacgtggcaatggcaaatttgataataaaaatagacgttcaaaagggtctaaaggtcattcaaataaaaagaaaaataataaaaaattcgaacgtcgtgataaacaaaataaaggttcaaaccaatcaatgagaggccgtacatttgccgatcatcaaaaataa

SEQ ID NO: 2168 - DNA, 480 bp, Staphylococcus capitis
atgaatcttgatagtacgtttcatcgcagtcctaaaaatgcattaaagtactattacatcactagttttattggtttaattgtagtactagtgattttgagcatattatattattgttggtctacttataattggtggaactttattctatacatacttattacagttgcggtgatttcagttataaactttattgttgggccatttctgagatataaatactatttttataaatttgaaggcgattcaattattttgaagcaagcttttttctttaaaaaggaagaactaagtaagatagagaggttgcaatatattacagtcagtacaaatccgctagcaaaaatatttaaaataaatacaattgaattggttacagcgggtcatgaaatttcactgccgatggtttcagaaaaagaagcagacgtaatagagcatcaagcattaaatagattgagaggtgtagatgacgatgtataa

SEQ ID NO: 2169 - DNA, 1500 bp, Staphylococcus capitis
atgtataatccacaaaagctacatccggtctcatatgtaacgagtctaattaatgttattaaaaataattttattgtaattattattttcctgtttaatattaaagattttaaatatgatgatttctattcatacttatggccaggtatcatgacattaatatttttaataactttcttttataatattttcaaagtttataatactagatattggattgaaaacaatcatttcatccttacaacaggtgtattaaataaagagcgaaaagaactcaatattagtagaattcaatcagttgataccactgaaggttttgtgaatcaaatagtaggtggcgtagaacttattattaaaactccaagtgacggtattgaactaagtacaatatcaaagaagcaaagtgtatcgattgaaagtgagattaaaaacatacaacaacaattgaacgcaacgcaacaagctgaagtgaatgttgattctgaaaaggatgaagacgaggataatgaatccttaaaaaatgtacctactaaatcaatttttaaaatgtcatttaaacaattattatttatggcaatgactagtggtgcgattggtattacattaataacattgtctccaattgtgggaagtttctcggacattataccttgggaaaaattaggtggggaactctcatatgtcttaaaatctactttcttcataattattgctatagtggttgtcgttttaataatgagctatatcatcggtacgtgtctcgcattcataagatactatggatataaagtaacgcaacaaggtcatcaacttaaaattcaatatggcttatttacaaaaaagaatgtcactgtaccaacaaatcgacttcaaggtgtacttgaacatcaatcatatctaagaagattatttggttatacttctattcatttttatattactagtgacgttgttacttctgcagagacgagtgatgttaatggacgtataatgattttaccttttattaaacggcaacaagcttatgaagtgattcaatctctggtaccagaaatgcgttataatacagctcatactggcatgccacttagaggttttcatcgacattttcttataccatcacttatccttattattgctagttttattggatggtatttctggtctacgtggtcgtttgctattgcggggttattaatcattttattaataatgagggccgtattatatgtgcgatatagtggttattaccttgaaaatgaagaaattgttatccaaaaagcatcattacttaatatgaaaagattctacttcaaactcaataaagtcataggtatggaaattagacagcatcctttattagaaagaaagcatttggccaattttaaatttataatcgccaaaggttttgaaaataaaaaaataggtcttaaatacacagatgtttctaaagttaatgaatttaaagagtggtacatgagaggtgatactcatgagtaa

SEQ ID NO: 2170 - DNA, 501 bp, Staphylococcus capitis
atgagtaattataactatatgaataaaaagggtttaaaagcaatgcgaatgaatgctttgctatggataacaatctttactattgcattaatcgtatttagcatctttaatgtgttgaaatttcattggatagataatcgtacactcatcattgctgaaatagttggagtcgttattttaggagtcttttttatatttgtaatgcccatatttcgatataaaaattttagatacgcaattgaagaagatgaagtacatgttagaagaggcattattttcataaagacaaatatcattccctactttagaattcagaacatcgatattaatgagggctttataatgagaagatatcaactagctactctcacgctatcaacagctggtggtaatagtgaaattgaattgatagataaaaatgaagctcaaaaattaaagttattaattaaacaaaataaaactagagatgcgcatgatatgttaaacggcgatgatgaataa

SEQ ID NO: 2171 - DNA, 357 bp, Staphylococcus capitis
atgatacatggaataggtatagatttgatagaaattgagcgtattagaaaggtgttatataaacaacctaaattagttgaccgagtattaactgaaaatgaaaagctaaagtttgaaaaattcactcatgaaaagcgtaagattgaatttttagcaggtcgttttgctgttaaagaagcttttagtaaagcattgggtacagggttaggtcagacgatatcttttaaagatatcaattgctataacgatgaattaggtaagccatgtatcgactatgatggatttagagctcatgtaagcattacccatacagataattatgcaatgagtcaagttaccttagaaaaattagaataa

SEQ ID NO: 2172 - DNA, 1149 bp, Staphylococcus capitis
atgtcggaaaaattctatagatcaacctatttaaatgttaatttagatgcaatattaaacaattatcaaacattcaatcagttacatcataacaagactgttatatcagtcattaaagctaatagttatggattaggtagtgtaaaagtagcacatcacctaatggaacatggggcttcgtttttcgcagttgcaacacttgatgaagctattgaattaagaatgcatggaattgatgcaaaactactagtcttaggtgtcattccaactaaagacataagtaaagctattcaacatcgtgtagctcttactgtaccttcaaaagcttggcttaaagaagctattagaaatatacctgaaaaaaatgagaaaaaactttggttacatgccaaaatagattctggtatgggtcgattaggtatgaaagatgttgaagagtataaagatgttgttgatataattaataaaaaagatgatcttgtttttgaaggcgtgtttacccatttcgctagcgcagatgaaccaggggattctatgaatgaacagtatgaattttttaaagatattgttaatcaagttgaaaaaccaaattacattcattcacaaaactctgcagcttctttattaatggatggacaattttgtaatgcgattagattaggtatctcattatatgggtattatccttcacaatatgttagggataatgtcaaagtacatcttcgcccaagtgctcaactcgttactgaaatagtacaagtgaaatctcttaaagttggcgaaactgtgagctatggacgaacttttacagctgaaaaagaaatgaaaattgctatactaccagttggatatgccgatggttatttaagagctatgcaaggtgcttatgtgaatgttaatggccatcaatgtgaagtggtaggtcgggtttgtatggatcagactattgtgagcgtgcctgatgatgtgaagatgggagacaaagtgatattgatggataatcatatagattcaccacagtccgttgagtctctagctgaaaagcaacatacaatcaattatgaagtattgtgtaacttatcaaaacgtttaccaagaatttatcaccataatgaagaacaattggttacgaacgatttgttaaaatag

SEQ ID NO: 2173 - DNA, 171 bp, Staphylococcus capitis
atgttatcttttaatcaatctaggagtcacagtcttgaacaatcattaaaagaaggctatgcacaaatggccgatttaaacctctccctagcaacggaagcttttcccatcgaatgtgaagcttgcgattgtaatgaaacatatcttacttctaactctaagaatgaatga

SEQ ID NO: 2174 - DNA, 357 bp, Staphylococcus capitis
atgattagaagaggcgatgtttacttagctgatttatcaccagttcaagggtctgaacaagggggagtaagacctgttgtaattatacaaaatgatactggtaataaatatagtccaactgtcatagttgctgctattacaggtaggattaataaagcgaagataccaacccatgtagaaattgaaaagaaaaaatataagttagataaagactctgttatcttacttgaacaaattagaacactagataaaaaacgtttaaaagagaagttgacctatttgtctgaaagtaagatgaaggaagttgacaacgccctagatatcagtctaggattacataattttgaccatcaatga

SEQ ID NO: 2175 - DNA, 1002 bp, Staphylococcus capitis
gtggaagaatttaagaaagattatatggaacttgtaaaagaaagtttaactactgaaaaccgaacgcaacttataaaaaagtgcgaagaatttacaaatgaagtaattaaaaaggatttactgccagaagatattgtagaaattcataaatcatatattaaccaattagatttagaagaaaaagaaatactcggtacattagatgtccttcaagaggtagtaaaaggattcggttatagttatagagattatcaaagattagttaataaattacaagttcacgacaaagaaattgatttggcttctagacttcagcaaactatgcttaaaacagatatacctcaattcgatagtatacaaatcggtgtaatttccgtagcggctcaaaaggtaagtggcgattattttaatttaattgatcataaagacgggactatgagtttcgctgttgcggacgttatcggtaaaggtatacctgctgctttagctatgagtatgattaaatttggaatggattcatatggtcactctcaattgcctagtgatggattaaagcgtcttaaccgagttgtcgaaaaaaacgtcaaccaaaatatgtttgtaacgatgttttatggcttgtatgaagaaatgaatcatcttttacattgtagttctgcagggcatgagcctggttatatttatcgagctgaaacagaacaatttgaagagattgacgttcgtgggcgtgtgcttggagtaagtcagaagactcgatataatcaacaagagatacctatttatctcgaagatttaataattatctttactgatggagtaactgaggcaagaaatagagaaggtgaatttatcgataaagataaattgttaaatttaatacaaaaatataaacatatgcatccacaagatatagttcaaattatttatgaaggaattttaaaagttcaaaatcctagtagaaaagacgatatgacaattttaattataaaaagagtaaattaa

SEQ ID NO: 2176 - DNA, 327 bp, Staphylococcus capitis
atgaatcttaatatagaaactgtaactcatgacgattattatgaagttaaagttggcggagaattagatgtatatacagtgcctgaattagaagaggtacttgtaccaatgcgacaagaagggactcatgacattcatgttaatttagctaacgtaagttacatggactctacaggattaggtttatttgtaggaacgttaaaagcattaaaccaaaatgataaagatttatatatattaggtgtttctgatcgaatcagtagattatttgatattaccggtttgaaagatttaatgcatgttaatgaaggaacggaggttgaataa

SEQ ID NO: 2177 - DNA, 480 bp, Staphylococcus capitis
atgcaatcaagacaagattacattgaaatgcggttaccagcctctgcggaatacgtaagtttaatacgtttaacattatctggtgtattctcaagagctggagcatcttatgacgatattgaagattctaaaatagctgtaagtgaggcagtgactaacgctgtaaaacatgcttataaacaaaatactgaaaccggtatgattaatttatgttttgagatatttgatgataaaataaaaatagttatttcagatcaaggtgaaagctttgattatgaaacaacaaaatcaaaattaggtccttacgacgataacgaaaacattgattttcttcgcgaaggcggcttaggattattccttattgaatcattaatggacgaagtgaaggtctataaagaatctggtgttacaatcagtatgattaagtatattaaaaaagagcaggtgcgaaataatggcgaaagagtcgaaatcagctaa

SEQ ID NO: 2178 - DNA, 771 bp, Staphylococcus capitis
atggcgaaagagtcgaaatcagctaatgatgtatcacctgaacaaattaaccaatggattaaagagcaccaagaaaatgaaaatagccaagctcaagataaattagttacgcattaccgcaaactaatagaatctttagcatataaatattcaaaagggcaatcacatcatgaagatttagttcaagttggtatggttggtttaataggggccatcaatagatttgatttgtcatttgatcgaaaatttgaagcattcctagttccaaccgtaattggtgaaataaaaaggtatttaagagataaaacatggagtgttcatgtaccaagacgtattaaagaaattggtccaagaattaaaaagataagtgacgaacttacaaatgagcttgagcgttcaccatccatcagtgaaattgctcaacgacttgaagtttcggatgaagaagtcttggaagcgatggagatgggtcaaagttataatgcgctcagtgttgatcattctattgaagcagataaagacggatcaactgtcactctattagatattatgggtcaacaagatgataattatgatttaactgaaaagagaatgattctagaacgtattttacctatattatctgatagagaaagacaaattattcaatgtacatttatagaaggtttaagccaaaaggaaacaggcgaacgtattggcttaagtcaaatgcatgtctctcgcttgcaacgtactgcaatcaaaaagttgcaagaagcagctaaacaataa

SEQ ID NO: 2179 - DNA, 2151 bp, Staphylococcus capitis
atggacaaaaatttaattcaaacaatcgttgaaaagtattctttttcagagaaacaaattaaatcagttcttgaactcttagaagataacaacactgtgccatttattgcaagatatcgtaaagaggcaactggtggtctagatgaagttgaaattaagcaaattgatgatgaatatagatatatggaaaatcttcaaaaaagaaaagatgaagtgatacatagtattgaacaacaaggcatgctaactgaagacttaaaaaaagatattattaaacagacaaaactacaaagagttgaagatttataccgtccttataaacagaaaaagaaaacacgtgctactgaagctaaaagaaaagggttggagcctttagcaaaatggttacttcagaagaatttagataagaatgttgatgaaaaagcacaagaattcataaatgaagaagtttctacagtagaagatgctattaaaggggcacaggatattattgctgaacaagtttcagatgaccctaaatatcgttcaagacttttaaaagatgtatatcatcaaggtcaaattgtgtctgctaagaagaaaaaagcagaagatgaaaaagaaatcttctcaatgtattatgattattctgaaccagtaaagcgtgttgcaaatcatagaattttagctatgaatcgtggggagaaagaaaaagtattaaacgttaaaatagaatttgacacatcaagaattaaaaaagacattgaacgacaattaattcaagtaaataatgaagcaagtccttatattgcagaggctattgaagatagtcttaaacgattaattatgccttcgattgaaagagaagttcgaggagatttaactcagaaagcagaaacacatgccatcgatgtttttagtgagaacttaagaaacttacttttacaaccacctatgaaaggaaaacaaattctcggtgtggacccggcatttagaacgggatgtaagttagcagttattaatccttttggaacgtttattgctaaaagcgtcatttatcctcatcctccaaaatctaaaatcgaagcttctgaaaaagaactggtcaacatgattaaagattatcaaattgaattactagcgattggaaatggaacagctagccgtgaaactgaacaatttgtagcaaatgtaattaaaaaatataaattagatgctcaattcatcattgtcaatgaagcgggagcctctgtgtattctgcttcagaaattgccagacaagagtttccagattttcaagttgaagaacgaagcgctgtatctataggtagaagagttcaagatccattaagcgaattagttaaaatagatccaaaatctattggggtaggtcaatatcaacatgatgtaaatcaaaaagaattaagcaatgcgcttactttcgtagttgaaactgcagttaaccaagtaggcgtagatgtaaatacagcttcaaaatctttacttcaatatgtttcaggactatcttcaactattgcgcaaaatattattgattatagagaagaaaatggacctattaaacataataaagaaattagtaaaattaaacggttgggttctaaaacttttgaacaaagtataggctttttacgtatcgttgatggctcagaaccattagataatactgcgattcaccctgagagttatgaagtgacttatgaaatattagagcaactaggtttaggcgctgataatataggtacggatcaattaaaatcaacattaagtgatgtgaatattgaagggcttgcgaaacaattgaatattggtgaacccactctagaagatattatcaaatcacttattgcgcctaatagagatccaagagatgaatttgagacaccaatccttaaatctgatgtattatccattgaagatttaaatgaaggcatgaaattaaatggtactgttagaaatgtagtagattttggtgcatttattgatataggtgttaaacaagatggattagtccatgtttctaaactttctaagaaatttgtaaagaatcctatggatattgtaagtgtgggagatattgtggatgtttggattctggatatcgatgaaaataaaggcaaagtatttttaacgatgattgatccaaatgaataa

SEQ ID NO: 2180 - DNA, 342 bp, Staphylococcus capitis
ttgttaaaaagccacaatatagaaataaaccctaaacaattaaagcattttggagaagatgcaatagttcaaatagttaaacatgaactttgtcattattttcttcatcttgctggtaaagggtatcaacacagagatacagattttaaagctttaagcgctaaagtaggtgcaccaaggttttgcaatccgactgaaacatatgaaagtcgagctaattacaaatatcaatgtgtcagttgtaaagctaattatttacgtattaaaagagtgaacactcaaataatgagatgcgggcattgcggtggcaaacttaaattagttaaagtttttgagaaatag

SEQ ID NO: 2181 - DNA, 114 bp, Staphylococcus capitis; identical to SEQ ID NO: 766

SEQ ID NO: 2182 - DNA, 114 bp, Staphylococcus capitis; identical to SEQ ID NO: 766

SEQ ID NO: 2183 - DNA, 456 bp, Staphylococcus capitis
atgagtgcggatttagagtcaattgaacatgaacttgaagaatcaattgcgtctttaagaaaagcaggaatacgtattacgcctcaaagacaagcaattatacgttatctcatttcttcacattcacatcctacagcggatgagatttaccaagcactttcacctgattttcctaatataagtgttgcaactatctacaataatctaagagtattcaaagatattggtatagtaaaagaattaacgtatggtgacgcatcaagtcgatttgattttaatacacataatcactatcacgttatttgcgaaaaatgtggtaaaatcgtagacttccattatcctcaacttaatgaggttgaacatttagctcaacatgttacagattttgatatcactcatcatcgaatggaaatatacggagtatgtaaggaatgtaaagaaaacgaaaataattaa

SEQ ID NO: 2184 - DNA, 951 bp, Staphylococcus capitis
ttgaaaatcgtaagtttaagaagattaaaagatttagaggaacagttgataaaacaatttcctgaacaggaattcaaattttataaaaaagctcaatttattccaactgaagatagagaatcactagatattttaattggttatgatggcgatatagatcaagcatttttagaagagtgtaaaaacttaaaatggattgcatggtatgctactggagtcaataatctcccactagattatattaatgataggggcattattttaacaaatggcagaggtgtccaagcaaaacaactatcagaatttataatgacgtttatattagatgattataagaaaatgagaacatcttatgaaaatcaacgtgcacataagtatgactcaaagctaacgggtgagagagttaacggtaaaacacttctatttttaggtactggcgcaattgcccaaaagactgcatatttagctcaagcatttggaatgaaagttatcggtgtaagtaaatcaggacatatgaaagattactttgataatacttatactatagaagaaatggatgatgtattagcggaaggtgatgtgatagttaattcactcccagaaacccaagaaactatacatctacttaaaaaacaccattttgaggaaatgaaagacgaagcattatttataaatataggtagaggtacgattgtgaaagaagaacttattatagaagttttacgaaatcgtttgattagacatgcatatttagatgtctttgaaaatgaacctctatcaagtgataacccgctatatgatttagataatgttacgattactgcacatattactggtaatgataaaaatataaatcgtgatgtaactgcaatatttgaaaagaacttaactcattttctcaataagaacagcgtaattgagaatgaagtagatccaaataaagggtattag

SEQ ID NO: 2185 - DNA, 456 bp, Staphylococcus capitis
atgttaaccaaaggcgaaaagtttccatcattttcattggagaatcaagacggagaagtagttacaaatgagacattaaaagggcgtaaggcaatattatatttttatcctagagacaatacaccaacttgcacaactgaagcatgcgactttagagataacttatctgaatttaatgatttagatgtagatgtttatggaattagtggagattctaaaaagaaacatcaaaactttattgaaaaacatcaactcaactttgacttacttgtagatgaagattttaaacttgctgatgaagcgggggtatatcaattaaaaaaatcttttggtaaagagagtatggggatcgttagaactacatttgtaatcgatgaaaatgggtatattattgacgtaattgaaaaagttaaagttaaaactcaaatagaagaattaaaaaatatcttggagtga

SEQ ID NO: 2186 - DNA, 1296 bp, Staphylococcus capitis
atgaattttactgaaagcgaacgtcttcagaaactctctaatgaatatatactaggtggcgttaattcaccttctcgttcatataaagctgtaggtggtggtgcacctgtaatgatgaaggaaggtcatggtgcttatttatatgatgtagatggtaataaattcatcgattacttacaggcgtatggtcctataattaccggacatacgcatccacatattacagaggcaattcaagatcaagctgccaaaggagtgttatatggtactcctactgaacttgaaattgattttgctaagaagttaagagatgccattccttcattagaaaagatacgttttgttaattcaggtacagaagctgttatgacaactattagagtggcacgtgcctatactaaaagaaataaaattattaaatttgcaggatcttatcatggacattctgatttagttttagttgctgcagggagtggcccttcacaattaggttctccagattctgctggggtgcctcaaagtgtggcacaagaagtgattactgtaccatttaatgatattgattcatatagagaagcaattgattattggggcgatgaaatcgcaggcgtactcgtcgaacccattgtaggtaactttggtatggttatgcctcaacctggatttttagaagaagttaataaaatctcacatgataacggaactttagtcatttatgatgaagttattacagctttccgttttcattatggggcagcacaagatttattaggagtaaaaccagacttaactgcttttggtaaaatagttggcggtggtttaccaatcggtggctatggtggtcgacaagacatcatggaacatgtcgctccattaggtccagcatatcaagctggtacaatggcaggtaatccattatcaatgagagcaggaattgctttactagaagttttagaacaagatggtgtttatgaaaagttagataaattaggaaaacgtcttgaggatggattacttaagttaatcgataaacacaacattactgctacgataaatagaatatatggctctatgacgttatatttcacggatgaaaaaattactcactatgaacaagtagaaaattctgatggcgaagctttcgcgaagttcttcaagttaatgttaaatcaaggtatcaatttagcaccatctaaatttgaagcatggttcctaactactgagcataccgaagaagatattgataaaactatagaagctgctgactatgcatttagccaaatgaaaaataattaa

SEQ ID NO: 2187 - DNA, 1095 bp, Staphylococcus capitis
ttgagactaggagctcggattttcaagaccggtatagcaattatattagctatgtctatcgcttctttacttccagataatatcggcttaaaggcacttgctggtgtcagtgctgtcgtagcgatgcaaccaagcgtttatcgttcaattaaaacagtatctgaacaagcgattggtaatattataggtgctctactcgccgttactatggtaactatttttagtgataacttcataataatgggcgtaacggttatattgttaattgcgattttgtttaaatttaacctagctcatgttgctacattagcaagtgtgacagctttaatcattatgggtcaacatacaggttccttctatgtagcagcattcttcagattcgctcttgttatgataggtgttttaagttcctcaatagtcaatttaatcttcttacctcctaaatttgaaaccaaaatctattataattctgtaaatatttcttcagatatttttgtatggttcaaacttgtgcttaatgatacttcagaatttcataatattaagcaggatggtgatcaacttaattcacgtatcaataaattagagcaaatctacaattattatcatgaagacaaacctttgactaaaaaacatatttatcagcagaatagaaagaagatattatttaaagaagtagtaggaacgacaagacaggcttacgaagtactcaaccgtatgtcacgttaccaaaatgacttacatcaacttaataatcaactattattacaaattaaattagaacttgattcgttagtagcagttcatgaacaaatctataagagcctttctaaaaaagcgagatacgatgttacaaaacttgattacgaagtagacaacccactaaagaaaaacttgatggacgcatttcaacaagagttaattcaaaatccttaccaaacgcaatactcttatgcaaatgtaatgcaaattatagctgctattgaggaatatagatatcacttagaacatctcgatagaattcgattaagcttctttaaatatcataattcagattcagacatcgacatttctgatgaagactttgatttgtaa

SEQ ID NO: 2188 - DNA, 1737 bp, Staphylococcus capitis
atgattaaacgatatttaaaattcgtcaaaccatatagatatcgtattattgcaactattatcgtgggtattattaaatttggtatacctatgttaataccgctattgattaaatacgctatagatggagtaattaataaccactcactatcaaatagtgaaaagtttagtcatcttgcaatcgcaattggcattgctctatttatatttgtaatagtacgtccgcccattgaatatatcagacaatatttagctcaatggacaagtaacaaaattttatatgatatccgtaaacaactatataatcatttacaagctttaagtgcacgtttctacgcaaataaccaagttggacaggtgatttctcgcgttattaatgacgtagaacaaacaaaagactttatacttacagggttaatgaatatttggttagactgcgttactattatcatcgctttatctattatgttctttttagatgttaaattaactattgcagctattttcattttcccattctatattttaacggtttatttcttcttcggaagattgagacaattgacacgtgtacgttctcaagcacttgctgaagttcaaggtttcttgcatgaacgagttcaaggtatgtcagtgattaaaagtttcgcaatagaagataatgaagctcaaaattttgatcaccgtaatagtcattttttaaagcgcgcctttcaacatacacgttggaatgcctattcatttgcagcaataaacactgtaacagacttagggccaattattgtaataggcgttggcgcatacttagttattaatggtgctattactgtaggtacacttgcagcatttgtagggtacttagaacaattatttggacctttaagaagacttgtttcttcatttactactttaacccaaagctttgcttcaatggacagagttttccaacttatggatgaagattatgacattaagaatggtatcggtgcgcaacctattgaaattaaaaaagggcaaatcgatttgaagaatgtcagctttaaatataatgataatgaattagaagttttgcatgatattaatttaacaattaataagggcgaaactgtagcttttgttggtatgagtggtggtggaaaatcaactttaattagtttaattccacgattttatgacgttacgtcaggtgaaattttagttgatggcaataatgtgaaagatttcttaacaggtagtttaagaaatcaaattggtctcgttcaacaagataatattttattttcagacactgtgaaagaaaatattttattaggtagacctgatgcaacggatgacgagatagttgaagcggccaagatggcaaacgcgcatgactttattatgaatttacctgaaggctatgacactgaagtcggagagcgaggcgtgaaactttctggaggacagaagcaacgtctttcaattgcacgtatattcttaaataatccaccgatacttattttagatgaagcaaccagtgcgttagatttagaaagtgaagctattatacaagaggcgttggatgtattaagtaaagatagaacaactttaattgtagctcataggctgtctacaattacgcatgcagataaaatagtggttatggaaaatggtcagattgttgaaacaggtacacatcaagagttgatccagaaacaaggtgcgtacgaacatttatatagtattcaaaatttataa

SEQ ID NO: 2189 - DNA, 543 bp, Staphylococcus capitis
atggttaaagagtccatacctaaagaaggagaaacgattaaaattcaaagttataaacatgatggcaatatacatcgtgtttggtctgaaacgacaattctaaaagggactgaccatgtgattataggtgggaatgatcatacgttagtaactgaaagtgacggacgcacatggattacaagagaaccagctattgtctattttcattcggagtattggtttaatgttatttgtatgtttagagaagatgggatttattattactgtaatttatcatcacctttcgtgtccgatgaagaagcgctaaaatatatcgattatgatttagatattaaagtttatcctaatggtaagtatcacttactcgatgaagatgagtatgaactacatatgaaccaaatgaactatcctcatgatattgacgttattttgagaagaaatgtcgacatcttacagcaatggattgagcagaagaaaggaccgttcgctccagattttattaaagtgtggaaagagcgttataaaaagattagagattattaa

SEQ ID NO: 2190 - DNA, 1044 bp, Staphylococcus capitis
atgtatcaagaggaatcttttaaaaagagaattgtggagtggtttaacaaaaatcagcgtgaaatgccttggcgagaaacaactaatccatattacatatggcttagtgaagtaatgttgcaacagacacaagttaacacggttattgactattatcataggtttgttaatcgatttcctacaatagcagctttaagcgaagcacatgaggacgaagtgcttaaatattgggaaggcctaggttattatagtcgagctcgtaattttcatacagctgttaaagaagttgaatctcaatatggtggagaagtcccgtctgatccagatcttttcaaaaaattaaaaggcgtgggtccttatacgcaagcagcagtgatgagtatagcgtttaaccaacctttagcaactgttgatggtaatgtcttccgagtatggtctcgattgaacaatgattatcgtgatacgaaattacaatcgacacgtaaagcgtttgaggaagagttaaatccatatgttcaagaagattcagggacatttaatcaagctatgatggaattaggtgcactcatttgtacaccgaaatctcctttatgtttattttgcccagtgcaagataattgtgaggcttttcatgaagggacgactgaagatcttccaattaaaactaaaaatattaaaaagaaaactatcaatcaaaaagtatttcttattagaaataataatggacaatatctacttgaaaaacgacaagaaaaattgttgaacggaatgtggcaatttcctatgagggaagcaagtgtagctgataatttattaactcaagaattaggagttaaagtcgaaactttagaagagcccatctttgaattacgtcatcagtttacccatatgacttggaatattaaagtttatagtgtacctacatctataaatctctcggagaatgaactcccctcaaacatgatttggtttaatttagataacagggataatcatacatttcctgtatcaatggacaaaatataccgttttattgttggataa

SEQ ID NO: 2191 - DNA, 978 bp, Staphylococcus capitis
atggatacagccacacatatagttatgggtgtaggtctcactgcattagcaacacaagatcccgtcatggcaggttcatttgcagcaactgcaaccacccttgttgctggttcattaatacctgacggtgatactgttttaaaactaaaagataatgagacctatatttctcatcatagaggaattacccattccatacctttcactattttatggccaattttgataacctttttaatattcgttatttttaacaacactaatccactacatgtttggctatgggctcaacttgcagtatttttacatgtgtttgtggatatatttaattcttacggtacccaagcacttagacccataaccaataagtggattcagttaagtgtcattagtacatttgaccctattattttcactcttttatgtattggtgtattactttgggttttaggcatacatccgtatttcgcattcttccctatcgtagcaatactagtgatttattatgtaatacgttttatgatgcaatcatctattaaaaaagaagcgttaactcaaattgaaaattctcataatcctgtaaaagtgtttgtagctccgacaatgaaatttcatgtttggcgtgtggcaattcaaaccgataaacatgattatgttggaactgctcggtggaaagatgtagaatttactgataaggtaaaacgtcaagctatgacgcctgattcgttactttggaaggttaaaggtaataaagatatatttacttttttaaatttttcatccatttatcgttggcaaaccacacctttagaagatggtacaacagaaattcgattaatggatttaagataccttaataatggacgttattcatttgttgcaattgcacatttaactcacgacaatgaaatcgaccactcttacatcggttgggtatttagcgaagacaaactacaacgcaaactattttcacaataa

SEQ ID NO: 2192 - DNA, 894 bp, Staphylococcus capitis
atgatagataatataatactatactttaaaaacttgccacatcttatcacttattgtgttcgtaggttaaagaaaatttggaaatggtttgctatgagccttgtaatagggattatcttagtattaggtttagagggcattttcgatataaatcacaatacggatatcgctcaaggaagatggttatttagagtgacatcgttaattgtatttggtcacattgtactttctgtatacttaagttataagttttatagaaaagattatatggtaatgaaatcattccatatttcatcagtaacgcctactatagtaattgcactattggcattcgtagacatgtttattcttggtttaattattgcgttcttgaagccaattaactttgagacatctttattgtcgctaatttattatttgattatgactagtatatttatcggtgttattgctgttacttttggtttattgaaatttatactcaaacgtttcgacacaatttattttataatgagtgcgatttgtttctttatagttccaattttattcattcctaaaacgcacttatcgatagtagatcatattttaatgttaaatcccgtttattatcttgttcatgggagtgcacagtctattatattcggtgcagtaagtatgaataacattccatatcatatttactttattctctttttagcattaatgtgtgtgattaactatgcattagttcgctatatcgcttttgataaatatgatagtttaaatgacactcaccttgaaaatgatttaacacatctgagtgatgataatggcaagaaattagaacatgatggtgtatttaacaataatgaaaatgctaatgaagataatgaaatgattggtaaaaatgaatag

SEQ ID NO: 2193 - DNA, 1518 bp, Staphylococcus capitis
atgggaagttcaattgttttaaggttactaaaagtaacgcattattataggaataaacgagcaaagaaatggtacctaccttttggttatggtgcagaagatattaatttaaataatatttctttacatatatatcaaggtgaatcattaggaataattggtgagccgggttcttctaaaacgctaataggcagaatcttaagtggaacggttaagcctgataaaggtaaggtttcccgaacagagaatctgttttacggtgatatggaagaccggaaagtagcacaccaatctgtacaagaatatgttgacgagatggtgcaactatttccctacaaagcgagtagtcataaggctgaacaaattatccactgggctcatttagctgagcaaggtgaaaatagtatttctaatctaacagaagctgaatatgcgcaattacttctcagtatcgctcgttcttgtcaaaacaaaattattatattgagtcatgtactctcgcatttagatgatgtgtttttcaaaagagcgattgaattatcagatgattacataaagaataatagtacactcgttttaatagataacgatattgataaaattagcgaaacgactaactatattacgtgggtttctcacgggcaaattagaaaggaaggctcacttaatcaagttttacctatttttaaagaacatgaaaaagaccgcaaaagtttagattcaaaatcgcaactggaaaattttgatttagattggaaaaagagtcgtacgcgtatgcctgagatgacttataactttaagagaatagagcgctataatcacgctaaaccaccagtatttttagtgagaatattaactctgtttgcaagtttcttaatcggacttacgttaatgggcatattgcttttcaatgatttaggaagggttcatgtttctgaaaattacactcaagcttcaattcaaaatcaaaataaagatccatatgaagataaactcacttacggtattgctttagatggttcaaccacattgagtggtacacaagattcgactctacctaaatatggcgtggctacgattactggtgaaaatagtaaaaaatatagagtagaaatggatcataaaatatatacagtaggcaaaaatgaattattcaattttaatcctgcaggtttatatgaatcgcatagttttaaaacgttaatgccatacattaaaacaaactatagtacatattatgaatacttcaatagtcatttacatcaaaagcataacaaagtgactaaaacattggtcccagaaaaagataatcgttatgtagttcctattacacaacaaccactaaatatgatttttggagtcaatgatacgttaacaggctttgtaattccaatggaacataaaactgacttaaagaaaaaatttaacattaaaaaagatgtttggattacgaaatcaggtagtggctattttattgctgatatgaaagatgacaaatggatatatattgaattgtag

SEQ ID NO: 2194 - DNA, 291 bp, Staphylococcus capitis
atgtctgaacaagaattaagacatgaaattcaaacatacaaagagaaaatgcgtaaagctgaaatgaatggaattatgaatgaatacgatgtgtaccaaagtaaagtcatcattgcagaaagctatctggttgatcgtaataaagttgaaattggaaaaatttacaaattgaacgatggcagcgaacaatactttaaagtagagagattaaaaggcgtctttgcttggggcttcagaataaaaagtagcgaaccagaagaaggtctaccattagcattattaaaaatttag

SEQ ID NO: 2195 - DNA, 819 bp, Staphylococcus capitis
atgccaaagataacgaagcttgaggttcaaaagaagaataaagagcgattcaatctttatctcgatggagagttcgaaatggggattgatatagatacgcttgtgaaattcaatttgaagaaagatcaaatgttagagcctcaagatatggaacaaattcaaaaatatgaccactatcgtcgtggagtaaatatggcgattcagtatttatcatttaaaaaacgcacggaaaaagaagtacgtcaatatttggaaaaaaatgatgtttcacaaaatgcaatcgaacaggtaatagaatattgttatagagaaaaatttattgatcatgaagattatgcagaaagtttaaaaaatacgatgattcgaacgtcagataaagggcctgaaatatataaacagaaattatatcaattgggtattgagccaaagattatcgatcattatacggctttatatgaagaacaacaaccacttgaagatgtaataaaagtggggaacaaagtcatgaaaacgaaaaaaggtcctgtggttaaagtaaaacaaaaggtttcccaagccttaatgcaaaaaggttttacccttgagacgattcaagcgacgatgaatgaattgaatttttcgcaagatgacgagaccttagataatttattgcaacgtgatttagagaaagtctataataaaaattgtaaaaaatatgatggtcaaaaattaatgatgaaaaccattgaagcgcttatgagaaaaggttataagtatgataaaattaaatcaaaattagaagaaagtggtataacagatggtacagaagaaattgagtga

SEQ ID NO: 2196 - DNA, 810 bp, Staphylococcus capitis
atgaaaagaactgaaaaatatgcggattcttataatgagcaacgttctgaatcacgtagacctcattataatacgtattaccaaccagtaggtaaacctccgaaaaagaaaaaaagtaataagattttattgaaaatactaattatagtcattgtactcgtagcaatatttatgggagcaatgtatgtcttatcttcaagagctaacgtggatgatttaaaatcaattgaaaataaaagtaatttcgtttctgcagataacatgcctaattatgttaaaggtgcctttatttcaatggaagatgaacgtttttataaacatcatggatttgatttaaaaggaactacacgtgcattgttttcaacaattagtgatcgtgatgtacaaggaggtagcacgattactcaacaagtagtaaaaaattattattatgataatgaacgctctttcactagaaaaattaaagagttatttgtagcccacaaggttgaacagcagtataacaaaaatgagattttaagtttttatgttaataatatttattatggtgatgaccaatatacacttgaaggtgctgcaaatcattattttggaacaactgttaataaaaacaatcaaagcatgcaacagattactgtattgcaaagtgctatattagctagtaaagtcaatgcaccgagtgtgtatgatgttaataatatgtcatctaattatacgaaccgtgtaaaagttaatttggaaaaaatgaagcaacaagattttattactgatgagcaatataaaaaagcaatgtcacaattaagcaattaa

SEQ ID NO: 2197 - DNA, 519 bp, Staphylococcus capitis
atgactaaaaaagtagcaatcattcttgcagatgaatttgaagatattgaattaactagtccaaaagaagctatagaaaatgcaggatttgaaactgaaattgttggagatactgcaaaccatgaagttgtaggaaaacatggcgagaaagctacagtacaagtaagtattgctgatgctaaacctgaagattatgatgcattattaatccctggtggtttctcacctgaccatttacgcggagatgcagaaggacgttacggcacatttgctaaatacttcactaaaaatgatgttccaacatttgcaatttgccatggtccattagtattaattgatactgatgatttaaatggtcgtacattaactggagtattaaatgtacgtaaagacttatctaacgcaggtgctcaagtggttgatgaatcagtagtagttgataaaaatattgttacaagtcgtacacctgacgatttagatgatttcaatagagaaattgttaaacaattagaagcttaa

SEQ ID NO: 2198 - DNA, 162 bp, Staphylococcus capitis
atgagtgaacaacaaactattgatcaaattaagacacgtttaaataaatttattgaggatattgaccatgtaaaccctgatgaagtacgtgtagaggatatagatgagtggattggtctgttagatcaattagaagagaaggtaaaacaagtttcaaaataa

SEQ ID NO: 2199 - DNA, 1143 bp, Staphylococcus capitis
atgttgatgacaaacaaaaaacctatttctatccaaaacgacccatgggaagcttacaatgatattatagatcatggaaagttaacacttagtaacatcgaatttaccactactaacctttgtaatatgcgttgtagccattgtgcagttggttatacacttcaaactaaagatccagacccccttccaatggatgtaatttatcgtaggcttgatgaaataccaaatttaagaacgatgtctattactggtggagagccaatgttctctaagaaatcaattaaaaatgtggttaaacctttacttaaatatgcatttgatcgtggaatttatgttcaaatgaattctaatttaacattacctcaggatagatatcttgaaattgctgagtatatcgatgtcatgcatatttctcataactggggtacaattcaagaatttactgatgtaggctttggggctatgaagaagcaaccaccattaaaagctaaacttaaattatatgaacaaatgcttgataactctcgcactttatctgaacaaggaatgtttgtttctgctgaaacgatgcttaatcaaagtacgctaccttacttagacaaaattcataatgaaatcgtaaatgatatgaaatgtagccgtcatgaggttcatccgatgtatcctgctgattttgccagtcaactcaatgtactttctttaaaagaaatgaaagatgctattaaccacttgcttgatattcgagatgaagatatatggatgctatttggaactttacctatttatccatgtatcaatgatgaaaatgatcaaaaattattgcaaagactaagagatgctaaaaacgtgacaatgcgaaacgatccagacggccgtagtagattaaacgttaacgtttttactggtaatgtaattgttactgatttcggtgatgaaaacggtacaatttcaaatatacagaaagataaattaacagacgtatttgaccaatggctagattcagaattagcaaaatcactcaactgccattgtcctgaatatcaatgccttggacctaacgtattagtaaaaaatatgtattatcctaaaaccgacttcaaacataaagaaaaagaaatgcatgcgcgtcatattttttcttaa

SEQ ID NO: 2200 - DNA, 531 bp, Staphylococcus capitis
atgtctaacgagaatagaaaaatgaaagcaatgtcggaagcgaaatgtattaaaaatagacaagtgtttccacaagataccaatcatcatcatacgatgtttggtgggtcattaatggcaaatattgatgaaattgctgccattactgctatgaaacatgctggagcgcaagtcgttactgcttcaactgattctgttgacttcttgagacctatcaaaactggagatattttgtcttatgaagcaatggtttcttatgctggcacaagctctatggaaatttgtgtacaaatcatcattgatgatgtttttaataatgagcgccatttagcagcattaagctttttaacatttgttgcgcttgatgaagatggtaaacctacagatgttccaggcgtatatcctgaaacagatgtagaaaaatggttccacgaaagtgcaccacaacgcgtagagagacgcaaagaacgtcgcactgaaagtaagaaaacaatcgaatatttatctgaagtcagacatattgaaaaataa

SEQ ID NO: 2201 - DNA, 1242 bp, Staphylococcus capitis
atggataactataatgaaaagttaagacaatatgcagaattactcgttaaagtagggatgaatgttcaacaaaatcaacctgtatttattcgttcatcagttgaagcgttagacttaacgcatttaatagttgaagaggcttataaagctggtgcctctgatgttcgtgtgaaatattcagactcaaaactgaagagacttaaatttgaacatgaatctgtagagtattttgagaatagtgatttaaaacagtatgatgttgatgaaagattggattatgttgaacgtggagcagctaacttagcactcattgcggaagatcctgacttattaaatggtatcgatggcaataaattaaaagcttttcaagctcagtattctaaagggttcaaaccatatatggaagcgagtcagaagaatcaatttccatgggttgtggcagcctttccttctaaagactgggctcgccgagtttacccagatatggatgaagaaaaagcttatgaaaaatttattgatgaagtgtttgatattgtacgtgtagatggcaatgacccaattcaaaattgggacaaacatgttaaatctttaagtgtacatgccgaaagactacaaaaggaaaattataaggcactccattatatttctgaaggtacagacctcacagtcggtttaccggaaggacatttatgggaagatgcaacgagttatgtcaacggtgacggccaaccttttatcgcgaatattcctacagaagaagtgtttacagcacctgacagaaataatgtgaacggttatgttactaacaagttaccattaagttataatgggaatattattgatggtttcactttaacgtttaaagatggtgaaattatagatgttaaagccgaaaagggcgaagcggtgctcaaagacttaattgagactgacgaaggttcaagaagacttggtgaagttgcattagtacctgatgattcaccaatttcaaatcgccgtaccattttttataacacgttatttgatgaaaatgcatcttgtcatttagcaattggatctgcgtatggtttcaacgtcaaaggtggaactgaaatgtctactgaagaaaagttagccgcaggtcttaacgattcaaatgtacatgaggactttatgataggtagttctgatttaacgatttatggtatcttacatgatggtactaaagagttagtttttgaaaatggaaattgggcaaagtaa

SEQ ID NO: 2202 - DNA, 207 bp, Staphylococcus capitis
gtgtcattatcaaatgaagaaatgattgcagaaatcagaaagaaattaaatattgtaaatcaaggtttacttgacccagataaattccagtcttctaatcatgaagaaattactgaaatacatgattttgtaatgtctaaagattcattttcaccaagtgaagtgacagcaattgcagatcatttaggacaacttagacaagattag

SEQ ID NO: 2203 - DNA, 465 bp, Staphylococcus capitis
atggtagacgtagcatttgtatgtctcggtaatatttgtcgttctccaatggctgaagcgatcatgagacaaagactacaagacagaggcatttcaggtattacagttcactcaagaggaacaggtcgatggaatctcggtgaaccacctcacgaaggtactcaagcgatattgaaagaacatcatatccccttcgataatatgataagtgaactattcgaaccagatgatgattttgactatattatagcaatggaccaaagtaacgtggataatataagacgaattaatcctcatatacgcggacaattgttcaaattgctagaatttagtaacatggaagagagtgatgtaccggatccatattacactaataattttgaaaatgtatttgaaatggtacaatcatcttgtgacaacttaattgactatatcgtcaaagatgcaaatttgaaagaggggtaa

SEQ ID NO: 2204 - DNA, 285 bp, Staphylococcus capitis
atggaaaataaattaattcctggtattctaatcggtgctattatcggcggtgctgcaacattagctgataaatcaacacgtaattctttaactcaatcatttaaagacgttaaggaaggtaatcgttcacgcaaaccgtctaaaattaatagcattaaagatgaagtaatttattggaaagatacgattgaagaaatccgtcgtaacaatcctgaattagagcgttctattaaagacgctaaagaaacttttgttaatcgtaaaaaccaacgtttaggtaaataa

SEQ ID NO: 2205 - DNA, 1254 bp, Staphylococcus capitis
atgtcaaaacaagaaaaaacaacttcaaagttcctaaattcggctaaggaacatgaggaacatgtgaaaggaaaaaatggtgaaaaagataaacagattaaagtcgaccgtacatatattgaacctcaacagtttcaatcaaaatcacctaagaaaaagaatcaagtattctttctatcaaggttaaataaacctgccaaatacacgaaagattctaatttcctcaattacttaatttatagaataggaaaagatgatgcttcaggactagcagcgcaaatgacctatcacttcgtgttggcaatgttcccaatgctcattttcttactgactttattgggacagtttataacgattaacactgatcagattaatcaaaaggtcagccagtatgtacctgaccaaagtaccgccgacgtaatcacaaaaatatttagtggtatttctgatagtgctaatggtggcgtcctatcaattggtttaatcttagccatttggtcagcatctaatggaatgtctgcgattattaattcatttaatgtcgcttatgacgttgaggattctagaaatggcttcgtacttaagattctaagtgtgttatatacactagtattaggtattgtgttcgtagtggccatcgtgctcattacattaggcccagtaataagcaagttcttatttggacctttaggattagataaacaagtagaatgggtatttgatttagtaagaatcgtcttacctctaattataataatcattttattcactgtattatattcagtggcaccaaatgtgaaaacgaaattacgctctgtacttccaggtgccctatttacatcaatcatttggttagtcggttcattcttatttggatggtatatctcaaacttcggtaattataataaaacatacggaagtttagctggtatcattattttattcttatggttatatatcacaagctttattatcattattggtgcagaaattaatgctattatacaccaaagaacagtaatcaaaggccacacacctgaagaagcagctcttcatcacgatgataacaaccaaaatcattataatgaagacacaacatatgaatataataacaatacaccagtgaataaagatgaaaattatgacgttgataaaaatccaaataatgaacaacctgaagatcatgaaacatttaaagataaaattgttgataaatttaaaaaagataacgacaatagtggtaaaaattcataa

SEQ ID NO: 2206 - DNA, 630 bp, Staphylococcus capitis
atggcgattaaagtattgtttgttgatgaccatgaaatggttagaattggtatttcaagctatctatctacacaacaggatattgaagtagttggagaaggtgcttctggtaaagaagctatcgaaaaagcccatgagttgaaaccagatttaattttaatggatttacttatggatgatatggatggtgtagaagctactactgaaattaaaaaggatttacctcacataagagtagtaatgttaacaagctttatcgaggataaagaagtttatcgagcattagatgctggggtagatagttatatcttaaaaacgactagtgcgagtgacattgctgacgcggtacgtaaaacatatcaaggggaatctgtttttgaaccagaagtacttgtaaaaatgagaaaccgcatgaaaaaacgtgctgagttatatgaaatgcttacagagcgtgaaatggaaattttattattaattgccaaaggttactctaaccaagaaattgctagcgcctctcatatcactattaaaactgttaaaacacacgtaagtaatatattgagtaagttagaagttcaagatagaactcaagctgttatttatgctttccaacataatttgattcaataa

SEQ ID NO: 2207 - DNA, 1047 bp, Staphylococcus capitis
atgaatcactacttgagagcaattggttcaatgctaatacttgtatatagcatgctaactgcttttttattcattgataaggtgttcgtcaatattatttattttcaagggatgttttacacccaaatttttggaataccagtatttttattcctaaatatattaatcatcttactatgtattatcgttggctctgtgttagcgtataaaatcaatcaacaaaatgattggcttaagtcacaaattgaaaggtctattgaaggtgaaacagtaggcataaatgatcaaaacctagagttatacagtgaaacgttagaaatttaccatactttagttcctttaaatcaagaattacaccgattgagaatgaaaacgcagaatatgaccaatgaaaattataatatgaatgatgtaaaagtgaagaaaattattgaagacgaacgtcaacgtttagcaagagaactacatgactcagttagtcagcaactatttgcagcaagtatgatgttgtcagcgattaaagagtcaaaattagaaccacctttagaccaacaaatacctgtactagagaagatggttcaagactctcagctcgaaatgagagcattattattacatctaagacctattggtttgaaagacaaatcattaggagagggtgttaaagatttagtcattgatcttcaaaagaaagtccctatgaaagttgttcatgaaattcaagatttcaaagtaccaaaagggatagaagatcatttgtttagaatcacccaagaggctatttctaatacattacgacactctaatggttctaaggtaacagttgaattatttaataaagaagattatttactacttagaattcaagataatggtaaaggttttaatgtagatgaaaaatttgaacagagttatggattaaaaaatatgagagaacgtgctttagagattggtgccacattccatatcgtatcgttaccggattcaggtacgagaatagaagttaaagcaccattgaataaggaggatgaatcaaatggcgattaa

SEQ ID NO: 2208 - DNA, 702 bp, Staphylococcus capitis
atgacacacaaatatatatcaactgaaatgttgataatttttacagctttaatgattatcgccaatttttattatatattttttgaaaaaattggctttcttctcgtcttattattaggatgtgtgctcgtgtatgtaggatatgtctattttcataaagtaagaggtttgttgtccttctggataggggcattgcttattgcgtttactctattgtctaataagtacacaattattattctttttattttcttagtggtacttatcattcgttacttaatttataaatttaagccattaaaagttattgcaactgatgaagaggtaacgtcacctatatttattaaacaaaagtggttcggggaacaacgtacaccagtttatgtttataagtgggaagatgtacagattcaacatggcatcggtgatattcatattgatatgacaaaagcagctaatattaaagaaacgaatacgattgtagtacgtcatattcttggcaaggtccaagtgattgttccactaaactataatattaatctacatgcggctgcattctatggtactgcttatttagaacaacaatcatacaaaattgaaaataaccatattcaagttgaagaaaaaactaaagaagacaactatactgtcaatgtttacgtttcaacgttcataggagacgttgaggtgatttatagatga

SEQ ID NO: 2209 - DNA, 387 bp, Staphylococcus capitis
atgaattatatggatttatatttacaacaatttctcaaatcaacaattaaaaatagtattgatgaatacaaaatgatactggataaaaaattaaaaagtatcgagagttatatcaattatttaagtgagaaaagagttcaattaaagaagttaattgacagtctcaccctctcattggaaaataaatatatcgatatcgtcaataatcatgacatttattgtgcagaggaaattcatgatgtagaaattgaaaaaattaaaacaaagttagatgatattgaagcttattatgcaagaattgaagcagatttacatttacaatctaaagagaaaatcactacagaaaatgagtgtaacttaatttatcatatgagtgctgtagcatag

SEQ ID NO: 2210 - DNA, 756 bp, Staphylococcus capitis
atgattgttaaaactgatgaagaattacaagcattaaaagaaataggatacatttgtgctaaggtcagagacacaatgcaagcagcaactaaacctggtgtgactacacgagagttagataatattgctaaagatttgtttgaggagcatggtgcaatttcggccccaattcatgatgaaaactttcctgggcaaacatgtattagtgtaaatgaagaggtagcccatggtattcccggtaaacgtattattcgtgagggagacttagtcaatatcgatgtatcagcgttaaaagatggttactatgctgatacaggcatctcatttgtagtgggagaagcagataatcctcttaaacaaaaagtatgtgatgtagcaacaatggcttttgaaaatgccatgacgaaagtaaaacctggtgccaaattaagtaatattggtaaggcggttcacgctacagcacgtcaaaacgatttaacagtaattaaaaacttaactggtcatggtgtgggtcaatcgttacatgaagcacctagtcatgtaatgaattattatgatccaaaagacaaaactctattaaaagaaggtcttgttattgcagtagaacctttcatttcatcacgagctacatttgtcactgaaggaaagaacgagtgggcatttgaaactaaagataagagctttgtggctcagattgagcacacagtaattgttactaaagacggtccattattaactactaaaatcgatgactag

SEQ ID NO: 2211 - DNA, 990 bp, Staphylococcus capitis
atgaatgtaaaatggtatagacatataattggagctagaacgcttaaaacaggacttgcaacttttttaacatcattattttgtatgttgcttcatctcactccaatattcgctattttaacagcaattgtaactattgaacctacagcaaaggcatcaattaagaaaggctataaacgtttacccgcgacagttataggtgctttatttgctgtagtattcacctatatatttggagatcaatcaccattaagttatgcacttgctgcaacgtttaccattttagtttgtacgaaattcaacttacaagttggtactactgttgcagtactcacttcagtagcaatgattcctggtattcatgaagcgtattattttaatttcttttcaagattattaaccgctcttattggacttgtcacagcaggattagttaactttatcattctgccccctaaatattatcaacaacttgaagaccaactatcaatgtctgagaaaaaaatgtacgacttattttataaccgttgccaagagttattattaggaaagtttagttctgagaaaagtaatagacaactttcaaaattaaacattattgctcaaaagattgagactttaacgagttatcaaagagatgaatttcattatcataaaaataaagaagatgattggaaattactaaataaaataaccaatcgcgcgtataataatcgtttgtttatctctcatctatccaatatcatttatctacctaaaaatactcatattgctttcgctccagaagaaaagatggcgataataaatattagtaatagtattagtgaaataataagtcatggaggttttaaacggcacaagaaatcagcttcgacgttaaaaacctctgtgaagcgtttagaagaatttgaccaaaatcaaatgaagagccaccttatttatgagatactattaatttataaaattttagattctcgctatgctaaataa

SEQ ID NO: 2212 - DNA, 543 bp, Staphylococcus capitis
atgaaaggttttaaaatgatgggtttaacacttgcagcatcatcgattgctttttcactttcgcaagttgcacacgctgaacaaatggttaatggggacaatcacttatcgagttataatcatcaatcatcattaaatcaagatgaatacgtacataatggtaatgccggtcaaaatgcttcttatcttgcaactaaaagttttgttaatgctttggataatgggcagttaaattttaatggttataagattgaacaagataatgaagataatattgaatacaagcatgtgtatgatcaagaaattagaacaacaagtgaggatacggctacaagtatcagatttaaagtaacagatcaatcattgtctttagatcaaatgaaagatgtttattcaaatgatgaattaaatcatttaccacactcaagtacagattctaatgatggtgtatatgtatatcatggcgataaaatcaaattacaatttaaagtagagaacggttatgttacttcagtgacaattggtcaaggtgaaacagaataa

SEQ ID NO: 2213 - DNA, 726 bp, Staphylococcus capitis
atgaatgaacttacggtatatcattttatgtctgataaattaaatttatacagtgacattgggaatatcatcgcactaaaacaacgtgctaaaaagagaaatatcaaattaaatgttttagaaattaatgaaacagatggtgtaacattcgataattgcgacatattcttcattggtggcggcagtgatcgagagcaagctcttgcaactaaagaactcagtaaaattaaaacctcacttaaagaagcaattgaagatggcatgccaggcctaacaatttgtggtggttaccaattcttaggaacgaagtatattactcctgatggaacagaacttgagggattaggagttcttgatttctatactgagtcacgaactgaccgtttaacaggtgatattgtgattgaaagtgatacatttggaaccattgttggttttgaaaatcatggcggtagaacatatcataactttggtacacttggacaagtgactcacggttatggtaataatgatactgatcgtaaagaaggaattcattacaaaaatcttttaggttcttatttacacggtccagtattacctaaaaatcatgaaatgacagattatttacttgaaaaagcgtgtgaacgtaaaggcattccatttgaacctaaagaattagacaatactgaagaagaagcagctaaacaagtattaattaaccgagctaagaacagcaagaattaa

SEQ ID NO: 2214 - DNA, 1314 bp, Staphylococcus capitis
atgagacaatggactgcaactcacatggctaagttagctcgtaaggcaagcagagctgttggtaagaagggaacagacttgccagggcaaattgcaagacgtgtggatcaaaatatattaagaaaattgtctgaacaagttgatgatatcgtatttattagtggtactaatggtaaaacaacaacatctaacttaatagggcatactttaaaagaaaatcaaattaaaattattcataataatgaaggtgcaaatatggctgcagggattacgtctgcattcattatgcaaatttcaaaagacactaaaattgctatcattgagattgatgagggctcaatacctcgagttcttaaagaggttacgccatcaatgatggtatttacaaactttttcagagaccaaatggatagatttggcgaaatagatattatggtaaataatatagcgaaatcgataagcaataaaggtattaaattattattaaacgctgatgatccattcgtaagtcgattgaaaatcgcaagtgattctcttgtatattatggtatgaaagcacatgcacatgaatttgaacaaagcaccatgaacgaaagtaaatattgcccaaattgtgggcgattattacagtatgattatattcattataatcaaattggtcattatcattgtgaatgtggatttaaacgtgaagaacctacatatgaagtttcaaattttgaagtttcaccatttatcaatatgacgattaatcattttacttttaatatgaaaattgcaggtgacttcaatgcatttaacgctttagcggcatattcagtattaagagaattgggacttaatgacgaatcaattcaaaaaggttttgaaacatatacttctgacaatggccgtatgcaatatttttctaaagggaataaagaagcaatgataaatcttgctaagaaccctgcaggaatgaatgctagcttatcagttggtgaacagcttgaaggtaagaaagtttatgtaattagcttgaacgataatgctgcggatggccgtgatacatcatggatttacgatgctgactttgagaagttaagcaatcaagatattgaagctatcattgtcactggtacacgtgctgaagaactacaactacgtttaaaacttgctgaagtggatgttcctataattgttgagaatgatatctataaagctacggctaaaacaatgaactatacatcatttacggtagctattccaaattatacttctttagcgccgatgctagagcaattaaatcgctcatttgaaggaggtcagtcgtaa

SEQ ID NO: 2215 - DNA, 501 bp, Staphylococcus capitis
atgttaagtaaagaattacttgaagcattaaacgaacaaatgaaccacgaatatttctctgctcatgcttatatggcaatggcagcttattgcgataaagaatcttatgaaggttttgctaacttctacattgaacaagctaaagaagaacgattccacggtaaaaaaatctatgattatattaacgatcgtggtgaacatgcagtttttgatacaattaaagctcctaaagtagaattctcatctattttagaaacatttaaagatggtttagaacaagaaagagatgttactaaacgtttctataacctatctgatttagcgcataaagataaagactatgctacaatttcattcttaaattggttcttagatgaacaagttgaagaagaatcaacattcgaaacacacattgattacttaactcgtatcggtgacgattgcaatacattatacttatatgagaaagaacttgctaatcgctcttttgacgaagaataa

SEQ ID NO: 2216 - DNA, 555 bp, Staphylococcus capitis
atggctgataatgcttttgtagcgttagactttgaaaccgcaaatggtaagcgtacgagtatttgttcagttggtatggttaaagtcatcaataataaaattactgaatcattctacacactagtaaacccctttgattactttactgaaacaaatataaatgttcatggtattagacctgaggacgttgaagatgcaccaagttttgaatatgtttactcttatatgcttcaattcataaatgaattacctgttgttgcacacaatgcggcttttgatatgaatgtcttacatcagagtttaaaaagcttaaatattgaaacaccttcgatgacttatttttgttcatatcagctagccaaacgaacaattgatgcttacaggtatggtcttaagcatttgatgaatcattatcaattagatttccacggtcatcatgacgcactcaatgatgctaaagcgtgtgcaatgattacatttaggttactcaaacactatgatgatttaccaagtatgctttcaatctacggtaagaatcttaaagataaaggctga

SEQ ID NO: 2217 - DNA, 1071 bp, Staphylococcus capitis
ttggcagagagaaggattattcacattgatatggattatttctttgcgcaagtagaaatgcgagataatcctcaacttaaaggcaaaccagtcattgtagggggtaaagcgagtcatcgtggcgtagtatcaactgcatcttatgaagcaaggaaatatggtgtgcattcagcaatgccaatgtctcaagctcataaactttgcccaaatggatattacgtaacaagtcgttttggtgcatatagagaagtttcacaacagattatggatatctttcgaatttacacagaaattgtagaacctatgtcattagatgaagcatatttagatatcacacatcttgttcgaccagatatgcccgcgtctagaattgcgaactatattcgacgtgatatctacgaacaaacgcaattaactgcttcagctggtgtatcatataataaatttttagccaaattagcgagtggtatgaataaaccaaatggtatgaccgttatagactatcaaaatgtatatgagatattaatgaatttagacataggtgaatttcctggcgttgggaaagcttcaaagaaagttatgcatgataatggcatctttatagggcaagatttgtacgacaaagatgaatttgaactaattcgtctattcgggaaaagaggccgcggtttatataataaagctagaggtattgataacaatgaagtgaaagctacccgagtgagaaaatcagtaggaactgagcgcaccttttcaactgatgtaaatgatgacgatgaaattttgaggaaagtatgggaactttctggtaaaactgcagaaagattaaacaaattacagaaatccggtaaaacagtaacagtaaaaattaaaacctttaaatatgagacgttatcgaaacaaacaagtttaagagattctgttcaatcagaaaacgacatttataatatagcttatacactctataatgatttaaaagatcctgatatacctattcgacttataggcgtaacagtgggaaatttagagcaatcaagttatcgaaatatgacaatatatgattttatataa

SEQ ID NO: 2218 - DNA, 543 bp, Staphylococcus capitis
gtgcataaaatagatttatcagagaataaatttcaacttcagcgatttattttattgcaaattgtatttggattatttgtcgtattatttacttataaatgggcttataaagtgactcatctgattgaacaaaatatagtgatgaacctgttctatggattcataggttttattatattattaattgttcatgagcttattcacagattactatttatactattttcaaaagatgaaaaaccttcaattaaatacaataaacgatccatcatcatgcaattctccaatacatgttttaatagatggcaatttacaacaattatgttagcgccacttgtgattattagtttaacattacttatacttattcaaatgtattcttactcatcactcattttcatgtttagtatacatatgagttactgtatgatagatgtatttctagtagcacttgcattaactagtaaatttaaatacgttcaaaaatatgatgaaggattatacttatatcaaagtaaaccaacccaagcaaatcatgaataa

SEQ ID NO: 2219 - DNA, 1368 bp, Staphylococcus capitis
ttggaaacattaaaaaagaatgaggtgcatactggaaaagttatcgatttaacgcatgaagggcatggcgttgtaaaaattgatcgttatccagtgtttgtgcctaatgctcttatagaagaagagatagaatacaaattgattaaagtgaaaaagaattttgcaattggtaaacttcttgaagtaaaaaataaaagtaaagatagagttgagcctccttgcgtatattattacaaatgtggtggatgtcagttgcaacatatgacttatcaagctcaattaaatatgaaaaaagaacaagttgttaatctatttcatcgtaaaggtcctttcgaagatacaccgattcagcctacgttaggaatggaacaaccatggagataccgtaataaatctcagattccagtagggaaagataaagataataaagctatcatgggattctatagacaacgaagtcatgacattatcgatatggatagttgtctaattcaagatgaacaacaccaaaatattatgaactatgtaaaacattggtttaatgaacttaatatgagtatctatgatgaaaaaaataaaagaggtttaatgaggcacttagtcattagaacggggtatcatactgatgaaataatggtcatctttgttacaaatggtaagaaatttaaaaatgcgaatgtattagtgcaaaaacttatctcagaatttccaaatataacaagcattaaacaaaatattaatgatacgcattcaaatgtcattatgggacctcaatctgtaacgttgtatggtaaagataaaattgttgatgagttaagtgaggttacatttaatatatcagatcaatccttctatcaaataaattctgcccagactgagaaactctatcaaaaagcgattgattatgctcaattaacaggagaggaaattgtattagacacttattgcggtattggtacaataggtttgtatatggctcctcaagctaagcatgtttatggtgttgaagtagtaccatctgctattaaagacgcacaggagaatgcgactaaaaaccaattaaacaatacgacttttgaatgtgggaaagctgaagatgttattttagaatggaaagcacaaggaataaaacctgacgtagtgatggttgatccaccaagaaaaggttgcgatgagacgtttattaaaacgttgctcaaattaaatcccaaacgcattgtatatatttcctgtaatccatctactcaacaaagagatgcgcaattattatcagataattatcatttagttgaaataactccagtggatatgttcccacaaacaacacatatagaaactgtggccttatttgaacgcaaagagaattaa

SEQ ID NO: 2220 - DNA, 951 bp, Staphylococcus capitis
atgagaaaacgtgcaagaattatatataacccgacatcagggaaagaactatttaaacgcgtattaccagatgtattaattaaattagagaaagctggctatgaaacaagtgcgtttgctactgagaaagctggcgacgcaacaatagaagcggaaagagcattgagtagtcattatgatttgttaattgtagcaggtggtgatggtactttaaatgaagttgttaatggtatcgctgagcaaccaaatcgtcctaaattaggaatcattccaatgggcactgtcaatgactttgggcgtgcattacatttaccaaatgatattatgggtgctgttgatattatcatagagggtcatactactaaagtagatatcggtaagatgaataaccgttactttattaatttggcagcaggaggtagactcactcaagtctcttatgagacgccaagtaaacttaaatctattgttggaccttttgcatattacattaaagggtttgaaatgttaccacaaatgaaggctgtagatattcgtattgaatatgataataaggtattccaaggggaagcattgctcttcttacttggtctgacgaattctatggcaggatttgaaaagttagtacctgatgcaaaattagacgatggatatttcactttaattattatggaaaaagccaatttagctgagctaggacatatcatgactttagcttcccgtggtgaacatacaaaacatcctaaagtaatttatgaaaaagctaagtcaattaatatttcatcatataccgaaatgcaattaaatgttgatggtgaatatggtggtaaattgccagcgaatttcttaaatttagaacgtcatattgaagtatttacgcctaaagatgtctttaatgaagaattattagataatggttcaacacctgatattaccactgaaaagcagtaa

SEQ ID NO: 2221 - DNA, 1428 bp, Staphylococcus capitis
atgcattttgaaacagttataggacttgaagttcacgtagagttaaaaacagactcaaaaatgttctctccatcaccagcacattttggagctgaacctaactcaaatacaaatgttatcgacttagcatatccaggtgtattaccggttgtaaatagacgtgcagtagattgggctatgagagcttcaatggctttaaatatggatatcgctacaaattctaaatttgaccgtaaaaactatttctatcctgataatccaaaggcatatcagatttctcaatttgatgaaccaattggtgaaaatggttatattgatattgaagtagatggagaaactaaacgtattggtattacacgtcttcacatggaagaagatgcgggtaaatcaacacataaagatggttattctctagttgacttaaaccgtcaaggtacgcctttaattgaaattgtttctgaacctgacattcgttcacctcaagaagcttatgcttatttagaaaagttacgttcaattattcaatatacaggtgtttctgattgtaagatggaagaaggatcactacgttgtgatgctaatatttcattacgcccttatggacaagaagaatttggtaccaaaactgaattgaaaaaccttaactcatttaactatgtaagaaaaggtttagaatatgaagaaaaacgccaagaagaagaattacttaatggtggcgaaattgggcaagaaacacgtcgctttgatgaatcaactggtaaaactattttaatgcgtgttaaagaaggttctgatgattatcgttatttcccagagccagatattgtacctttatatgttgatgaagaatggaaagaacgtgtacgtcaaacgattcctgagttgccagatgagcgtaaagctaaatatgtgaatgatttaggtttacctgaatacgatgcacatgtcttaacacttaccaaagaaatgtcagatttctttgaaggtgccattgaacatggtgctgatgttaagttaacgtctaactggttaatgggtggcgtaaatgaatatttaaataaaaatcaagtcgaattacaagatacacaattaacacctgaaaatcttgcaggaatgatcaaattgattgaagacggtactatgagtagtaaaattgctaaaaaagtcttcccagaacttgcagaaaatggtggagatgctaaacaaattatggaagataaaggtttagtacaaatttcagatgaagcgacgttattaaaattcgttaatgaagctttagataataatcctcaatctgtagaagactataaaaacggtaaaggcaaagctatgggcttcttagttggacaaattatgaaagcttcaaaaggccaagctaaccctcaaaaagttaatggtttattaaaacaagaattagataaacgctaa

SEQ ID NO: 2222 - DNA, 1458 bp, Staphylococcus capitis
atgagtattcgctatgaatctgttgaaaaattaacagaaatgattaagaacaaagaaattaaaccttctgaagttgttaaagatatttatgcagctattgaagaaacagacccaactatcaaatctttcttagctttagataaagagaatgctattaaaaaagcagaagaactagatgatttacaagcaaaggatcaaatggacggtaaattattcggtattcctatgggaattaaagataatattattaccaaagatgtagaaactacatgtgcgagtaaaatgcttgaaggattcgtaccaatatacgagtctactgtaatgaataaattacatggagaaaatgccgtacttattggtaaattaaatatggatgagtttgcaatgggtggttcaactgaaacatcttactttaagaaaacgttaaacccattcgatcatacagcagtacctggaggttcttctggtggttcagcggcagctgttgcagcaggtttagtaccatttagtttaggatctgatacaggaggttctatcagacaaccagcagcatattgtggtgtcgtaggtatgaaacctacatatggacgtgtatcacgttttgggttagtggcttttgcttcttctttagatcaaattggtcctattacacgcaacgttaaagataacgcaattgtacttgaaactatttcaggtgtagatgcaaatgattcaactagtgcaccagtagaagatgttgatttcacttcagatattggtaaagatatcaaaggtcttaaagtagctttacctaaagaatacttaggagaaggtgtaagtgaagaagtcaaaacgtctgttaaagaagctgttgagacgttaaaatctttaggtgctgaagtaggagaagtttcattacctaacactaaatatggtattccttcttattatgtaattgcatcatctgaagcatctgcaaacttagctcgttttgatggcatccgttatggctaccattcaaaagaagctcaatcgttagaagagttatataaaatgtcaagatctgaaggcttcggagctgaagttaaacgtcgtatcttcttaggaacattcgctttaagctcaggttactacgatgcttactataaaaagtctcaaaaagtgagaacattaattaaaaatgattttgataaagtatttgaagaatatgatgtagtggtaggaccaactgcgccaacaactgcatttaatttaggcgaagaaattgatgatccattaactatgtatgcaaatgatttactaacaacaccagttaacttagctggtttacctggtatttctgttccttgcggacaatttaacggacgaccaattggtttacaatttatcggtaaacctttcgatgaaaagacgttatatcgtgtagcttatcaatatgaaacacattacaacttacatgacgcatacgaaaaattataa

SEQ ID NO: 2223 - DNA, 303 bp, Staphylococcus capitis
atgactaaagttacacgtgaagaagttgaacatattgctaatttagctagacttcaaatttcttctgaagaaacagaagaaatggctaataccttagaaagtattttagattttgcgaaacaaaatgatagtgctgatactgaaggtgttgagccaacttatcacgtattagatttacaaaacgtgttacgtgacgataaagcaatcgagggcattcctcaagaattagcattgaaaaatgcaaaagaaacagaagatggacaatttaaagtgccatccatcatgaatggggaggacgcttaa

SEQ ID NO: 2224 - DNA, 1536 bp, Staphylococcus capitis
atgctgacattaggttctacactcagtaaccaagtcgatgcgaattggcaaacatacattatgattgctgcttactttattattctgctcgttatcggcttttacggttacaaacaagctacgggcaatttaagtgaatttatgctaggaggacgtaatataggaccatatattacagctctatcagcaggtgcttctgatatgagtggctggatgattatgggacttccaggttcagtctatagcacaggtctttctgccatatggataacaataggtttaacacttggtgcttatataaactatttcgtcgtcgctcctagattacgagtctatacagaaattgctggggatgccatcaccttacctgatttcttcaagaatagattgaatgataaacaaaatgtgattaaaattatttccggattaattattgttgtcttctttactttatacactcattctggattcgtttcaggtggtaaattatttgaaagtgccttcggacttaattaccattttggattgatattagttgcagtcatcgttatcctatacacctttttcggaggttatttagctgtatcaataactgactttttccaaggcgttattatgcttatagcaatggtaatggtacctattgttgcccttttaaaattaaatggatgggacacgtttcatgaagtggcacaaatgaaaccaacaaatttagatttatttagagggacaactgtaattggtattatatctctattttcttgggggcttggttactttggacaaccacatatcatagtacgattcatgtctattaaatctcataagttattacctaaagcaagacgtttaggaattagttggatggcagtaggtttacttggtgcagtgggagttggtttaacaggtatcgcgtttatttctgaaaaacacatcaaattagaagatccagaaacactatttattgttatgagccaagttttattccaccctcttgttggtggtttcttgttagcggcaattttagctgcaattatgagcactatttcttcccaactattagtaacatctagttctttaactgaagatttttataaacttgtacggggtgaagataaagcagtagctcatcaaaaagaatttgtaatggtaggccgtttgtcagtactagttgttgccattgttgcaatagctatcgcttggcatccaaatgacacaattcttaaccttgtgggtaatgcttgggcaggttttggtgctgcatttagcccacttatactattttcactgtattggaaagacctcacacgtgctggagccgtgagtggtatgattgcaggttctctagtcgttatcatttggatagcatggattaaaccacttgcttcggtcaacgaattatttggaatgtacgaaattattccaggctttatcatcagcgtaatggttacttattttgtaagtaaattaactaagaagccagatactttcgttgaaaatgatttaaacaaagtgaagcaaatcgttcgagaataa

SEQ ID NO: 2225 - DNA, 1209 bp, Staphylococcus capitis
atgaagcgaacaattattttactcatttcgacaatatttttattagctgcatgtaataacaatcaaaaagataaccaatctgataaagatgaaagtggaagtaagaatagtcaaaatacgaaccaagtaaaacaaattgcaacagacaaaaatgttcaaggagataattatagaacaattttaccttttaaagaaagccaagcgagaggtctcttgcaagataatatggcaaatagctataacggtgaagattttgaaagtggcttattgactttaagtaaagaagtattcccgacaaataaatatctttaccaagatggacagtatttagataagaagacaattaatgcctatttaaatcctaaatacacgaaaaaagaaattgataagatgagtgagaacgagaagaaaagtaagaaagcgaatgaaaaccttggtcttaatccttcacacaatggtgaaacagacgaagaaaaaatagcaaaacaatcaccagcttatctttcaaatatactagaacaagatttttatggtaataatgattctaaagctaaaaatatcaaaggcatgacgattggactagctatgaatagtgtttactattatcaaaaagaaaaagatggagaaacatatagtaaaaaattagatgataaagaaattgaaaaacaaggtaaacaaatggcaagtgaaatgttatctcgcttacgtgaaaatagcgatttaaaagatataccaattcattttgcaatttataaacaatcaggccaagattctattacaccaggtgaatttattgctggtgcaactgcagatgatggtaaaacaaaaattaatgaatgggacgctattaaagaaaaatcagccttgcttccttcctcaactgcagaggattataatgaaacattaaataataatttcaaacaatttaatgataatttacaatcttacttctctaactttactcaagcagtaggtaaagtgaaatttattaataagaaaccaaaacaattaactgttgatttaccaatcgattattatgggcaagctgaaactattggtattactcaatatgttacagagcaagctgaaaaatattttgataatattgatgagtatgaaattcgcatcaaagatggtaatacacctcgtgcattaattagcaaatcgaaagatgataaagaaccacaagttcatatctatcataattaa

SEQ ID NO: 2226 - DNA, 2004 bp, Staphylococcus capitis
atgaaagatttacaatctcgtgtaaatgaactacatgatttattaaaccaatatagctatgaatattatgtacaggataatccatctgtaccagatagtgaatatgataaattattacatgaacttatagatattgaagagaagcatcccgaatataagactgctgattcacctactgtacgtgtaggtggagaggcgcagtcctcatttgaaaaggtaaatcatgatacaccaatgttaagtttagggaatgcatttaatgaagaagatttaagaaagttcgaccaacgtattagagaaaatatcggaaacgtcgagtatatgtgcgaactaaaaatcgatggattagctgtttctctcaagtatcaaaatggtagattcgttcaaggattgacacgaggtgatggcactactggagaggatattactgagaatttaagaactatccacgctataccattaaaaattaaggaaccacttaattttgaggtgcgtggagaagcctatatgcctagacaatcatttatgaatctaaatgcggaaaaggaagagaatggtgaacaaccttttgcgaatccaagaaatgcagcagcaggatctttaagacaacttgattctaaacttgcagccaaaagaaagttaagtgtcttcttgtatagcgtaaatgatttaactgagtttgatgcaacaactcaaagtggggctttacaagaacttgatgacttaggttttaaaacaaaccaagaaagagaacgagtagctgatattgatggtgttctcgactatatagagaaatggactgagaaaagagagtctttatcatatgatattgacggtattgttattaaagtaaatgatttagatcaacaagaggaaatggggtacacacagaaatctccaagatgggcaattgcctacaaatttcctgctgaagaagtcgtttcaaaactattagatatcgagttaagcatagggagaactggtgtagtaactccaacagctattcttgaacccgttagagtagcaggtacaactgtttctagagcgtctttacataatgaggacctcatacatgaaagagatattcgtattggtgacagtgtagtagttaagaaggctggtgacatcattcctgaagtagtcaagagcatattagatagacgaccaaaggatgccaagacatatcatatgccaacacattgcccaagttgcgatcatgagttggttagaatagagggtgaagttgcacttcgttgcatcaatcctaaatgtcaagcacaacttatagaaggactaatacatttcgtctctagacaagcaatgaacattgatggacttggaacaaaaattattcaacaattatatgaaaatgagttaatcaaagatgttgcagatatcttttatcttaaagaagaagacttgcttcctttagaacgtatgggtaataaaaaagttgagaatctattagctgctatagagaaagctaaagataactcacttgaacatttattatttggtctaggtatcagacatttaggtgttaaagcaagccaagttctagcagagaaatatgaaacgatggatcgtttattaaatgtgactgaggaagaacttgtagcgatacatgatataggtgataaactagctcaatctgttgtcacttatttagaaaatcaagatattcgtgctttaattcaaaaattaaaagacaaaaatgttaatatgaattataaaggaattaaaactacagaaattgagggccatcctgaatttaatggtaaaactattgtattaactggtaaactagaacaaatgacaagaagtgaagctacacaatggttagaaatgcaaggggctaaagtaacaagtagtgttactaaaagtacagatattgttatagccggtgctgacgcaggttctaaacttgctaaagctgaaaagtttggtacagaaatttggactgaagatgaatttgctaaaaaacaaaaagaattaaataattag

SEQ ID NO: 2227 - DNA, 2196 bp, Staphylococcus capitis
atgaattcgctagtaaagaatatgaatacagaacaaagtgaagctgtaagaacgactgaagggccattgcttattatggctggcgcggggtcagggaaaacacgcgtattaacacatcgtattgcttatttattagatgaaaaagatgtgtctccttacaatattttagcgattacttttacgaataaagcagctaaagaaatgaaagaacgtgttgaacaattggtcggagaagaggctcaagttatttggatgtccacattccattctatgtgcgtgagcatcttaagaagggatgcagatagaattggaatagaacgcaatttcactatcattgatcctactgaccaaaaatctgttattaaagatgttttgaaaaatgaaaacatagatagcaagcgttttgaaccaagaatgttcattggagcaataagtaatcttaaaaatgaattgaaaacaccagatgatgctcaaaaagaagcaaatgactttcactcacaaatggttgctactgtatacaaaggttatcaaagacaattatcacgaaatgaagcattagactttgatgatttaataatgactacaataaacctctttgaacgtgttcctgatgccctagaatattatcaaaataagtttcaatatattcatgtcgatgaatatcaagatacaaacaaagcgcagtacactttagtgaaattacttgctaataaatttaaaaatctttgcgttgtaggtgactcagatcaatctatctatggttggcgtggcgctgatatacaaaacattttatctttcgaagaggattatcctgaagcgaagaccattttcctagagcaaaattatcgttctactaaaaatatattaaatgcagctaatgaagtgattaagaacaattcagaacgtaaacctaagggattatggactgcaaatacaggtggagacaaaatccaatattatgaagcgatgacagaacgtgatgaagctgagtatgttgtgaaagaaattatgaaacatcaaagaaatggtaagaagtatagcgatatggcaatactttatagaactaatgcacaatcacgtgtactagaggaaacattcatgaaatctaacattccatacactatggttggaggtcaaaagttctatgaccgtaaagaaatcaaagacttactaagctatttacgcgtaattgcgaatagtaacgatgatattagtttacagcgtattattaatgttcctaaaagagggatagggccttcttcagttgagaagattcaaacctatgcagttcaaagcaatataagtatgttcgatgcattaggagaagtggactttattggtctctctaagaaagttacacaggaatgcattaacttttatgagacaataactcatttaataaaggaacaagaatttcttgaaataagtgaaattgtagaggaagtcttaaaaaaatcaggttatcgtgacatgttagagagagaacagacacttgaatcacgtagtcgtttagaaaacttagatgaatttatgtctgtaccgaaagactatgaggaaaatacaccattagaagaacaatctttaatcaatttcttaactgatttatcacttgtcgctgatatagatgaagcagatacgcaaagtggtgtaacgatgatgactatgcactctgcgaaaggtttagagtttccaattgtttttattatgggtatggaagaatcactattccctcatattcgagctattaaatcagatgatgatcatgaaatggaagaggaacgtcgaatttgttatgtggcaattacccgtgctgaagaattattatatgtcacgaatgccactacaagaatgttatttggacgttcacaatccaatatgccttctagatttttaaaggaaattccagaagagttacttgaaagtcatactggtaataaacgacaaacaatccaacaaccaaaagctaaaccacaacagaaaagaggatttagcaaacgaatgacttcacctaagaaacaagtttcatcttcagaatggaaagtaggagacaaggtgactcacaaatcttggggtgaaggaatggttagcaatgtaaatgagaaaaatggttcggtagaattggatatcatatttaaatctgaaggacctaaacgtttacttgctcaatttgcgccaatagagaagaaggaggactaa

SEQ ID NO: 2228 - DNA, 690 bp, Staphylococcus capitis
atgtatgacataacaaagtggaaacatatatttaaactagatccggctaagtcaatatctgacgatgatttagaagcaatatgcatgtcaaatacagatgcaattatgattggtggtacggataatgtaaccgaggataatgtcattcatttaatgagtagagtgagacgttatccattaccacttgcattagaggtttcaaatgttgaaagtgtaatgcctggatttgatttttattttattcctacagtgatgaatagtaatgatacaacatatcataatggtattttattagaagctctcaaacaatttggtcatgtaataaactttgaggaagtaatatttgaagggtatttaatactgaattcagatagtaaagttgcacgcaaaactggagctcaaacggaattaaatattgaagatgttgaagcatatgcgcagatggctaatgaactctatcatttccctgttatgtatttagaatatagtggggcatatggtgacatagaaaaagtaaaggccgtatctcaaatgcttactgaaacacaactcttctatggtgggggtatctcaaatttaggtcaagctcaagaaatggctgactttgcagatacgattatcgtaggaaatattatatatactgatattaaaaaagcgctaaaaactgtaaaaataaaggagtctaattaa

SEQ ID NO: 2229 - DNA, 303 bp, Staphylococcus capitis
atgcaaattgaaaaattacgtgggcaagcattggatgaattatttgatgcgatcctagcgctagaaaatagagaagaatgctatcagtttttcgatgatttatgcactgtgaatgaaatacagtcgctatctcagagacttcaagttgctaaaatgattaaacaaggttatacgtatgcaacgattgaagacgaatctggtgcatcaactgcaacgatatctagagttaagcgttcgttacaatggggtaatgatgcatatactatgattttagatagacttaatatagaaacaaagtcataa

SEQ ID NO: 2230 - DNA, 1296 bp, Staphylococcus capitis
atgattgaacgctattcaagagaagaaatgtctaaaatttggacagatcaaaatcgctatgaggcatggttagaagtagaaatattagcatgcgaggcatggagtgaattaggatatatccctaaagaagatgtcaaaaaaattcgtgaaaatgctaaagttgacgttgatcgtgcaaaagaaattgaactggaaacacgtcatgatgttgtagcttttacaagacaagtgtctgaaacgcttggtgaagaaagaaaatgggttcactatggtcttacttcaacagatgttgtagataccgcattaagctttgttgttaaacaagcgaatgaaattattgagaaagacttagaaagatttattgaagtattagctaataaggctaagaattataaatatacattaatgatggggcgcacacatggtgtccatgctgaaccgactactttcggtgttaaaatggcactttggtatacagaaatgaaacgtaaccttaaacgctttaaagaagtgcgtaaagagattgaagtgggtaaaatgagtggtgcagtaggtacatttgctaatattcctcccgaaattgaagcatatgtttgtaagcacttaggcattgatactgcaccagtttctactcaaacattacaaagagatcgacatgcatactatattgctactctagcgttaattgctacttccttagagaaatttgcagtggaaatccgtaacctacaaaaaacagaaacacgtgaagtagaagaagctttcgctaaaggacaaaagggttcatcggctatgccgcataaacgtaaccctattggttctgaaaatattacaggtatttcacgagtaattcgtggatatattactacagcatatgaaaatgtacctctttggcatgagcgagatatttctcattcatctgcagaaagaatcatgttaccagatgtaacaattgctttagattatgcattaaaccgattcacaaatattgtagatcgccttactgtatttgaagataatatgagaactaacattgataaaacatttggtttgattttctcacaacgtgtattattagctttaattaataagggaatggttagggaagaagcctatgataaagttcaaccaaaagcaatggaatcttgggaaactaaaacaccatttagagaattaattgaacaagacgataccatcacaaatgttctatctaaagaagaattggacgagtgtttcaatcctaaacaccatcttaatcaagttgatacaattttcgagcgtgctggattagaataa

SEQ ID NO: 2231 - DNA, 180 bp, Staphylococcus capitis
atgagcaaaaagtttaaagttgaagataatgagaccattgctgattgcttagctcgtatgcgcgaagaaggttttatgccaactcgtagaatggaaaaaccagtctataaagaaaataaagatggaagtatagaagtgctcaaacaggatataatttttgtgggtaaacctattaattaa

SEQ ID NO: 2232 - DNA, 627 bp, Staphylococcus capitis
atgtcggcaatcgctcataatccatggctaatggtattggccatatttgtaatcaatgtctgttatgtcacattcttgacgatgagaaccattttaacattgaaaggctatcgttacattgctgcagtggtaagtttccttgaggtacttgtatatgttgttggtttaggattagttatgtctagtttagatcaaatccaaaacatttttgcatatgcattaggcttctcagttggaatcatcgttggtatgaagatagaagaaaaactagcgttaggttataccgtagtcaatgtgacttcgtcagagtatgaattagatttacctaatgaattaagaaatttaggttatggtgtaactcactatgaagcgtttggacgtgatggtagtcgaatggttatgcaaattttaacgccacgtaaatatgaatttaagcttatggataccataaaaaaccttgaccctaaagcgtttatcattgcttatgaacctagaaatattcatggtggattctgggttaaaggggtacgcagacgtaaacttaaagcttacgagccagaacatctagatgttgtagtagaacatgaagaattagaaagtgcgaagacaaatgagcaaaaagtttaa

SEQ ID NO: 2233 - DNA, 822 bp, Staphylococcus capitis
atgagtaaattacaagatattgttgttaaagaaatgaaagttaaacaacagattgatagtgaaaaagaagtaaatgaaatcaaacatttcattaagtcttatgttcaatctcattcttttattaaatcgctagtacttggaatttctggaggacaagattctacattaacaggaaaaattgtacagttagctgtaaatgaattacgctctgagggacgtgaatgtaagtttatagcagttaaattaccgtatggtgtacaaaaggatgctgatgaagtagaagatgcactgcaatttatagaacctgatgaaacagttacagttaatatcaaacctgcagtagaccaaagcgtccaatctcttaaggaagcgggtatcgaattgacagattttcaaagaggaaatgaaaaagctcgagaacgtatgaaagttcaattttcgattgcttcaaaccaaagtggaatcgttgttggaactgatcattctgctgagaacattactggtttctatactaaatatggtgatggtgcggctgatattgctccaatttttggattggacaaaagacaaggtaagcagttattaaagtatttaaatgcaccaaaacatttatatgagaaagtaccaactgcagacttagaagatgataagccacaattacctgatgaggaagctctaggtgtgacttatgatcaaatagatgattatctcgaaggtaaagatatacccgctgaagcgcgagaaactattgagaaacattatgttagaaatgcgcacaaacgtgaacttgcatatactagatatacttggcctaaaaactaa

SEQ ID NO: 2234 - DNA, 1470 bp, Staphylococcus capitis
gtgtaccaatttaaagatgacagcttaatgctacaaaatgacttatatcaaattaatatggcggaaagctactggaatgacggcattcacgaaagaactgctatttttgatttatattttagaaacatgcctttcaacagtggttatgcggtttttaatggtttaaaacgtgtaattgactttatagagaattttggtttctctgatgctgatatagactatttaaaaacaataggctataaagatgattttctaagttatctaaagaatttaaaatttacaggtaatattcgctctatgcaagagggggaattatgtttcggtaatgagccattaataagagttgaggctcctttaattcaagctcaacttattgaaacaattttattaaatataattaatttccacacacttatagcgactaaggcgagcagaatcagacaaatcgctatgaatgatacattgatggaatttggaactagaagaggtcaagaaattgacgctggcttatggggggctcgcgcagcctttattggtggatttgactcaactagtaatgtaagagcgggtaagctattcgatataccagtttcaggtacgcatgcgcatgcattagttcaaacatatggtgaggagtatacagcatttaaaaaatatgctgaacgacataaaaattgcgtctttttggtagatactttccatacattaaaatcgggtgtgcctacagcaataaaagtagctaaagagttgggtgacactatcaactttattggaattagattagattctggagatattgcttatttatctaaagaggcaagacgtatgttagacgaagctggcttcacagaagctaaaattattgcttcaaatgatttggatgagcaaacaataacaagtttgaaagcacaaggagctaaagtggacgcatggggtgtgggaactaaattaattactggttatgatcaacctgcactcggtgcagtatacaaactagtagccattgaaactgaggatggtacttttagtgatagaatcaagctttctaataatgccgaaaaagtaacgactcctggtaagaagaatgtctatcgtattattaataaaaagactggaaaagcagaaggtgactatattacgcttgaaggagaagatccatcaactgaaaaacctctcaaactattccatccagtacatacgtataaaatgaaatttattaaatcatttgaagcgaaagatttacatcataccatctttgaagctggtaagttagtatatcaacttcctaccgaacgtgaagctcaggcatatttaactaaaagtttagatacactttgggaggaaaataagcgttacttaaaccctcaagaatatcctgtagatttaagtgctaaatgttgggaaaacaaacataaacgtatctttgaagtagcagaacgtgttaaagagatggaggaagatcatgagtaa

SEQ ID NO: 2235 - DNA, 1068 bp, Staphylococcus capitis
atgttattagatgaagctaaatcatttattcaaaccatgtttaatgaattaaattatagctcaagtgaaactcaacaaagacttaatgaaattgaagaagaaattaaagaaacaggaagctacacccatacttatgaagaattggtatatggatcgaaaatggcatggagaaattctaatcgttgtattgggagactattttgggaatctctaaatgtgaaagatgcgcgtcatgttgaaaatgaagaagaattcattgatacaattcaccaacatataaataaagcgactaataatggtaaaatcaagccacttattacaatttattcacccaaaaatggccctaaaatatataataatcagcttattcgttacgcaggttatgacaaagcaggagatccatctgagaaaaaagtgacacgattggctcaacatctaggatggagcagtgagggtacagatttcgatatattacctttgatatatcaaatgcctaatgaagcactaaaatttcatgagtatccaaaacatcttattaaagaggtacctatatttcatgaccagtatccaaaattagcacatttaaatttaaaatggtatgcagtgccaatcatttccaatatggatttaaaaattggcggaatcatttatcctactgcaccgtttaatggatggtatatggtaactgagataggtgtacgtaatttcatagatagttatcgttataatcttttagaaaaagttgcagaagccttcgaatttgatacacttaaaaataattcatttaataaggatcgagcacttttagaattaaactatgccgtatatcattcctttaaagctgagggcgtttctattgtcgaccatttaactgcctcaaagcagtttgaaatgtttgaacgaaatgaacttaagcatgatagacacgtgactggtaaatggtcatggttagcaccacctttatcgccaacgttaacatctaactatcatcatggttatgataatacgatgcgatcaactaatttctactataaaaagaatgaacctatgaagtgcccttttcattaa

SEQ ID NO: 2236 - DNA, 804 bp, Staphylococcus capitis
atgcgattatattatttaggacctaaaggaactttctcttatctcgcttcacaaaaacttattttagaaaatgatatcgaatatttagctaagtcaaaccttcacgaagtgatcaaagcagtctcaagtgacgataactcaatcggtatcgttcccatagaaaattctatcgaaggtacgattaacatcgtagctgacgcattagctgaacaaaaaatttatgctcatggtgaaattcacttagatattgattttgcattgtatggctatccttctgatagtttacatgacattaaaaaagtctactcaatcgcgcctgctatcagtcaaacaaccaattatatacaccaacatcaatttctgtacgattatacagacagtacaattcaaagtttagataaaatagccaaaggtataggtgctattgcgcctttaggtagtggagaaacttatggatatcaacctattgatttgcatattcaagattatccgcataatgtcacacgctttttaattgttaaaaatcatacacactttgaagatgatactaatacaaccatgttcttaattacccctcagtatgataaacctggtttgttagcgagtgtattaaatacctttgcattatttaatatcaacctctcatggattgaatcacgacctttaaaaactcaattgggaatgtaccgcttcttcgtacaagcagacacacctgtaaccaacgatgttaataaagtaattactattttaaaaacgttagattttacagtgaatttaataggttcgtttaataaaagattttag

SEQ ID NO: 2237 - DNA, 1086 bp, Staphylococcus capitis
atgttcattaatgccagggaatttggtttaactggagaaaataaatataaagacacaagagcaattcaaaaagcattaaattatgccaaaaaaggtaaacacactgtttttatccctaaaggtacatatcatattagaaaagctttagtcatttatgattctacaacgttgctactcgatgatgaggcagttcttttgcgagtagggaaagatgcattgctaaaaaatggtaaaccttatattttttaccataaatattctggaaatagtcatatttatattaaaggtggcacgtttgatatgaatgggggcgactttccatacaacaatactgctatgagtataggtcatgctgaagatattcaacttatcggcgtaacctttaaaaatatagttggtggacatgcattagatgcatgtggtttaaatggcttacatattacagattgttcattcgagggttttctcgacatagatggagatcgttcattttcagaagcagttcaattagacattcaagtgccaggtgcatttcctaaatttggcacaactgatggtacaattactaagaatgttgttatagagaattgttattttggtaattctgatcatccgaaaatgaaagcatggaatcgtgcaataggttcacacgcaagtcgctataataaattttatgacaatattcatattagaaataatgtgtttgataaactaaaagaatttgctttaacaccgctaaagtctaagaatacatttatttcaaaaaatgaattcaaatcatgtaatggtggtatacgatttcttggcgtgaaagatggtaaaaatgcagcagaccctcaaacaggtcaagttatgggtacacaagcaggggaaaatttcaatgtgattggtaatacctttacaggaaagatggagagagatgcagttcatataaggagttataatgatgtgaaacatcaacatgtatttatagcaggtaatcatttcgatgattcaacgcaaactctacatctagaggatataaaagatctaactcttaatcaggaagaggaatttttaaaagtcgaaaaaattaatgtcgaatag

SEQ ID NO: 2238 - DNA, 555 bp, Staphylococcus capitis
atgaataaaaacgcactaattatagtggattattctattgattttattgcgaatgatggaaaacttacttgtgggaagcctggtcaagaaatagaggattatattttaagaagaattgaaacgtatcttaaccatcaagaagatatcttttttacaatggatgtccattatgagaatgacctataccaccctgagacacaactttttccacctcataacatttatggaacaaatggccgtagtttatatggaaaagttggtgaaatatacgagaaaaacaagcataattcacaagtccattacttggataaaacaagatatgattcattttatggtacaccattagatagtttgttgagggaacgtgatattaaaaatgtagaaattgtaggtgtttgcacggatatatgtgtgttacatacagcgatttcagcctataacttaggttataacgtcacaattccaagccgaggtgtagcatcctttaaccaagaagggcatatttgggcactagcgcatttccaaaactcactaggtgctaaggtagaagattaa

SEQ ID NO: 2239 - DNA, 927 bp, Staphylococcus capitis
atgacaaaaacttttatttttgggcacaaaaatccagatacagatgcaatttcttcagctattatcatggctgattttgaacaacaaactggtaactctgaagcaaaagcttaccgattaggtgaagttagtgctgagacacaatacgctttagattactttaaagtaaaagccccagaattattatctgaagacttaaataatgaagatgttattttagttgaccataacgaatttcaacaaagtgctgattcaatcgctgacgcatctgtaagacacgtgattgatcaccaccgtatcgcaaatttcgaaacagcttccccactttattacagagctgaaccagtgggatgtactgctactattttatacaaaatgtataaagaacgtggatttgaaattaaacctgaaattgctggtttaatgatttcagctataatttcagatagcttattatttaaatcacctacatgtactgaagaagatgttaacgcagctcaagcattaaaagaaattgccaatgttgatttagatagctatggtttagatatgctaaaagctggtgcttctactactgataaatctgcagaaaccctattaggtatggatgctaaatcatttactatgggcgactatgtcactcgtatcgcacaagttaacactgtagatatcgacgaagtacttaaccgtaaagatgaattagaaaaagtaatgttagagataagcgcaaacgaaaaatatgacttattcgtacttgtagtaactgatattatcaacagtgattctaaaattttagttgtcggcgctgaaaaagataaagtaggcgaagcatttaatgttcaattagatgatggtatggccttcttatctggcgtagtttctcgtaagaaacaagtggtacctcaaattactgaagtattatcataa

SEQ ID NO: 2240 - DNA, 1380 bp, Staphylococcus capitis
atgaacgatattgaacaacaatttaatattagcaagcaatttttcaaaacaaataaaactaaagatttaaaatttaggaagcaccaattaaaagctttaagtaaaagtatcaaaaatcatgaacaagctttactagaagcacttaataaagatttaggaaaaagcaaagtagaagcttatgctacagaaattggtatattactaaaaagcattaaacttgccagaaaagaactaaaaaattgggctaaaactaaacaagttgaaacaccgctttatttatttccaactaaaagttatatcaaaaatgaaccctacggtactgttttaattattggtccctttaattatcctgtacagctagtattcgaacctttaattggagccatcgctgcaggtaatactgccattgttaaaccctctgaacttacccctaacgtagcagaagtaattcaagatataattcaagaaacttttgaagagaattatatttcagttgtgaaaggtggcattgaggaaactcaaaaattaattcatttaccgttcgactatatgtttttcactggtagcgaaaaagttggtcaaatcatctatgaatcggctgctaaaaatctggtacctgttactttagagttaggtggtaaatctccagtcattattgaccaaactgcaaatttaaaagtcgctagtgaaagaattagtttcggaaaatttacgaatgcaggacaaacatgcgtagcacctgattatatactaattgatcgaaaagtaaaaaatgattttattaatgcactaaaacaaacaattacagaattttatggggaaaacatcaaagaaagtcctgattttggaagaattgttaatcaaaaacatttcaaccgcttaaatgaattattagaaactcatgagagtaaaactattttcggtggtaaaagctttgaagaagatttatatattgaacctacattaatagacaatgttaatctacaagataaagttatgcaggaagagatttttggtcctattctaccaattattacttatgatgatttcgatgaggcaattcaaattattcagagtaaatctaaacctttaagtttatatctttttagtgaggatgaaaattctacacaccgcgtattagaggaattatcattcggtagcggagctataaatgatacacttatgcatttagcaaatcctaatttaccatttggtggcattggggcttcaggtatcggtcaatatcatggcaaatattcttttgatacctttagtcatatgaaatcatatacatttaaatctacacgtttagaatcaagtatctatttcccgccttataaaggcaaatttaaatatattaaagccttctttaaaaattaa

SEQ ID NO: 2241 - DNA, 1029 bp, Staphylococcus capitis
atgactattggatatattggttcttatactaagcaaaatggtaagggaatttaccgtttcgaattagaagatttaaaagggacaataaaagaagttcaaacaggttatgaaatagaggcgtctacatatttaactagaaatgaaaactatttatacgccattactaaagaaaatgaaaattgtggtgtagcaagcttcaaaataacgcaaaatagtgatttagaactaattaataaatgtttagcatctaaaaatggaacaggatgttatatacaaatttcaagtgataacaattatttatttgaagctgtttatggtgctggaattgcacgaatttataagttaaataaagatactggagaaattgaaaaacttattgaagaaattgaacatgaatatccaacaggtccacatgaaaggcaggaatccccgcatgtccattttttaaatgaaacgccagataataaatatgtagtagcaaccgatttaggctcagatagaatcgttgcttatacatatggtgaccaaggtttaaaagaatatgctgtttcacaatttaaagaagcggatggcacaaggcacattacttttagtaaagatggtaaatacgcatatgtagttcatgaattatctaattatgtaagtgtaactgaatataatgatggtgaatttaaagaaattgagagacatcttacaatacctcaagattttaaagaagaatcgaaattagctgcggtaagattatctcatgatcagaaacatttatatgtaagtaatagaggtcatgatagcatagctatttacgaagttgttaataacggaaaatcattaaaaatggtggatattcaaccgactaaagatgaatttcctagagattttaatattacgcaggatgataacttaatagtatgtgctcatcaagaaggtgagtctaaagtaactgtgtttaaaagagatagtgtcacaggaaaacttgaatttattgatgaccacgaaagtgcacctgaaggtgtttgcgtcttattctaa

SEQ ID NO: 2242 - DNA, 1290 bp, Staphylococcus capitis
atgacctttatagctattgttattttcgttataactttaatttttgttatttggcaaccaaaaggattaaatataggaattactgctgtagctggtgcacttttagctattattacaggcgttgtatctctaactgatattgttacagttacaaatatagtatggaatgcaacgttaactttcgttgctataattttaatatcactcattttagaccgtattggcttctttgaatgggctgctttgcatatgattattgcttcaaaaggctatggccttagaatgtttatttttataatgactttaggtgctgtagtagcttctctatttgccaatgatggtgctgcgcttattcttacaccaatagtgttagctatggtaaggagcttaggttttgataaaaaaacaatattcccatttattatagcaagtggatttatagccgataccacttccctaccactcactgtcagtaatttagtcaatatcgtttcagctgactactttaacatcacatttattcaatatgctttaagaatgataattccaaatttattttcatttttagcaagcatatttgtgctttggctttattttaaaaaatctcttcctaaaagtacaaatattgaagatttagccacacctcaatcagttataagagataagaaactttttaaaacgtcttggattattcttattattttattaataggttatttaacaagtgagtttattcatgttcccgtggctttcatagcattaattattgcttttgtattcctactcttagcgagtcgttctaaagcagttaatactaaagaagttttaatagaagctccttggaatatagttatattttcaattggtatgtatcttgtagtgtatggattgaaaaatgtaggtataacattagtactagggaatattttgaattctatttcaaaccatggactattcagtagtattatgggtatgggattcattgcagccttcctctcttctattatgaataacttgcccactgttttattagatgcaattgctattgctcaatctaattctgaaggattaattcaagatggtatggtctatgcaaacgttattggctctgatttaggtccaaaaatcactccaattggctctttagcaactttattgtggcttcatgtattaactcaaaaaggtgttaaaatatcatggggaacatattttaaaacaggtatagtgattactattcctgtactatttataacgttactaggactctattttactctaattattttttaa

SEQ ID NO: 2243 - DNA, 399 bp, Staphylococcus capitis
atgacggatataaagaatgaaacggattatcgaaatattccacgtgaaatgttagataggaatattccggctggtcgtggcatggttaaatgggcgccgttcgctacgctacccgaacaattcgaaactatccatcaatacatgattgatcaaaataaaatagatagaccagtactttcagacgatcaattagctcaattaaatatccgcttgcacgaagcattacaaaaatctcaacctgttaatataaaatattatgaagaaggttatattaattttgttaatcttaatatacatcgcattgattcattaaatcttgaaattgaagggataaagccaggtactacctatcatcagaaagtccctattttagatattgttgatattactttctcataa

SEQ ID NO: 2244 - DNA, 171 bp, Staphylococcus capitis
atgtggaactttattaaaggtttatttaaatttgtatttagcttattagctatcactacagttgtagtaggcgtaggtgtagttgcctttgcttatatcttcaaaaaagatttcgaagatattgaaagaaaaactaaagaaattgtttcagatattgaaaataataattaa

SEQ ID NO: 2245 - DNA, 1041 bp, Staphylococcus capitis
atgcaaaatgttcaatccgatatcatgacttttcgtggttctcattatgacttaggagtcgaaacagcgaaatggttacaaagaactcctttattaaaaaatcgtgaaaaagaatggaaaaaaagaaatccaagatttgatatcgatgtcagagaaacatataatatttttcaaatttatgctcctaaaatttgggacgagctaataggtatgcaagacgttttgaatctacctactaaacaaattatattaaattttggacactatcgttttactgatttaaaagatagtggttgtacagtttttaaagggaaagactatttactacgtaattatgattatcatccctctacttatgatggtcgatatttactatacaaaccaaatgatagtggtttagctcaaataggacctacttctagagtaactggcaggatggatggaatgaatgagtatggtttatcaatggcttataattttatgcatcgcaagaaaccagcaaatggctttgtatgctacatgataggtagacttatacttgaatattgtaaaaacgttaatgaagctatacaacttttaaaagaattacctcatagaagctcttttagttatattttaatggataaagaatctaattatgccattgtcgaagtaacacctcgttctatagatattagatatgaacctatatgtacgaatcactttgaattattaacacatgaaaatcgtaactacactaaagaatctaaagaacggttggagagagtgattaacaccacaagaagtgatttaagaaaagaaaatgcttttaaattatttaatgaccctcaatataatatttatagtaaattatttaagagttggtctggaacaattcacacatcgttatacgaacctcaaactttaacaacgtggataggacttggagaaaatagttctccgactaaaatagacttttatcaatggcttaaaaataatactctaacaataaatcaactaaacggaaaaattgataccgatttaacatttgccacatattaa

SEQ ID NO: 2246 - DNA, 837 bp, Staphylococcus capitis
atgaggaagcttttcattagcggtttaattatatttgcaattttctttatcagtggaacagttacttggtttgcttttgataaagctaaatatgaaaagcaaaactataataagacttttaataatcatttcagtcagttgtcagtaagtacaattggttctgaaataaacattgttaaaggtaataaattcaaagtggattatcaaggtgataacgatgtatatgtatctaaaaaaggtaaaatgctcaaagttaccgagaaacgtgctactaatagaggatacggattaaactttaatccttttcattataataagaaaaaactcaccattacagtaccagataaacaattgaaagatcttagcgctaaatccgtaataggtgatgtacatttgaggaattttaatgcatcaagtgccacaataataaatagtcgtcacttttctatggaacattcaaatttaaaatatttaaatgtggatggttcaaatagcttagcttatatttgtgattcatcagttaaaaaaggaaacttaaaaatcgatactggtaagttgactcttagccgtagcgaattccaagattcaatcttcctattgaatgagggagatattaatatgaataaaatgaaatcttcgaatgatattaaagcttcaacaaaaaaaggagatataaattataactttgaagctaagcctaaaaacacactacttaagttacatcctggacgtggtgaaaaagtagtcaataataataattttaaagatggtaaagtaggtaagagtaaaaacattttggaattttatacggttgatggtgatattgtcatcaattaa

SEQ ID NO: 2247 - DNA, 558 bp, Staphylococcus capitis
atggataaaattacttttttaaatgaattagaattagctttagatgatcttcctagacgagaaaaagataataaaatgtacgaatatgaaaatttattctatgaagaagagttaaaaggtagaagtgaagaacaaatagtgaataaattgaaagatccgtatgatatagcaaaagagataaaagctaaaagtgctatcagttatgctaaatcaaaaccaacaatccaaaacataactagagctattatagcctccttaagtctaggtatactttcattatttattatattagttccagtagcgattattgcatttctgattttacttttggtgtttacagcagtctgtttactattctccccattgatccttattagttattcgataattaatgggttttataattcactgagtaatatattattctctatctctttaacaggtttaggaattatttttattgttttaacattaaaaattattggattagtacataatttaatattgaaatatttatcatggtacattaaaacagttaaaggaagcgttaggaaatga

SEQ ID NO: 2248 - DNA, 486 bp, Staphylococcus capitis
gtgcgtatacaaaacagatgggtgatttcaaccctttttttaattggagcaattattctacttttcggaattatgtactatagaagtattaaaacagtagatttatccaattatactgtgaatgatataggtttaaatgatcgttttaatcaaaaagggtatgtcattaataaaaaaattaaattagatcgatttaaattttataatgacgaaaagcataaggatttaacggttaaagtgaaaaataaaaagcacattgttaaaggaattgttttaatcaaggataaaagtgttaaaacgaatttcggagttagaataggtgactcaattgatgatgttattaacgagttaggagatagttataaaagacatatggttggtaagcattataaatctattacatatactgaccgccaaaataaaatgaaactgaatatattatataaagatgatatcgtaaaaagaatagagtttttcagtaaatga

SEQ ID NO: 2249 - DNA, 564 bp, Staphylococcus capitis
atgactaatttagaaacttattttaaaaaaagtcagccactagaagagtacattgaccgaatgaaagataatagaaataatttattatcaatatacaaatcctttaaattaccagaagaagatgaccgtattacaaagcttaaagatgcaaattactcaaaggtattagtcatcactgaagattggtgtggtgatgcaatgatgaaccttccaatacttaaacgtgtaagtgaagaattaaatttagaagttagagtatttcatagagatgacgacacacgtttaattgatcaatatcttacaaatggtaagtctagatcgattcctatttttgtttttatgaacagtgcatatgaacaaataaccgtatggggacctagagctaaggaagtcgaaaaatttgttgttgatttgagaaatgataaattaccagataaagatcatcctcaatatgatgataaagttaaagaaactcacttacttatttcaaatagatttaaaacagattcatcattttggaaaaatgtatataactccataattaatcagcttttatataaataa

SEQ ID NO: 2250 - DNA, 732 bp, Staphylococcus capitis
atgagaagtttacagctagtcaagttcgatttaattagtattttaaaaagtcctttaacatatcttgcattaatactagttataggaatgacagtcttccaagcaagtatgcaagcagcatatagcaagtctcatgaagtaaataacgaaatggtcttcgtactggccaactggttattcttattcgcgggattattatttatcattaaaactatcactagagattattctcaaggtacaattcaattatatatgagtaaggtaagtagtcgtattggttatattaatgctaaaacaatttcaatgatattaatttctttcttatttactttacttcaatatcttgtaattattgttattcaagcatctacaaaaggttcaaatgttgacggagataaattcttaaataatatatggttttaccttatatttttcttattctttggcttattcttattattacttacgttaattattgaaaagccggcagtaatctttactttaggtattttcttattacttatcgttccatttgtgcaacctttaataggtttaattccaaatattggtgacgatattcaaaaatcatttaaatatattccatttacttatctcactgagaaaatgacagaggagattaaattctcgcattggcaatggtttatttcaattgcttcaatagtagtattatttgtagctaacatcttatatgctgctaaacgagatatttaa

SEQ ID NO: 2251 - DNA, 873 bp, Staphylococcus capitis
atgaaattagaacaaatcactaaaaaatatggtcaaaatacagttattgacgatataaactttgattttggaaatagccaaatagttggtcttataggtaaaaacggtgttggtaaaacaacattaatgaaagtcatgaatggtaatattattaattaccaagggaaagttgatttatctaaagatgaaaacgtaggttacttaatcgaacatcctaaactttatgacaacaagtcaggtttatataatttaaaattgttcgctcaagttttaggcaaaggctttgataaagagtattctgatcacattattgatgcttttggtatgagaccttatattaagaaaaaagtgaaaaaatattcaatgggtatgaaacagaaattagccattgcggtctctcttatgaataaaccaaaatatttaattttagatgagcctacaaatggtatggatccagatggatcaattgatgttttaaaaactatccaatcattagtcaaacaattagatatgaaaatattaatttcaagtcataaattagaagatattgaacttatttgtgatagagctgtcttccttagagatggtaactttgttcaagatgtgaacatgaaagatgggggaccagaagatagtacaatcattactattgaacatgatgattttaataaaactttagaatatctaactgaacattataaagtgcaacaatcacaaaaagatgctggtgagattatcattaaagctcaaagagactataaaccactattaaaatcattgtctgaacaaggtgtttatcctaagtatattgaaacgcgtaaaagttctctacgtgatacttactttaatattaatcaaagaggtgataaataa

SEQ ID NO: 2252 - DNA, 660 bp, Staphylococcus capitis
atgaaacaattattaataagaaatcttaaacttcgaagatggacacttttgatttatggtttattactcatattctttccgttttatcacttaatcgataggcaacatttaccgtatcttgttatttcaggacctataggtattatattaactattatatgcttagttgatgctggacatttatttagaatcaatcgtagattaggtggatctcagtcttacttattttttggtagtctgccagtttcaaggagagatttattaaatgcaaattacatcagttgcatagttttaacaattattggtgcaataatcataagtttatatggctatgaaacaagttcaataaagacagattcgataactttttctacaacctattcttttataatagcgaatttcttttcaatccctatcgcttttaataaaagtacagaacagaaacataaagacgtgccttatttagcatatgtatttggagttatcattgtattaccatttgtcttatctactttatttatcttaataaacgttttagttcacaaagatagtcatattccagttgtatattcgtacttcttaaattatggcctattgattattagcatcataagtttagtagtgaattatttaattcaaattagaaaaataaaacattaa

SEQ ID NO: 2253 - DNA, 900 bp, Staphylococcus capitis
atgaatgcgattgagcttaagaatgtaagttatcaaacaaaagattttcagttgaaagatatctcctttgaagttcctaaaggctttgttactggttttataggtgggaatggtgctggtaaaactacagttattcgtttaattatggatttaattcaatctaaaaatggtcaaatttctgtatttaatgaacaaatgaaggatagtgcagtagaaataaaaaataaaataggcttcgtttattccgaaacgtattttaatgacaaatggaccattaaaaagttagagaatatcgtcgccccgttttataaaaattgggatcataaaatttttatgagctatcttcaattttttcaattaccttataagaagaaaatcaaaactttttcaacaggtatgaaactgaaattgtcactagctattgcatttagtcaccatgctgaattattcatcttagatgagcccacatctggactagatcctttagttagaaatgaactacttgagattattcaacaagaattaattgatgaagataaaacagtcttcatatcgacacatatcatatctgatttagaaaaaattgcggattatatagtttatttacgtgatggtcaaattatttttaatgaatcacgagacactttatttgaaaaatataaaattattagtggttccaatgaagacttagatgtggagttggaggaattgttaatttataaagaagttagaaaaactggctacataggcctcactgaacactaccaaacatttaaagaattatttggaaatagagtagaaattaaaaatccatcaattgaagaactaatgatatatttagaaaaaaataaaaatcaactagatttcaaatatcaccaacgaaatgagaaactaatatga

SEQ ID NO: 2254 - DNA, 378 bp, Staphylococcus capitis
atgaaattaattttgaaaaacaacagtgaatatcccatttatgaacaaatcaagcaacaaattaaagaaaatattttgaaaggttatgttgctcctggcgaacaccttccatcaatgcgtgagttagctaaagatttacaagtgagtttaattactacaaaacgagcttatgaagatttagaaaaggatggatttgtgacaactataagaggtaaaggtacctttgtgaaggaacaagataactcaattcttaaagaaaagcagttctttgtaattgaaaatttggctaaaacaatgtcaaaagaagcaaaaacaattgggatgcctttagaagaattgactgaaatattgtctttaatttatgaggaggaagactga

SEQ ID NO: 2255 - DNA, 171 bp, Staphylococcus capitis
atgaagcacttaacaaaaatattcgttggactagcaattgtgctatttgtagtaggctattatcttcaagctacaggtcatgaagagcaaggaattaaattgctacttgctgcaattatgtttatgatttgtgcttttatcgatagaagtaataaacggagaaaaaaatag

SEQ ID NO: 2256 - DNA, 129 bp, Staphylococcus capitis
atgacactaatcaattctgggaggtgtagtataatgacgtggtggcaagatggtttaataacattgattacaggtggcgtacttgtcgtctttcgtatttggttagaaattaaatggaaagacaagtag

SEQ ID NO: 2257 - DNA, 1290 bp, Staphylococcus capitis
atgacaagccctttagccgaaaatttaaataacgaattacaacaatccaatccagaagtatatgacatgttatctgacttaggtaaagaaatgttctatcctaaaggtattctatctcaatctgctgatgccaaaagtactaaatataatgctacgattggtatggcaacaaatgatgaaggtaaaatgtatgctgattcattgaataatatatttaatgaattaactccagatgaagtttttccatatgcacctccacaaggtattgaagacttacgtgacttatggcaaattaaaatgctaaatgaaaatcctgatttatcaaaagaagcgataagtagacccatcgtgactaatgctttaactcatggattatctttagttgcagacttattcgtagatgaaaatgatactattttattaccaacgcacaattggggcaactataaactagtgttcaacactcgccataaagccaatatcgaaacatatcctattttcaatgaagaaggacattatacaactgattcactagtggaaactttagaaaactttaataaagataaagtaatcatgattctaaattatccaaataatccaacaggttatacaccgaaagctgaagaagttaaaactatcgttaatgctattgaaacacttgctaataaaggaacaaaagtgattgcagtagttgatgatgcttactatggtttattctatgaagatgtatacacacaatctatttttacggctttatcacaggtgaattcttataatattttacctgtacgcttagatggtgctactaaagaattttttgcttggggattccgtgtaggcttcatgacttttggtactaaaaatgaaataactcaaaatgtacttgaagcaaaagttaaaggtttaattcgaagtaatatttcaagcgggccattaccatcccaaagtgctatcaagcatgttctaaaaaataataaacaatttgataaagaaattgaggagaatattcaaacattaaaagatcgatacgaagttactaaggaagttgtttatgatgagaaatatgcagactattggaaagcatatgattttaattcaggttacttcatggcattaaaagttaagcatgttgatccagaaatattacgcaaacatttaattgataaatattcaataggtattattgccttaaatgatacggatattcgaattgcctttagttgtgttgaaaaagacgatattcctcacgtgtttgagtctatcgctaaagctattgatgatctaaaatag

SEQ ID NO: 2258 - DNA, 1608 bp, Staphylococcus capitis
gtgccacatattcaattagatgaaactaccggaaaagtcacactagggcaccaagcggtgttagcagaaagcgaagttgtagatactgaaacaaaaggtaatagtgatacaagtacagaaagtaaaataaatatgccacgaaaagaagtaacaccagagtcgccagctatcgaagcaaatgaagaacacgtcaatgttgaagttacaccaaaaggtaaatcaacgaaattagtaatcaattatacaaattcagaaggtcaacctgattcaattatcgcaatcaaaaaagaggaaatatggtcactcaataaagaagtgccacatattcaattagatgaatatactggaaaagtcacactaggccacccagttgtacaagcagaaagcgaagttgtagctactgaaacaaaaggtaatagtaacacaagtccagaaagtaaagtgactatgccacgaaaagagtcaacaccggattctccaacaattgaagcgaatgaagaacgcgtcaatgttgaagttacaccaaaaggtgaatcaacaaaattagtgatcaattatacaaattcagacggccaacctgattcaatcatcgcaagcaaaaaagagggaacatggtcactcaataaagaagtgccacatattcaattagatgaatatactggaaaagtcacactaggccacccagctgtacaagcagaaagcgaagttgtagctactgaaacaaaaggtaatagtaacacaagtccagaaagtaaagtgactatgccacgaaaagaagcaacaccagatgcaccaatagttgagaaagatgaaagtaaagtaaatgtgagtataataccaagcggtttatctacaaaaattgaaatcgaatatataaatccagaagggcaatctgatacaatcatcgcaagtaaagatgaaggtacttggagcttgagtaaagatataacgggcatcactatagaacccgctactggtaaggtaactatagactattacgttgtttatcctgaaagtgaaattactgcaagtgaagtacatggtaatagcgaccatagtaaattaaatagtgtgattatgccacgtaaagaaaatgcacctgaacctccaattgtgactgtaaatgaaaaagaagctatagttattataaagcctagaattgaagcaactaaagttgaaattaattttaaaaataaaaaaggtaaggcgatatatataaatgtttataaaaacggttcagagtggtctgtagaccaagttatagaaggtattattttaaacgctcacacaggagaaataaaaataactcatctagctgttaaagatggtagtgaaataatcgctagagagtataaaggcaatagtgacgcaagtatcgctattagtataaaagcacctactaaagttacaagtaaagaaagctataaaattaaatctttaaaagtgaaattgaatgatagaagtaatgaaatgatgtataccaaaaaggataaactcttagaattgccacatactggtgaaagtgaaaaagcaaataatacattactatccagtattctaattcttggtttaatgttattacgtaaatcacgtaaaaaagagatttaa

SEQ ID NO: 2259 - DNA, 171 bp, Staphylococcus capitis
gtgcttgctgacttacttgtactctctgatgctttttgtgaattactctcactgattgattttgacgtactttcagctgctgatttactttgcgaatctgcaatacttgtactttttgatttactctcactgattgaatttgactcactttccgatgttgatttgctttga

SEQ ID NO: 2260 - DNA, 378 bp, Staphylococcus capitis
gtgcttgttgatgcactctctgaatctgctgtacttgttgatgcactctctgaattcgccttacttgttgacgcgctttctgaattagctatactattgctttttgatgttgaaaggcttttacttgaagaagtagatatggaatcactagtactatttctagtaacatcatacttaaatgtagacgttgatgtatttccagtctcatcctttgaagtaatagttatggtaaaactacccattttacttggcgtgccactaatcgtattcgtattcgaatcaaatgtaagaccatcaggcaagcctgatacttcgctaactactttagtcccactattatctgttgtactaatcgtaattggattgattggattataa

SEQ ID NO: 2261 - DNA, 474 bp, Staphylococcus capitis
atgtcaaaaaaagaaagagattttaacaagagtcttggccaagaaaaagcccgggtcaaactctataagtccggtaaaaactgggttaaagcgagtattagtgaatttgaattattaagaacaatgggagtgccttttttaagtaaaaatattaaaaaagaaagccaaactaaagataataaaggtagtagattcaagaagaatgctgctaagacaacggccctagtcggcggagcgttcacattcaacatgcttcaagatcatcatgcgttagctgcttctgagacgccaatgacttcagaaatttcatctaatagcggaacagttgccaatcaaaactctactactataagaaattcgcaagcaaaggtaacgaataacacaacgtcaaattccacgcagcaaagtagtgaaatcaaaaattctactactaaaacatcatcatcagaagtgataaataaaaaacgaatctag

SEQ ID NO: 2262 - DNA, 1329 bp, Staphylococcus capitis
atgaaacgttttttaaaaatacataaacatactctaagagaaaatacattgataagtcttatttttataatgagtttatataataaatggttgctacttttagcgattattttatcggttctcttgttaaaaagaggaatacttggagtgatccaacttatttacctctatactacaagaaatttaatgatttcatttttcgatacgagtgatagcgcgtatgatcttacatatgcgatttacattctcatttatgttataggaatatttttcttaattagacatatcaaacgttgggtgagaagctatctgatatttacctttgctctagcttcaatcactttgatgctaatttatatcataatgtctttgattacatctaatgatcctctttattcaataactaaactcattaattactttattccattaatcattattgttactttagtttatcttatcaaagaagtagatgaacttattaaatggctagcgaatcaagttgtaacattcattctttttacattaatacctttagtgatgtcattaataaaagttctttctcaagaacaatcatttaaagggttcttcaatgactcaaatacgtttgcagtctttcttatattaggtttattaactctcattatttcatctatgaaatatcataaatttaacttcttcgtcatgtttgttatgatgtcgggaatttttgaactttatgtaactcattctaagttggcatggtttgtatttatagtatgtttatttctctctttattgcttttaattttgaaaaagcgttataaatatttaacgattcccttaataatttcaataatcatattaagtatctttcaaccgtcaattcattatttaattaaaagctttgtgttaaatggtaactcagttaagagtgttttaatgccaaaggataatcaaattaaaaatatcgagaatgtgctagaaacacatatgcttatggggaatggatttggtatgtcattgcacggtttgactaaaaatagtgatatagtcgcagggaatatggtttttgaacttatgatgtttactggggtaattggtttaacttgttatgtgatatatgtattaaaagttatgcttttagccacatatatgtttaaactcacgtttgtgctctttatagcaaccttactgactaataccatagaaatcgtaatgtttaacgcaataaatatcggtgctctttgttacattctttgggggatttatctcaaggatggtttacataaggatagtaagaataaaatggttaaaaaatctttagaggttgataaaagaaatatataa

SEQ ID NO: 2263 - DNA, 654 bp, Staphylococcus capitis
atgatgagtgtactagtaattggttcaaatggtgcagtgggcagaaaagttatttcgcaattaaaagacactgaacattcctctgtagcacttgtacgtaaagaggaacaagtaagtgatttaaaagaactaggtgcagataaagtcgttgtccaagatttagaggaagatttttcaagtgcttttgaaggcgtagatagtgtcatatttacagcaggttcaggtggtagtactggtgcagataaaactttattagtagatttgtggggagctaaaaaagctgtggactacgctactaaacatcaagtgaagaaatttgttcatttaagtgctactgatagtgttgaacctgataaagaaactgatgtaatgaaaccatatgctgtagctaaacatttctcagatctatatattgaaaattcaaatttaaattataccattgtccaccctggtccacttcaaaatgaagaaggtacaggtaaaattgatgctgaattagatatcgcaagagatcctaatagctatacaattcctcgcgaagacgtagcaactgtattaatcgaagctcttgatgcgtcagcagttgaaggtaaagatatcttcattcaaacaggtcaaactgatattaaggatgcaatcaacaatataaaataa

SEQ ID NO: 2264 - DNA, 810 bp, Staphylococcus capitis
atgaatgaacaaaaatacaaactcaattcaaagagatatcgtgagagaattataaaaaattggattattgcagttattgtagcagcgattattatttgggcatttgcaggtatgccagctttagaattaaaaagtaaatcgattgaaatattgaagtccatattcaaaggcttatttcatccagatctaggctacatatatattcctgccggtgaagacttacttagaggactattagaaacatttgcaattgcagtaatagggacattcattgcctctattatatgtattccatttgctttcttaggtgcaagaaatatggtgaagttaagaccagtaactggcataagtaaatttatcttaagtattattcgtgtatttccagaaattgtaatggcacttatctttatcaaagccgtaggaccaggttcattctctggagtacttgcattaggtattcactccgttggaatgttaggaaaactttttgttgaagatattgaaagtttagattttagtgctgttgaatcattaaaagctagtggtgctaataaaactaaaacattaatatttgcagtgataccacaaatattaccttcatttatatcattaattctttatcgatttgaactaaatctacgttctgcctctattctaggtctaataggtgcaggaggtattggtacgccgttaatctttgcactccaaacacgttcatgggatcgtgtggggatcatcttaataggattggtgattatggttgcgattgtcgacctaatttccggtgctatccgtaagcgtattgtttag

SEQ ID NO: 2265 - DNA, 807 bp, Staphylococcus capitis
atggcaacacctacatcatcaacgagtaaatatgatcaatatttaaataaaaagatgtcaattaaaacaagctttacaattattcttatagcggctctcatcatatggagctttatttatacaggttttagtattggagatttaatgataggtattccacaaattggtgcattctttggacagatggtaccaccagattggagttacttagatcaaattacgaaaccaatgttagatacaattcgtatggcaattgtaggcacattcttagggagtattgtatcaatacctgtagctcttttatgtgcaagcaacatcgttcaaactaaatggattgctattccagcacgatttattctcaatattgtacgtacaattccagacttacttttagcagcagtgtttgttgcggtatttggtattggtcaaattcctggtgttttagcattattcatattaactatctgtatcatcggaaagttactatatgaatcattagaaacaattgaaccaggacctatggaagctatgacggctgtaggagcaaataaagttaaatggattgtctttggtgttgttcctcaagcaatttcttcattcatgtcatatgttttattcgcttttgaaattaatattcgtgcatcggcagttttaggacttgtaggtgcagggggtattggattattttacgatcaaactctaggtttattccaatacaagaaaacggcaatgattattttatttactctcctcatcgttgtcattattgattttgtaagttcgaaagtgagggaaaaattagcatga

SEQ ID NO: 2266 - DNA, 774 bp, Staphylococcus capitis
atgagtcaaattgaattcaaggatgttaataaagtatatcctaacgggcacgtggggttaaaaaatattaatttaaacattgaaaagggtgattttgcagttattgttggtttatcaggtgcagggaaatcgactttgctacgatctgtcaatcgcctacatgatatttcttcaggtgatattacaattgatggacaatccattacgaaagcgcgtggcaaacagttattagaaatgagacgtaacattggaatgattttccaacatttcaatctcgtaaaacgttcaaccgtactaagaaacgtactaagtggcagagtgggatatcatccaacttggaagatggtactcggtttattccctaaagaagataaaatcaaagcaattaacgccttagagcgagtgaacattttagataagtacgatcaacgctcagatcaactctcaggtggacagcaacaacgtatatcaatcgcgcgagcattgtgccaagaatcagcaatcattcttgcggatgagcctgttgcatcgttagaccccttaacaacaaaacaagttatggatgatttaaagaaaattaatgaagaattaggaattacaatcttaatcaatttacactttgtagatttagcaaaggaatatggatctagaatcataggtcttagagctggagaacttgtctatgatggaccagcaagtgaagcggatgatgatgttttcaatcatatttatggtcgatcaattaatgaagatgaaaagttaggggtggagtaa

SEQ ID NO: 2267 - DNA, 972 bp, Staphylococcus capitis
atgagaatgaagaatttgaagtttttagttgtacttgtattatcggtagttatctttgcggcagcgtgtgggaactctagttcattagataacaataagaaaagttcagatagtggatcagattctggttcaagttcgggagattataaacctaaagaattaactgtacagttcgtaccatctcaaaatgcagataaactcgaagcgaaagccaagcctttagaaaagttattatctgataaattaggtattcctgtaaaagtatcagtatcaacgaattacaacacaattgttgaggcaatgaagtctaaaaaagtagacgttggtttcttaccaccaactgcttatactttagctcatgatcaaaaagcagcagacttattacttcaagcacaacgttacggtgttaataaagacggttcatctaataaaaaattagtggatgattacaaatctgaaatcttagttaagaaaaactcaggaattaaaagcttaaaagatttaaaaggcaagaaaatcgcactacaagatgtaacttctacagctgggtacacattcccattagctacacttaaaaaagaaacaggtatcaatgctacaaaagatatgaagattgtaaatgttaaaggtcacgatcaagctgttatttctttattaaatggtgacgttgatgcagctgcagtattccaagatgcacgtactatagttaaaaaagaccaaccaaatgtctttaaagatactaagattttaaaactaactgaatctattcctaacgatacaatttcagtacgtccggatatggataaaaaattccaagagaaacttaaaaaagcatttaaagacatcgctaaatctaaaaaaggtcacaaaatcattagtgaagtatattcacacgaaggatacacagatacaaaggattctaacttcgatatcgtaagaaaatatgaaaaagaagttcaagacatgaagtaa

SEQ ID NO: 2268 - DNA, 1560 bp, Staphylococcus capitis
atgaaattatttaaagtgttaagttcaactgttttagctactgccatttctgtaactacgattcaatcagctcatgcaacgacacaatctacatcttcaagttcgggacaatctgaccaaaccgtgcttttcgataactctcatgcacaaacagctggtgccgctgactgggtaactgacggtgcattttcagattatgcagattctatgaagaacaaaggatataacgttaaagaattagatggagaagcaaatattagtaatgaaacacttaaaaatgctcatattttagtaattccggaagctaataatccatttaaagagaaagaacaacaagctattgttaactttgtaaaacgtgggggtagtgtcatatttatttcagaccactacaatgcagatagaaatttaaatagaatcgattcatccgaatctatgaatggatatcgtcgtggtgcttaccaagatatgacaaaagatatgaatagtggagagaaaaactctaaagcaatgcaaggtgtgaaaagctcagattggctttctaatcaattcggcgttcgctttagatacaatgcattaggcgatttaaatactcagaatattgtatctagtaaagagagctttggaattactaaagatgtgaaatcagtatctatgcattctggttcaactctagctattactgatcctgataaagctaaaggtatcgtatatatgcctgaaaacttatctaataaacaaaaatggtctcacgccgtagaccaaggtatttatagtggtggcggtactaaagaaggaccttacatagctatttcaaaagttggtaaaggtaaagctgcatttattggagatacttcacttgtagaagacagttctcctaaatatcaacgtgaagataatggcaaatcgaaaaaaacatatgatggctttaaagaacaggataatggaacacttttaaaaaatctcacaacttggttaggaaaatcagatagccatgaatcaatgaaggatacaggtgtcaaaattgataataaaaccccattattaaactttgaaaaacctgaaaattccactgaacctcaacatgaaccttggtcacagccagaaaaaggctataaatggtatgaccgttcaacttttaaacctggtagttacggtagttcgcaaagtggttctgataataatgatgaaagtagctctaatgacaatagcaactcacatcatggccaaactggtaacgctgaattcaacctacctcaaagtattcagcccaaccatccatttaaagtaacagtaaaacttaaaggttatgatgcaaatagtacaattaataatttaacagttggtatttataaagatggaggtaaacaaatcggtagcttctcatcagatgggtcccaatttagtcaaccaggctatagtaaagatcaaactgttaaaacggatagtaatggagaagcaacattaacacttactgctaaagtttctgaagatattaatggtgctcatattcgactcaaacaaggtaaaaaagtagttacaactacagacattcattaa

SEQ ID NO: 2269 - DNA, 1536 bp, Staphylococcus capitis
atgactcaattagcattttatgttgtaagtgatgtgcatggatttatctttccaactgacttctcacatcgtgatgttgaattacccatgggattattaaaagctaatcatatcattgaacaagactgctctcactatgacggcagtataaaaatagataacggcgattttttacaaggttcccctttgtgtaactatttagtttctgaattagctactagtcgtccattaaccgatatttataatcgtttaaattttaatttcggtacaattggaaatcatgagtttaattacggtctaaagtatcttaaacaaaccatacatcagcttgattatcctatgctatgtgcgaatattttagaaaatggagaaccgtttacagggcaaggtatcacttacataaaaagtcaggggttaactataggtgtaattggcttaacaacgcagtttattccacattgggaacagcctgaatacattgaaactttgacatttcaaagtgctgttgaaactctttcttcccaattacctgaattgcgaaaacaaagtgatgtagtagtcgtaagttatcatggtgggtttgaacgtgatttagaaactggtgagcctacggaagctctgactggagaaaatgaagcttctgaaattttgcgtttattcagtgatgacattgatgtattaattactggtcatcaacatcgtgatattgctaccatttacaatcaaactgccgtcatacagcctggtacaagagggactaaagttggaaaaatcgtcttaaatattgaacatgacaatgacgttcaaatagagaattgtcacttattagatgtcgaggattgttcaagttttgaaataaatcaacaagatcaaaatttaagagttcatttagaagattggctagataagaaagttgcaactttacctacttcaatgcgagttgagaatgcttttgatgctagagttaagcctcatccgtttattaatttactaaactacattttacttgaaagtagtggcgctgatattacctgtactgcccttttcgattctgctaaaggcttcgataaaaatgtgactatgcgtgatatcatcaacaactatccatttcctaacacatttaaagtaatcgaacttacaggtcgtgatattaaattagctattgaacggtcagctgcttatttcgatttacatgatgaggaaataagtgtgagcgcagacttccttgagccaaaacctcaacattttaattatgatatctttgcgggaatagattatacgattcatgtaggtcgtgctctaggagaacgagtgagtgatttatttgtgaatgggaagcctttagatgaacataaaagctacactatttgcgtcaataattatcgtgctgttggtggtggtaattataatatgtatgaaaataaaccaatcattaaagacatccaaattgaaggcgcacaactattaatcaattacttatcaactaacgacttaagtcatatacctaaagttgtaaatttcaaagtcgtaaaatga

SEQ ID NO: 2270 - DNA, 378 bp, Staphylococcus capitis
atgtcagaatttaacctttttataaatgacatcgagaatgaagcgcatcgtgaaaaattgagacacttatttgaatggattgaaacacaatattcagatttaacaccagtagtgaaatggaatcaaccaatgtacacgtacaacgaaacgtttataattgccttcagcaaagccaaacaacatttctcaattatgcctgaagcagcttgtttgaaacaatttaagcaacgtgtaactaacgctggttacacacaaactgaaaatttatttagaatcaaatggaaccaagagattgattatgatttaatcggtgacatgattaaactaaatatggaagagaaaaaagattatacgaaattttggagagatcataagtaa

SEQ ID NO: 2271 - DNA, 1170 bp, Staphylococcus capitis
atgagagaaaacaaaatgatgttcttcatattcatgttaggaactttcacagtaggtatggcagaatatgtagtgaccggtttgttaacacaaattgctgacgacatgaaagtctctatttcaagcgctggcttactaataagtgtctatgcaattagtgtagctgtgattggtccattcatgagaatattcactttaaaagtgcatggacatcgattattgcctattctagtggctatattcattgtcagtaatttagtgggtatgttagctcctaattttaatatactgctattatctagattgatgtcagcagcaatgcacgcgccattctttggtgtatgtatgagtgtagcggctgcggttgctcctcccgctaagaaaccacaagcaattgccttagttcaagctgggttaactatcgcggtaatgattggtgtgccgtttggttcatttcttggtggattcgcaaattggagaacagtatttggtgtaatgatcctattagctatcattacaatgttaggtatgattaaatttgttccaaaagtatcattaagtgcaggagccaatattgctaaagaattaaaagtatttaaaaatccacatatccttatagttatttctatcattgtatttggatatagtggcgtatttacaacttatacttttatggaaccaatgattagagatttctcaccttataaagtggtaggccttacagtgtgtctatttatgtttggtcttggtggcgttatcggtaatttagttactggaagtattccagaacataaattaactaaaaatctctatcttacgtttttattattattcatcacaattattttatttgttactgttgtgcataacgcagttttagcgttaattgtatgtttcatgtttggttttggaacttttggtacgacaccattactcaatagtaaaattatattaagtgctcatgaagcgccactacttgcaagtacattggctgcatcagtattcaatgtagcgaatttcttaggcgcaatcattggttcgattctattatctataggtttaccatatattcaaattacatttatttcaggtggtatcattattctaggtatcattcttaactttcttaataatatttatgaaaagaaacacattacattcaatgattaa

SEQ ID NO: 2272 - DNA, 132 bp, Staphylococcus capitis
atgagttcaacacccacagagaaaaagaaaaaacgaaaatttgaatggttttggtggttcgtggatattattatagatcttatttactatttaattattggtctagttaaggtatttaaacaatggaattaa

SEQ ID NO: 2273 - DNA, 645 bp, Staphylococcus capitis
atgaagaaagtcactttattaagtagtgcagtattagcaggtacgattgctttatcaggcgtaacaggagtagcaaatgcgagcgactatcatcatggcaacttcgctacttataaggaaaaagttgaatcactaaaaaaattaaaaaaagatggagctattagtaataaagaatataaaggtaaaatggaagctttaaaagagtttgataaacaaggacgtacgaatatgggatctagaccatatggtggtatgcctcctaaaggtatgactagtgagcaatacagtgaattagaatataatgttggtaatgctaatgagatgcctaactcagtatttaacaagagaatcgatcgtgaaacacaaaaaattgcagataaatacaaaacaacgatttatgcacctcaaaagacgttcaaacctcatactcaacaaactaaacaaggggaccgtccatacggtggtgtagcacctaaaggaatgacaagcgctcaatatgcagaattagagaaaaaagtaggaaatgcatcacaaatgtctaaaaaagcatttgcgaaaaaagtagaccaagaaacacaaaaaattgcagataaatacaaaacaacgatttatgcacctcaaaagacgttcaaaccacataaataa

SEQ ID NO: 2274 - DNA, 561 bp, Staphylococcus capitis
ttgaagaataagattattgataatgcaataaccttattttctgaaaaggggtattacggtactacacttgatgatatcgctaaaagtgtaaacatcaagaaagcgagtttatactatcattatgacaacaaagaagaaatttaccgtaaaagcgtagaaaactgttttaattactttaaaactttcattcttgagagcaacaacgattctaactactctatagatgggctttaccagtttttatttgaatttatatttgatattgatgaaaggtatatcaggttatacgtccaattatctagtgcaccagaagagttatcttcagagatccataatcatctcttaggagttaatgaagtgctagatagtgaaattataaaatattatgattcctccaatatatctatgggtaaagaagattttcaaaatttgatactcctttttttagagagttggtatctgagagcgtccttttcacaaagattcggggttactgaagaaaataagaattgctataaagaccaagtatattctttattaaatgtgtttataaaaaaataa

SEQ ID NO: 2275 - DNA, 1239 bp, Staphylococcus capitis
ttgcacttttttaactttttacttttttaccccatttttatgtccatttactggattgttggggcgttttattactttttcactaaagaatttccttttagtaagaagaaagtaatctctaaaaacaaggaccagattgaaggtatctctttcttgctggcctgttacaacgagagcgaaactgttagagatacactctcaaatgtgttggctctcaactatccaaaaaaagaaatcatcatcataaatgatggtagttcagataataccgctgaaattatttatgagatgaagcaacatcacgactttaaatttgttgatttacaggtaaatagaggaaaagctaacgctttaaacgaaggcgtcaaacattcttcatatgattacgtcatgtgtttggatgcagacacaatcgttaatcaagatgcgccatattatatgatggataactttaaacaagatcctaaactaggtgctgttacaggtaatccacgtatacgtaataaaagttctatattggggaaaattcagacgatagaatacgcaagcttaattggatgtatcaaacgtagtcaatcacttgctggtgccattaatactatttctggagtgtttacattatttaaaaaaagtgcacttaaagaagttggttattgggatactgatatgattactgaggatattgctgtttcgtggaaactgcatcttgcagattttcgtattaattatgaaccacgtgccatgtgttggatgttagtacctgaaacggttggggggctatggaaacaacgtttgcgatgggctcaaggtggacatgaagttctattaagagatttttgggcaacaatgaaatctaaaaaattatcgctctatatcctcatgtttgaacaaatagtttcaattatttgggtttatatgattttgctgtacttagcatttctattaatgacagcaaacttcttagattacacatatttgaagtatagtttttcaatatttttcctatcatcatttacgatgacctttatcaatattattcaatttacagttgctttgtttatagacagtcgctacgaaaagaaaaatatcgctggtttaatatttgtgagttggtatccgacaatctattggattatcaatgccgccgttgtcattttcgcatttcctaaagcattaaaaagaaagaaaggtggctatgctacatggtcaagcccagacagaggaaatatccaacggtaa

SEQ ID NO: 2276 - DNA, 120 bp, Staphylococcus capitis
gtggagaatattgaaatttataagatctttgaattaatgggattattttcaattatcattttcctattcttcacatttagtttgattttccaaaaaattaagaaaggtcgtgaagtatga

SEQ ID NO: 2277 - DNA, 864 bp, Staphylococcus capitis
atgaaacctttcaaattcatcttcattagcttagtagtgatgttagtaatgacgaatgtaacacctagctttcatcattatgcacaagccgatgaagaccacaagaagttaaagtataagaagaatagcgctttagcgttaaactatcacagagtgagaaaaaatgacccgttaaatgactttattacgattttctctagtagtaaggaaattaaaaattatagtgtgacagataaagaatttgaatcacaaatcaagtggcttaagaaacatgatgcaaagtttcttactttgaaagagtttttgaagtataaacagaaagggaagtttccaaaacgtagcgtatggataaatttcgatgatatggataagacaatttatcaaaatgcttatccagtactaaaaaaatataaaattcctgcaactggcttcgtgattacaggacacgttggagagaagaattttcataatttggatatgatcacgcagcctcaattatcaaaaatgtatcgttcaggactttgggactttgaaacacacacgaatgatttacattctcttaagaaaggaaataaatctaaatttctagaggcgtctaatgtgtctgctattaaagacattgaagtaagtgaagatgaactaaaatcgaagtttggtaaaacacaacatgccattgcttacccctacggtctaatcaataatagtaaaattcaagcttctaaagatgcaggtatgaaatacggatttacattgaaggagcaagcagtcactcctcatgataataattataaaattccacgtattttagtaagtaacgacgcattcgaaactttaattaagaaatgggacggtttccatgaataa

SEQ ID NO: 2278 - DNA, 1074 bp, Staphylococcus capitis
atgaataaaaatagacttgaattagtatatttacgtacttttatttgcatcattattatagtgacacacttattaactcaaatcacactagaacatgaacatttgtcagggagttctcttgttctacaatattatattcggaatatagttatctttggaactccaagttttattgtattatcacagttgctaacaacattaaattataaatctgtaagcgtacaatatttgatttctcggttcaaatatatctttattccatatttattagtgggattattctatagttatagtgaatcattattgactgcttcttctttcaaaaagcaattttttgaaaatgtaatattagggcaatggtacggttatttcatcattatcatcatgcaattcttcatattatcttacttaatttataaaattaattataaactgtttaacagtaagatattattagtattagcatttgtagtacaacaaacatttttatactactttaatcatagtgatgctttccatacatttgtaaaccattactatcctttaagtgaaaatacgatgatattaggatggattttttatttctttttaggtggtttcataggatataactatcaacgtgtcctatcattcttagaaaaatatctcgttatcatgattatgttagctttaggttcatatgtattatttatagcactttcaggtgatgattattggaatgtaacaagcttcacttattcacttacgttatacaatagtattatgttctttgtgcttattggcatttgtgcgcattttaaaacgatgctattaaacacggttcaaatgataagcgcattttcgtttttcatctatttattacatccaattatcttagattcactatttgcttataccaatatctttgaagataacacggtcgtcttcttagcggtttccttgttaatgattatcggaatatgtattggtgttggcatgatgttaagagaattttatatttttagatttgttattggcaaacaaccgtataagctacaatttaataactatcaacctagttggaaatcacactaa

SEQ ID NO: 2279 - DNA, 2370 bp, Staphylococcus capitis
atgaaaacaagacaaaacaagtatagtattcgtaaatttagtgtgggggcatcatccatcttaatcgcagctttattatttatgggtggaggctcagcacaatcggccgaacaaaatcaggaacagggaaatcctgagaaggcaacagcacaatctattggggatgaaaatgaagattcaaatgggcaacaggcgacagaggatgacgcgtctcaatcagctaaagaaactacgtctgaacagccaaatgttgaaaaagataatagcgaaaatgctaatgataatcaaacaagcttacataatgaaaataatcaaaacactgaacaacaagattcagaaactgaagaacaaaattcagcacaaaatacagaacaaacgaagtctactgaagaacaaggtaaagaggaacaaacttctgcacaagatgcaactcaaaattcaactaagtcatcagatgaacaagtggaatctagtgaggattcacaagtagataatagtaaaaaggacgcaaagcaagaggatgctaaccaagcggactcaaaatctgaacaaacagaagaacaaacggatgttcaaacacaaccaacagaaaaatctgatgaagataaatcaactcaatctaaaccagaagtgaatcaaaatcaagaaagtgaaaaagattcatctgagactcaagataatctaaaacaagacaatccaaaaactgaagataaaacagaagaagtatcagattcacaaaaagattcacaaaaagtcactcaaaataaccaacaaaaagacgacttatcttcagataaagagacaactcaatcagacagagcagtaaaaaatcaagctaaagatgaaactgaagcttctcaaactgataaagatcaaactcaaactcaaactgcgactgcaactgcaacaaaaccaaaagcatcacaacaagataaagaaaatgatgcagaagaacagcaaaaagtgtcagcgcaagacgaagcaacttcagaagagactccagctgaaacagataaccacaaaacgcaagcattgagtgtaagtgacaaagcaaatcctaaatctgagaaagatgaatcatctaacaatgataaagattctaaagatggattaggtacgcttaagagtaatgctgtagctactacaaataaaaaatctaagcaacaaacaacgaaacaacagaaagatcaaacaaataaagcggctaaacaaagccaatataaaaatcatgatccaatcatcttagttcacggtttcaatggtttcactgatgatatcaatccttcagtgcttgcacattattggggcggcgataaaatgaatatccgtcaagatttagaagagaatggttataaatcttatgaagcaagtattagtgcatttggtagtaactacgatcgcgcagttgaactatattactatattaaaggtggccgtgtagattatggtgccgcacatgctgcgaaatatggtcataaacgttacggtaaaacatatgaaggtgtatacaaagattggaaaccaggccaaaaagttcatcttgtcggacatagtatgggtggtcaaacaatccgtcaattagaagagttactaagaaacggaaatcctgaagaagttaaatatcaaaaagaacatggtggcgaaatttctccattatataaaggtaataatgacaatatggtttcttcaatcacaactttaggtacaccacataatggtacgcacgcatcagatgaattgggtaatgaagcgctagtacgtcaagttgtgtatgatttaggaagagcattcggtaataaaaactctcgcgtagactttggattatcacaatggggtcttaaacaaaaaccaaacgaatcacgtattgattatgtgaagagagttcaaaaatctaaattatggaaatctaaagataatggtttcaatgatttaactcgtgatggtgcgactgaccttaaccgtaaaacatcattaaatcctaatattgtttataaaacatatacaggtgaatctacgcataaaggtctatttggtagacaaaaagcagatttaaatcttttcttcccattcacggtaactgccaatgttattggtaaagctaaagagaaagaatggagagaaaatgacggtttagtatcagttatttcttctcaacatccattcaatcaaaaatatgttgaagctacagaccaaaatcaaaaaggtgtatggcaagtgacaccaactaaacatgactgggatcatgtggactttgttggacaagatagctcagatacagtacgctcaagagaggaactacaacaattctggcatggacttgcagatgatttagttcaaagtgaaaaactgacatcaactaaaaaagcataa

SEQ ID NO: 2280 - DNA, 786 bp, Staphylococcus capitis
atggaactatcgcagtttgaaagctatttaaatattgattcttctcgttataacaatattgataaagcctcgctagattattatatggaacgttatatgatgactgttccgtttgaaaatattaacgttcaaaatcaagttcctatctctgttaatattaatgatttattggacaaagttataaaccaacatcgcggtgggttctgttatgaaatgaaccacttgttcggaacgtacttagagaaaaaaggttttgatgtccatcgagcttctggaacagttcatactccagatggcggtgttgctttagaaggctcacatatgtctttatacacaattttaaatgatacttattatgtgacagacgttgggtttggtgacttacctctacatgcaatcccgatttcacatccgtctcaaccagtgagtatttctgatatcaatggagaatttcgcgcaatttttgacaaagaagactgctatcatgttcaaaaattgaaaaataataaatggactactctatatcacgcctacttagagcgtcaatcaattcaagatttcagcgataaaatcatttataacgagagtaatccaaactctatctttgttaagcagctattaatcacacaaccacagtcatttggacgtgcgacgatgacacatcaaagtcttacgttaacttcacaaagttctaaagaaaaatgtgaggtatcgtccgacaattataagtattttctaaagaaatattttaatcttaatatcacgattgatagacttgaacagtag

SEQ ID NO: 2281 - DNA, 2256 bp, Staphylococcus capitis
atgtcacaaattgaaatcataggcgctagacaaaataatttaaaaaatatcgatgttaatataccgaaacatcaattaattgtatttacagggcggtcaggctcaggtaagtcttcactagtatttaataccattgctgctgaatctgaacgtctattaaatgaaacatactcaagttatgttcaacatcaactcacacaatatgaaaaaccagacgtcgatcaaatcaatcaccttcccgttgcaatgattattaatcagaaacgcctaggtggtaattcacgttcgacggtaggaactatttctgatatttatgcttctgtgagattgttatggtcaagaataggagaaccttttgttggttattctgatattttctcatttaataatccgaaaggtatgtgtgaaacatgttcaggattaggttatgttgaagacattgatttaaatgagttacttgattttgataaatcgctcaatgaagatgccattaaattcccgtcgtttagacccgatagttggcgaggtaaaagatatctttatacaggtctatttgataatgataaaaagttaaaagattatacaaaagaagaattggatacttttttatatacagaacctacaaagttgaagaatccgccatcaaattggcctagaacagctaaatttgaaggtctaattcatcgtttcagacgctctttcttactaaatgataactttgagaagaaacgcttcaaagctgatattgatcgagtcgttactaagcatgattgcccttcatgtcatggtaaaaggcttaatgataaagtgttgagttgtaaaatcaatggcttaaacattgctgaatttacagatttacccattgatgaggctgttcattttctagaaaaaatagattcaaacacagcaaaagtgattatcgaacctttaaaacaacaactacaagcattaagctatataggtttgaattacctaacgttatctcgtgaaacgacaacgctttccggtggcgaatctcaacggataaaacttattcgccatttaaatagtccattaagtgatttagtttacatcatcgatgaaccgagtgtaggacttcacccagaagatattcagagaattaatgacatgattgaatcacttaaacaaaaaggtaatacggtgatcgttgttgaacacgaccctgatgttattcaaacggctgaccacattattgatataggtccgaatgcaggcaaagatggtggagagattatgtttgaaggaagttatcaagaccttctcacatctcagacgagcacaggtcaagctttaaacagaacacatcaacttaaagaccatcctagagcaactcatgacatgtttaatattgagaatatttcacgtaacaatttaaatcatatttcaactcaattaccaaaacatgcgatgaccgtagttactggtgtggctggctcaggtaagagttcccttatctcagcagcctttgaacaagagcaacgtgctatcttcatcgatcagaaaccgcctcacgcatcgaatcgctctaatttactcacatacttagatatcttcgatgaggtaagaagtttctttagtcaacatactggtatgaagaaaagtatgtttagctataattctgagggcgcttgccctgaatgtaatggtaaaggcgtacttaagaccgaactcgcatttatgccagacttttctcaagtgtgtgagatgtgtggtggcacaagatatcgccctgaagtattacaggcgaaggtagagggatattctatcgcagatatacttgcccttactgtaagtgaagccatctctcaatttgaaggtcaagacagtatcactcgtccgcttcaagcgttggctaacacaggacttcaatatatgacattaggacaatctttagatacattgtcaggcggtgaaattcaacgcgttaaactaagtcgctatttaactgaagatgtacacgattatatttttatttttgatgaaccaacgacggggcttcatgaagatgatttacctgtactgattgattgcttcaatcatttaattgacgatcataacacggttattcttctcgaacataatttaacgatgatgacacaagctgactggtttatcgatataggcccttatgctggagataaaggtggacaactattgtatagtggtcagcctgcgggacttttaaatattaaaaattcagtaaccgctaaacacttaaaaagatatatcctttaa

SEQ ID NO: 2282 - DNA, 591 bp, Staphylococcus capitis
atgaagagtaaagatttgcgtgtagaaaaaacagaaaaagctctattagatgctttatttgaaactttaagaacaaaagagttcaatcaaataacagtgcaagatttgtgcgataaagctctcgtaagacgttcaacgttttaccgacgttttgatgataaatacgatttgcttaagttattaatacgaaaattaattttcagagtaagagagaagcatttctcaacattaaaccctgagaatcctagagctcatttcgaaaaggtcattcacgaatcattacaatatctatataatcataagtctattgttcaaaatgtattaacattagcgctttatgatgaagtgaccgatattatattcaaacaattatatgaagggatgaaagcacaaatacagtttgaaatacagcacggcgttgagttcgatgtcgatatagaaatacttgctgaatttataaccgggggaatattgagaacaatgtatgcttggattcaagatggtcaagaacgttcgatcaatgagttaactaaagaaatggtgaccctacttgatggcgtgcataactatcatactaaaggtgaaaattaa

SEQ ID NO: 2283 - DNA, 588 bp, Staphylococcus capitis
atgaatagcaatgatttacgtgttaagaagacacaacgtgctctaatggattcatttttagaattacttaaaactaaaaattttagtcagattacagttcaagatttgtgtgatcgtgctatggtacgacgctctactttttatcgtcactatagtgataaatacgatttattaaaccaagtcttagccaacttttccaatagtttgcatgaatctcattcagagagtttattagtcaaacagcctaaatcatattttgaaaatatcgttagagatacgctttattttttaattgaaaatcgagaaacgattcaaagtatctttactatatcgtattatgatgaagtgacacgtatcgtctatacgcaactttataaaggtgtagagagacaagttaatttcgacataaggcacggtatacgtttcactattgatttagaagtttataaagaatttatagcaggtggtatattacgtatcatttatgcttggcttaaagaaggtcaagaacgatctgttgatgagttaactatagaggtagttaaaataatcaatggtatcagagaaacaaatataaagaagttctaa

SEQ ID NO: 2284 - DNA, 1167 bp, Staphylococcus capitis
atgtttcgaagaatactatatataacaggcacgataggattaacatcattacttttaacttctcaaagttatgcagtagaaaagcccacacctctagtcaataaagaagaaaatgctaatatttcaactcaatatgaacctcaatcactcacgctcactacaaagcaaggtcaaattttatacaattacaacgaaaataaaaaagtagatcctgcctctttaactaaaatgatgacaatgtatttaacattggatgcagttaaatcaggaaaaatacatatgaaagataaaataaaaatcacatctaaacaagcgcaattatctcaaaagtctaacctttcttcggtaccgttaaaagcaggacaaacatatactgttaaagatatattgagccaaacagctttagcttcaagtaatgctgctgctttaattctaggcgaaaaggtatcaggttcgacttctacttttacagataaaatgaatcagcaggctaaaacatttcacatgaaagacacacactttacaagtccagctggagcagatactgagttgttaggatctagcgcacctcaaaagtataagaaacaagggaagacttccagtacgtctaaagatatgaatatcatgatgtatcacatgatcaaagagcaccctgaaatacttaaaaccacacaaaataaatcagatacacaaaaaggacaatcatttgaatctacgaatttatctttgaaaggtcagccgaaatattataaagggactgacggactcaagactggtacgagtgattccggatatagtttagctttaaccaataagcaacatggtttgagattaaatgagacgattttagatgttacaccatatcctagtgaaacagctaaattaaatcgtaatgaaattgcgaatgatatgatgaaatattatcggaagcaatatgaatataaaaaggtgttatctaaaggtgaacatcaaattgatggcaaaaaatacacagtaaaaaaagacttatatgacgtcgtacctaaacataaaaaatggtatattgcgattaatgataaagggaatgcttacgttcactatcaacgacattttctagatggcgcttcttatccatcggtaaaagctgaaaagaaaagtagtggcttatttggatggttatcgcattga

SEQ ID NO: 2285 - DNA, 1131 bp, Staphylococcus capitis
atgagaaagactttatatttattttttgtttctattgtgttgatggtattcattttagaaggatgctcaaaacagaaagattctcacactgaagatagtgaaaatgaaaatatgtatgcaagtcatcaatcaaaaatgactaaagattggcaaacatacgatggtgaaatataccatatcttttatcatccacttattactgacgctaaagtggcattttcggggagcccacaagaagccaaaggtaataacgactggatgattacagctaacgaatttaaaaaatctctagaagagttacataaaagaaattatattttaattgatccacacgatgcttatgatttaaaagcaaaaacgataaataagaagaagttaaaattacctaaaggtaaaaaaccattaatactatctatcgacgacatgaactattatgagtacatgcgtggaaaagggtatgccgacagattagttttagataaaaacaaacatgttgtatcagaaacgaagcaaaagaatggcaaagtaacacattctaaagacgatgatatcgttccaatattaaatgactttgttaaaaaacaccctgatttctctttaaatggacaaaaaggtgtagttgcattaacaggatataatggcgttttaggatatcgtacaaatgaaacagatagtaagcattataaggaccgtaaagctaaagcaacagaagtagctgatgctatgaaaagagatggttggacatttgccagtcattcatatggacatattaattttgaacaatcatcttatgaaggaattgttaaagatacaaaacgttgggagaaagaagtgacaccaattataggtaaaactgatttatttattttcccccatggtgcacaagatagagatacgccagcatataactatctgattaaagaaggtcactttaaatatttggctggagtaggacctaataactttaccgatgttgaaccagataatgtatatcaagatagagttgcagtagatggtctgaacttatacgattttaaagataaattaaagccttttatgaatcctgagaaggtttatgataaacaagatcgcagttactttaaagggaataaagattatcaacaagaataa

SEQ ID NO: 2286 - DNA, 519 bp, Staphylococcus capitis
atgttagaaaccgatagactttacttattaaaaccagatattgagcatcttgatgcgcttttccaactacatacgaataatgaatcaacaaaatacactcctaaaggtatacacgagaacaaagatattactaaaggatttataaaaggttggagaagacattgggaagaaaatgactttggatactttatgttaatagccaaagatactggagaattagtagggatgagtggttttgaataccgcaccattaattatcaattattcttaaacttgtattatagactttttccaaaatatacaggtgaaggattagctactgaagcaatcgaaatgatatcacgatggatgaaacaatttgatgcagtaacaccaaaacttatacgaacgaatcaagtcaatgaatcttctattaagcttgccgaacgtttaggatatgaattaaatgatacgtggaataatattataaatgatggggatcgttgttattttaagcaacagttaaatgttcctttgtaa

SEQ ID NO: 2287 - DNA, 447 bp, Staphylococcus capitis
atgtatgacgatgggaatccctatttatacatacgtaaatcgtaccctaacccctttattaaaggattagacattattattcctcaagcaggaatatatacctcttatgtcgttagggatttagagaaaaatgtaatatttacttctaaatgtattccaaattttagaaactttagagagattcattgtaattacagaggtactcatattgagatgaaagagttcacattggtgaacaaaccggttaaattcacttatgataatgaagattattttattaaaaagacgagcccagaaacatgtactattacgaattatgagaatgaaaaactatctcattgggctaaaaatgaaggacaagtgagcttccatattttagatgaaagtagtaaaccaatagaagagttattaatcatactctctcatgcattaatgaataaaatttga

SEQ ID NO: 2288 - DNA, 1497 bp, Staphylococcus capitis
atggctaacaatgagtcaaaaaacatagttattattggcgctggtgtcttaagtacgacattcggttctatgattaaagaattagaacctaattggaacatcaaactctatgaacgtttagatcgtccaggtattgaaagttctaacgaaagaaacaatgccggtactggacatgctgcgttatgcgaactgaactatacagttcaacaaccggatggttcaattgatatagaaaaagcgaaagaaatcaatgaacaatttgagatttctaagcaattctggggacaccttgtgaaaagtggcaacattgataaccctagagaatttattaatccacttcctcacattagtttcgtaagaggtaagaataacgttgaattcttaaaagaccgttacgaagcgatgcgtaacttccctatgtttgacaacatcgaatatacggaagatatcgaagaaatgagaaaatggatgccattgatgatgaaaggtcgtactggcaatgaaatcatggcagctagcaaaattgacgaaggtaccgatgttaactatggtgagttaacacgtaaaatggctaaaaatattgagcaacatcctaatgccgatgttcaatataatcatgaagtcattgatttcaaccgacgtcaagacggcatctgggaagtgaaagtaagaaaccgtaacaatggttcagaggaaactgtattcgcggattacgtctttataggtgctggtggtggcgctattccactattacaaaaaactggtatccctgaaagcaaacaccttggtggattccctattagcggtcagttcttaatttgtactaaccctgaagtcattaatgaacacgacgttaaagtatatggtaaagaaccaccaggcacaccaccaatgactgtacctcatcttgatacgcgttatattgatggtgaaagaacattattatttggtccgtttgcgaatatcggtcctaaattcttaaaaaatggttctaacttagatttatttaaatctgtaaaaccatacaacattacaacactacttgcatctgcagttaaaaatttacctttaatcaagtattcaatcgaccaagtattgatgacaaaagaaggttgtatgaaccacttacgcacgttctaccctgaagctcgtgacgaagattggcaattatacactgcaggtaaacgtgttcaagttatcaaagatacgcctgagcacggtaaaggattcattcaattcggtacagaagttgtgaactctgaagatcactcagttattgcattattaggagaatcaccaggagcatcaacttcagtttctgtagcgttagaagttctagaacgaaacttcgctgactacgaaaatgaatggaaacctaaattacaaaatatgattccttcatatggtcaatcacttataaatgatgttcaattaatgagagaaactcgtaaacaaacatcaaaagatttagaattaaattattatgaatctaaataa

SEQ ID NO: 2289 - DNA, 525 bp, Staphylococcus capitis
atgaaagatatctcaagaggtatcaatcatattggtttaactgtaccggatatagaggaagccactgaatttttcaaaaagggtttagacggaaagattgcctatgatagtcaaagaaaagatgagaaaccacgtggtggtaaagatgtagaaaaaatattgggcatgagtaaaggtgctcaaatcgtacataaacggatgatggtatttgggaatggtccaaatattgagatgtttgaattccaaaatgcaaagcaacgaaaacctgaagcacttcaagatattggttatacacatttatcgttttatgtagatgactttgaagtggctgtagccaaagtaagatcagccggtggagaacttatttctgagcctcatagtaatacgagatatgaagacaccgaagggaatcaaacagtatatgttaaaacaccatggggaagtctcattgaattacaaaccgttccaaatggattttattatcctccagataatgaagcggaactctttacgccaagtgaataa

SEQ ID NO: 2290 - DNA, 516 bp, Staphylococcus capitis
atgactcaattcacatttgatcaagcacatagtgatattcaattccaaatcaaacatttaatggtatctaaagtgaaaggtactttctcccaatatgatgttcaattagatggagatattaacgacttaagttcacttaaagcaactgcaactatcattccaagctcagtcgacacgcaaaatgaagatagagataatcacttgaaatctggtgacttcttcgcaacagatgaaaacgacaaatggacatttgaaacaaaagaaatttcagagaacaaagtaacgggcgatttaactattaaaggtgaaacacacgaagaaactttcgatgttgaatttaatggtattagtaaaaatccaatgaacggttcacaagtaacaggatttattgttacaggtacaattgaccgtgaaaaatatggcatgagcttcaaccaagcattagaaactggtggcgtaatgttaggtaaagaagtaaaatttgaagcatcagctgaattcagtttagaagattaa

SEQ ID NO: 2291 - DNA, 978 bp, Staphylococcus capitis
atggctattcaagatttaccaactttaaaatatacagggaaatcggcaagtgttgcaccaatagtgtctgaaaatgagttgcaaacagtgactgcagaaccttgggttaaaatttcggatagaggattacaattagaaggcttaaatttcaatcgcgaaggcaatttattcttattagatgtctttgaaggtaatatttttaaagtgaatacatctaccaaagaagtgactcgaccattcgtgtctgaaaaagcgaatccagcagctattaaagttcataaagatggacgtttatttatatgttatttaggcgactttaagacgacaggtggtattttctcaactactgaagaaggcgaacaatttgaagaaattgtttctgaattaagcacagaatactgtattgacgatatggtatttgatagtaagggtggtttctacttcactgatttcagaggatactcaacaaatcctctaggcggtgtttattatgtatcaccagacttcaagacaattacaccagtgatacagaatatctcagttgcaaacggtgtcgcattaagtactgatgaacgcgtattgtgggtgactgaaacaactacaaatcgtcttcatcgtattgaattagaagaagatggtgtgactattgcaccatttggcgcaacgattccatattacttcacaggtcatgaagggccagattcatgttgtatcgatagtgatgataacctttatgtggcaatgtatggtcaaggtcgtgtcttagtctttaataaaaagggttacccaattggtcagatcctaatgccaggccgtgatgaaggtaaaatgctacgttcaacgcatccacaatttattccaggtacaaatcaattgttaatttgtacaaatgatattgagaataactctgaaggcggttcaatgatttatacggtcaatggatttgcaaaaggtcatcaaagttatcagtttcaatag

SEQ ID NO: 2292 - DNA, 963 bp, Staphylococcus capitis
atggattatagagtacttttatactataaatacgtaacaattgatgacccagaaacatttgcgtcagagcacttagaattctgtaaagaaaataatttaaaaggtagaatcttagtttctacagaaggcattaatggtactttatctggtacaaaagaagacacagataaatatatcgaacatatgcatgcggatgaacgtttcgctgatttaacattcaaaattgatgaagctgaaggtcatgcattcaagaaaatgcacgttcgacctagaacagaaatcgttgctttaggtttagaagatgatgtagatccacgcgtaactacaggtaaatattattcacctaaagaatttaaagaagctttagaagataaagatactgttattttagatgcacgtaacgactacgaattcgacttaggacacttccgtggtgcaattcgtcctgatattacacgtttccgtgatttaccagattggattcgcaacaataaagatcaattagatggtaaaaatatcgtgacatattgtactggtggtatccgttgtgagaaattctctggctggttagttaaagaaggcttcgaaaatgtaggccaactacatggcggcattgcgacttacggtaaagaccctgaaactaagggtgaatactgggatggtaaaatgtacgttttcgatgaacgtataagtgtagatgttaaccaagttgagaaaacagttattggtaaagagcatttcgatggtacaccatgtgaacgttacatcaactgtgctaacccagaatgtaataaacaaatccttgtatctgaagaaaatgaagaaaaatacttaggcgcatgctcatacgactgtgcgaaacatgaacgtaatcgttatgttgcaaaacatgatatcagtaatgaagaatggaatcgtcgcctagagaactttaaagacgttcctgagcatgcccacgcttaa

SEQ ID NO: 2293 - DNA, 639 bp, Staphylococcus capitis
ttgaaaatattagtaactgcgtttgatgcatttgatggcgaatccacaaatcctgctttagaagccgtacatcgtcttgatacgcacatcggcgaacatgtcatcactaaattagaaattcccaccgtctttcatgaatctaaaaacgtaatctgtaaagcgttaaaagaagacacttatgacgttgttctagcaattggtcaagctggaggtcgtttcgaaattacacctgagcgcgtagggataaacattgatgatgctcgtattccagataataaaggcaaccaacctattgataaagtaataaaagaagacggcgcgccggcttatttctcaaatttacctgttaaaaaaatggtagaagctattaaaagagcaggagtacctgccagattatcaaatactgcgggtacgtttgtatgtaatcatatattatatcaactaggttatttagcagatatgtcttatccagacttactgtttggttttattcatgtaccttacattccagaacaagttactgataaacctgagaaaccatcaatgtctatcgatacaatcacgaaaggattaacctctgctatcaaggcgatatcacgagaagaagatattaaagttgctatgggtgagacgcactaa

SEQ ID NO: 2294 - DNA, 570 bp, Staphylococcus capitis
atgtataaatactttaagagaaatcgtttctcaacgaaaagttctgatattaaagatgattctggaaaaatagtcggtaccattcagaaaaaatttaataatatttttcaacggttggttagtttttttacattaggttttaaatttaatcgattcgtaatttatgatcataatggtgatgtaaaagcgagtgtcaaagtaaaaacgataatggcgcaaaagcgttttgatgttacatatgtttcaaataacggggaatcacaagttttatttgataagcaaagtaatggtcgtggagaaacttatggaatattgaaatttgatggtagaatcctcaatattcattcagacgtgaataaatatacagtgataaaagattctaaacaagataaagaaatcgcaagttggaaacaaaatggtgactatgcatatgttgaggggaaaagtgagttatatgaaaagaatcatttattatttatattaattttgcattctttcgcgaatgttcatgtatcgcacagtattctgaatccatttaatccagatactactggctccccaattatatag

SEQ ID NO: 2295 - DNA, 465 bp, Staphylococcus capitis
atgactaaaactgtttatgacgttatagactttggtgtaagttatattagagatgtttatgataaatgggatgttatgaaagtattagataaagatgacagtgtcttcccaaatacactacattggcaatatggtcacgtactaactgtgtttgaagaagcactcgcaatgggtaatcaagaagttattgatgttgataaatatagtaaattgttcggaactggaactaagccatcagattggggatatgatgaagttccttcaatcgaaagcattttaaatgacattaaaacgttacctgaaagagctacacatttaactgataaagagctcaaaaaagaaattgaccagcctatcgcaggttgtaaaacattagaagaacttttagtgcttaatgcattacacatcccattacatgcaggtaaaattgaagaaatgactcgtgttttaaaagctgaacaataa

SEQ ID NO: 2296 - DNA, 1419 bp, Staphylococcus capitis
atggagaatacggttaaatatcgtaaattcatacttccaattgttgtaggattgattatttgggcactcaccccttttaaacctgatgctttaaatgaccaagcttggtatatgtttgcaatttttgtggctacaattatcgcatgtatcacgcaacctatgacaatcggtgctgtatctatcattggctttacgattatggtactcgttggcatcatggatacaaaatcagctgttgaaggttttggtaatagtagtatctggcttatcgctatggcctttttcatttcaagagggtttgttaaaacaggactcggccgacgtattgcgcttcaattcgtaaaattatttggtaagaagacgctaggtcttgcttattcccttgtaggtgtagatttaattttagcaccagcaacacctagtaacactgctcgtgcaggtggaataatgttccctatcattaaatctctctcagaatcatttggttcaacacctaaagacggcactgagagaaagatgggtgcatttttaatatttacagagttccaaggtaaccttattacggcagctatgttcttaactgcaatggcaggtaaccctatcgctcaaagtttagctgagaagaccgctcatgttcatattacctggatgaattggtttgttgcagctatcgttcctggtcttatttcactaatagttgtcccattcattatttataaaatgtaccctccaactgttaaagaaacacctaacgctaaaaagtgggctactgatcaattagaagaaatgggcaaaatttcattagctgagaaatttatgattgggatttttatcgtagcgttaatactttggataactggtagctttatcaatattgatgcgacgttaacagcctttatcgcgttatctcttctcttacttacaggcgtattaaattggaaagatatattaaatgaaacaggtgcctggaatacacttgtttggttctcggtactcgtattaatggcagatcaattaaataaattaggatttattccttggttaagtaaactcatcgcacatagtttaggtggctttagttggccaatcgtgttagttttactcattctatttttcttctactcacactatttatttgcgagtgcaactgcacatgtcagtgccatgtatgccgcgttacttggcgttgcagtagcagctggtgcgccacagttattcagtgcattgatgttaggtttcttcggtaatttactagcctcaactacgcactatagtagtggtccagcaccaattctttatgcttctggctatgtatcacagaaacgttggtggcttatgaaccttgtactcggtatcgtttactttattatttggattggattaggttcattatggatgaaattaattggaatgatgtaa

SEQ ID NO: 2297 - DNA, 675 bp, Staphylococcus capitis
atgaactatttcagatataaacaatttaacaaggatgttatcactgtagccgttggctactatctaagatatgcattgagttatcgtgatatatctgaaatattaagtgaacgtggtgtaaacgttcatcattcaacggtctaccgttgggttcaagaatatgccccaattttgtatcaaatttggaagaaaaagcataaaaaagcttattacaaatggcgtattgatgagacgtacatcaaaataaaaggaaaatggaactatttatatcgtgccattgatgcagagggacatacattagatatttggttgcgtaagcaacgagataatcattcggcatatgcatttatcaaacgtctcattaaacaatttggtaaacctcaaaaggtaattacagatcaggcaccttcaacgaaggtagcaatggctaaagtaattaaagcttttaaacttaaacctgactgtcattgtacatcgaaatatctgaataacctcattgagcaagatcaccgtcatattaaagtaagaaagacaagatatcaaagtatcaatacggcaaagaatactttaaaaggtattgaatgtatttacgctctatataaaaagaaccgcaggtctcttcagatctacggattttcgccatgccacgaaattagcatcatgctagcaagttaa

SEQ ID NO: 2298 - DNA, 276 bp, Staphylococcus capitis
ttggataaaaatatacaacttgagctttacacaagacctacatgctctgattgccaagaatcaaaaaggtatttaaactctcaagagattagttatagtcataaagatgtaagtcaaaatttggacttagaagaagaaatgaaaaaaatatcaggcaaccgaattgttcccttatttgttttttataaaaaaattttttggggtaaaaaaaagttgtttaaatattacgtgggatttgaaaataacaaaaaagatatattaaatatattggaataa

SEQ ID NO: 2299 - DNA, 276 bp, Staphylococcus capitis
ttgaacactactactgttaaaaacaatgacgcattgctcaatagactcaaaagattagaaggacaaatgcgcggtttacaatcaatgatagcagaagatagatattgtatagatgtactagtacaaataacagcaatacaatcagccctaaaacaagtgggttttatagtaactgaagaccatatatctaattgtgtaagtgaaggtattaaaaatggcaacggagaagaaagtatcaaagaattgatggttgtattaaaacaattttcaaaatag

SEQ ID NO: 2300 - DNA, 2388 bp, Staphylococcus capitis
ttgagtgaaaatattaaaaaaacctcattaggtatcacaggcatgacatgtgcagcttgctcgaataaagtagaaaaaaatctaaataaattagatgaagttaacgctaatgtaaatccttctacagagaaagctacaattgaatataaccccaatgttacatcattagaagatattgcaaatacaattcaaaaaacaggttatggagttttaaccgaaaaagtggatctcgatgtaatgggaatgacgtgtgcagcttgttcgaataaaatcgaaaaagttttaaatcgaatctcaggtgtaaataaggctacagttaatttaaccacagaaagtgctactgtagaatacaaccctgatatgacgtctgtagatgaatttcaacaacgtattaaaaacctagggtatgaggcacaacctaaaaaagaagcatcagaaaaaagttcccaaaaagaaaaacaattaaaacgacagttaattaaattagttgtttcagctgttttagcagctccattgttaatgacaatgttcgttcatttatttggtattcaaataccacatatatttatgaacccgtggttccaatttgtattagcaacgcctgttcaatttgttattggttggcaattttatgtaggcgcttataaaaaccttcgtaatgggtcagcaaatatggatgttcttgtcgctttaggtacaagcgcagccttcttttatagtatttatgaatcgattaagtggttaattaatacaaattatgagccacacctatattttgaaacaagtgctgtattaattactttaattcttttcggaaagtatttagaagcacgtgctaaaacacaaacaacaaatgcgttaagtaaattgttgaatttacaagctaaagaagcacgtatattacgcaacggtgaagagactatggttcctttaagtgaggtaaaagaaggagactatttagttatcaaaccaggagaaaaaataccagtagatggcaaaataattaaaggtatgacttcaattgacgagtcaatgttgacaggtgaatctattcctgttgaaaaaatgcaaaatgataatgttataggatcaacaatgaataaaaatggagcaattactgttgaagcaacaaaagttggtaaagatacagctcttgcctccattgttaaagttgtcgaagaagcgcaaggttctaaagcgccaatacaaagactagcagatattatttctggatattttgtacctatcgttgtaggtatcgcgattttcacatttattatatggatttcattagttcagccgggacaatttgaaccagccttagttgctgcaatagcagtattagttatcgcttgtccttgtgcgttaggcttagctacgcctacttctataatggtgggtaccggaaaagctgctgaaaatggcattctatttaaaggtggagaacacattgaaggtacacacgctattaatacagttgttttagataaaactggcactataacaaatggcacacctgaagtcactgattttagtggagatgatcaaacattacaattgttagctagtgcagaaaaaggttctgaacacccactagctgaagctatcgtaagttatgctaaagaaaaatcattagaatttttagaagtagaccattttgaagctataccagggcgcggtataaatgcaacaattgatggtaaagaactttttgtcggaaatcgaaaactaatgagtgaaaaaggaatccaaactaatgaagctgaaacaaatctcgctcaatttgaaaaagaaggaaaaactgcaatgcttataagcgtagataacgaattgagaggggttgtcgctgtagctgatacagttaaagatactgcccaacaagctattcaaaaacttcatgaattaggtattgaagttgctatgttaactggtgataacaaacgtaccgcacaagcaatagcaaaacaagttggtatagacacgattattgcagaggttttaccagaagaaaaagcttctaaagtagcagaaattcaatctgaaggtaaaaaagtagctatggttggagatggtgtcaatgatgctccagcactagttaaagcagatattggtattgccattggtacaggtacagaagttgcaatcgaagctgctgatataactattttaggaggagaccttttattaattccaaaagcaataaaagcaagtaaatctacaattcgtaatattcgccaaaatctattttgggcgtttggttacaatgttgcaggtatccctatagcagcaattggtctgctagcaccttgggttgcgggagcagcaatggctttaagttctgtaagtgttgtcacaaacgctttacgtctaaaacgtatgaaattataa

SEQ ID NO: 2301 - DNA, 210 bp, Staphylococcus capitis
ttgactaacgaagttattaatgtagaaggtatgagctgtgaccattgcaagcattcaattgaaaaagcattaaatggattagatggtgtaacatcttcagaagtaagcttggcgaatgggaatgtggaagttgaatttgatgaaaatcaagtagctttcaacgactttaaagaagctattgaagatcaaggttacgatgtaattaaataa

SEQ ID NO: 2302 - DNA, 657 bp, Staphylococcus capitis
atgaatcataatcatgaatatcattcaaacaaacccgaaattaaagcaaatgttgtatatagagatggtaatatagaaattacgttagaagatgaatttaataatgccccattattagatactatgcatgaaaaagaaatgcatttcgttttagtatctaatgacatggagaaatattaccacctacaccctcaaaaaaagcatgaaggtttatttataattaaccaacaattagagccaggaacttaccaggcttttgttgatgttacaccaaaaaaccatgtgtattccgttcatcctattgaactgcaaattggagataaaataacctctacaacatctttaaattctgataaaaattgggtaaaagttaacaaaggagttcatgtaactttaaattctataagtgctaaagaagatgaacatgtccctttaactttcaatacagaattaactccccaaccttatttaggagctttaggacatgtgattatatttgatgagcaattaactgattatattcatgttcacccagaatcacctgattctacaaccttttatgctcattttcctaaaaaagggatgtataaaatttgggcagaatttaaatttaatgatgaagtgcatagatttacttataatattaaagttgcataa

SEQ ID NO: 2303 - DNA, 528 bp, Staphylococcus capitis
ttgattaagtttgaatattttgaggagaaagattttgatttattaataaactggataaactctcctgaacttttagtcaaatgggcaggtacagattttaattatcccctagatgaagaacaattaaaggaatatattaaagacacaaataaagaaaattctagtaaaataatttataaagttatcattgaagaaaataattcaaaaaaaattataggtcatattgctttaaataatatagattttaaaaattgttccgccacgttaagtaaagttttagtaggtgatccgcaaatgcgtggccaaggattaggccctaaaataataaagaaattattgaaaaaggcttttgaagatttgggactacacagaattgaattaggtgtttttgcctttaataaatcagctattaaaagttacaaaaagattggatttataaaagaaggagaaaaaagagactttagaaaattaaatggagaatattataatttatggcaaatgagtatgttagaaagcgaatggtcttga

SEQ ID NO: 2304 - DNA, 666 bp, Staphylococcus capitis
atggaggtaaatctacaaaaaaaatcaatagaatcaattcaacattcacatttaataggattatcattagtgaatttcattatttttgcagtttactattttatatatgcaggtccaggtataaaagggaatatgcctttatatatgaaagtatatttaataggatcattattattatggttgcttctttatttacaagaacgtgagtatatttttaaacattataatcgaaaaaattataaattcagagttgtaatatatatgaccatcaatctactttcaggatacaatattccatttttaattagttctgcttatgctttttattttgcagattctagagatgatacttttacatattggttgttaatttgtgggctcataatagtctctgctataggtctattcttattttgtctaggtgaatttgagatgtttggtatccaaaacggtagttttattagaatgattggaattttaactattttattatcatttggactattgctgtatgtatcattaattcttcctgttgattctgaagaaaatagaacgatttggatgggaatgataatgttattttgtagccatttattaattggacgaacatatttttatttaggtctcttaaattatgacattaaagaagatgggatgaaattataa

SEQ ID NO: 2305 - DNA, 588 bp, Staphylococcus capitis
ttggtttattttgtactgattggagtatttattatattttatttagctctatttgacagtcttctgaaatctgaaaatttttcaattttatctatttttttagattttgttattgtaataatgttgattatttttcattttattggaaataaacttacaggaaatgatttaagtaattatatagcatttactttaattggttcatttgtgtatatgtattttgcaatcaagaatttttggacaaaacctaaagttttgaactatctaattagtaaaaaggaaaatacaaatcaagatgatatagaatatcaagagttagatttacaagtctcgaaaattaaatctgtttactattttttaattgctattgcacttttaatacttacgaaagtacatattgttagtgatattaaagcagacagtttgtcaatgaaccctgtatttatttttgttggaatcattattatagttatctggctaataatggacttgtatagaaagaaaaaatatggcatttttttatttaaatcattaattcctattgtcgtgacgatatggatcataatgtcatctgtattattgtattaa

SEQ ID NO: 2306 - DNA, 792 bp, Staphylococcus capitis
ttgacaaaagtattagcaacatttgtattgccagtaattttaacaattataagacgatattttattcattattttgacggcaagaaaatagatgcctattctgcatatgcattaataatgttatatggtatgacgatatgtacggtatatttatatgaagttcttttgatagtggaaagagtttctgtgttacaatttttaacttttattattagttttatgctatttgccatttttattttaagtacttgcatatcactttgcacgtctatcaatagtttcactctttttaaaaataaagaaaacgagttatttgagaaaaaaagtaaaaaccataattttttcaaagatttaattatgttagacaaagtaactgatgaatatcaattgagtgaaatgaaacgatcttcatattatcagaaatatcaacgtgataaatactattatcaagataaagatgctaattcatactatgagtatgtatatttatataagaaaaatagctttatgagaataaaacgtatttgtcctaaaaggacagaatatttaatgttaatcatgttattactctttctttttaatggaatatacatatatatagatcttgataatattccttataaatatagtaatagtgattatactgagtacacgttgataatatgtaatgctttattgtgtatagtaggatgcattattataagcaaactacaatcaaatattataaaagaaaataaaaaggataaagcttctaaaatgaatgaaattaaactatcagaagaaaaaatataa

SEQ ID NO: 2307 - DNA, 1308 bp, Staphylococcus capitis
ttgaaagatcaagaattccataaaagcatagaagactttttaaaaacgctcaataagatgggtattaatatggaagaagtatcaaaacaatccgacattagtaaacacagtttatctgattggagaaatggtaaaagtatacctaaacgaaagaatcttaaaaaattaagagactatgcttctgatttacttaatacaggtgttttacatatagaattaaaaagagaatttcgctatcctattatagaattttatgaaagaattcatttatatttgcaagaaatgataactgatggagaatcagaaaaagagataatgaagcttcatgaaggtaatcctagagcacaagaagtattggaaccgtttttagaattgaacttgtttaagtcttttataaatcccagtatgcaatacaaacatattgatggtaaacctaagatagatagggaactgaaaaataagtacaaaccaaattttatagaaaatattaataacttaatagagtttatcgatgaaacatcaaaatatgaaagtacagatatttgtcaatcacccttatttccagataaattggttagaagacaagtagaagagttttgtagaaatatacctcgtgaagaatactttgatgtaactcataaaatagcgtccgtaggtgaacaatggctgcaatatcatttaaatgtcagtaaaaaacaaattaatagttggaggagaggaatagacttgccatcagatgaaaacctccaaaatttaaaaacattgttgggatatcaaagtgatggagcttttttaatttacaaacttaccaataaagattttttacatatgtttttacctagtttaaaaattgaatcggaaaatcaggataaagaacatgaattgcataaaaacttaataaatttcactgacatgttattttattattgttcctatgataaaaaagtaagagaactaatggaagatgtagaaataagtatgaaagttaaaagtgagaagtcaattgtattttcattttatagtgaaatacataaattaaaagttgcgcgtaaattttattatgatccatattctagagaaaactcaaaagacttaaaagaatattttaatatgagcattgaatcaataaataaaacgttagagcaagattttgctattatagatgaaattgttaccaaagagaatataaaaaagttagaaagttatgcagaaaagtattttgatgaagatcaaaaagaagacttgctaaatgtgattgataaaatagacgataaagagttatatgaaatttatactcacattaggtaa

SEQ ID NO: 2308 - DNA, 321 bp, Staphylococcus capitis
atgaaaattcaagccaatttcaaaaaaggcggctattcaactgaaatagcgtctaactacattgatcataaaaagccgatttatagcttaagtacagaactttatccgcaacagcgttttgaaaataaccaaccgactggggaaatcattgcgtataaagcttggtttgttcaagaaggtttaccacccttcacagtcaaatttgaaaatgaagtgacattaccaaattatatgagcgttatcacttttgataatctagaagcttgtgaaatccgttatgatgtttacttcaaagcttcagatctgaaggaggttaaataa

SEQ ID NO: 2309 - DNA, 726 bp, Staphylococcus capitis
atgacagccaaagaactcgaacaatatctcctacaaagcttaaatatggcattaggatccatgatgcaaggcgaaaccagttataccaatagttttacctgcaaggttacggaagaaggtttttactttcttcctcgcctgcctgcaggctacattattgatgatgacttatatcaaaaaatatttctcatcgcaagtgcagctttatatccaaaatttacactgttaaaacaaaactccgcgtatttcgttcctatggacacagatgatattcacacgcaacgtgcattgttttttccatggcaacaagggatttctgaacgcttagtgattacagatttagatcaattcacttctaaactaacacatcaacaaatcccgatcatgaaacaattaactttaaattatcaaaacattacatccatagcgatcgcaggtaattcaggcagtggtaagtcatatatgctgacgtacttattaagtgtactaaaacccatatctgaactcattattgttgaccctaagtttgatacaccaagccgctgggcacgtatccatgatattgctgtcattcatccacatcaaaatcgatctaaatctgattttttatctgagattaatgaaaacttaagtcattgtcttcaaattattcaacagcgccaaaccattctttacgacgatccagactatcaatttgagggttctgttgcaaagttgaatttatag

SEQ ID NO: 2310 - DNA, 129 bp, Staphylococcus capitis
gtggtttggctgatttggaagacaatgtatcataataaatcttgggcagagaggaaaattgaatggactcaccatacacaaccagagagaccacatggctctgcttctcctttgaaatgggattggtaa

SEQ ID NO: 2311 - DNA, 528 bp, Staphylococcus capitis
atgattataagagctttagaggaaacggatttacctttcgtacatcatttaaataatgaatattcaattatgtcatattggtttgaagaaccttatcaatcacttagtgaattggagaatctttataaaaagcatattttagatgaatctgagcgacgatttatcattgaagaagatgaggtatctatcggtgtagtagagttattagaaatcaattttatacatcgtacttgtgaagttttaattattatagatcctcaatttgcgaatcgtggttatgctaaaaaagctttcaaaatggcaattgattatgcatttttagtattaaatatgaagaaagtatatttatatgtagacattaaaaatgaaaaagctgttcacatttataaaagtaataatttcgagattgaaggtacattaaaggaacatttctatacacgtggagagtatagagattgttatgtgatgggattattaaagagaaattgggttaatcaacatgatgatgatttatctcatattaggtag

SEQ ID NO: 2312 - DNA, 1344 bp, Staphylococcus capitis
gtggataagatggaaaaacctataacaaataaacttgaagagttaattgataataaagttatttcaatgcatgttccaggacataagaacatgactataggaaatttaaatcaactaaaaattaatatggatatgacagaaattacgggacttgatgatatgcatcaaccagaagatatcattttagaaagtatgtctcattttaaaaaacacgatgattatgatgcatttttgcttattaatgggactacttcagggatactctctgtgatacaggcattttcagagaaaaagggacgatatcttattagtagaaatgttcataaatcagttttccatgggttagacttagcaaaagcacaagctacttttacagctatgcatcaaagtaacctaacatgtcaatatgtagaaccaatactagaagatgtgattgaggattataagctaggtatttgtacatatccaaattattacggagaaacatttaatattggaaatttcattaataaattacatgataatggcattccagtattagtagatgaagcgcatggcgcacattttgatctcgaaggttttccgatttcgtctatgaattatggtgcggattatgtggttcagtcttatcataagacgttaccagctttaaccatgggctcagttttatttatacataaagatgcgcctttacgttcacaagtaatagagtatttatcttattttcaaacttcaagtccctcatatttagttatgtctagtttggaatatgctcaagaattctataatgaatttaaaagtgagttattctttgaaaagagaaaacattttataaaagtattaaaaaagaaaggattcaacattggggaacccgacgatgctgttaaattagtcgttagttatgatggttttgaagggtatgatatacaacgttggttcgaagatcataatatttttgttgaattagttgatgagcatcaaattttgctagtattaccactttggcatgaaaatgacgtatttccgtttgaattattaattaaaacaataaatgaaatggagattcctgaacgagctgaacatgctcctaaaaaattgaatttgatgctagcatcgagtgagtatagggcagttcattttccaaaagtaaaagagatagcaattcatcaagcggaaggtgaagttttagcacagcatattgtgccatatcctcctggaataccagtaatgtttagaggagaagttatcacgacacatatgataaaattattacaacattattcaaacctcggaataaaagttgaaggtttgaaagctcaaaattttttagttaaggatgaataa

SEQ ID NO: 2313 - DNA, 618 bp, Staphylococcus capitis
atgtcagcttttataacgtttgaagggcctgaaggagcaggaaaaacctctgtaatatcgaaagtaagtcaaaaattagctacagatatggatgttattacaactcgtgaacctggtggagttcctacaggagaagaaatacgtagagttgtattagagggaaataacatggatattcgaactgaggcgatgttgtttgcagcctcaagacgtgagcaccttgttgaaaaagttatcccggcattaaaaaaagataaaattgtactatgtgatagatatattgatagttctttagcttatcaaggatatgcaaggggtataggtattgaagaagtgaaaactttaaatgaatttgcaataaatggattgtatcctgacttaactatttatttagatgtaagtgctgaagtaggacatcaacgtatccttaaaaatcaacgtaatcaaaaccgtttagatcaggaagataaggcgtttcatgagaaagtgattgaaggttatcagagagtcatcgatagcgatcctgaacgttttgttaaagtaaatgcggatcaggatttggaaaatgttgttgaggaagcttaccaatctatcatcaaatatttaaaaaatatgtga

SEQ ID NO: 2314 - DNA, 330 bp, Staphylococcus capitis
atgaagatgattatagcgatcgtccaagatcaagatagtcaagaactttcagaccaactcgtaaaaaataattttagagcaactaaattggctactacaggcggatttttaagagccggtaatactacattcttatgtggtgttaatgatgaacgtgttgaagaactattaacggttattgataacacttgtggtaatagagaacaacttgtttctccaattactccaatgggtggtagtgctgattcatatattccatatccagttgaagttgaagtaggtggagcaacagtatttgttatgccaatcgaggcctttcaccaattttaa

SEQ ID NO: 2315 - DNA, 927 bp, Staphylococcus capitis
atggatgaacaacaacagttagctcatgcatatcattcaaataagttatcacacgcttatttatttgagggtgacgatgctcaaactatgaaacatgtagctattaactttgctaagttgattttgtgtgcagaggatagccagtgcgaactgaaagttgatacatttaatcatcctgatttcatgtatgtttcttctgatgagaacacgattaagaaagaacaaatagaaagactcgtacactatatgaatcaattgccgattgatggacgctataaagtgtatattatcgaagattttgaaaaattaactgttcaaggtgaaaatagtatactaaaatttttagaagaaccaccagagaatacaatcgcgattttattatcgactaaaccagaacaaatcttggatacgatacattctaggtgtcaacatgtttattttaagccaattgatagaaaacagtttattgagcgattggttgaagcatcactaactaaacctgttgctgaaatgataagtacatacacaactcaagttgagacagcaatagcattgaatgaagaatatgatttaactgctttaagaaagtcagttatccgttggtgtgaacttattttatctaataaaccaatggcgatgattggtattattgatttgcttaaacaggctaagaatcgcaaattacaattgttaacattagcagcagtaaatggtttttttgaagacatgatgcatgcaaaagtaaatatagataatcattttatatatagtgatttgagtgtggaaatgaaaaaatacgcggaaagtttaacgtttaatcaaatgactctgatgtatgaccaactgactgaagctcataagaaattaaaccaaaacgttaatccaacactcgtatttgaacaaatagtaataagaggtgtgagatga

SEQ ID NO: 2316 - DNA, 804 bp, Staphylococcus capitis
atgccaaatgttgtaggtgttcagtttcaaaaagcagggaaattggaatattatgcgcctaaccaactaaatgtgaacgttggcgattgggtggtcgttgagtctaaacgaggcattgaaataggtattgtaaaattcccgccgaaagatgtcgctaatgaagatgttactttacctttaaaagaaattattcgagtagtcaatgaagaagatgaagaacaatattataataatgagcgcgacgcaaaacaggctttagaactttgtaagagagtggtaaaggaacaaaatttggatatgcgtttagtaaattgtgaatacacactagataagtcgaaggttattttcaattttactgcagatgatcgtattgattttcgaaaattagttaaggtattggcacaaaatttaaaaacaagaattgaattacgacaaattggcgtaagagatgaagcgaagttattaggtggtattgggccatgcggtcgttcgctttgttgttcaacatttttaggtgactttgaacctgtatctattaaaatggctaaggatcaaaacctatcattaaatccaactaaaatttcaggagcatgtgggcgattaatgtgttgtttgaaatatgaaaatgattattacgaagaagcaagagcacagttgcccgatgttggtgagttagttcaaactcctgatggaagtggaaaagttataggtttaaatattttagatatttcaatgcaagtaaaaatagaaggacttgaacaaccattagagtacaaaatggaagaaattgaagcgtttaactaa

SEQ ID NO: 2317 - DNA, 348 bp, Staphylococcus capitis
ttgaatagaaatgaattattcgagagattaatgcgacttgaacgaaatgtaggacaattaacgaacgatatgactgaactcaaagatttagctgttgaacttgttgaagagaatgtggcgttgcaagttgaaaatgataatctaaaaagattgatggagaaagacgagcagtcagaatctaacaatgaagaaagaagtcattcaaagcacgttaaaacgccttctccaagtaaagataatttagctatgttatatcgagaaggatttcatatatgtaaaggcgaattgtttggaaaacacagacacggagaagattgcctactgtgtttaaatgtattaagtgattaa

SEQ ID NO: 2318 - DNA, 726 bp, Staphylococcus capitis
atgcttaaagaaaatgagagattagattgtttaattaaagaggggtatgagattattcaaaatgatgatgtgttttctttttcaacagatgcactgttattaggacatttgactgaagttagaaaaaacgatcgaatcatggacttatgttctggaaacggagttatacctttgctattagccgcaaagtgcaatcaaaagatagaagccattgaaatccaagatcaattagtagaaatggctcgtcgcagttttgtacacaatagcttagatgagagacttacaatgtatctgatggatttgaacaatgtatatgacgccttcaaaccttctcaatatactttagtcacatgtaatccaccttattttaaagtgaatcaactgaatcaacatcaaaaagaagcgcataaaatagcacgtcatgaggtaatgtgtgatttcactgattgcgttaaagctgcacggcatttgcttaaggaaggtggacgatttatcgtcgtacatcgtgcggataggcttatggatgtcttaactgaaatgagaaatggtaaaattgaacctaagaaactcacttttgtatacagtaaagctaataaatcagcacaaacgattgtagttgagggacgaaaaggtgggaaacaagggctagatatacagcaacctttttatatttacaatcaagatggtacatatagtgatgaaatgaaaggcatatattatggatag

SEQ ID NO: 2319 - DNA, 204 bp, Staphylococcus capitis
ttgtatactggttatgcgaaagacgtgaatgcgcgtgttgcaaaacataatgaaggtaaaggtgctaaatatactaaaataagacgtccggtagagttagtttatcaagaaatgtatgggacaaaatctgaagcgttaaaaagagagtatgaaattaaaacattttctagaaagaaaaaattaaaaatgattgaggaggggtaa

SEQ ID NO: 2320 - DNA, 840 bp, Staphylococcus capitis
atggcaactttatttttagtaggaacgcctataggaaatctagctgatataacgtttcgtgcggtagacacattaaaaaatgtagatatgattgcatgtgaagatactagagtgacacgaaagttatgtgaccattacgagattgaaacacctttaaaatcgtaccatgaacataacaaagaacaacaaacagagtatttaattgagcaactcatttctggtttaaatatagctttagtttcagatgcggggttaccgcttataagtgatccaggatatgagttagttgttgaagcacgtaaccagaatataaatgtagaaacaatccctggacctaatgcaggtttaacagcactaatggcaagtggtcttccttcttttacatatacatttttaggctttttacctagaaaagagaaagaaaaattagatgtattgcaagagagaatgtatcaatatagtactttgattttatatgaatctccacatcgtgttactgacacacttaaagcaatagctaaagttgataatatgagaaaaatagctataggcagagaactgactaaaagatttgagcaacttatgactttaccagttgagcacatgctagaaatgattcaaagtggtgacattccactaaaaggtgaatttgtgattctaattgaaggcgcacgtcctttagtcaatcactcatggtttgaggaattaagtattaaagaacatgttgaatattatattgaaagagatcaattaaaaccgaagaaagcaattaagtcagtagcgctagatcgtggaatgaaaactggagaagtatacaatatatatcatgatgtagaataa

SEQ ID NO: 2321 - DNA, 1971 bp, Staphylococcus capitis
atggctaaagatacattttatataactaccccaatttattatccaagtgggaacttacacatcggtcatgcatactctactgtcgcaggcgacgttattgcgcgctataaaagaatgcaagggtatgatgttcgttatttaacaggtacagatgaacatggccaaaaaattcaagaaaaagctcaaaaagctggtaaaactgaattagaatatttagatgaaatgattgccggaattaaaagtttatgggataaactcgaaatttcaaatgatgattttattcgtacaactgaagaacgtcataagcaagttgttgaaaaagtgtttgaacgcctacttaaacaaggtgatatttatttaggagaatacgaaggttggtattcagttcctgatgaaacttattatacagaatcacaacttgttgacccagtttatgaaaatggggaaattgtaggggggaaaagtccagattccggacatgaagttgaacttgttaaagaagaaagttatttctttaatattaataaatatacagatcgtttattagagttttatgatgaaaatccagatttcatccaacctccatctagaaaaaatgaaatgattaataactttatcaaacctggattagaagatttagctgtatctcgtacatcatttgactggggagttcgtgtaccatcaaatcctaaacatgttgtatacgtttggattgatgcgcttgtaaactatatttcttctttaggctatttatcagatgatgaagaacttttcaataaatattggcctgcagatatccatttaatggctaaggaaatcgtacgtttccactctattatttggccgatattattaatggctttagacttaccgctacctaagaaagtcttcgcgcatggttggattttaatgaaagacggtaaaatgagtaaatctaaaggtaatgttgttgatcctaatgtattaattgaccgctatggtctagatgctacgcgttattacttaatgcgtgagttaccgtttggttcagatggagtattcactccagaagctttcgttgaacgcacgaattatgatttagcgaatgacctaggtaacttggttaatcgtacaatttcaatgataaataaatatttccaaggtgagttaccagcatatcaaggtcctaaacatgaacttgatgaagatatggaagcgatggcacttgaaacagttaaaaactttaatgaaaatatggaaagtttacaattctctgtagcattatcaacggtttggaaatttattagccgtacgaataaatatattgatgaaactcaaccatgggtattagctaaagatgaggatcaacgtgacatgcttggtaatgtaatggcacatctagttgagaacattcgtttttcagctgttttactgcaaccattcttaacacatgcaccaagagaggttttcaaacaacttaacatgaatgaccctaaattatcgcaattagaaagtcttgaaagctacggtgcacttactgaaccaatattagttactgaaaagccaacacctattttcccaagattagatacggaagcggaaatagcttatattaaagaatctatgcaaccacctaaatctgaagaaaaagaggaagtgccaagtaaagaacaaattgatattaaagactttgataaagttgaaattaaagctgcaacaattactgatgctgaaaatgttaaaaaatcagataaattattgaaaattcaaattgatttagacaacgaacaacgtcaaatcgtatctggaatagcaaaattctataaacctgaagatattattggtaaaaaagttgctgtagttaccaatctaaaacctgctaaattaatgggacaaaaatctgaaggtatgattttatcagcagagaaagatggggtactgacattagtaagtttaccaagtgcaattccaaacggtgcagtcattaaataa

SEQ ID NO: 2322 - DNA, 774 bp, Staphylococcus capitis
atgatgttaatcgatacacatgtacatttaaatgatgaacaatatgatgaagatttaaatgaagtgatatctcgcgcgcaagaagcaggcgtagatagaatgttcgtagtaggatttgatacacctactatagaacgcactatggaactcatagataaatatgaatttatttatggaattatcggttggcatcctgtcgatgctatagattgtacagacgaacgattagagtggattgaaagcctgtctaagcatcctaagattattggtatcggagaaatgggcttagactatcattgggataaatctcctgctgatgttcaaaaagaagtatttagaaagcaaattgccctagctaaacgtgtgaaattacctataattattcacaatcgtgaagcaactcaagactgtgttgacattttaatggaggaacatgccgaagaagtcggtggcatcatgcacagttttagcgcttcgcctgaaattgcggatgttgtcataaacaagttgaatttctatgtttctcttggtggtccagttactttcaaaaatgccaaacagcctaaagaagtggcacaacatgtacctatggatcgtttgttatgtgaaactgatgcaccatatttatctccacatccttatagaggtaaacgaaatgaaccagaacgtgtgactttagttgcacaacaaattgctgatttacgagatatgtcctatgaggaagtttgtcgacaaacgactgaaaatgcagaacgtttatttaaattgaactaa

SEQ ID NO: 2323 - DNA, 552 bp, Staphylococcus capitis
atgaagattaatgaatttatcgttgtagaaggtagggatgatactgaacgtgttaaaactgctgtagaatgcgatacaattgaaacgaatggtagtgcaatcaatcaggatacactaaatgttatacgtcacgctcaagaaactagaggtgttattgtactgactgaccctgatttcccaggtgataaaattcgacatacaatacgtgattatgtaccaggtgtgaaacatgcttacttagatagagaaaaagctaaaaacaaaagaggtaaaattggcattgagcatgcaaacgttaaagatattcgtgaagctttaatgcatgtgagctctccattagaagaagcagaagaaactattgataagagtgtacttattgatttagggcttattattggtaaggatgcaagacgtcgtagagagatattaggacaaaaactacatattggtcactcaaatggcaaacaattgctaaagaaacttaacgcatttggttatacagaacaagatgtaagagaggcattacttgatgatgaaagaagggagaaataa

SEQ ID NO: 2324 - DNA, 891 bp, Staphylococcus capitis
atggaacataaagatatagctacaccatctcgtacgcgagctttattagaccaatacggttttaactttaaaaaaagtttgggccaaaacttcttagttgatgtaaatataattaataaaattattgatgcgagtcaaatagatgatactacgggcgtaattgaagttggtcctggtatgggatcattgactgaacagcttgctaaaaatgctaaaaaagtgatgtcttttgaaatagaccaaagattaattccagttcttgaggatactcttgctccatatgataatgtgacaattattaatgaagatatattaaaagcaaatattagtaaagcagttcatacacacctaagtgattgtgaaaaaatcatggttgtggcaaatttaccttattatattactacgcctatattattaaatttaatgcaacaagatatacctatagatggctatgtggtaatgatgcaaaaagaagttggtgaacgtcttaatgcaactgtaggtactaaagcatatggttcactttcaatagttgctcaatattatacagagacaagtaaagttctgacagtgcctaaatcggtgtttatgccacctccaaatgttgattctattgtagtaaaactgatgcaacgtgaagaacctttagtacaagttgataatgaagaagcgttttttaaattagctaaagctgcatttgcacaacgacgtaaaacaattaataataactaccaaaacttttttaaagatggtaaaaagcataaagcgtcaatattaaattggttggaaagtgcagaaattgatccaaaacgacgtggtgaaacgcttacaatacaagattttgctaatttatatgaggaaaagaaaaaattcccagaattagaaaattaa

SEQ ID NO: 2325 - DNA, 264 bp, Staphylococcus capitis
atgccaaaatcaattttggacatcaaaaattctattgattgtcatttaggaaatcgtattgtacttaaagccaatggtggacgcaaaaagacaattgaacgctcaggtgttttaaaagaaacatatccttcagtattcattgtcgagttagatcaagataaacacaactttgaacgcgtatcttatacatacactgatgtgcttacagagaacgtacaagtttcatttgaagaagataatcatcaagaagcagttgcacactaa

SEQ ID NO: 2326 - DNA, 849 bp, Staphylococcus capitis
atgatatatgaaacggcacctgccaaaataaattttacgctcgatacccttttcaaaagagatgatggttatcatgaaatagaaatgattatgactacgattgatttaaacgatcgattatcttttcaaaaacgcaaagataaaaagattgttgtagatattgaacataattatgtgcctaatgatcacaagaaccttgcatatagagcggcgcaattgatggttgatacgtataatattaaagagggcgttacaattactattgataaagatataccagtttcggctggattagctggtggttctgcggatgcggcagctacgatgagaggtatgaatcgtttgtttgagttaggtaaatcattagatgaattatcggcactaggtatacaaattgggacggatatcccgttttgtatttataataagactgcagtatgtactggtcgaggtgaatgtgtgacatttttagataaaccaccttctgcatgggtagttttggctaaaccagatttaggaatatcctctccagatgtatttaaagcactaaacttaaacgaaaagcatgttgtaaataacgatatgtgcaaacaggctttaaaaacaaacaattactatcaattatgtgagagcttatctaaccgtttagagcctatttcgatatcaatgcatccagaaataaaaaagctgaaagataacatgttacaatgcggtgctgatggtgcattaatgagcgggagtggtccaacggtatatggtttagctcaaaaagagcgacaggctaaaaacatttataattcagttaacggatgttgcaacgaagtatatttagtaagattattaggatag

SEQ ID NO: 2327 - DNA, 825 bp, Staphylococcus capitis
atgagatataaaagaagcgaacgtattgtgtttatgactcaataccttatgaatcatccgaataaattaatacccctcacttttttcgttaaaaaatttaaacaagcgaaatcttctataagtgaagatgttcaaatcattaaaaacacttttcaaaaagaacagttgggtacggttattacaactgctggtgcaagtggtggtgtgacttataaaccaatgatgagtaaggctgaagcgactgaggttgttaacgaagtcattacgcatttacaagaaaaagaacgattgttgcctggaggctatttattcttatcagatttagttggcaaccctactttattgaataaagtaggcaagttgattgcaagtatttatatggaagagcaactagatgctgtcgtgacaattgccactaaaggtatatcgcttgctaatgcagtagcaaacgtattaaatttacctgtagtggttattagaaaagacaataaggtaactgaaggttctactgtttccattaactatgtttctggatcatcaagaaagatagaaactatggtgttatcaaaacgtactttagctgagaattccaatgtcctcgtagtagacgattttatgagagctgggggctctataaatggagttatgaatttaatgaacgagtttaaagctcacgtaaaaggggtatcagtacttgtagaatcaaaagaagttaaacaaagattgattgaagattatacttccttagtcagattatcagatgtcgatgaatataatcaggaatttaaagtagagccaggcaacagcttgtctaaattttcttag

SEQ ID NO: 2328 - DNA, 378 bp, Staphylococcus capitis
atgaaaacagtaaacacaaacaaagcaccagaagcattaggaccatattcacatgctacagtagttaatgacttagtctttacatcaggtcaaattccattaacacttgatggaaatatcgttagcgatgatgtacaagaacaaacgaagcaagttttagaaaatttaactgtagtacttcaagaagctggttctgatttagattcagttgtgaaagcaacaatttttatttctgatatgaataatttccaaaaaattaatgaaatctatggagattatttcggcaaataccaacctgcacgtagctgtgttgaggtagcacgtttacctaaagacgtgaaggtggaaattgaattgataggtaaagttaaggaataa

SEQ ID NO: 2329 - DNA, 309 bp, Staphylococcus capitis
atgaaagtgacagatgtaagacttagaaaaatacaaactgatggcagaatgaaagctcttgtttccattacacttgatgaagcatttgtaatccatgacttacgtgtaattgaaggaaactcaggtttattcgttgctatgccaagtaaacgtacaccagatggtgaattccgcgacattgcgcatccaatcaactctgatatgcgtcaagaaattcaagatgctgtaatgaaagtatatgatgaaactgatgaagtcattccggataaaaatgcgacttcagacaatgaagaatcagacgaagcttaa

SEQ ID NO: 2330 - DNA, 1356 bp, Staphylococcus capitis
atgcaaagacatgcgattattttggcagcaggtaaaggcacaagaatgaaatctaaaaaatataaagtgcttcatgaagttgctggcaagtcaatgattgaacatgttctcaacaatgttaaacaatctggagttaatcaaattgtaactatcgttggacacggcgcagaaagtgtcaaagaaactttaggcgatcaatcattatacagttttcaagaggaacaacttggaacagcacatgctgtaaagatggcatatgaacatttggaagataaagaggggacaactttagttgtgtgtggtgatacgccgttaatcacatctaagacgttagaatcacttatcgaccaacacgaaagtacagaagcacaagtaactgtattatctgcatcaactcaacaaccgtacggatatggtcgaattgtaagagattccaaccatcaattagaacgaattgttgaagaaaaagacgcaaatgaaaacgaacgtgcgattaaggaaattagttctggtatttttgcttttgataataaagagctatttgataaattagcacaagtcaaaaatgataacgttcaaggtgaatattatttacctgatgttttatcgcttattttagacgatggtggtaaggcagaagtgtaccatacagatgattttgacgaaatcatgggtgtcaacgatagagttatgttaagtcaggctgaaaaagctctacaaaaacgtattaatcattaccatatgagaaatggcgtaactattattgacccagattcaacatttatcggtcctgatgtagaaataggtgctgacacaacaatagaaccaggtgtacgtattggtggccgtacgattatcggtgaagacgtattagttggtcaatattctgaaattaataatagtacaattcgttcgaatgctaacatcaaacaatctgtcattaacgattcagttgtaggagaaaaaacaaaagttgggccatttgctcagttaagaccaggctcaaatcttggcgcagatgtaaaagttggcaactttgttgaagttaagaagtcagatctcaaagatggcgcaaaagtttcacatcttagctatattggtgatgctgaaattggtgaaagaacaaacattggctgtggttctataactgttaattacgatggggtaaataaatttaaaacgattgtaggtaacgatgcgtttattggttgtaatactaacctcatagcccctgtaacagtaaatgatcacacccttattgcagctggttcaacaattacagatgatatacctgaagatagcttagccatcgcgcgcgctagacaagtgaataaagaaggctatttgaaaaaatag

SEQ ID NO: 2331 - DNA, 966 bp, Staphylococcus capitis
atgttaaataatgaatataagaattcatcattaaagatcttttcgctcaaaggtaatgaacctttagcacaagaagtagcagatcatgtagggattgaactagggaaatgttcagtaaaacgttttagtgacggagaaattcaaattaacatcgaagaaagtatccgtggttgtgatgtgtttattattcaaccaacttcatatcctgtaaaccttcatttaatggagttacttattatgattgacgcatgtaaacgtgcttcggcagctaatattaacatcgtagttccttactatggttatgcacgtcaagatagaaaagcgcgaagccgtgaaccgattacagctaaattagttgcaaatcttattgaaacagcaggtgccaatcgtatgattgctcttgatttacatgcacctcaaattcaaggattcttcgatatcccaatcgaccacttaatgggtgtacctatccttgctcaacattttgaaaatgaccctaatatcaatccagaagaatgtgttgttgtttcaccagaccatggtggtgtaacacgcgcacgtaaattagcagacattttaaaaactccaattgcaattatcgataaacgtcgtccaaaaccaaatgtagcagaagtcatgaatattgttggtgagattgaaggacgcacagcaattattattgatgatattatcgatactgctggaacaattacattagccgcgcaagcacttaaagataaaggtgctaaagaagtttatgcttgttgtacgcaccctgtattatcaggtccagctaaagaacgtattgaaaactctgcaattaaagaattgatcgtttcaaattctattcaattagaggacagcagaaaaccatctaatactaaagaactttctgtagcaggattaatcggtaaagcgattatccgtgtttatgaacgagaatctgtaagtgtattatttgactaa

SEQ ID NO: 2332 - DNA, 660 bp, Staphylococcus capitis
atggcttcattaaagtcaatcatccgtcaaggtaaacaaactcgttctgaccttaaacaattaagaaactcaggtaaagtacctgcagttgtatacggttacggtactaaaaatacttcagttaaagttgatgaagttgaattcatcaaagtaatccgtgaagtaggacgtaatggtgttattgatttaggcgtaggttctaaaacaattaaagtaatggtttcagattatcaatttgacccattaaaaaaccaaattactcatatcgacttcttagcaatcaacatgagtgaagaacgtactgtagaagtaccagttcacttagttggtgaagctgtaggcgctaaagaaggtggcgtagttgaacaaccattattcgacttagaagtttcagctactccagaaaatatccctgaatcaatcgaagtggatatctctgaattacaaatcaacgacagcttctctgttgctgatgttaagattactggtgacttcactatcgaaaatgacccagaggattcaatcgtaacagtcgttcctccaacagacgaaccttctgaagaagaagtggaagctatggaaggtgaatcagctactgaagaacctgaagttgttggtgacgacaaagaatctgaagaagaaaacaaagaagaagagtaa

SEQ ID NO: 2333 - DNA, 573 bp, Staphylococcus capitis
atgaagtgtattgtcggtctcggcaacataggtaaacgtttcgaacttacaagacataatattggttttgaagttatcgattatatattagaacgtaatcaatttacactcgataaacaaaagtttaaaggtgcttacacgattgagcgtttaaatggggacaaagtattatttatagaaccaatgacaatgatgaatctttcaggcgaagcggtagcaccgttaatgaattattataatgttgaacctgaagatttaatcgttttgtatgatgatttagatttagagcagggacaagtgcgtctgcgtcaaaaggggagcgcgggtggacacaatggaatgaaatctataattaaaatgcttggtactgatcaatttaaacgtattcgaattggagtagggagaccaacgaatggtatgtcagttcctgactacgtattacaacgcttttctaaagaagaaatggtaactatggacaaagtgattgaacatgctgctagagctgtcgaagctttcatagaatcatcaagatttgatcatgtaatgaatgaatataatggtgaagtcaattga

SEQ ID NO: 2334 - DNA, 3510 bp, Staphylococcus capitis
ttgaaatcaataattactgattatattagtgaagataagcgttttcaggaattagacgacgtttttggacaggagaatatattagttacaggtctctccccttctgctaaagcaacgattattgctgagaaatatttaaaagatcagaaacaattactacttgtaactaacaatttgtatcaagcagataaaattgaaacagatttattacaatatgttgatggctcagaagtttataaatatcccgttcaagatattatgactgaagagttttctacacaaagtcctcagttgatgagtgaacgcgtacgaacattgacggcgttagcccaaggccaacgagggttatttatcgtgcctttaaatggctttaagaaatggctaactccagtcgatatgtggaaaaatcatcaaatgacattaaaagtaggcgaagacattgatgtcgaggcgtttcttaacaaactagttaatatgggatatcgtcgagaaagtgtagtatctcatattggtgaattctcactacgtgggggcattatcgatatatatccattgataggatcgccggtaagaatagagttatttgatacagaagtcgactccattagagatttcgatgttgaaacacaacgttctaatgagaacttagatgaggtagatattactactgcaagcgactatatcatcactgatgaggttattcagcatctacaaacacatttgaaagaagcttatgaacacacacgtcctaaaattgaaaaatctgtacgcaatgatttaaaagagacgtatgaaagttttaaattatttgagtctactttctttgatcatcaattattacgtcgcttagtcgcatttatgtatgaacaaccctctactattatagattactttagagatgatgcggttatcgctgtagatgaatttaatcgtgtcaaagagacggaagaaacgttaactactgaagttgacgattttattagtaatttaattgagagtggaaatggattcatcggtcaaagtttcatgaaatatgatgggtttgaaactttacttgagaagaaaccagttgcatacttcacgttatttacatcttcaatgcaagtaccattgcaacatatcattaaattctcatgtaaacctgttcaacaattttacggtcaatacgatatcatgcgctctgaatttcaaagatatgttcataatgactataccatcatggtgcttgtggagaccgaaactaaagtagagcgtattcagtctatgttgaatgaaatgcacatccctactgtttctcatatccatgaaaaggtagatagcggacaagctatcgtaacggaaggtagtttgtcagaaggctttgaactaccatacatgcaattagtggtcattacggagagagaacttttcaagactaagcaaaagaaacagcgaaaacgcaccaaaacgatatccaacgctgaaaagatcaagtcttatcaagacttgaatgttggcgactacattgttcacgtgcatcatggtgtgggtcgttacttaggtgttgaaacacttgaagtaggcgatacgcatcgagattatattaaattacaatacaaaggaacagatcaattattcgtaccagtggatcaaatggatcaagttcagaagtatgttgcttcagaggataaatcgccaagactgaataaattaggcggtacagaatggaaaaaaacgaaagctaaagttcaacaaagcgttgaagatattgctgatgaactgattgatctgtataaagagcgagagatgtctgtgggttaccaatacggggaagacaccgcagaacaatcagcctttgagcatgatttcccttatgaattaacgccagaccaaggtaaatcaatcgaagaaataaaaggtgatatggaacgtgaaagacctatggatcgcttattatgtggcgacgtaggttatggtaagactgaagtagctgtacgtgctgcatttaaagcggttatggaagggaagcaagtcgcattcctagtaccaaccacaattttggcgcaacagcactatgaaacgttaattgaacgtatgcaagattatcctgtagaaattcaacttgtcagtcgtttccgtacgacgaaagaggttcgtgaaactaaagaaggcttaaaatctggctacgttgatattgtagtaggaacacacaaactacttggtaaagatattcaatataaggatttaggcttactcatagtcgatgaagaacaacgctttggtgtgcgccataaagagcgtattaaaacacttaagaagaacgttgacgtgcttacattaactgcaaccccaattccaagaacgttgcatatgagtatgttaggtgttcgtgatttatccgtaattgaaacaccacctgagaatcgtttcccagtgcaaacctatgtattagagcagaatacgaattttattaaagaagcattagaacgtgagttatctcgtgacggccaagtattctatctttataacaaagttcaatcaatttatgaaaaacgtgaacagcttcaaatgttaatgccagaagctaatattgctgttgcacatggacaaatgacagaacgtgatttagaggaaacaatgcttagctttattaaccatgaatacgatatcctcgtgaccacaacgattatagaaacaggcgtagatgtacctaacgcgaatacattgattatcgaagaagcggaccggtttggtcttagtcagctgtatcaattaagaggtcgtgtaggacgttcgagtcgtataggttatgcttatttcttacatccggcgaataaagttctaaatgaaactgctgaagaacgtttacaagcaattaaagaatttactgaattaggttcaggatttaaaattgctatgcgagatcttaatattcgtggcgcgggtaacttacttggtaaacaacaacacggctttattgattctgtcggtttcgacctatattcacaaatgcttgaagaagccgttaatgagaaacgtggtattaaagaagagacgccagatgcaccagaagtggaagttgaacttaaccttgatgcgtacttaccggctgaatatattcaaaatgaacaagctaaaattgaaatatataaaaagctgcgtaaggttgagacagaagatcaattatttgatgtgaaagatgaattaatcgatagatttaatgattatcctgtcgaagtagaacgtctcttagacatcgttgaaatcaaagtacacgctttacatgctggtattactttaattaaagataaaggtaaaacagttgaaatttcactctctaataaagctaccgaaaatattaatggtgaagaattgtttaaacagacgcaacctctaggtagagcgatgaaagtaggcgtacaagaaaatgcgatgcgcgttactttaactaaatctaagcaatggctagatagtttgaaattcttagttaaatgtattgaagaaagtatggcgattgaagatgaagcataa

SEQ ID NO: 2335 - DNA, 1542 bp, Staphylococcus capitis
atgaagcataagcctaagcctaaaacggcattcaatggtgttgtgatactgacgctagcgcttgtcattgttaaaatcttaagcgctatttatcgcgtaccttaccaaaatgttttgggcgatcagggtctgtatgcttatcaacaaatttatcctattgtcgctttaggaatgattctatctatgaacgcaatacctagtgcggtcactcaagtattaggtgtgcatagtccaattgcatcatactcgaaggtcatgttgagattacagtatgttggcttggccatatttacaatcatattcattggtgcgtatcctttagcgctatggatgggcgattcaagactgacacctatgttaagaatggcaagttttagttttatatttattggcatactaggtgtcttacgcggtttttatcagacaaaacaagctatgaatattccagctatttcccaggtaatagaacaattgattcgagtaagtttaatcatcgtagcgattgttttattttctttacacagttggtctatttatcaggctggtacactcgcgattttagcatcttctattggatttttaggttccatgctatatctagtgctgacgcgtccattttccttaaaattaaagcacaataccgctcatgttgattggcgtcagctcttcatgtcgatactcatctatgcattaagccaattaattgtcattttatggcaggtggttgatagcttcactgttatacacacgcttcaagtgagtggtctgtcattcgatacagctatccgatataaaggtatttatgatagaggggcatcctttattcaaatggggttaattgttaccacaacatttagtttcgtacttatacctttattgactgaagctattcatcaacgcaatcaagttctgatgaaccgatatgcgaatgcttcaattaaaattacggtattgataagttctgcagcaggaattggcttaattaatctcttgccactcatgaatcgtgtcttttttaagaacgatagtctaacgggaacactcagtatttacatgattacagtcgtttgtgtttcacttattatgatgaatatagcattattacaagtattgaatcgcattagacctattttagtgggtatcgtacttggaatactctcaaaagctattttgaatattatgtgtatcagtcagctaagtatctttggtgcgagtttaagtaccgtactttcattaattttatttgtaactgtgctacaagtggcagtactgaaacactatcattttagacatatgtcgttatttatcattaaactcataggcggtttagtggtgatgagtataagtgtgcaaatcatcatgctcaccattcctgcccatggacgtgtaatgggacttattgaattagttatgagtgccttcattggtgttggtgttttactcatatatgttgtaatgtttaatgtattaagctataaagaactcaaatatttaccttttggagataaactctatcattttaagaaaggacgacgttcatga

SEQ ID NO: 2336 - DNA, 1194 bp, Staphylococcus capitis
atgactcacacgattacagttgtaggtttaggtaattataatatcgatgatttgccactaggggtatatcgttttctggaaaataaaaccaaaatttatgcgagaacgctagatcatcctgtcatagaagagcttaaagaaacgcttcaattcgaaagtttcgatcatatatatgaaaagaactcgagttttgaagaggtctatcaaacgatagtgaatgaattaattcaacacgcacaaactgaagatatcgtgtatgctgtgccaggacatcctcgtgtagctgaaacgactactgcccaactattagaatatagtcaatcacataatgatattcaggtggaaattttaggtggtaaaagctttattgacgacatttttgaagcggttgatttagatcctaatgatggatttacgctattagatggtactgcgattcaagaatcaatgcttaatgtacgcacacatacattgattactcaagtctacagtgcaatggtggctgctgacttaaagttagttttaatggaacgttacccagatgattttgaagtgaaaattgttactggtgcacatagtggaggttcacatgtaattgaatgtccactttatgaaattgatcaccatgaaaatgaatttaataatcttactagtatctttgtgccaaaagtagaagatgagaaagcactatatcaagactttgattatgccgtacaaactatagatgttcttgtagatgacgagaaaggttgtccctgggataaagttcaaactcatgaaacgcttaaacgatatttattagaggaaacatttgagttgtttgaagctattgacaatgaagatgattggcatatgatagaagagcttggcgacatcttattgcaagtattactgcatacaagcattggtaaaaaagatggctatatggatattaaagaagtgattgaaagcctcaatgctaaaatgatacgtcgacacccacatatatttggagaggcacaagctgactctatggacgacttaaaagatatttggtcagcagcgaaagataaagaaggaaagaaacctcgcgtcaaattcgagaaagtatttgcagaccatttcttgaagttgtatgatgaaaccaaaaataaacactttgacgaagatgctctcagaaactttttacaacaaggggagaataatcaatcatga

SEQ ID NO: 2337 - DNA, 264 bp, Staphylococcus capitis
atgagattagataaatatttaaaggtatcacgactcgttaaacgtcgtacgttagctaaagaaattagtgatcaaggtcgtgttactgttaacggaaacgtagcgaaggcggggacggacgttaaagaaaacgatgaactcgtcatacgcttcggacaaaaactagtaactgttaaagttacaggtttaaatgaacatgctacaaaagaaaatgcaaaaggcatgtatgagttgataaaagaagaacgcattgatgaagcgtga

SEQ ID NO: 2338 - DNA, 402 bp, Staphylococcus capitis
atgagcaaaaaagtggagaatataggtaatcagtatacatcgcaagaaaataagaaaaagcaacgtcaaaaaatgaagatgcgtgttgttcgaagaagaattaccgtttttggcggtatacttttggcaattatactgattttattagtattgcttgtcattcaaagacatagtaacgatcaagatgcggtggaacgaaaacacaaagaagcacaatttcaaaagcaacaagatgaggaaattgcattaaaagaaaaattaaacaaccttaacgataaagattacatcgaaaaagttgctagagatgattattatttaagtaataaaggcgaagttatttttagattaccaggtgataataaatcctctaaatctaaatcatccgacgatgacgataattag

SEQ ID NO: 2339 - DNA, 405 bp, Staphylococcus capitis
atgtcaatcgaagtaggaaacaaacttaaaggtaaagttacaggtatcaagaaatttggtgcatttgtagaattacctgaaggaaaaagtggtttagttcatatcagtgaagtggctgataattatgttgagaatgtcgaagaccacttatcagttggtgacgaagttgaagtaaaagtattatcaattgctgatgacggtaaaattagtctatcgattaaaaaagctaaagatcgtcctcgtaaacctcaccacaataataaatctaatcatgggagaccagctcaaaaaactgaagactttgagaagaaattaagtaacttcttaaaagacagtgaagataaattaacttctattaaacgtcaaacagagtctcgtcgtggcggtaaaggctcaagacgttaa

SEQ ID NO: 2340 - DNA, 1287 bp, Staphylococcus capitis
atgaagttaaatacgcaaggatggaacaacgatgcacatatcattgtcgcagtttcaactggcattgatagcatgaccttattacatagtttattaaaccagtaccgtgatacctataaaacattgacctgtgtacatgttaatcatggattacgagcgcaatcagttgaagaagaaatatttttaaacgagtattgtcaaaaaaatcaaattaaattatatgttaaacatctcgacttatctaaaatagttgataaaggaaatagtattcaaaatgaagcgcgtcgattgcggtatcagtggtttggagaagtcattcgtgatttaaatgcagatgtattacttacagcgcatcatcttgatgaccaacttgaaacgattctttatagggtgctgagtggtcgttcaactagaagctcattaggaatgtctgatatctcgaactatgaagattaccttgtgtgtcgtcctttgctgaacatttacaaaaaagacatcatcaattaccaagaaaagtatcaggttccatattttgaagatagttctaatcaagatacgaaatatgttagaaatgatatacgacaacggattatcccaagtattgataacaatccgtttcttgattcccatcacttgttaaagttaaaggaatggcacgacaatgaactacaattgttaaaagaacatgcgcgttactttgtcgctcactttgtttctaaaaatgatagcgtcgcggggtatacattttcaagggaagcatttaaccgacttaatcctaatgttaaaacaactgtgatggatcaattattagaggatatagtgacccattcaactatttcacaaaaaacgtatgacgagtggttccaacaaatccaaaatgaaaaatctcaatttcatatcgatattacagataaatggataattcaaattgcatatgatacattaataataatggctaaattagaagacaatatatatataaagcaaaatattatgatagaccggccaggactatatcaatttaacgactatgatatatgtattaaggaacacttacctcagacgtcttaccctcttaaagttcgtgcgagacgtaatggagatatgttcaaattaaacgggagaaatggacataaaaaagtgagtcgtttattcatagatcaaaaaattcctgcaattgaacgggaacaaatgccaatagtactaacctatttaaatgaaatagtagcaataggcgaattatatgttcatgagcagtttaaagatttaattacgattaaaaaatga

SEQ ID NO: 2341 - DNA, 540 bp, Staphylococcus capitis
atgcataatgatttaaagaatgttttgttaactgaagaagacattcaaaacatttgtaaagaattaggagcgaaaattactgaggactataaagaccgtcctctagtgtgtgtaggtattcttaaaggttcagttatgtttatggcagaccttatcaaacgaattgatacacacttatcaatcgactttatggatgtttcaagctaccatggtggtacagaatcaacaggagaagttcaaattttaaaggatttaggttcctctatagaaaataaagatgtactcattattgaagatattttagaaacaggaacaactttaaaatcaattactgaattgctacaatctcgtaaagtaagttctttagaaattgtgactttattggataaacctaatcgacgtaaagctgacattgaagcaaaatatgttggtaagaaaattcctgatgaatttgttgtaggttatggtttagattatggggaattatatagaaatctaccatacattggtactttaaaacctgaggtttactctaaatag

SEQ ID NO: 2342 - DNA, 2136 bp, Staphylococcus capitis
atgcagaaagcttttcgcaatgtgctagttatcgcaattataggcgttattatatttggtctattttcgttcttaaatggtaacggaaaaacaccaaaacagcttacatacactcaatttgttaataagttggataaaggcgacttaaaatcattagaaatccaacctgaacaaaatgtctatatggtaagtggtaaaactaaaaatgatgaagactattcatcaacaattttatataacaatgaaaaagacttacaaaagatcactgatacagctaagaaacaagatggtctaaaatttaaagttaaagaagaagaaaaacaaagtgtctttgttagtattttatcaacactgattccagtattaatcattgcattattatttattttcttccttagtcaagcccaaggtggtggcggcggaggtcgtatgatgaactttggtaaatccaaagcaaaaatgtacgatagtaacaaacgtcgcgttcgtttctcagatgttgcaggtgctgacgaagagaaacaagaattaatcgaaattgtagatttcttaaaagataataagaaatttaagcaaatgggatctcgaattcctaaaggtgttttacttgtaggacctccaggtaccggtaaaactttattagcacgtgcagttgcaggggaagctggcgcaccattcttctctattagtggttctgacttcgtagagatgtttgtcggtgtcggtgcaagccgtgttcgtgatttattcgaaaatgctaagaaaaatgcaccatgtattattttcattgacgaaattgatgcagtaggacgtcaacgtggtgctggtgttggtggtggtcatgacgaacgtgaacaaacacttaaccaattattagttgaaatggatggtttcggtgaaaatgaaggtattatcatgattgctgcaactaaccgtccagatatcttggacccagcgttattacgtccaggtcgtttcgacagacaaattcaagttggccgtccagatgttaaaggccgtgaagccattcttcatgtacactctaaaaataaaccacttgatgaaacagtagacttaaaagccatttcacaaagaacgccaggtttttcaggtgcggatttagaaaacttacttaacgaggcttcattaattgctgcacgtgaaggtaaaaataaaatcgatatgcgtgatatagaagaggcaactgaccgagttatagccggtccagctaagaaatctcgagttatttctgaaaaagaacgtaatatcgttgcgcatcacgaagcaggacatactattattggtatggttcttgatgaagctgaggtcgtgcacaaagtaactattgtccctcgtggacaagctggtggttacgcgatgatgttacctaaacaagatcgtttcttaatgactgagccagagttacttgataaaatttgtggtttacttggtggacgtgtttctgaagatattaacttcggtgaagtatcaacaggtgcttctaatgactttgaacgtgcaactcaaattgcaagatcaatggttactgaatatggtatgagtaagaaacttggaccgttacaattctctagtagcggtggtggccaagtattccttggtaaagatatgcaaggagagcctaactattctggacaaattgcttacgaaattgataaagaagtccaacgtattgttaaagaacaatatgaacgttgtaaacaaatcttgttagaacatcaagaacaacttaaacttatcgctaagacattgcttactgaagaaacgttagttgcagaacaaatacgtgcattgttctatgacggtgaattacctgaagtagattatgatgcagctaaagttgttaaagatgaagacacagattatagtgacggaaaatatggtaaatcttacgatgatattcgtaaagaacagctagatgaaggcgacgagaaagaaaaagaagatcgtaaagaaaatcgtgatatcgagcacgaaagacgtcgacaacataatgaagaccacgattataaaggtcaagagtctgatcaagactctgattctgatgtaactggtcatgagcagtcaccaaacatcgataaaccatatgatccaaataatccagataatagacattaa

SEQ ID NO: 2343 - DNA, 882 bp, Staphylococcus capitis
atgacacatgattatatcgtaagaggattggcttatgacggtgaaattagagcttatgctgcaactacaactgaatctgtgcaagaagcccaaacaagacactatacatggccaactgcttcagcagcaatgggacgtacgatgactgctacggtaatgatgggagcaatgttaaaaggagaccaaaaattaactgtaacggttgatggtcaaggaccaattggaagaatcatagctgatgccgatgcaaaaggtaatgtacgtgcatatgtagaccatccacagacgcacttccctttaaacggacaaggtaaattagatgttagacgtgcagtaggtactaatggttcaatccaggtagttaaagatgtaggtatgaaagattatttctctggggcgagtccaattgtttctggtgaactaggagatgactttacgtactactatgcaacaagtgaacaaacaccatcttcagtaggtttaggtgtattagtgaaccctgataactcaattaaagctgcaggtggatttattatacaagttatgcctggtgctaaagatgaaactgttacaaaattagaaaatgctattaatgaaatggaacctgtatctaaattaatcgaacaaggtttaactccggaaggtattcttaatgagattttaggagaagataacgttcaaattttagatacgacaacagcacaatttgaatgtaactgtagtcatgagaaattcttaaacgctattaaaggtctaggtgaagcagaagtacaaagtatgattgatgaggatcacggagctgaagctgtgtgtcatttctgtggaaataaatatcaatatactgaaagtgaattagaagatttgttaacagcgatgaaataa

SEQ ID NO: 2344 - DNA, 933 bp, Staphylococcus capitis
atggcacaaaaacccgtagataacgttacacaaattattggtaacacacctgtagttaaattaagaaacgtagttgatgaagatgcggcagatatttatgtaaaattagaatatcaaaacccgggcggttcagtaaaagaccgtattgcactagcaatgattgaaaaagctgaacgtgagggcaaaattcaacctggcgatactattgtagaaccaacaagtggtaacactggaattggtttagctttcgtatgtgcagctaaaggttacaatgctgttttcacaatgcctgaaacaatgagccaagaacgtcgtaacttattaaaagcttatggtgcagaacttgtattaacaccagggtctgaagcgatgaaaggtgctattaaaaaagctaaagagcttaaagaagaacacggttatttcgaaccacaacaattcgaaaaccttgcaaaccctgaaattcatgaacttacaactggtcctgaacttgtagatcaattcgaaggtaaacaaattgatgcattcttagcaggtgtaggtactggtggtactttatctggtgttggtaaagtcttaagaaaagaataccctaatgttgaaatcgttgcgattgaaccagaagcttcaccagtattaagtggtggagaaccaggtccacataaattacaaggtttaggtgctggtttcgtacctgacacattaaatacagatatttacgatagcattattaaagttggaaatgatactgcgatggatatggcacgtcgtgttgctaaagaagaaggtatcttagcaggtatttcttcaggagctgcaatatacgcagcaatccaaaaagcaaaagaactaggtaaaggtaaaacagttgtaacagtcttaccaagtaatggtgagcgttacctatctacgcctttatactcatttgatgactaa

SEQ ID NO: 2345 - DNA, 804 bp, Staphylococcus capitis
atgactaaaacaaaaattatgggcatacttaacgtcacgcctgattctttctcagatggaggtaaatttaattcagtagacaaagctactaaacgagtaaaagaaatgattgatgagggtgttgatatcattgatattggtggcgtgtcgacacgacctggttatgaagaagtatctttggaagaagaaatggaaagagttattccagttgttaaagcactagtacaatatgatatacaactttcaattgatacatttcgaagcgaggttgctgaagcatgtctcaaactaggtgctacaatgattaatgatcaatgggcaggtttgtatgatcccaaaatttttaaagttgtagctgaatatggtgctgaaatcgttttaatgcataatggggacggtcgaagagaagaccccgtcgtagatgaaatgcttacgtcacttcttgctcaagctaataaagctgaaatggcaggtatcccacaagaaaaaatttggttggatccaggaattggttttgctaaaacacgcgatgaagaaaatgaagtgatggctcgtttagatgaactggtagcaactgaatatcccattttattggcaacaagccgtaaaaggtttattaaagaaatgattggaacagatacaacgccattagagagagatgaggccacaggagcaacaactgcctatggtataatgaaaggtgttaaagctgttcgagttcataacgttcagttgaatgcgcggttagctcatagtatggattttttaaaggagaatgaacatgaacgacataatctttcttaa

SEQ ID NO: 2346 - DNA, 366 bp, Staphylococcus capitis
atgaacgacataatctttcttaacggtatgcgtttttatggatatcatggggtgttaccatcagaaaatgaaattggtcaaatatttatagtagatgttacgttgaaggtcgacttaaaagatgctggtcaatcagatgatgttgcagatactgtaaattatggcgaagtgtttgaagaagttaaatcaattgttgaaggtaagccatctagattgattgaacatctagctgaacgtattgcaaaacgtataaattcacactataatcgtgtaatggaaacgaaagttaaaatcactaaagaaagtccacccattcccggacattatgatggtgtaggaattgaaatagtgagggagaattgctaa

SEQ ID NO: 2347 - DNA, 480 bp, Staphylococcus capitis
atggttaaagcgtttttaggtttagggagtaatattggagaacgtgaaacgcaacttaaagaagctataaggattttaaatcgttttgataatattaaagtgactcaaatctctgatatttatgaaactgaaccagtgggatacactaatcaaccgaactttttaaatttatgtgttgaaatagatacaacattagatcctcaatctttactatcatgttgcttaaaaacagaacaacaactccatcgagtaagagttaaacgttgggggccaagaactttagatgtagatatattattatatgaagatcaaattatcgaagaagataatttatcggtaccacatccgaggatgaatgaacgttcgtttgtgcttattcctttaaatgatattgcttcgaatcaaatagaacctcgtacccatctaactattggcaatttagtaaccgcagacgatactgttaaaaagtataataagtga

SEQ ID NO: 2348 - DNA, 1488 bp, Staphylococcus capitis
atgtcagaagaaatgaatgaccaaatgcaggtccgtcgtcaaaaactacaagaattaatagatttaggaatagatccgttcggtcatcgttttgatcgtagtgctacttctaacgagttaaaagagcaatgggatcaattttcaaaagaagaattacatgaaaaagaggacgaaagtcacgttgcaattgcaggtcgtttaatgacaaaacgcggtaaaggtaaagcaggatttgcacatatccaagatttagaaggtcaaattcaaatttacgtaagaaaagaccaagttggagaagaacaatttgatatttggaaaattgctgacttaggtgacattgttggaatcgaaggtgttatgtttaaaactaatactggtgaaatctcagttaaggctaagtcatttacattattatctaaatcattacgtcctttaccagataagttccatggactacaagatattgaacaaagatatcgtcaacgttatttagatttaataacaaacgaagatagtacacgtacatttataaatcgcagtaaaattattcaagaaatgcgtaattatttaaataaacaaggtttcttagaagtagaaacacctatgatgcatcaaattgctggaggtgcggctgcacgtccatttgttacccaccataacgcattagatgctacgttatatatgcgtatagctattgaattacacctaaaacgcttaatcgtcggtggtcttgaaaaagtatacgaaattggccgtgtattccgtaatgaaggcgtatctacacgtcataatccagaattcacaatgatagaattatatgaagcctacgctgattatcatgatattatggatttaactgagagcatggttagacatattgctcaagaggtctttggttcagctaaagtttcttataatgatgaagaaatagatttagagtcttcttggagaagacttcacattgttgatgcagttaaagaagccactggcgtgaatttctatgatgttaaaactgatgaggaagcggtaagcttagctaaagaacatggtattgagattactgaaaatatgaaatatggtcatattttaaatgaattcttcgaacaaaaagttgaggaaacgttaattcaacctacattcatttatggccatccaattgaaatctctccattagctaaaaagaatccagaagatcctaggtttactgatcgatttgaactatttatagtgggaagagaacatgcgaatgctttcactgaattaaatgacccaatcgatcaacgtgaacgtttcgaagcacaacttgtcgagaaagaacaaggtaacgatgaagcgcatgagatggatgaagattatattgaggcgttagaatatggtatgcctcctacaggtggattaggtatcggtatcgatcgtttggtaatgttactaacagattcaccttctatcagagatgtactattattcccttatatgagacagaaataa

SEQ ID NO: 2349 - DNA, 1269 bp, Staphylococcus capitis
atgacagttaaaacaaccgtttcgacacaagatatagatgaagcttttttacgcctcaaagatatcgtgaaagaaacgccattacagcttgaccactatctttctcaaaaatatgattgtaaagtatatttaaaaagagaagacttacagtgggttcgttctttcaaattaagaggcgcatataatgctatttcagtattatctgaagaagctaaaaatcgaggtatcacttgtgctagtgctggtaaccatgctcaaggcgtggcatacactgctaagaaattaaatcttagagctgtaatttttatgccagttactacacctcttcagaaaataaaccaagttcaattttttggtagcgataatgttgaagtcgtgctaactggtgatacatttgatcattgcttagaagaagctttagcttatactaaagaaaatgaaatgaattttattgatccatttaataatgtatttacaatttcaggtcaaggaacacttgccaaagaaattattgaacaatccgaagcagatggagtaaaatttgattatttattttctgctataggcggtggaggtttaatatctggtattagcacatatttcaaggcttattccccaaacacacaaattattggtgttgaacctgcaggcgcctgcagtatgtatgaatctgtagtcgtaaacaaacgggtcatcactttagatcacattgataaatttgttgatggtgcttcagtagccagagttggagatattacatttgatatagctaagcataatgtagatgattatgtacaagtagatgaaggagcagtatgttctactatactagatatgtactctaaacaagctatagtagctgaacccgcaggcgctttaagtgtagctgctcttgaaaactatagagcaaaaattaaaggtaaaactgttgtatgtgttgtaagcggtggtaataatgatattaatagaatgaaagaaattgaagagcgttcattattatttgaagagatgaaacattacttcatccttaattttcctcaaagaccaggggctttaagagagtttgttaatgatgtactaggtcctcaagatgatattactaaatttgaatatcttaaaaagtcctctcaaacaacaggtactgttatcattggtattcaacttaagcaccataacgatctcattcaattaaaagaacgcgtaaatcaatttgatccatcaaatatatatattaatgaaaataaaatgttatactctttattaatttaa

SEQ ID NO: 2350 - DNA, 570 bp, Staphylococcus capitis
atggaaattcaacctattacaacatacacaggtaaagttgttccccttttctacgacaatatagatacagatcaaattatacccaaagttcatctcaaacgtatttcaaaaaccggctttggtcccttcgcctttgatgaatggcgttatttacctgatggttctgataatccagaatttaaccctaataagccagaatataaagatgcttctattttaataacgggagacaactttgggtgtggttcaagtcgtgaacatgccgcttgggctttaaaagactatggttttaatattattatcgcaggtagttttagtgatatcttctatatgaattgtacgaagaatgcaatgctccctattacacttgataaggaagcacgagaacatctggctcaatttgaagaaattacggtagatctaccttcgcaaaccgtatcatcttcagaacaaacttttgaatttaaaatagatgaaacatggaagaataaattagtaaatggacttgatgatattgccattactttacaatatgaagatctaatagaaaaatatgaaaaaacattttaa

SEQ ID NO: 2351 - DNA, 1371 bp, Staphylococcus capitis
atgggacgaacactattcgataaagtatggaataaacatgttctacatgggaatgaaggtgaaccacaattattatatatagacctacatctcatacatgaagttacttctcctcaagcttttgagggactcagaattcagaatcgttcattaagaagacctgatctcacgtttgctactttagaccataatgtaccgactatcgacatttttaacataaaagatgaaatagcaaataaacagattactaccctacaaaagaatgccaaagactttggcgtccatatctttgatatgggatctgatgaacaaggtatcgttcatatggtaggacctgaaacaggtttaactcaaccaggaaagacaattgtttgtggcgattctcacaccgcgacacatggtgcttttggtgcaatcgcatttggaattggtacaagtgaagttgaacatgtctttgctactcaaacactttggcaaactaaacctaagaatttaaaaatcgatataaatggtaaattacctaccggcgtttatgccaaggatataatactctatttaattaaccaatatggcgttgattttggtacaggatatgcccttgaatttacaggagaaacgattaagagtttgtctatggaagctcgaatgacaatttgtaatatggcaattgaagcaggcgcaaaatacggtatgatgcaacctgataagacgacttttgaatatgttaaaggtcgtccttacgctactaattttgatcaatctattgattggtggcaaactttatattccgatgaggatgcgtacttcgataaagttattgaattagatgtttcaaacttagaacctcaggtgacatggggaacaaatccagaaatgggagttaattttagctctcctttcccagaaattaaagattctaatgatgaacgtgcctataactacatgggactcaaaccaggtcaaaaagccgaagatattgaattaggctatgtattcttaggttcatgtacgaatgcaagactctctgatttagtagaagcaagtcatattgttaaaggtaataaagttcatcctaatatcacagctattgtagtgcctggctccagaacagttaagaaggaagctgaagcactaggtctagatgtcatttttaaagaagctggttttgaatggagagaaccaggttgttcaatgtgtttaggtatgaatcccgatcaagttcctgaaggtgtgcactgtgcttccacaagtaatcgtaatttcgaaggacgtcaaggtaaaggtgcacgaacccatcttgtatctcctgctatggcagcagctgctgctattaacggtaaatttgtagacgtaagaaaggtggtcgtatag

SEQ ID NO: 2352 - DNA, 1044 bp, Staphylococcus capitis
atgagttacaaaatcgtagctttacctggcgatggtataggaccagaaattataaatggtacattagagcttctcgaactaatcagtcataaatatgacttccagtatcaaatagaacatcatcattttggaggtgcggcaatcgataactatggtacacctcttactgatgaaacattagaagcatgtaaatcttcagatgccattttacttggtgcaattggtggtcccaaatggtcaaatcctaaaaatcgtccagaacatgggctattaaaacttagaaaggctttaaatttatatgtaaatatacgtccaaccattgtaagtgagggtaccagtcatttatctccattaaaacaagagcgagttgaaggtactgatttagtgattgtcagagaactaactagcggtatttattttggtgaaccaagtcactatgataatcattcagctctagattcacttacttatactcgtgaagaaatagagagaatcgttagagttgcatttaatttagctcaaaatagaagaaaaaaactaacatccgttgataaagaaaatgtattatcttcaagtaaactttggcgtcaagtggtgaatgaagttaaagcggattatccagatgttgaagtcaaccacttgttagtagatgcctgtagcatgcatttaatcacacaccctactcaatttgatgttattgttaccgaaaatttatttggagacattttgagtgatgaagcatcagtaataccaggctcacttggtttatccccttccgcaagttttggggaacaagggacacgattatatgagcctattcatggctcggcacctgatatcgctaaccaagataaagctaatccatttggtatggtgctatctttggcactttgtttaaaagaaagtctaaatcaagaacaagccgcaatagaacttgaaaaacatgtatttaaactcattaagtctggccatactacagcagatttaggtggaagttacaaaacttctgaaatatttaaactactaaagaataattatttataa

SEQ ID NO: 2353 - DNA, 1536 bp, Staphylococcus capitis
atggaaagccatattcaaatttttgatacaacactaagagacggagaacaaacaccgggagtcaactttacctttgacgaaagattgaaaattgctaagcaattagaaaaatggggagtcgatgtcatagaagctggattccccgcttcaagctctggaagttttaaatcagttgaatcaattgcaaaggcattaactactacagcagtttgtggcttagctagatgtaaaaagtcagatatagacgctgtatatgaatcaacaaagttagctgctaaaccgcaagtacatgtgtttattgcaacatcccctattcatttagagcataaattaaaaatgtctcaagaggaagtattagcatctatcaaagaacatgtatcatacgctaaacaattttttgaagtagtacaattttcccctgaagatgcgactagaaccgaaattccgttcttaattgattgtgtgcaaactgctattgatgctggcgctaccattattaacatcccagatactgtaggattcagttatcctacagaatatgaacaaattttcaaaacattaaccaaatccatccattctgaacaaccaatcgttttcagtgcccattgtcatgatgacctgggtatggctgtatctaatagtctggcagccattgaaggtggtgcacgacgcatcgaaggtactgtgaatggaattggtgaacgtgcgggtaatgctgcgcttgaagaagttgcattagcactttatgttcgacgtgatcattatggtattgaatcccaaattaaacttgatgaaactaagaaaacatcagacctcatatcacgatacgcaggaattcgagttccaaaaaacaaagcaatcgtcggtcaaaatgcgtttagtcatgaatcggggatacatcaagatggtgtactcaaacatcgtgaaacatatgaaattatgacgcctcaattagtcggagtaagtacaactgaattacctcttggtaaattgtctggaaagcatgcttttgctgagaaactaaaatcattaggctatgacattagcactgaggatcaaatcaacttatttaaacaatttaaagaagttgctgataagaaaaaatcagtttctgatcgcgacatccatgcaatcattcaaggatctgagcatgagcaacgagcgatttatcaattagaaaatttacaactgcaatatgtatctaaagggctacaaagtgctgtggtcgtgattaaagataaaaatggaaaaacttatcaagattcaagtattggaacaggttcaatcgtatctatatataatgctgttgatcgtattttccaaagaaagacagaacttatcgattataggattgactcaatcactgaaggtgcagatgcgcaagcagaagttcacgttagtttaatcatcgaaggtacaccagtcaacggtataggaattgatcatgatattttacaggcttcttgtaaagcctatatagaagctcatgcgaaatatatttctgaaacacaaaagaaagtaggtattcattcatga

SEQ ID NO: 2354 - DNA, 1005 bp, Staphylococcus capitis
atgacaaaagtttattatgatcaatcagttgaaaaagatgctttacaaggtaaaaaaattgcagtaattggttacggttcacaaggacatgcacacgctcaaaatttaaaagacaatggttatgatgtagtcgttggtattcgacctggtcattctttcgatagagctaaagaagatggatttgatgtttatccagtgaatgaggctactaaacaagcagatgtagtaatgattttattacctgatgaaatccaaggtaatgtatataaaaatgaaattgaacctaacttagaagcaggcaatgcattagcttttgcgcacggatttaacattcactttggagttattcacccccctgctgatgtagatgtattcttagtagcacctaaaggtcctggtcatttagtaagacgtacctttgtagaaggtactgctgtaccagcattattcggtgtacaacaagatgcttcaggtcacgcacgtgatatcgcactaagttatgccaaaggtattggcgcaacacgtgctggtgttattgaaacttcattcaaagaagaaactgaaactgatttattcggtgaacaagctgtactttgcgggggtatccataaattaattcaaagtggttttgaaactctagtagaagctggatatcaaaaagaattagcatacttcgaagtattacatgaaatgaaattaatcgttgatttaatgtacgaaggcggtatggaaaacgttcgctactctatttcaaatacagctgaatttggtgattatgtatctggaccacgtgttatcactccagaagttaaaaacaacatgaaaactgtattagaagatattcaaaacggtaactttgctaatcgttttgttaaagataatgaaaatggctttaaagaattttaccaattacgtgaacaacaacatggtcatgaaatcgaagcggttggtcgtgaattaagaaaaatgatgccatttattaaagctaaaagtattcaaaaataa

SEQ ID NO: 2355 - DNA, 234 bp, Staphylococcus capitis
atgaaacgtacaattcaatttgtggtcgccgaccaagtgagtacattacatcgtattacaagtgcatttgttcgattacaatgtaacattgatgagctgcatgttaagaggtcagataatgaaggtatttctaatctagaactgaaagtacatattgaagacgaagctgctttcaatattgtattaaaaaagttagaacaacaaatcaatgtattaagtgttacgagtgtttaa

SEQ ID NO: 2356 - DNA, 1800 bp, Staphylococcus capitis
atgtctaatcaaaaagaaagcccctcttttacaacggtaaccgcgattagtaaagaaaatactgatacatttaatgtttctgaatcacaagaaccagaatatcttcaacaacaaactgttaatcaaatgcgtagtggttctcaacttttagtcgaagctttacaacatgaggacgttgattttatttttggttacccaggcggtgctgtattgccactttatgacacattttatgatgggcaaatcaagcatatcttagcaagacatgaacaaggtgcaacccatgccgcagaaggatatgcacgtgtctcaggtaaaactggtgtagttgttgtcactagtggcccaggagctacaaatgcaattactggtatcacagatgcacatagtgattctttacctttagtcgtttttacaggtcaagtagcaacaccaggaataggaaaagacgctttccaagaagcagatttactttctatgacaacaccaattactaaacaaaattatcaaattaaaaatgttgaggatattccaaaaatagttcatgaagcatttcatgtggctaattcaggaagaaaaggtcctgtcgtcattgatttcccgaaagacatgggaatttcatcaacaaacgttggtttatcaaatgaaatcaatttgcctcattatcaagttaaaagtgaaccagaagatatagacattaagacattagtttcatatattagtaaatctaaaaagcctattattctcgcaggttcaggtatcaatcattctaaatcaaatcaattattaacagaatttgtcactaaacatcaaatccctaccgtaaccacactattaggtcttggtgcaataccttacgaacatcccctgttcttaggaatgggaggcatgcatggttcatatgcaagtaatatggcactcactgaatgtgatttactcattaatttaggtagtcgttttgatgaccgactagctagcaaacctgatgcatttgcaccaaacgctaagatagttcacgtagacattgatccttcagaaatcaataaagtcattcaaacagatttaggtattgttgccgattgtaaactcgttttagaagctttatcttctgagaatgtcacaacagctcatcatgaagaatggattcattattgtaaacagaataagcaaaaacatccatttaaatacgataaaaatgaagatgatacatttagtaaacctcaaaaggcaattgaatacatcggaaaaattacaaatggcgatgcaatcgtcactactgatgtaggtcaacatcaaatgtgggctgctcagttctaccctttcaaagaccatggtcaatgggtaactagtggcggattaggtacgatgggatttggtattccttctgcgattggtgcacaactcgcttcccctgataaaactgtcgtatgcttcgtcggagatggtggtttccaaatgactaatcaagaaatggcgctattgcctgaatacaacctgaacgtgaaaatagtgttaatcaataatggtacgttaggtatggttaaacaatggcaagacaaattctttaaccagcgcttctctcattcagtatttaatgatcaacctgattttattaaaatggctgaagcatatggtatcaatggatatctaattgattcaccggacaaacttgaatcacaaatcgatgcagctttcaatcataatggtccagcattaattgaagttcgcatctctcctgtagaacctgtcaatcctatggtacctagtggtaaatctaatcacgagatggagggattataa

SEQ ID NO: 2357 - DNA, 1689 bp, Staphylococcus capitis
atgcgaagcgacatgatcaaaaaaggagatcaacaggctccagcaagaagtcttttacatgcgacgggcgctcttcaaaaacctacagatatgaataagccttttgtggcaatttgtaattcttatatcgatatcgtaccaggacatgttcacttaagtgaacttgctgatatcgcgaaagaagctattcgtgaagcgggtgcaatccctttcgaatttaatacgattggtgtagatgatggcatcgcaatgggacacattggaatgagatattcattaccttcgagagaaattattgcagatgcagctgaaacagtaattaatgcacattggttcgatggtgtgttttatattcctaactgcgataaaatcactccgggcatgatactcgctgcggtacgtacaaatgtccctgcaattttttgttcaggtggcccaatgaaagctggtctatctgctcacggtaaagcacttactttatcttcaatgtttgaagcagtcggcgcttttaaagaggggtctatttctaaagaagaatttttagatatggagcaaaatgcctgccctacttgtggttcatgtgctggtatgttcacagcaaattctatgaactgtttgatggaggttttaggactcgccttaccttacaatggaacagctttagcagttagtgaccaacgtcgtgaaatgattcgtcaagctgcttttcgattagtagataatattaaaaatgatataaaaccaagagacatcgttacacgagaggcaattgatgatgcttttgcattagacatggcaatgggcggctcaactaatactgtgttgcatacattagcaatcgcaaatgaagcaggcattgattatgacttagaacgtattaatgaaattgcgaaaagaacaccctacctttcaaaaatcgcccctagctcttcttactctatgcacgatgtacatgaagctggtggtgttccagctattatcaatgagttaatgaaaaaagatggtacgttacacccagaaagaattacagtcactggtaaaacattaaaagaaaataataaaggaaaggaaatttcaaacttcgatgttatacatcctctcgatagtccctatgatcacgaaggtggactttcagtacttttcggtaatatagctcccaaaggtgcagtgattaaagtaggtggtgtagatccctctattaaagtctttaaagggaaagctatttgttttaactctcatgatgaagctgttgaagcaattgacaatcatactgtacgtgaaggtcatgttgtagttattcgctatgaaggtcctaaaggcggtccgggaatgcctgaaatgttagctcctacttcctctattgttggccgaggattaggaaaagatgtggctttaattactgatggtagattttcaggtgctacaagaggtattgctgtgggacacattttcccagaagcagcatctggtggccctatcggattaattagagatggagatgaaattacaattgatttaacaaatagaaagttagatgttgaccagccacaagaagaactttatcgcagacgtgaagagctacaaccatttaaagcaaaagtaaaaacaggatatctggctagatacacctctttagtcacaagtgctaatacaggtggtattatgcaagttccagaaaaccttatttaa

SEQ ID NO: 2358 - DNA, 465 bp, Staphylococcus capitis
atgttgattactatacacaatttagatgagatgaaagaatttgctgatgttttagtgaaaaatttaaaatcaggagatttaattttattgaacggcgatttaggtgctggtaaaacgactttaacacagtttataggaaaagctttaggtgtgaaacgaactattaattcaccaacatttaatattattaaatcttataaagggaatgaactcaaacttcatcatatggattgctatcgtttggaagaccatgaagaagatttaggatttgaggaatatttcgaagaccatgctgttacggtcgttgaatggagtcagtttatttctgatttattaccttatcaacatttgacaatcaacattaatgttataaatgaaaatgaacgtacaataatgattgaagcacaaggtgcacattacgaaatgttaagggaggttgttatcaatgaattatctgctcattga

SEQ ID NO: 2359 - DNA, 663 bp, Staphylococcus capitis
atgaattatctgctcattgatacatctaatcagccgttatcagttgcactcatgcaggatgaaaaagtgttaattgaacaaactacaaatattaaacaaaatcattcagttcaattgatgcctgagattcaaaagttatttgaacagtctcaagttgataaacaagaaatcacagacatagttgttgcagaaggaccgggttcatacacaggtttaagaatcggtgtgactgtggctaaaacgttagcttacgctttacaaactcgattatatggtgtgtcatcacttaaagctcttgctgcaactattaaagatgagcatagattattagtacctatctttgacgcaagaagagaagcggtttatacaggtgtttatcaatacgttaatggtgaattaactacaatcattgaggatggatatttatcaattaatgatttaaaagataaacttcatgcgctaaatcaagaatatgtttttattgggtttaatttagaaaatataaagcatttattagatagcgaagtgattgaaagtttacctaaagcttcagttatgaaatccttaattcaacaacctgaaaatatccattcatttacaccgaaatatcataaattatcagaggcggaaagaaattggttagaccaacagaagaacaattaa

SEQ ID NO: 2360 - DNA, 462 bp, Staphylococcus capitis
ttggttagaccaacagaagaacaattaaatattaggaaaatgagtgttgaagatgttcctcaagtctttgatatagagcgcgaaagcttcaatgatagttcatggacgattgatgccttttatcatgaaatagaacagaatcaatttgcaacatattttgtaattgaatatgatgataaaattattggatatttaggtatgtggattgttatagatcaagctcaaattacaacagtcgccattaaaaaacagtatagagggtacggactaggtcaattattacttaaatatgttaaaaattacgcaagtcatacctgtgaagtaatgagtttagaagttcatttagataatgtagtggcgcaacatgtatatcagaatttaggatttgaatatggtggaaaaagaaaaaattattatggtgaaggtgaggatgcactagtgatgtgggtgaatttaaaatga

SEQ ID NO: 2361 - DNA, 1029 bp, Staphylococcus capitis
atgacacaacaaactttaattctagggatggaaaccagttgtgatgaaacaagtgtaagtgtgattagaaatggtcaagaaatactttctaatacagtattaagtcaaattgatagtcataaacgatttggtggagttgttcctgaagtcgcaagtagacatcatgttgaaggtgtaacagctacgattgaagaggcacttgactcagcaaacgtgactatgcacgagattgatgctatagcagtgacgcaaggtccaggattaataggtgcattattaataggaataaatgctgcaaagacgctcgctttcgcttatgataaacctattattcctgttcaccatattgctggccatatttatgcaaatcatttagagcaaccacttacatttccattaatggctttaatcgtttccggtggtcatacagagttagtctatatgaaagatcacctgaattttgaagttattggtgagacgagagatgatgctgttggagaagcttatgataaagtggctcgtacgattaacttaccttatcctggaggaccacaaatcgatcagctagctactcaaggtcaagatgtttatgattttccaagggtttggcttgaaaaggatagctacgattttagcttcagtggattaaaaagtgcagtcattaataaattgcataatctaagacaaaaaaatgaagaaattgtagaagaaaatgttgctacaagttttcaaaacagcgttgttgaagtattaacttataaagctattcatgcttgtaaatcttatgacgttaaacgacttattgtggcaggtggtgtagcaagcaataaaggattaagaacatcactcaaagaagcttgtgataatgaaggcattactttaacgatcccaagtccatccttatgtacagacaatgctgcaatgattggagctgcgggtcattatctttatcaggctggattacgaggtgatttagctttaaacggtgaaaataatatagacatagaagattttacgatgagtaaataa

SEQ ID NO: 2362 - DNA, 1617 bp, Staphylococcus capitis
atgactaataatcagacgtttggactcatcgttcttatctttattattttaatagcgattgtaaatatcaccgtttcatttatcgaaaggagaaaaacaatcgctaaaattaatacgctttgggataggaaagctaaattagagacatttataaggcctaattctaggtttgatgctcaataccaagagtataaggataattacactgaacaacatcctcttatagatgataaaacttggtcagatttaaatattgaagctctatttcataaaataaactttaattttaccgctattggagaaatgaaattatatgctacattaagaggaatgttctcgattgaaaatcaatcactcatcaagcgttatagcgaggataaatcttttcgtttaaatgtatcttacatactttctaaaataggcaaaactgtatacccattattcccagatcaattaacaccaattcctaagaacaatctcttaatgttttgtcctttattacctttaattgcatttttatctatatttatttcaccagaaataggagtctttttatttattggaagcttcttcttaaatattgtgctttctttaaatttaaagaaaacttatgaacaggatttaaaatcaatcttttatactgctaatgtaatcaaacaatgtaaggctttgtctaagatagagggaacacctgacataaatattaattttaatcactttaaaaattctcgacgttttagtggattgctagctcaattagaatccaatgatgttgtaggcagtacgataatgcttgtcaaattaatgtttatggttgattatgttttatttcatctaatacaacatagttattttaaatatcaaaatgaagtcgaagaatgttacgactatattagtacactagataatcactactctttagctatgtatagacgtacgttaactcattattgtatacctcatgctgatcaatacatggagggtatgcattttcaaagtttaattcatccactaatagatgaagaagtggccgttcctaatgatttaaacttggataccaaccttctacttacaggttcgaacgcttctggtaaatcgactttcatgaaggctgtagcactgaatgttattatggctcaatcccttaatattgctactgctgaatcatttaactaccaaccaggttacgtttttacttcaatggctaacgcagatgatgtactctcaggggacagctattttatggctgaattaaagtcaattagacgactttttaatattcatacacaagctaaaatttactgtttcatagatgagatttttaaaggaactaatacaactgaacgtattgctgcttctgaatcagtactcagctatttaaatgaactgccaaattatcaagttgttgcagctacacatgatattgaattgtccaccctattagaaaaggattaccataattatcactttaatgagtctattcaaaacaatgaaatttattttgactataaaatcaaaccaggcaaagcaaatacgcgcaatgcgattgaattgcttagaattactcattttccagatgatatttatcaccgcgctaaaacacaagtagatgaataa

SEQ ID NO: 2363 - DNA, 1938 bp, Staphylococcus capitis
atgatacttttacaacttaatgacatctcgaaatcgttcgatggtgaagatatttttactgatgtagactttgaagttaaaactggtgaaagaattggtgtcgttggtcgaaacggtgcaggtaaatctacattaatgaaaatcatagccggcgtagaaggttacgatagtggtcatatatcgaaaataaaaaatttaaaaatgggttacctcacgcaacaaatgacacttaactccacggctactgtcttcgaagagatgtcaaaaccatttgaacatataaaaaatatggaaaacttaattaaagaggaaacagattggttggcacaacatacaaatgaatatgaaaccaaaacttatcaagagcatatggaacgttatgaatcattaacaaaccggtttgaacaacttgaaggttatcagtatgaaagtaaaataaaaacagttcttcacgggcttaattttactgaaagtgattttaataaacccattaatgattttagtggtggtcaaaaaacacgactttctcttgctcaaatgttattgaatgaacccgacttactattgctagatgagccaacaaaccacttagatctagagactactaaatggttagaagattatttaaaatatttcaaaggcgccattatcataattagtcacgatagatatttcctagacaaaatagttactcaaatttatgatgttgcccttggagacgttaaacgttatgtaggtaattatgaacaatttattgagcaacgtgaccaatactatgaaaaacgtatgcaagagtatgaaaagcaacaagaagaaattcaaaaattagaaacatttgttgataagaatattacacgcgcttcaacaagtggcatggctaaaagtcgacgtaaaacgttagaaaaaatggaacgtatagataagcctatgattgacgctagaagcgcaaacattcaatttggctttgaaagaaatacaggtaatgatgtcatgcatattcgtgacctaaaaattggttatgattcacctatcactcaacctattaatatcgaagtattcaagggggatcatatcgcagtgataggaccaaacggcgtaggaaaaacgacacttatcaaaacaattgccgataagcaaaacaaacttggtggagaaattacttttggagcaaatcttcaaataggctactatgaccaaaaacaagctgaatttaaatcaaataaaacaattttagattacgtttgggaccagtaccctactatgaatgagaaagatgtacgtgctgtactaggtcgtttcttatttgtacaagaagatgttaaaaaaataattaatgacctatctggcggtgaaaaagctcgtttgcaattagctttattaatgttgcaaaaagacaatgtgctgattttagacgaacctaccaaccacttagatatcgattcaaaagaaatgttagaacaagcgttaaatcattttgagggtacaataatatttgtttctcatgatagatattttattaatcagcttgcaaataaagtatttgatttgaatcatgaaggtggacagatatatctcggggactatcaatactatattgagaaaactgaagaagctgctgcactaaaagctcaagaagaattgaagaattcttcttcaaaaaccaataacaataatgacacttctatttcttcttcagcatattcaagtcaaaaacaacagaaaagtcatcaacgtaaaatcgaacgtcagattgaacaatgtgaaactaagattgaagaatttgaaactcatatttcttatattgaaacacaattaactcagccagaagtatttaatgatccaatgaaagctgcagaattagctgaggaaaaaaataataccgaacaaaaattagaacaagtaatgttagaatgggaagaattacaagaaaaattataa

SEQ ID NO: 2364 - DNA, 642 bp, Staphylococcus capitis
atgccagaaaatattaaaattcctcgtgctacattaaagcgtttacctttatattatagatttgtgagtacattaaaatctaagggtatcgaccgtgtgaattctaaagcaatcagtgaagctttacaaatagattcggcaacgattcgtcgtgatttttcatattttggtgaattaggtaaaaaaggctatggttacaacatcgatagtatgcttgaatttttcaagtctgaactaagtgaaagtgatgaaattaaaattgcgatagtaggtgttggtaatctaggtcgcgcgttacttacttataatttttcaatacacgctgagatgacaattactgaagctttcgatattagagaagatctaattggagagaaagtgggtaaagtcgttgttaaaaatatcaatgaaattcaatctacattagcagcagaagaaattgacgttgtgatattaacgactcctgaaagtgtagcacaacaggttgctgatcaactcgttgaagcgggtgtgaaaggtatacttaactttacgccaagcagagttaaaacaccacaagatgtacaagttcaccatattgatttgggtattgaactacaatcactattgttctttatgaagaactatagtaataataattaa

SEQ ID NO: 2365 - DNA, 288 bp, Staphylococcus capitis
atgaaatttgaagcaaactgtacatttaaagcacatatccctcaaatgataagggttcctggaaaattagtaatcaatgagaatactttacaattcaaagcttatggcaaagaatatactccatttgatatagagttagatattaataaagttgtgagatataagtgctcgaaaggactgctgggaagtaaattatttgtttactataacaatcatgagtggtataaatttagtcatttttcaaaagaggatttaaaatcattgagtaaagaattgaaaatacattag

SEQ ID NO: 2366 - DNA, 1095 bp, Staphylococcus capitis
atgacatggatgataattagtggacttattgtcggagcgttattagggttcgtaatgcaacgaacaagattctgtctagcgggcggtttcagagacatgtatgtccaaaaaagtcataaaatgttttatgcattgctcgtagctataacagttcagagtttgggattactcatattaacgagcttaggtattattgaagtgcctacgcatacatttccagtattagggacgattataggatcatttatatttggcgttggtattgtattagctggtggctgtgccacaggtacgtggtatcgtgctggcgaaggtttaattggaagttgggtggcattaattttatatgctataacttctgcaattactaaaacaggagtactccttcctgttatgaatatgattaataagcctacgaacgtgaatgcgagtgtaagtcattcaacagggcttcctaattgggtacttgttttaattttagcaattattacaattacaatggttgtgaaaactttacgtaaaccgaaagtgatggtgcctaagttaaaacaaaaatatacaggtattagacactatttatttgaaagaaaataccatccatttatagctggtattgccgtaggacttattgctttactagcatggcccatgagtgaatcaactggtcgaccttatggacttgggattacgactccatctgctaatttgattaactttctaatatccggtgacactaagttcatcgattggggcgttttattagtgctcggtatctttattggttcatatattgctgctagagggtctaaagaatttaaatggagacttccagataagaagacgattcgtaacagtgctattggtggcatattgatgggatttggtgcttcagtagctggtggatgttcaattggtaatgggttagtagaaaccgcaacaatgagctggcaaggatggttaggtttagcatcaatgatagttggtgtatggttcatgagttattttatttttattaaaccaatgaaaaagtttcaacaatcatctaatgaaaaatctaaacgtaaacaagtgagtcaacaaactcagacaacataa

SEQ ID NO: 2367 - DNA, 225 bp, Staphylococcus capitis
ttggtacatgaattaggtactgtaggaatggtgtgtccatttccacttattgaagcgcaaaagaaaatggaagagttagagcaaggcgatgaattaaaaatagactttgattgtacgcaggcaacagaagccttaccaaactgggcagctgaaaatggatatccagtcactaattatgaacaattagatgatgcttcttggacgataactattcaaaaatcttaa

SEQ ID NO: 2368 - DNA, 1251 bp, Staphylococcus capitis
atgaatatggatgatacaattttcttatttctatgtgcattattagtttggttaatgactccaggattaagtttattttatggaggtctagtccaatctaagaatgcattaaatacagtaatgcaaagtatggctgcaatagttatcgttacctttgcgtggatgattattggtttttctattagttttgatcaaggtaatgattggttaggtggcttaaaatttctaggtctaaaccatgtaggctttgctatttctaaaactattagccctcatgtccctctcgcactcttcatgttattccaaatgatgttctgtactatagcagtttctattttatcaggttcaattgctgaaaaaatgagattcatcccttatcttatttttgtcggtttatgggttgtgtttatctatagtccagtagctcactgggtgtggggcggcggatggattagtaaactcggtgctattgattatgccgggggtacagttgtacatattacctcaggggtgtctggtcttatattagggataatgattggtgtaggtaaaaagcaagagaaacataccccacataacttactaataactctcatcggaggtattttagtatggttggggtggtatggctttaatgtaggtagtgcatttactttcgaccaaatcgcaatgatttcatttgttaacacagtcatcgctgcaagtgcaggtgcgctaggatggttaattttagagtatgctttgaaaaaaacgacaagtcttttaggattattatcaggcgctttatcaggtctcgttgctattactccagcagcaggttatgttaactatttaagtgccatgatcatagctataattggtggtatcggttgttatgtcgttattaatttaattaaagtgaagttacagtataatgatgctctagatgcatttggtattcatggtgtagggggagtattaggcgcagttttaacaggtgtgttccagtctcataaagtaaatgatgctattgaaaatggactcatatatacaggtaactttaaagtcatttgcattcaattagcagcagcaatagcaactgtcgtatttagtgcaatagttacatacatgatagctagagtaattaaatcattcactcctttagcaactactgaagaggaggataaaacaggtcttgatgcaatcgttcatggagaaaaggcctacttctatggcgaattgaacaaattcaatcgccgaatgaaattttaa

SEQ ID NO: 2369 - DNA, 951 bp, Staphylococcus capitis
atgaaaaatatttctgatatcgccaagctagcgggtgtatcaaaaagtactgtttcaaggtttttaaacaatggatccgttagtaataaaacaaaagaaaagctgacaaaaattattaaagagtatgattatcaacctaatcaatttgctcaaagtttaagagcaagacgtaccaatcttataggagcaattattccacgtatgaattcattcgcagttgatgaaactattaaaggtgtcatcaaccaatgtcatttacataactatcaactcttattaaattatactggacttgaactagaagcagaacttgcagcattagaaacattatcaagaagtaaagtagatggtattgttttaatggctacaaacattactgaacaacatatccaaattatagaaaagattaacgtaccggttattattgtagggcaagaacatgcacaattgcatagtatatatcatgatgattaccaagctggatttgaaataggtatgagaataggtcaaaaaggactacacgaagtcactttatttagcgttagtgaacgtgatgttgctgttggtattaaacgtaaaaagggactaatagatgctctaaaacaatataatattgaacctaagatttatgaaactacatttaaatatgaagaagctctggtagatgttgagagatatttatccaatataacggaagttgatgcaattgtcggtgcaacggattcaattgccttagcaattcacaaattttgtgcggatcataagaaagatctatctcctcatgcaatttttggatttggtggtgatccaatgacacaagtagtgtctccgataattgaaacaattcacttaaattataaagaagcaggagagcaagcacttaaagaaattaatcaattattaaatcatcaaactacagaacttaaaataaaaattcctgtcattaagtaa

SEQ ID NO: 2370 - DNA, 1476 bp, Staphylococcus capitis
atggcggaatggacacgtgaagcacgttatcaacgaatagaggatgttgatacagagacatttaaaaatttaaaacaacgagtcgatgcttctccttatagacagacataccatattcagcctgaaacaggattgctcaatgatccaaatggtctcatttattatgacggctattattacatatcacatcaatggttccctctaggggcggttcatggtttgaaatattggtttaattataaaagtgatgatttagtacatttcaaagcacaaggtcctatattagagcctgacacaaaatatgatagtcatggtgtctatagtggtagtgcatttgagtttaatggtcatctttattacatttataccggtaatcatagagacaatcattggaaacgtacctccagtcaaatgattgctcgcgttaaagaagatggttcagttgagaagtttcctaaatctgtaattcatggacaacctgatggatacacaagtcattttagagatcctaaagtgtttaaaaaagatgatcaattatatgcaattataggagcccaaaataataatgaacaagggcggttactactatatcaaagtgatgatgttgttaactggacatttcttggtgaaattcaaacgaatttaaatcattttggttacatgtgggaatgccctgattatttcgaattagatggacagggtgttattttattttgtccgcaagggattgaagcggatggaaataaatatcgcaatatttatcaatctggctacatgatcggtcatttaaatattgaaaatatgacatttgatcatcaagagtttcaagagttagatagaggctttgatttttatgcaccgcaaacatttatagataaagatggaaaacgcatattaattggttggatgggcttaccagaaagtgattatccgacagatagtgaaggttgggcacattgtttaacgattccacgagaacttactctcgaaaatggtaaattaaagcaacgaccattaaaagctctagaaactttaagaacgaacaaagagactgcattagggtatgcaaataaatttaaccgcaaattgcacccctatgaaggcaaacaatatgaaatgattattgatattttagaaaatgatgcaactgaaatttattttgagcttagaagttctagaaatgagtctacgttgattacctataatcaacgtgagaattcgctcacattagatcggtcagaaagtggtttattacctacaaatgtggatggcacaacgcgttcaactattttagatacacctttaagccagttacacatttttgtagatacgtcgagtatagaaatattttgtaataatggtgaacgtgtacttacatcccgtattttcccaagtgaagcttctacgggtatcaaagcatctactgagtcaggacaagtatatttacaatttacgaaatttgaactaaagggatga

SEQ ID NO: 2371 - DNA, 960 bp, Staphylococcus capitis
atgagaaggttgtttgcaataggtgaagcacttatcgattttataccacatgtcacaaattcagaacttaaagacgtagaacaatttagtcgtcaggtaggtggggcaccttgtaacgtagcagcaacagtgagtaaactaggtggtcattccgaaatggtcactcaattaggacatgatgcatttggtgacattattgttgaaaccattgaacgcattggtgtaggtgtagactatattcaacgtaccaatgaagcaaatacagcactagcttttgtaagtttaaaagaagatggtcagcgagatttctcgttttatcgtaagccttctgctgacatgctttatgatccctcacatattgaagatatagaggttactgatcaagacattctacatttctgttctgtggatttagttgaaagtttaatgaaacaagcacattcaaaaatgattgagaaatttgagaaggctaatggaacgatagtatttgatcctaatgtacgcttacctttatgggaagacccagaagcatgtcgtcaagcaattcatgaatttattcctaaagcgaatgtagtaaaagtttcagatgaagaactagaatttataacaggaatgaaagatgaaactaaagctatacagtcactatttaaaggtaacgtggctgtagtgatttatacaaaaggtcctaaaggggcacaagcgtttactaagcaccaatttactacagaacatcaaggtttcaaagttaaagctatagatactacaggcgccggtgatgcctttataggagccgttattagtcgtatattatcttcagatattattgatgttgctcaattatttgaaaatgaaggtaatagcattctcgaatttggtaataaagtggcagctataacaactacaaggtatggcgccattgaaagtttaccgacaatagaagaaattgaaaaagggtcctaa

SEQ ID NO: 2372 - DNA, 672 bp, Staphylococcus capitis
atggtttcaattatcaaaaattacatcatgatagaagaaaaacctatggaactagctctcgcaactgatgatccttatgaagtgcttgagcaatcaaaagaaatgaatgatattggttgttatttcttagatattcaattagaagctgatatgaatggtattaaacttggtagtgaaattcgtaaacatgaccctgtgggtaacattatttttgtaacaagtcacagcgaacttacttatctcacttttgtttataaagtggctgctatggacttcattttcaaagatgatccttcagaactaaaaacaagaatcattgactgtcttgaaactgctcatacacgtcttaagttgctatctaaagaaagtaatgttgaaacaattgagttaaaacgtggtagtaactctgtgtatgttcaatatgacgatattatgttctttgaatcttcaactaagtcacacagattaatcgcacacttagataaccgtcaaattgaattttacggtaatcttaaagagttagctcaacttgatgaacgtttctttagatgtcataacagctttgtagtgaatagacataacattgaatcgattgattctaaagagcgtatcgtttatttcaaaaatggtgaaaattgtttcgcgtctgtgcgtaatgttaaaaaaatctaa

SEQ ID NO: 2373 - DNA, 1290 bp, Staphylococcus capitis
atggatgctttaaactacgctccatatgctggtgttcagacattactattatttcttattattaaaataatattagatattaaattcaactataaggattatttattcacttctggaataataatcctttctgtttatactttttctattttaggtagtaaaacattacctattttagttgtagttattttcatcttcttttataaaaaaattaagctttattcatttttagcagtattaataagtaatatagttttatacctaactaattttctatcggtaactttgtatttaaacacgcgagaaataatcaataataattctatttccatctctttacattttgtaatttttgttgtaatagctatattattagcttatatacttaaatttttatttaaaaaacttaaaggatcctatttatctttaaataagaaatatattaccattattaccatagttttattattttcatttgttttcttttacataatttctcagactgatttaagcgctaatgatagccttactttatatgcttttatatttgtaggtttaattatatttttaagcattttaatatttgtgctttcaactttcactctacgtgaaatgaagtataagcgtaatcttgaagaaattgaaacgtactatgagtatacgctacgtatcgaaagtatcaataatgagatgcgtaagttccgacatgattacgtcaatattctttctacgctttcagagtttattcgtgaagatgatatgcaaggtcttaaaaaatatttcaatgaacaaattgttcccatgaaggataatatgaaaacgcgctctataaaaataaatggtattgaaaatcttaaagttagagaaattaaagggttaattactactaaaattcttcaagctcaagagaaagcaataccgattagtatagaggttcctgatgaaattgataaaatcgaaatgaacactatagagttcagccgtatttcaggaattattttggataatgccattgaagcttcagaagttcttgatgatccacttattcaaattgcttttattaataatgaagaatctgttacattcattgtgatgaataaatgtagcgatgatacccctaaaatacatgaattatttgaagaaggcttttcaactaaaggcgataacagagggttaggtctatctacgcttaaagaactgactgaccaaaatgagaatgtcctattagatactgttatcgaaaatggatattttgttcaaaaagtagaaattattaatacggaagcataa

SEQ ID NO: 2374 - DNA, 141 bp, Staphylococcus capitis
atggatgctttattcaatttagttctcaaattttttactatcatatttgaatttattggttttgtagctggtgctaacccttgtgctctatactacgatgagccagaagtacctgatgaattatcaaagctttatgaataa

SEQ ID NO: 2375 - DNA, 567 bp, Staphylococcus capitis
gtgaaaataatagatagaaaaattgatgaatttgctaactatttacagcataggaataacctagatcgtatacaatttttgaaagttcgtttaggtatgcaagtcgtattttcaaatattgaaaagactattgttgtatacgggttagcactgatattccagactttttattacacacttttaactcatatcagttattttttaattagaagtaatgctcatggtgcacacgctaaatcatccctattatgtcatattcagaatattattctttttattatattcccttatttaataataaaatttgacgtagaatatgtagttttattatttttagcattaataggttttactatagttatcaagaatgcgcctgtagctaccaaaaaacaacccatacctaagcgcttaataaggcgtaaaaaaatactctccattattctatatagttttattttagcggtatcattattaactactgagccaattaataaacttattttatttggcgaaataatagagtctgtaactctattatctattttttcccctaaggaggatttatga

SEQ ID NO: 2376 - DNA, 786 bp, Staphylococcus capitis
atgaaaattcaactttttcaatttcatgtaacttatggaaatgctaatgaaaatgaatccaaaatacaaaagtggtttaaagaatacttaaacgaggatacggaggtcgttgttttacctgaaatgtggaacaacggatacgctttagaagaattaaaggataaagcagatactaatttaaaacgaagtttttcatttatagctcaactggctaaacaattcaatgttgatattattgcaggttctgtatcaaatattaaagacaataacgtgtataatacagcattttcagtgaataaagatggtgagctaataaatgagtacgataaagtccatcttgtaccaatgcttagagaacctgagtttctgactgatggcaataaagtacctgaaccttttcaattgtcagatggtaccctagctacacaaatcatatgctatgatttacggtttcctgaattgttaagatatccagctaaaaatggtgctaaaattgcattttacgttgcacaatggcctagtgctagacttaatcattggttggcattgcttaaagcaagagctattgaaaatgatatgtatgtagttgcagctaatggttgcggtaatgatggaaacacggagtacgctggatattcgacagttatcaatccaaatggtgagattgttcaagaattgggcagtgatgaaggtgtcctcaccactaatgtagatttagaattggttgatcaacaaagagagtctatacctgtatttagaaatctaaaacctaatttatataaataa

SEQ ID NO: 2377 - DNA, 627 bp, Staphylococcus capitis
atggggatttttaataatactgaaaatgaacaatcatttaacgaagcaattgaaactagaagaactatttataatttagaaaaaacaatatctattagtgatgaagaactagaagaattaatcgcacatgctgtaaagcatataccttctgcattcaactctcaatcaacaagaatagttttacttttgaatgacaaaaatgaacaattctgggaaaatacaaaatctattttaaaagaaacaatgggttttgacagagattttgaacctactcgccaaaaaattgataatttcaaacattctcatggcacaattctttattatgaagatcaaagtgttattaatgcattacaagataaaatgcctaacttctatgaaaactttgaaatttggtcaaaccaagctaacgcgatgcatcagtatgctatttggactgctttagctactaaaggcatcggtgcatctttacaacactataatccaattgtagacgaatctactgcaagccaatttgatattccgaatacatggaaattaatcgcacaaatgcctttcggtgatgtacgtgagaatgcgaaggaaaaagaaatcaaacctgtagaagatcgttttattattaaaaaataa

SEQ ID NO: 2378 - DNA, 810 bp, Staphylococcus epidermidis
atggatttttccaatttttttcaaaatctgagtactataaaaattattactagtttactcgatttactgattgtttggtatgtgttgtatcttctcattacagtttttaaaggtactaaagcaattcaattattaaagggaatagttgtcattgttatcggccagcaaatcagtaaaattcttaacttaacagcaacatctaaattgtttgatattgtaattcaatggggtgttttagcactcattgtgatatttcaacctgaaataagaagagccttagaacaattaggtagaggaagttttttaaaacgatatacgaatacttatagtcgcgatgaagaaaagttgattcaatctgtgtctaaagctgttcaatatatggctaagcgacgcattggtgcgcttattgtttttgaaaaagagacaggtttgcaggattatatagaaactggaataccgatgaattcagacatatctcaagagctactaactaatgtatttatccctaatacgccattacacgatggtgcaatgataattcaaggaagtaagattgccgttgctgcaagttatttaccattatcagatagtgttaaaatatcaaaaagtttaggaactagacatagagcggcagttggaatttcagaagtttctgatgcttttactgttgttgtatcagaagaaactggtgatatatcagtcacttttgatggaaaattaagaagagatatttcaaaagatgtttttgaagaattgcttgctgaacattggtttggtgcacactttcaaaagaaaggtgtgaattcataa

SEQ ID NO: 2379 - DNA, 936 bp, Staphylococcus epidermidis
atgcttgaaagtaaatggggattaagatttgtcgctctcatattagcagtttttttctttttatcagtaaataatgtgttcggaaatatttttaatacagatgatttatctcaaaaatcatccaaaactattcaagatgtgcccgttgatgttatctataatagtaaagacctacatgtaactaaaattcctgaaaacgtcgatgttaatttaacaggaccacaatcaaaattaatcaaaattgaaaaccctgaagatttgaaagtagttgttgatctttctggaaaaaaagcagggaaatatcaaaaaaaatatcaagttagaggcatagatagtggtatcaactatcaaattaaacctgaagttgcacacattaaccttgaaaataaaataacacgagttatgcatgtgcaaccagacattagtagtaacagtttagatccaaaatataaaataagtaaacaaagtatttcaccagaaactgtaaaagtgactggtggagagcaacaattaaaaaatatagcttatttaaaagcaacctttaaaaattctagtaaagtgaacaaagacaccaatgatgttgcagatgttagtgcatttgataaacaattgaataaattaaatgtatcaattaatccaaatgaagttaatttaaaagtaacagttgaaccattcagtaaaatggttaaggtacgtacaaaaacaacgggtaagcttaatgaaaataaagaattagatagtgttaaactggaagataaagaagtagaaatctttggtaatagagatgaattacaaaatattaatgaaattactgctgaagtagatattgatggaatttcagaatctacagaaaaaacagtatcatttaacttacctaaagatgtgactaaagtgaatccaaaggaaacaaaagcgtatataaatgttaaaaattga

SEQ ID NO: 2380 - DNA, 1356 bp, Staphylococcus epidermidis
atgggaaaatattttggtactgatggtgttcgtggtgtcgctaaccaagaactcacacctgaattggcttttaaactaggtagatacggaggatatgttctcgcacataataagggtgaaaagcatcctcgagttttagtaggaagagatacaagagtttcaggagaaatgctagaatctgcattaattgctggtttaatttcaattggcgcagaagtgatgcgcttaggtgttatttcaacaccgggtgtggcttatttgactaaagaaatggaagcagcattaggtgttatgatttctgcgtcacataatccggttgctgataatggaattaaattttttggttcagatggctttaaattgtcagatgatcaagaaaatgaaattgagcaattattagatcaaaccaatcctgatttaccacgaccagtaggagaggatattgtacattattcagattattttgaaggtgcacaaaagtatctaagttatcttaaatcaactgttgatgttaattttgagggtcttaaaattgtattagatggtgcaaacgggtcaacttcttctttagccccattcttgtttggcgatttagaagcggatactgagacaattggatgtaatccagatggttataacattaatgaacaatgtggctctactcatccagaaaaattagctgaagctgtgttagaaactgaaagtgactttggtttagcttttgatggagatggcgatcgaattattgcggtagatgaaaatggacaaattgtagatggagatcaaattatgttcattattggtcaagagatgtataaaaaccaagaactcaatggaaatatgatagtttcgacagtaatgagtaaccttggtttctacaaagctctagaaaaagaaggtattcagtcaaacaaaactaaagttggagatcgctatgttgtcgaggaaatgagaagaggaaattataatcttggtggtgaacaatccggtcatatcgtattaatggattacaatactactggtgatggattattaacgggtgttcagttggcttccgttattaaaatgagtggtaaaactctaagcgagttagcttctcaaatgaaaaagtacccacaatctttaattaatgtgagagtgactgacaaatatcgtgttgaagagaatattcatgttcaagagataatgacgaaagttgaaacagagatgaatggtgaaggaagaattcttgttcgtccttctggaactgaacctttagtacgtgtaatggttgaggctgcaactgacgcggatgctgaaagatatgctcaaagtatcgctgacgttgttgaagacaaaatgggcttagataaataa

SEQ ID NO: 2381 - DNA, 156 bp, Staphylococcus epidermidis
gtggacaaagttaataagatcgccaaactaaataaattattttgggaaactacggatagcgtgtataaaattcatataatagcacgcttatttcatgatgtattcgttgataatgattatgataggggattatcaaatttaagcagtgataattaa

SEQ ID NO: 2382 - DNA, 1806 bp, Staphylococcus epidermidis
atgtgtggaattgttggttatattggctacgataatgccaaagaattactattaaaagggttagaaaaattagaatatcgtggttatgactcagcaggtattgctgtagttaatgatgatggtacaaaactttttaaagaaaaaggaagaattgctgaattacgtaaagttgcagataatagtgatgaggatggtacgttaggaattggtcatacacgttgggcgacacatggtgttccaaattatgaaaattcacatccacaccagtcaacatctggacgttttacattagttcataatggtgtaattgaaaattatgaagaattaaaagctgaatatttatctgatgtcactttttcatcagaaactgatacggaagttattgtacaattagtagattatttttctagacaaggattagctacagaagatgcatttacaaaagtagttaaattattacatggttcatatgctttaggattattagatgataatgataaagatactatttatgtggctaaaaacaagtctccgcttttagtaggtgtaggtgaaggtttcaatgttattgcttctgatgctctagcaatgttacaaactacaaaccaatacaaagagatacatgaccatgaaatagttattgttaagcgagacacagtagaaattaaagatcttgaggggcacattcaacaacgtgatacgtatacggcagaaatagatgctgctgatgcagaaaaaggcgtatatgatcattacatgttaaaagaaattcatgaacagcctgcagtgatgcgtcgcattattcaagaatatcaagatgaaaaaggtaatttaaaaatcgattcagagattattaatgatgtagcagatgctgatcgtatttacatcgttgcagctggtactagttatcatgctggattggttggtaaagaatttattgaaaaatgggcaggtgtacctactgaggttcatgtagcttctgaatttgtatataatatgccacttctttctgaaaaaccactatttatttatatttcacaatctggtgaaacagctgatagtcgtgctgtattagttgaaacaaataagttaggtcacaaatcattaacaattactaatgttgctggttcaacattatcacgtgaagcggatcatacattacttttacatgctggacctgagattgcagtcgcatctacaaaagcatatacagcgcaaattgctgttttatctatcttatctcaaattgttgctaaaaatcatggtcgtgaaaccgatgttgatttattaagagaactagctaaggttactacagctattgaaacaattgttgacgatgcacctaagatggagcaaattgcaacggatttcttaaaaactactcgtaatgcattcttcattggacgaacaattgattataatgttagtttagaaggtgcattaaaattaaaagaaatttcttatattcaagctgaaggatttgcaggtggggaattaaagcacggaacaatcgctttgattgaagatggcacacctgttataggtttagctacacaagaaaacgttaatctatcaattcgtggaaatatgaaagaagtagtagcacgtggtgcatatccttgtatgatttcaatggaaggtttgaataaagaaggagacacatacgtgattccacaagtacatgaattattaactcctttagtatctgtagtgacaatgcaattaatctcatattatgctgcgttacaacgagatttagatgttgacaaacctcgtaacttagccaaatcggttacagtagagtaa

SEQ ID NO: 2383 - DNA, 858 bp, Staphylococcus epidermidis
atgaaaaatataaaagcaatttttttagatatggatggaacgattttacatgaaaataataaagcctcggaatatactaaacaagtgattaatgaattgagagagcaaaattataaagttttccttgctactgggagatcttattcagaaatcagtcagcttgttcctgatggattcactgtagatggtattatcagttcgaatggaacttcaggtgaaattcatggagataatttgtttagacatagtttaactttagaacgagtacagaaaattgtggaattggctaaaaaacaacatatttattatgaagtttttccttttgaaagtaatcgtatatctcttaaagaagatgaagattggatgaaagaaatgatttccactatagagccacctgacgctgtaagtcaaagtgagtggtcatcgcgaagagaggcaattaaaggaaaaatagattggcgagataccttacctgatgcacacttttctaaaatatatttatttagtcccaacttagataaaataactgattttcgcaaccagcttgttgaaaaccaatcaaatttaggtattaccgtatctaattcttcgcgttataatgctgaaacgatgccatatcatacagataagggtacaggtatcaaggaaatgattgatcactatggtattaagcaagaagaaactttagttattggtgatagtgataatgatagagctatgtttaattttggccatcacactgttgcaatgaaaaatgcaagacaagaaattaaaaatcttacagatgatattaccgaatacacgaacgaagaagatggtgcagcacattacttaaaaagtcatttattagataactag

SEQ ID NO: 2384 - DNA, 1005 bp, Staphylococcus epidermidis
atgttagctcaactcggtgaatctactacaaaacctataatatctattatttttattttactcattttagctttattatttatttttgtaggttacccattgataactggtacagtatatgcaattcaaaaagctattaataaagagaaagttctttttagtgatttattttttgcttttaaaaaaggcaaatatgctaaatcagtaattttagctttaataactttagttttattcattgtaatcgtacttattctagtgctattaaataaattatatagtttagctcttagcccaatattaatcggcttacaacaatcaataagcggctacgacaatccaatgggaattttaattacaatacaaattgtgttgttactcataacaggtttcatctcatcaattttctattggtttgtaattatattcattattaattatactaccgcttatacagaagattcatctcgtaaagtaatgagtaatttaaaagaaggatttaaaggtattaaaaacggtaagaaaacttggtttaaatttttcattggcgtattacttattagtttacttgcaagtattattaacaaaccgctattattcggtgtacaatacttaacaagcagtatgtctcaaacggtggctcaaactattattataatagctagaatcgtatctatagtattacgcctatgtctttattacattttgatttttggaattattaattatttcgttagacgtggtgacaaaccagtcaaaagcaaaagacgtcataaaaataaagatattaacaaaggtaatgtaaacgacaaagtagatactaaattaaatgcttccaactccaaagatacagaagcagataaaatgaaagatcaacaaacacatatacaacaagacaaaactgatagtcaagaaaataacatatatgattccatcaaagaaaaagtaaatgaaaataaagaaaatgttacagaacaatctaaaaatctatttgataagaaatag

SEQ ID NO: 2385 - DNA, 732 bp, Staphylococcus epidermidis
atgaaatttgctgttatcactgatattcatggaaactttgatgcgcttcaaactgttttagatgatattgatagtagagatgatatcgaaaaaatttataacctaggtgataacatagggattggacatgagacaaataaagtactggatactatatttgaccgggatgatatggaaatgattgcaggtaatcatgatgaagctattatgtcactcgtcaatggaacaccttatcctgaagatttaaaagggaaattttatgagcatcatcaatggatagaaggacatttagatgagtcctattacgatgaaattaatcaattgcctagatatattgaaatgaccataaaagggaaaaagattttatttattcattatgaaattgaaaatgataaaatgtcagctcctattgatgaacaaccttttgcacctattacaaaagatgacgaacaagctatttctgaattatttaaagacaaagaagccgatttaattttatttggacataaccataggttgcatatgtttgatgataaatcaacagtatattttaatcctggatcagtaggtttgaacaatggttcaaacaccgtatatggtattattaccgttaatgaaaaaggaatttcagtagagagagtgaaattagcgtacaataatgaagaatttttagcaggatttgaagaaaagcaagtaccagctagagaatttatatttaagaatttcatttaa

SEQ ID NO: 2386 - DNA, 954 bp, Staphylococcus epidermidis
atgacaaatcataatcatcaacatcatcattctcatgcacacggacacgttcatacagataataaaaaggtactcatgttttctttcattatcattagtctcttcatgcttgtagaaattataggtgggtttttagcaaatagtctagcattattgtctgatggttttcacatgctaagtgacgctatatccttaggagtagctcttatagcttttatatatgctgaaaagcatgctacaaaaagtaaaacatatggttacaagcgttttgagattttagcagcacttttcaatggagttaccctatttatcatcagtattattataataatcgaagcgatacgaagatttttagaacctcctgaggttcaatcgaaggaaatgttcatcattagtgtgattggtcttatggtaaatatcattgtagcgatacttatgtttaaaggaggagatacctctcacaaccttaatatgagaggcgcatttttacatgtacttggagacttgttcggctctgttggcgcaatcgttgcttctcttttaatttggggctttaattttacaatagcggatcctatagctagtattttagtttcgttaattattttaaaaagtgcttacggcatttctaaatcatcccttaacatattgatggaaggaacgcctaatgatatagatttaaatgctgtaattaaagcaattagtaaagatgaaagaattcaaaatgtacatgattgtcatgtatggaccatttcaaatgatatgaatgcattaagttgtcatgcagttgtaccagaatatttatcagttcaaacgtgtgaaacaatgttaaagtcaatcgaaagtgacctattgcaattaaatattcagcatatgacaatacaacttgaaacaccagaacacaaacacgatgaatcaacattgtgctcaggtatacatgaacactctcattag

SEQ ID NO: 2387 - DNA, 342 bp, Staphylococcus epidermidis
atgagtggatatcatattaacgttgaaagcaatcaggatacattgattaaagtcactcatattttcaaagctttaagtgattttaatcgtgtgagaataatggagtttcttgaaaacggtgaagcaagtgttggacatatttcacattctttaaatatgactcaatcaaatgtatcacatcaattgaaactacttaaaagcactcatcttgttaaatctaaaagacaagggcaatcaatgatttattctatagatgatatacacgtttcaactttacttaaacaagccattcaccacgccaaacatcctagtgaaggtggaatttctaatgacaaatcataa

SEQ ID NO: 2388 - DNA, 657 bp, Staphylococcus epidermidis
atgagtattttagttattggagcaaatggaggcgtaggttctaaactagtaagtcaattaaatgaagaacacgttgattttacagctggtgtacgtaaggaagatcaagttaaagaattagaaaataaagggattaaagctatattaatagatgtagaaaaaaatagtattaatgatttaaaaaatatctttacagattatgataaagttatcttttcagttggatctggtggaagcactggagcggataaaacaatcattgttgatttagatggtgctgtaaaaacaattaaagctagtaaagaagcgggtatcaaacattatgttatggtatcaacatacgattctagacgtgaagcattcgatgcgagtggagatttaaaaccgtatacaattgcaaagcattatgctgatgattacttaagaacatcagatcttaattatacaattgtacatccaggttcacttacagatgatgctggaactggaaaaatagaagctgatttatatttcgacaaagcaggatcaattccacgtgaagatgttgctacagttttaaaagaagtagtaacttctgatggttttaataatcaagaattccaaattttaagtggcaatcatggtgttaaagatgcattgaaaaactatgaatcttaa

SEQ ID NO: 2389 - DNA, 939 bp, Staphylococcus epidermidis
atgccgttatttttaaaacccatttttctggataaagtatggggcagtgataatcttcgtcaatttgggtatcaactacctaataatcacataggtgaatgttggggaatttcagcacatccacacggaaaaagtgtgattgaaaatggtatatttgctggtcaaacattggatcaagtatggaacaatcatagagaaatatttggagattttccaagtaaagattttccattaatggctaaaattgtagatgctgctgcgccattgtctattcatgtacatcccgacgattcttatgcatatgaacacgaagaaggtcaatatggaaaatctgaatgttggtacatcattgaagctgatgaaggtgcaaagattactataggtacgtatgcgaaatctcgtgatgaatttgaagagcaattggagcaaggtacatttgaaaattatttgagaacaatacaagtgcaaccaggtgatttttactttataccagctggaacgatacattccataggtgcaggcattatggcgtatgaagtcatgcaatcatcagatatttcatatagaatttatgattatcatagaaaaactgataatagtgaggaacgtgaattaaatatagataaggcattagatgttattaattattcaaatgaactacctaatatcactcctcaaaatgaagtgatagaaaatcacaattgtacacatattgtatctagtgatttttttactatggttaagtgggatatttctggtactctaaattatatgaagcctagagaattttgtcttgtttctgttttagatggacaaggtaaacttattgtagatggtgatatatatgatatatctaaaggttcaaactttgtgttaacttctgaagatttagatagtgttttcgaaggagattttaaactaatcattagttacatttaa

SEQ ID NO: 2390 - DNA, 228 bp, Staphylococcus epidermidis
gtgaagcaatttatatatatttctctagtttgtggcattatttcaggagcagggatatttttacaattaccacattatccatctatgatgattccaagatttgtggcgattcttggaataattagcgctgcaatcacaataagagataaggaaataagtggtatgcttaaacttggtgggataatgattaatataatgccgttacttgggagtgtcattgctaaataa

SEQ ID NO: 2391 - DNA, 1377 bp, Staphylococcus epidermidis
atgactgaggaaattaactatttttggcttaattgtggttacaatagatggaatcataatgaaccattagtggggcagacagcgttatttgaatctggcgcacattttaatcctacacaaggatatagagcatttaaaaaagctaaagctggagatcaagtgattttctatcaagtacaaacagattctggacttttaggtataggtgaaattataagtgtgcaatccggtgctcaaaataaaataagagtagaatttaaatttaaagaaacgctaaaaccacttacaacggattatcttaaaagaagtgaagcactcgattttcgtatgagtaacatgagggaaacacttttcaatcaaatcagagagtcagaatttgagttaatagttagtttaggtaaaggaaaatcgaaaattcctcgatattttttattagcagaaacagaagcgtttgaacctggtaaaaactatactatatttactcatacatttaatggaatcaaaaggaatggttatcatttttacactcaactagaggtgggtgataacattattatatataataaatatcaaaaccaatcggttatcggtattggcgaagtatcaaagcatatacatgagaaaccacctataccaggtcgaacgaatagtacagctattgaaattttttatgagaaagatatcaagcccatttcattaggtcatttaaataaacatcctaaattgaagaatctgtactttttacaagaaaatgcgaaacagtcaatagcaagtatgtcacaagctcaatacgatgccattttggacatgagtatgaataatggtattaaacatccttttgaaacagtaaaaaaagcagaactatcaactcaaaatgctgaagatgatagtttaaaaccttttgtattattagttgttgaacaaaaaggagaaggcttaaaggcagctgaagaattactccaaaaaacaaatgcaaaccctgtgattactagcggacatccagattttagtgaagatatgctttatggtaaatatttacctaatgagtcaggagcgctatattatcgtgaaggattcatcacacacctaatgcctaagaaagataaaagttatttagtcattgataacttcaatcgcatcgatgtagatattttccaaacatatattaatgtacttgaaggctatgaagtgacattaccgagatataataaagatggaagcatgattaagtggtcaaaaaataaagattctttttatcattttaatcctaattggcatattgttggtattacatatgactctatagaaaaaattaagcaaaaatattcgtcacagtttttaaaatatacgcgtatcgtcaaagtgaatcatgactaa

SEQ ID NO: 2392 - DNA, 411 bp, Staphylococcus epidermidis
atgccaataatttattatgatggaaattgtgtttattgttataactatgcaatttggttaattcaaaacggactttcacataaatatgagtttgcaacaattaaaggtcaaataggtaaacaattttttgaaaattatcctgatgcgcaaaataagaatagtgttattcttcaaaaaggaaatcatttagaatttgaatcacaggctgttgcaacattgatatcgtcactacctaatcactctaaatttcttggaataggattaagattaattcctaaaccactaagagatttaggatatcgattatttgcaaataatcgagataaaatgtggaaaacacattggcacaagccaactgattatgaaaaatcattttttcttgatgataatgaaaaaatcaaactaacctaa

SEQ ID NO: 2393 - DNA, 447 bp, Staphylococcus epidermidis
atgagtcaacaacaagatgtagtcaaagaattaaatcaacaagtcgcaaactggacggtagcttatacaaagttgcataatttccattggtacgttaaaggtcctaatttcttttctttacacacaaaattcgaagaattatacaatgaagctagtcaatatgttgatgatttagcagaaagaattttggcaataggtggtaatccaattggaacactttccgagtgtttagataaatcaatagtaaatgaagcaggaaaacattattcagctgaagaaatggtagaagaattgtctaaagatttttctaaaatctctaaacaattagaacaatcaattgaagtggcgggaagtgctagtgatgacgtttcagaagatatgtttatcggcatgcaaacttcagttgataagcataattggatgttacaatcttatttaggtcattaa

SEQ ID NO: 2394 - DNA, 711 bp, Staphylococcus epidermidis
atgacagaaagtacacctcacattaacccaaatggagttaaaatagctaaaactgtattaatgccaggcgacccattacgtgctcaatatattgctgaaaattttttagaaaatgttgaacaattcaatacagtacgtaatatgtttggttacacaggaacttataaaggcaaagaagtttctgtgatgggctctgggatgggaattccaagtattggtatttattcctatgaactttaccatttctttgatgtggatacaatcattcgcgtaggttcatgtggcgctcttcaagaagatgtcaatttatatgatgtgattattgcacaagccgcttccacaaactcaaattatgttgatcaatttaatataccaggtcactttgcgcctattgctgattataatctagtagctaaagctaagaaagctgctgatgaaattggtgccatatcacatgtaggtaacgttttgtcatctgatacattttataatgctgattcaacttttaatgattcatggaaaaagatgggtatcttaggtatcgaaatggaatctgcaggtctatatttaaatgccatccatgcaaataaaaaggctttaggtatttttacagtaagtgatcatattctaagagatgaagccactagtgcagaagagagacaaacatcatttactcaaatgatggaaatagcgctcgaaatagctgaatag

SEQ ID NO: 2395 - DNA, 666 bp, Staphylococcus epidermidis
atgatgaataaagcaaaattgatagaccatacattattaaaaaccgattcaacaaaggaacaaatagatacaattataaatgaagcaaaagcatatcagtttaagtctgtatgtgtgaaccctacacatgtacaatatgcatctgaacaacttaaaggaacagacgttttagtgtgtactgttattggatttccactaggtgcaacaactacagcggttaaatcttatgaaacaaaagatgcgattaacaatggtgcccaagagattgatatggtgataaatattggagcacttaaggatggtcgttttgataaagtgcaaaatgatatcgaagccgtcgttcaagcagccaatggtaaaacagttaaggtaattattgagactgttttattaactgagaaagagaagattaaagcatgtcaattatctgaagcggcaggtgcacattttgttaaaacatccacaggttttgctggtgggggtgcaacagttgaagatgtaaaattaatgaaagatactgttggtgatcgtttagaagtaaaagcgtcaggtggcgtgagaaatctagaggattttaataatatgattgaagcgggtgctacacgtattggtgctagtgccggtgtgcaaattattcaaggacttgaatcaaatactgattactaa

SEQ ID NO: 2396 - DNA, 1302 bp, Staphylococcus epidermidis
atgagaatgattgacatcatagaaaagaaacgagacggtaagtcattaaccaaagaagaaatagaattttttgtaaacggatacactcatggggaggttccagattaccaagcttcaagtttagctatggcgatattctttcaagatatgaatgatgaagaaagagcggcattgacaatgtcaatggttaactcaggagagaaaatcgacttaagcgatatcaatggtattaaggtagacaagcattctacagggggcgtcggtgatacaacgacactcgttcttgccccattagtagcggcagtaggtgttccagttgcaaagatgagtggtcgtggtctaggacatacggggggtacgatagataaattagaatcagttaagggatttaacgttgaaatcagtgaaaaagattttataaaacttgtaaatgataatcaagtagcagtaataggacaatcaggcaatctgaccccagctgataaaaaattatatgcactacgggatgtaacagggacagttaattctattcctctaatcgcttcgtccataatgagtaagaaaattgctgctggcgcagatgcaattgttctagatgtcaaaactggcagtggtgcgtttatgaagacgctagatgatgccgaagcgcttgcgcatgcgatggtaagaattggtaataatgtaggtcgtaatacgatggctattatttcagatatgagtcaacctttaggaaatgcaattggtaatgcgctcgaattaaaagaagctatcgcaacattaaaaggaaatgggccgaaagacctaacagagcttgtgttaacacttggttctcaaatggttgtcttagctgaacaagcaacatctttagatgaagcgcgtcagatgctaatcgatgctataaaaacaggcaaagctttaaacaaattcaaaacatttctatcgaatcaaggaggagatgactctattgtggattctcctgaaaagttacctagcgcgaaatatcaagttgaatttaaagctaaaaaagatggttatataactgaaataatagctaatgagataggcgttgcttcaatgatgttaggcgctggtcgtcaaacaaaagaagacgttattgatttaggtgtaggtatcgtgttaaataaaaaagtaggagaacatgttgagaaaggtgaaaatattttaactattcataccaacaccaaagagatcgatgatattttatataaactagacaatagtattactattgagagtaagggcgaagctccaaccttaattcataaaataataaccgagtag

SEQ ID NO: 2397 - DNA, 1194 bp, Staphylococcus epidermidis
atgatgactacaccgttcaaaagaattcatctaatagttatggactcagtaggtataggcgaaggtcctgatgcagcggcattcaatgacgaaggatcacacactttaaagcatactttagaaggatttaagcaaaagttaccacatctagaacaacttggattaggaaatattgcaccgcttcctgttgtttcaaaagttacacatccaggtgcattttataccaaactaagtgaagcttcagtaggtaaggatacaatgactggacattgggaaattatggggttaaatataatgcaaccatttaaggtttatccaaatggtttcccagaagagcttgttaaagagattgaatcaatgactggacgcaaggttgtagcaaatagacctgcttcaggaactcagattattgacgagtggggcgaacatcaaatgaaaactggagatttaatagtttatactagtgctgatccagttctacagattgctgcacatgaagacgtgattccacttgaagaactttacgagatttgtgaaaaagttcgtgaactaacaaaagatcctaaatatttaataggaagaatcattgctcgaccatatgttggagaacctggtaacttcactagaacttctaatcgacatgattacgcgttaaaaccatttggacgaacggtgatgaatagccttaaagataatggttatgatgtaatcgcgattggtaaaattaacgatatttatgacggtgaaggcgtgacagaagctatacgtactaaaaataatatggacggtatggatcaattgattgaagttgtaaaaaaagattttgaaggtatcagtttccttaatttagttgattttgatgcattgtatggccatcgtcgtgataaagaaggctatgctcaagcaattaaagattttgatcttcgtttacctgaattaatgaatcatttaagagaagatgatttagttattattacagctgatcatggtaatgatccaattgctaaaggtacagatcatacacgtgaatacattccacttttaatgtttagtccgaaaattaaagattatcatgaactttcacaagacacgacatttagctctatcggtgttacaatagcagataacttcaacgtagaattacctaaatatggaaaaagttatttaaaagaaatgggggttgagcatcaatga

SEQ ID NO: 2398 - DNA, 351 bp, Staphylococcus epidermidis
atgaaagttttaagattcttattaggactagcatttggaacagctggtgttttacattttactagagagagacaatttagaaatattgttccagattatttacctttacaaaaaactgctgtattggtaacaggtattatagaaatcttttttggtatcatgttgcttattaaaagaccagcatcatggttgaaaaagggtattaatttattcttgttagcagtgttcccagcaaatatttatatggctcgtaaaggattgccattaggtgacaaagaactacctaaatgggcactttattcgagattaccattgcaatttgtgcttattaaagccattaaaaaattataa

SEQ ID NO: 2399 - DNA, 471 bp, Staphylococcus epidermidis
atgactaaaatgaatgtagaaagctttaatttagaccatactaaggttgttgcaccttttattcgtctagccgggactatggaaggtcttaatggtgatgtcatacacaaatatgacattcgtttcaaacagcccaataaggaacatatggatatgcctggtctacattccttagagcatttaatggcagaaaacattagaaatcatactgataaagtagtagatttaagtcctatgggttgtcaaactggattctatgtttcatttattaatcatgacgactacgatgacgtattaaatattatcgatcaaacattgcatgatgtgttaaatgctagcgaagtcccagcttgtaatgaggttcaatgtggttgggctgcaagtcattctttagaaggtgctaaaacaattgctcaagcatttttagataaaagagagcaatggaatgacatctacggagaaggtaaataa

SEQ ID NO: 2400 - DNA, 1185 bp, Staphylococcus epidermidis
atgcataataaacaaaagatattagattttatagaaaataataaatatgattatgttgaaataagtcatcgtattcatgaacgccctgaattaggcaatgaagaaatttttgcatcgagaacattaattgaccaattaagagcaaatcgattcgaaatcgaaacggatattgcaggacatgcaacaggatttatagcaacgtatgattctgatatgactggaccggttataggatttctagctgaatatgatgctttacctggtcttggtcacgcatgcgggcataatattattggtactgctagcgtacttgctgcagtagcactaaaagaagtcgtcgatgaaattggtggtaaagtagtcgttttgggatgtcctgctgaagaaggtggggaaaatggctccgcaaaagcttcttatgttaaagcaggtgtcattgatgaaattgatgtagcattgatgattcatcctggaaatgaaacttatcgtacaattaatactttagctgtggatgttctagatattaaattctatggacgtagtgcgcatgcatctgaaaatgcagatgaagcattaaacgctttagatgcaatgatttcatatattaatggtatagcacagttaaggcaacacattaaaaaaggacaacgagttcacggggttattttagacggtggtaaagcggctaatattatacctgattttacacatgcgagattttacactcgagctacttcgcggagagaacttgatgttttaactgaaaaagtaaaccaaattgcaagaggtgctgctattcaaactgggtgtgattttgaatttggtcctatccagaatggtgtaaacgaatttatcaaagcacctaaacttgatgatttatttgaaaaatatgcaactgaattaggagaagaagtgattgatgatgattttggctatggatctacagatacaggtaatgtaagtcatgttgtaccaacaatacatccacatattaaaattggttctcgaaatcttgtaggacatacccaccgctttagagaagcggctgcaagtttacaaggtgatcaggcactcattcgaggtgcaaaaattttagcattaatgggactagaattaatcgaaaataaaccgttgttagacgaaataattgaagagcatacgcatataaaggggcatgttaagtaa

SEQ ID NO: 2401 - DNA, 1191 bp, Staphylococcus epidermidis
atgaataataaagtaaatggtccgtttctcacacttagtgatttgtataatgatgacattgtttacacatctcgaccttcatatgtgtcgaacccatggttgaaaccagatgaacaccaatcaaatttcttaactggaagagaattacttatagctaatcgttttcctgtcattgttcatgaggcaagtgttacaaacaaattagaacaactttttaatatagtgggtagggaaattccaccacatacttataaatttaaagatcaagaaacatatgaaagcttgataaggaatttagctcttcatcaaggtaaaaaaatctactttcaatatattcatgatgaagatattttacctaaagaatattatgcacttgataaagatgtttttgttgctcttaataataaagcacgaattccagaatggactaataacaaatatctaccacaaagagaaattgtctcaattaaagattttgaatctcatattcaagcatggtcgtatccatttgtcataaaaccaggcgatgatttacctacagcaggaggatatggtgttatgatttgttataatgatacagatttagctaaagctatcacacgcatcaacaatgcatcagcagagactgaaaatttaatcattgaacaaaaaattaatgcagtgaataactattgtgtacaatttgcttattcagatgatattggtatcaaatacttaggaacagcgcaacagttaactaatgactatggattttacaacggaaatgaaaatgttaatgatgtgcctcagaatgtaatagacgctggtagagagattatggaaataggcgtaagcaaaggtttttttggtgtagcaggttttgacttactagtagatgataataatgatgtttatgcgattgatttaaactttaggcaaaacggatcaacgagtatgctacttttagcaaaagatttaactcatggatatcataaattttacagttacttttctaatggagataatacaaaattctataatgctattttaaaatacgtagaattaggtgtactttatccactttcctattacgatggagattggtatggaaagaatcaagttaattctagatttggctgcatttggcatggggaaaataaagaattaattaatcgatatgaacaacaatttatattggaagctggattataa

SEQ ID NO: 2402 - DNA, 666 bp, Staphylococcus epidermidis
atgtcatacaaatatgaagcattttttaaagatattttgattaatgaatatatttattttgcttcaaaaaataaaaaattaattagaatacaacatgagaatttgccatatattgctatgtggacagacgaaaatgttgctgagtcttatttgttacatcattcaattgattacgacaaaatcattagagcagatattgaccgttttgtaacatatgaaatggatgaaatctttgatccaggtgacaaagttttagttaatgtgaataatggtgaagaaggaaacattgtagatatagttaaaatgactgatgagttgatgtctgaattagatgatataagaatgagagagtttattaaagatgtcgcaaaatatgacgaagtatacggattgacaaacaaaggtgaaaagaattttattatgatttcagatgatgaccataacaaaccacacatcatgcctgtttggagtattaagagtagagcgcgtaaagtacgtgatcaagattttgaagaatgtgatttaatcgaaattgaaggtgaagtctttagtgaatggttagacaagttacgcgatgataataaagcagtagcgattgatttgaaatcaggtgttgttggtactgttgtatcagcgcaaaaactgtcaaatgaagcaacattttaa

SEQ ID NO: 2403 - DNA, 798 bp, Staphylococcus epidermidis
atgaagattggaattgatgccggagggactttaattaaaattgtacaagagcatgacaatcgtagatattacagaactgaattaacaactaatatccaaaaagtcatagattggcttaacaatgaagaaatcgaaacattaaagcttacaggtggaaatgctggagtaatagcagatcaaattcatcattcccctgaaatatttgtagagttcgatgcatcatcaaaaggtttagaaattttattggatgaacaaggtcatcaaattgaacattacatttttgctaatgtaggtacaggtacttctttccactattttgatggaaaagaccagcaacgtgttggaggtgtaggtaccggaggcgggatgatacaaggtttaggctatttattgtccaatataacagattataaagaattaacgaatttagctcaaaatggagatcgtgatgccattgatttaaaagtaaaacatatttataaagatactgaaccaccaattcctggagatttaacagcagcaaattttggaaatgtattacatcacttagataatcagtttacatcagctaacaaacttgcctctgcaattggcgtcgttggtgaagttataacaactatggctattacattagcacgtgaatataagactaagcacgttgtatatatcggttcatcatttaataacaatcaattactacgtgaagttgttgaaaattacactgttctaagaggatttaaaccgtactatattgagaatggtgctttttcaggcgctttaggagcactttacctctaa

SEQ ID NO: 2404 - DNA, 861 bp, Staphylococcus epidermidis
atgtttataaaaaaggattttgatgatattacagttcaagtatttgaagaaaaatatagagatgcacttaaccaatttgaattaagtgaacgacaacaaatatattcttcattgcctcaaactgttttagatgatgcattaaaagatgaaaatcgaattgctaatgtagctttaaataaagaaggaaaagtagtggggttcttcgttttgcatcgttattatcaacatgaaggttatgatacaccaaacaatgttgtttatgtacgttcattgtcagttaatgaaaagtttcaaggccatggatatgggacaaaaatgatgatgtttttaccagagtatgttcaagcattatttcctgattttacacatttatacttagtagtagacgctgaaaaccaaagtgcttggaacgtttatgaacgtgcaggttttatgcatacagctacaaaagaagaaggacctattgggaaagaaagactttattatttagatttagattcaaaacatgtatcttctttaaggctaaaagagggggaagtcacatataatgatgatattcacgtgattaatttgcttaaagatgatgtgaaggtaggctttattgcactagaacaaaatgataataaaatgaatatttctgcaatcgaagttaataagaaaaataggaatgagggaattgcagaaagtgctttacgccaattaccaacgtatatacgtaaacagtttgaagacattgaagttttatcaattactttatatggcgaacgtaatgaattaaaaccattgtgcttgaatagtaattttgtagcaatagaggaaactgaggattatacacgttttgaaaaatatattaattattaa

SEQ ID NO: 2405 - DNA, 537 bp, Staphylococcus epidermidis
atgaaaattcaagattacacaaaagaaatggttgatgagaaatcattcatcgatatggcctatactttattaaatgataaacaaacaacgatgaatttatatgatattattgatgaatttaaatctttaggcggatatgagtatgaagatattgaaaatcgaatcgtacaattctataccgatttaaacactgatggtcgttttttaaatgtaggagaaaatctttggggtctacgtgattggtactctgtagatgatattgaggaaaaaatcgcaccaacaattcaaaaattcgatattctagatgacgaagatgaagaagatcaaaaccttaaattattaggtgatgacgacgctgatgaagatgacgatattcctgctcaaacagatgatcaagaaacattagacgagtcagataatgatgaagatgatgttgaaatgaatgatgcagatatcgttattgatgaagacgaagacgaagatattgctgaaggtgaagaagaagcctttgaagacgccgaagactttaatgattaa

SEQ ID NO: 2406 - DNA, 1608 bp, Staphylococcus epidermidis
atgacaaagtttatttttgtaacaggcggggttgtgtcatcattaggaaaaggaataacagccgcttctctaggaagattacttaaagatagaggacttaaagttacaatacaaaaattcgatccatatttaaatgtagacccaggcacaatgagtccgtatcaacatggtgaagtgttcgttacagacgatggtgctgagactgatttagacttaggacattatgaacgttttatagatattaatttaaataaatattcaaatgttactgccggaaaagtatattcacatgtgttgaaaaaagaacgccgtggtgattacttgggtggtactgtacaagttattccccatattacaaacgaaattaaagaaagattgctattagctggtgagagtactaatgcggatgttgtaattactgaaattggtggaacaacaggtgatatagagtctttacctttcttggaagccattcgtcaaattagaagcgacttaggtcgtgaaaatgtaatgtatgtacattgtactttgctaccatatattaaagctgctggggaaatgaaaacaaaacctacacagcacagtgttaaagaattacgaggtctaggtattcaacctgatttaatagtagtacgtacagaatacgaaatgacacaagatttgaaagacaaaatcgccctattttgtgatatcaaaaaggaaagtgttatagaatgtagagatgcagattctctttatgaaattccgttacaacttagtaagcaaaatatggacgacattgttattcaacgtttacaattaaatgccaagtatgaaacgcaattggatgagtggaaacatctattaaataccgttaataatttagatggtaaaattacaatcggtttagttggtaaatatgtgagcttacaagatgcttatctatcagttgttgaatcacttaagcatgctggttatccatttaaaaaagacgttgtggtaaaatggattgattcaagtgaggtcaatgatgataatgttgaggcttatttatccgacgttgatggtattttagttcctggtggatttggattcagagcaagtgaaggtaaaattgcagctattcgttatgcccgtgagaataacataccattctttggcatttgtctaggaatgcaattggcaactgttgaatttgcgcgtcatgttttaggctatgaaggtgcgcattcagcagaattagatccaagtacaccatatccaattatagatttattaccagaacaaaaagatattgaagatttaggtggaaccttaagacttggtctttatccttgccacattaaagaaggtacattggcagagaaaatttataataaaaacgatattgaagaacgtcatcgtcatagatatgaattcaataacgagtttagggaacaattagaaagtaacggtatggtattttcaggtacaagtccagatggtcgtttagtagaaattattgaaatacctaaaaatgatttctttattgcatgtcaattccatcctgaattcttatcaagacctaatcgtccacagcctatatttaaatcatttgtagaagcggcgttgaattaccaacaaaaataa

SEQ ID NO: 2407 - DNA, 522 bp, Staphylococcus epidermidis
atgtcaaaaatcttaaacacacaattaactggtatttttaatcggcttgaaaaacaagagttggatattcaaatggcagctcaatgtctcattcaagcaattggtggagaaggacatgtctatatcaaaggctacgatgatttaaaattctatgagtcattcatattacaaagccatgaaaaattagcgtctagcttaccacttgaagatttacaaaattttaacgatatagatacaacagatagggtactgttattttcaccatactacacttcggaagttgaaagtgatgtacttcaacttattgatttagatgtcgatttagtgcttatttgtaataaccctaaacgagatgattttcctaatcatttaattcattatgttaatttatcaacacctaggcccattgtttacacagaagattatgataaaatcattcaaccacatccgatggccttaaattatatttattatgatatttatactcaaatgattgagatgactagagacctagatttatag

SEQ ID NO: 2408 - DNA, 861 bp, Staphylococcus epidermidis
atgcctttagtttcaatgaaagaaatgttaatcgatgcgaaagaaaacggttatgcggttggtcaatacaatcttaataacctcgaatttacacaagctattttagaagcgtctcaagaagagaatgcgccagttattttaggtgtttctgaaggggcagctcgttatatgagtggtttttatacagttgtgaaaatggtagaaggtttaatgcatgacttaaacatcacaatcccagtagcaattcatttagaccacggttcaagctttgaaaaatgtaaagaagcaattgatgctggattcacatctgtaatgattgatgcatctcatagtccttttgaagaaaatgttgaaatcacttctaaagtagttgagtatgctcatgatagaggcgtttctgtagaagctgaattaggtacagttggtggacaagaagacgacgtagttgctgatggcgttatctatgcagaccctaaagaatgtcaagaattagtagaaaaaactggaattgatactttagctccagcattaggttctgtacatggaccatataaaggtgaacctaaattaggatttaaagagatggaagaaattggtgcttcaactggattacctttagtattacacggtggtacaggtattccaactaaagatattcaaaaagctattccttatggtactgctaaaattaacgtgaatactgaaaatcaaattgcgtctgctaaagcagttcgtgaagtattaaacaacgacaaagatgtgtatgatccacgtaaatatttaggaccagcacgtgaagcaattaaagagacagttaaaggtaaaattagagaattcggtacttctaatcgcgctaaataa

SEQ ID NO: 2409 - DNA, 1260 bp, Staphylococcus epidermidis
atggctcaagaggtaataaaaattagaggtggacaagcactaaaaggagaagtagaaattagtggagcaaaaaatagtgcagttgctattatccccgcaactttattagctcaaggacaagtaaagttggaaggccttcctcaaatctctgatgtcgaaactctagtaagtttgttagaagatttaaatattgaagcaagattaaatggtaaacaattagaagtggatactacacaaatagagaatgcacctctacctaataataaagttgagtctttacgtgcttcttattatatgatgggcgcaatgcttggtcgttttaaaaaatgtgtaattggattgccaggtggatgtccactcgggccaagacctattgatcaacatattaagggattcaaagcattaggagcagaaattgacgaatctagcaatacatccatgaaattagtagcaaaagaacttagaggcgctcatatatttttagatatggtaagtgttggagcgacgattaatattatgcttgcggcagtccatgccaaaggtcaaactgttattgataatgcagccaaagaacctgaagtcgtagatgttgcaaactttttaatgagtatgggtgctgatattagaggagcaggtacaacatcaataaaaatcaatggtgttgaggaactaaaaggttcagagtatcaaattattccggacagaattgaagctggttcttatatgtgtatggccgcagcaatgggtgaggaggtcattttacataatattgttcctaaacatgttgaagctttaactgttaagttgcaagagttaggtgtagatattgaaattgaatatgaaaaaataatcattcgtaaacaaacaccgtataaaaatgtagatataaaaacgcttgtttatccaggttttgcaactgatttacaacaacctattacaccattattattcatgacagaaggaccttcgtttgtgactgatactatttatccagcgcgttttaaacatgtagaagaattacagcgtatgggtgctaatattaaatcggatgagggaacagctgtgattaaaccttcgacacttaatggagctgaagtatatgcaagtgatttacgcgcaggcgcttgcttaattactgcaggtttaatagctgaaggtgtgacgacaatatttaatgtaaaacatatttatagaggatatactaacatcgttgaacatcttaaagcacttggtgctgatatttggacggaaacggtataa

SEQ ID NO: 2410 - DNA, 1428 bp, Staphylococcus epidermidis
atgagaaatttcactaaacaatatataaacggtgaatgggttgatagtgcaagcggtgaaactattgatgttattaaccctgcaactgaagaagtaatgggtaaaattgctaaaggtaacgaagaagatgttaataaagctgtagatgctgcagataaagtatatttagaatttagacatagttctgttgaagaaagaagagaacttttagataaaatcgtaaaagaatatcaaaatagaaaaaatgatttaattgaagcaattactgatgaactaggagcgcctttatcagtttccgagaacgttcattatcaaatgggattgaatcattttacagctgcaagagatgctttagatagcttccaatttgaagaacaacgtggcgatgatttggttgttaaagaagcaattggagttgctggacttgttacaccttggaatttccctacaaaccaaacttcacttaaattagctgctgcgtttgctgctggtagccctgttgttttaaaaccatctgaagaaacaccatttgctgcaattattttagcagaaatttttgataaagtaggcgtacctaaaggtgtgtttaacttagtcaatggtgatggatctggagtaggaaatcctttaagtgaacatccaaaagtaagaatgatgtcatttacaggttctggtcctacaggttcaaaaattatggaaaaagctgcaaaagacttcaaaaaagtgtctcttgaattgggtgggaaatcaccttatatcgtattagatgacgttgatgttgaagaagctgctaatgcaacaacgaaaaaagtagttaacaatacaggtcaagtttgtactgcaggaacacgtgtacttattcctgaaagtattaaagaagactacttaacagcagttaaagaagcatttagtaaagttaaagtaggtcaaccaagagaagaaggaactcaagtaggtcctattattagtaaaaaacaatttgatcaagttcaggattacattgataaaggtatcaatgaaggagcagagttattctacggtggtccaggtaaaccagaaggattagataaaggatattttgcgcgtccaactatatttattaatgtagataatcacatgacgattgcacaagaagaaattttcggacctgtcatgtctgtaatcacttataataatcttgacgaagctattgaaattgctaatgatactaaatatggtcttgctggctatgttattggtaaagataaagatacattgagacatgttgctcgttcaatcgaagctggtacaattgaaattaatgaagctggtagaaaaccagacttaccattcggtggttataaagaatctggcttaggtcgtgaatggggcgattatggtatcgaagaattcttagaagtaaaatcaatagctggatattttaaataa

SEQ ID NO: 2411 - DNA, 1317 bp, Staphylococcus epidermidis
atgcctggtagagaacgaacatctccgcagtatgaatctttccacgaattatataaaaacaatactactaaagagctcactcaaaaagccaaatctttaaaattaactaattacagtaaattaaataaaaaagaattggtacttgccattatggaagcacaaatggaaaaagatggtaattactatatggaaggaatattagatgatattcaacaagatggatatggtttcttaagaaccgttaactattctaaaggtgagaaggatatttatatttctgcaagccaaattcgacgttttgaaataaaacgtggtgataaagtaacgggtaaagttcgtaaaccaaaagataatgaaaaatattatggtctacttcaagttgattttgtaaacgaccataatgcagaagaagtcaaaaaacgtcctcacttccaagctttaacacctctttatccggaagaaagaatcctattagaaacgcaatctacaaattattccactcgtattatggatttagtcacaccaataggtcttggtcaacgtggtcttatagttgcaccacctaaagctggtaagacaagtttattaaaagaaatcgctaacgcaatagcgagtaataaaccggaagcgaatttatttatattactagtaggtgagcgtccagaagaagtgacggatattgaaagatcggttgaatctgcagaagtcgttcattcgactttcgatgaaccaccagaacaccatgttaaagttgctgaattattattagagcgtgcaaaacgattagttgaaattggagaagatgtaattatacttatggactccataacacgtttggcacgagcatataatctagtcataccacctagtggacgtacattgtcaggtgggcttgatcccgcttcattacacaaacctaaagcgtttttcggtgcagcacgtaacattgaagctgggggaagtttgacaattttagctactgctttagttgagacaggatctcgtatggatgatatgatctatgaagagttcaagggtacaggtaatatggaattacatcttgatcgtaagttatcagaacgtagaatattcccagcgatagacataggtcgtagttcaacacgaaaagaagagctattaatcactaaagcggaattagattcattatggcaattacgaaatttatttactgattcaacagactttacagaacgttttattagaaaacttaagcgttcgaaaaataatgaagaattctttaagcaattgcaaaaagcagctgaagagagtactaaaactggaagaccaattatttaa

SEQ ID NO: 2412 - DNA, 258 bp, Staphylococcus epidermidis
atgaaacaaggaattcatcctgaataccacaaagttatctttttagatacaacaacaaactttaaattcttaagtggttctacaaaaacatcttcagaaactatggaatgggaagatggaaatgaatacccagttattcgtttagatgtatcatcagattctcatccattctatactggacgtcaaaaattcgcagcagcggatggtcgtgtggaacgtttcaacaaaaagtttggactcaaatcaaacaacaactaa

SEQ ID NO: 2413 - DNA, 600 bp, Staphylococcus epidermidis
atgtatgaaacgtaccattcaggttggattgaaaccataacaggaagtatgtttagtgggaaatctgaagaacttatacgtcgcttaagacgtggaatatacgctaaacaaaaggtggttgttttcaaaccagcaattgatgatcgttaccataaagaaaaggtcgtctcacataatggtaatgagatagaagcgattaatatatctacagctcaagaaattttaaatcataagctagaagaagtaaacgtcatcggaattgacgaagtgcaattttttgaagacgatattgtcaacatagttgaaaaattagctgaaaacgggcatcgtgttattgtagcaggtttagatatggattttagaggagaaccgtttaaacctatgcccaagttgctcgcagttagtgaacatattacaaagttgcaagcagtatgttctgtatgtggttcaccttcgagtcgtacacaacggttaataaatggtgaaccggcgaaagtagatgatcccatcatattggttggtgcaaatgaaagttacgagccacgttgtagagcacatcatatagttgcacctagtgaaaatgagaaggaggaaatgtag

SEQ ID NO: 2414 - DNA, 1077 bp, Staphylococcus epidermidis
gtgtttgatcaattagatatagtagaagaacgatatgaacaattaaatgaattactgagtgatcctgatgtcgtgaatgacgctgataaattaagaaaatattcaaaagaacaagctgacttacaaaagactgttgatgtgtacagaagttataaaaccaaaaaagaagaattacaagatattgaagatatgctaaatgaaacatctgataaagaagaagttgaaatgctaaaagaagaaagtagcgctttaaaaacagaattacctgatatggaagaagaattaaaaatcttacttatacctaaagatcctaatgatgataaagatgttatagttgaaatccgtgcagctgcagggggagatgaagctgcaatatttgctggggacttaatgagaatgtattcaaaatacgccgaggcaaacggatttaaaacagaaatagttgaagcttcagaaagtgatcatggtggatataaagaagtgagtttctcagtatctggtacaggtgcttacagtaaattaaaatttgaaaatggtgcacatagggtccaacgtgtgcctgaaacagaatcaggggggcgaattcacacttctaccgcaactgttgctgtattacctgaagctgaagatgtcgaaattgagatacgtaatgaagatttaaaaattgatacttatcgctctagtggtgctggtggtcagcacgttaacacgactgactctgcagtgcgtattacacacttgccgactggtgttatagcaacttcttctgaaaagtctcaaattcaaaaccgagaaaaagctatgaaagttttaaaagcacgattgtatgatatgaaattgcaagaagaacaacaaaaatatgcttctcaaagaaaatcagctgttggtacaggtgatcgttctgaaagaataagaacttataattatcctcaaagtcgtgtgacagatcatcgaattggtttaacgcttcaaaagttaaatcaaatcatggaaggaaatttagacgagattgtggaggcactcacactttcagaacaaactgagaaactgaaagaattaaacaatggtgaattataa

SEQ ID NO: 2415 - DNA, 837 bp, Staphylococcus epidermidis
atggtgaattataaagagaagtttgcagaagccaagacaattgccgtaaatgaggggtttgaatcaactcgtgccgaatggttgtttttagatgtttttggttggtcgaaaacagattatttaattcataaagatgagcaaatgtctttgacatcaattaacaaattggataaagcgttggatagaatgatcacaggagaacctattcaatacattgttggatttcagtctttttatggttatcaatataaagtgaatcaacactgtcttataccaaggcctgaaaccgaggaagttatgttgcattttttagaattgtgtaaaaagactgataccatagcagatattggaactggaagtggtgctatagcaattacgcttaagttactgcaacctgaattaaatgttattgcaacagatttgtatgaagatgctttaaatgtagctaagcaaaatgctagtcattatcaccaaaatattcagtttttgcgtggaaatgctttaaaaccgctaattgaaaatgatataaaattggatgggctgatatctaatccaccatacataggccatagtgaaataatagatatggagtcaacagtactaaattatgagccacatcatgctctatttgctgagaaaaacggatttgctatttatgagtcaatattagaagatttaccatttgtaatgaaacaaggtggacatgttgtttttgaaataggttatagtcaaggagatatcttaaaaagaatgattcaagatttatatcctgaaaaagaagtagagattttcaaagatatcaatggaaatcagcgtattatatctattatttggtag

SEQ ID NO: 2416 - DNA, 1044 bp, Staphylococcus epidermidis
atgcacacacaaatatgggatttaagaatgtataaaaataatgttagtcaatatccacatatagatgagataaaacaaactttcctagatggaggtttagtagcgatacctactgaaacagtatatggtcttggtgcgaatgctagaaacgaagaagcagtcgaaaacatctatgttgcaaaaggacgcccgtccgataatccgttaatcgttcatattcacagtattgaacaactcgatgattttgtagagtatattgatgataaggttaaagtattgatggatgaattttggccgggacctatttcttttatattaccacttaaacagggatatctttgcagtaaagtgactggtggattagaatctatcgctgttagaatgcctagtcataaaatagggagagcattacttcaaattgtagatgaacccatagcagctcctagtgctaatattagtggtcgaccgtcaccaacaacttttgaacatgtgaatagagatttaaatggtaaagtcaacggtatagttaatggtgatcaatgtgaagaaggacttgaaagtactgtgattgattgcacacagtttccgtttcgtatcgcgcgaccaggttcaattacgcaagatatgatagaaactaaactacctcattcgataaatcgtcaaatatatgaggaaaatgaaaagcctatcgcacctggtatgaaatataaacattattccccagagaccccattaacaattgttaaagatttaaataaaaaaattgctaatgatgataaatggtcaaaagtagcatttgtattcccagagagtcaaagaagtttgattcccgaaaatagcatttttatatctttatgtgaaaataagggagattttaaatcagcaggccataatttatatgaaattttacatgaacttgaccagaatgaagaaatagaagaggcatatatttatggatttgaagataatcatcacactgaagctatcatgaaccgaatgttaaaagcagcaagttataaactaattaaaggtgaaaagctatga

SEQ ID NO: 2417 - DNA, 420 bp, Staphylococcus epidermidis
atgaaaataatttttgtatgtagtggcaacacttgtcgaagcccactggctgaaagtatagccaagtcccttttaccacacgatagtatagcttcaagagggctattcgcagttgagggacaggccatatctaaggaatcgttagaattaattcataagtacgatttacctgaaccatcacgagcacaagcatttcatatagatgatcttgatgctgatattatacttaccatgacgcaagctcataaagatttaatattttctatgtatggacgacaatctaatgtctttacattaaatgagtatgtaggtgacacacaggaaattgatgacccatatggtggatcgtttgatgtttatgaacaaacttataccaaaatttatgatttagtcgacaaaataaaatttaaacacgagtaa

SEQ ID NO: 2418 - DNA, 525 bp, Staphylococcus epidermidis
atgcgtgatttacaacaactgcttgatgaattgaaagatatgtcattctttaatccaggcgaaatgtgtatcattggttgttcaacttccgaagttataggtaaacgtattggttctgttggatcaatggacgtagctaaagaaatttacgaaaatttgaaacaactagagattgatacaggcgtgacatttgcttttcaaggatgtgaacatattaacagggcagtaacgatagaaagagcaaatttcaatccattgactatggaagaagttactgtcgttccagacgttcatgcaggtggtagtttatccacttacgcttatcaacaaatggaagatcctattgttgttgagcatattactgtttcaaaaggtatagatataggtcagaccttaattggaatgcatattaaacatgtgtgtgttcctgtaagaacaagtgttaaacaaattggagaagctatcgttaccatagcgacatctagacctaagaaaattggtggcgaacgagctaaatatcaataa

SEQ ID NO: 2419 - DNA, 1239 bp, Staphylococcus epidermidis
atgtcttatatcgaaaataaggataaagttgtttacgatgctattcaaaaggagtttcaacgacaaaatagtaatattgaactcattgcatcagaaaatttcgtgtcacaagcagttatggaagcccaaggttcagtattaacgaataaatatgctgagggttatcctgggcgccgttattatggagggtgtgagcatgtagatgtaactgagtccattgccattgaaagagcaaaagctttatttggagcagaacatgttaatgttcaaccccattcaggttctcaagctaatatggctgtgtatttggttgctttagaaatgggcgatactgtgttaggtatgaatttgagtcatggtggtcatttaacacatggggcaactgtcaattttagtggtaaattttatcattttgttgaatatggtgtggaccaagaaaatgaattaataaactatgatgaagtgagacgtttagcaattgagcatcaacctaaattaattgtagctggtgcttcagcatattcaagaactattgactttaaaaaatttaaagaaattgctgatgaagtaggagctaaattgatggtagatatggcacatattgctggtttagtagctgctggtttacatcctaatcctgtagaatatgccgattttgtgactactacaactcataaaactttacgcggtccacgtggtggtatgattttatgtaaagaagaatataaaaaagatatagataaaacaatcttcccaggtattcaaggcggtccattagaacatgtcatcgccgcaaaagctgttgcatttggagaagctttgaacgacgattttaaagattatcaaaatcaagtcattaaaaatgcacaagctttagctcaaacattaattgaagaaggcttcagagttgtatctggcggtacagacaatcatttagttgcagttgatgttaaaggttctatcaatatgactggtaaattagctgaagagacacttgataaagtaggaattacatgtaataagaatactattccatttgataaagaaaaaccgtttgtaacaagtggtgttagactaggaacaccagcagctacaactcgtggttttgatgaatctgcatttgtggaagtagcaaaaattattagtttagcattaaataactatgataatgatactaaactaaatgaagctaaagagagagttcacgcactcacatctaaatatccattatataattaa

SEQ ID NO: 2420 - DNA, 630 bp, Staphylococcus epidermidis
atgagtaaagtacatgtttttgatcacccattaatacaacacaaactaagttatattagagatgctcgcactggaacaaaagagtttagggaacttgtagatgaagtcggtatgttaatggcttatgaagtaactagagacttagaactgcaagatgttgaaatacaaacacctgtgactaaaatgacagctaaacgtttggcgggtaaaaagttagcaattgtacctattttaagagctggtctaggcatgacagatggtgtgttaagtcttgttcctgctgctagggtaggacatataggactatatagagatccagagactcttgaagcggtagagtactttgcgaaaatgcctcaagacatcgatgaacgtcaaattattgtggttgatcctatgcttgctactggtgcttcagctattgaagcaatttcttcattaaaaaaacgtggagctaaaagtatacgttttatgtgtttaatagctgcccctgaaggcgttgaaaaaatgcaagaagcacacccagatgtagatatatatattgcggcattagatgaaaaattaaatgacaaagcgtatattacaccaggtttaggtgatgcaggggatagattattcggtactaaataa

SEQ ID NO: 2421 - DNA, 1146 bp, Staphylococcus epidermidis
atgaaaaaagttatgaccatatttggaactaggcctgaagctataaaaatggctccgttgattaaaacgttagagaaagattctgacctggaacccgttgttgtagtcaccgcccaacatagagagatgcttgattcagtgttgaatacttttaacataagtgcagattatgatttgaatattatgaaagctggtcaaacattgtctgaagtaacatctgaagcaatgaaaaagttagaagatatcatacaaaaggaagtgcctgatatggtacttgttcatggtgatacagtgacaaccttttctggagcattagccgcattttatagtcaaacacctataggacatgttgaagctggattaaggagttataataaatattcaccttatcctgaagaaataaatagacaaatggttggggtaatggcagatttgcactttgccccaacctataatgctgcacagaatttagtaaaagagggtaaattagccaaacatatagctatcactggtaatacagctattgacgcaatgaattatacaatcgatcaccaatattcatcatctatcatacaaaaacataaaaataaaaactttattttactcacagcacatagacgtgaaaatataggtaaacctatgataaacgtgtttaaagcgattagaaagttgattgatgaatatcaggatttagcgttggtctatcctatgcatatgaatcccaaagtaagagatattgcgcaaaaatatttaggaaatcatcctaggattgaattgatagaaccacttgatgtggttgattttcataattttgctaaacaagcatatctcattatgactgactctggtggaatacaagaggaggcaccatcattacacaaaccagttttagtattgagagatagtactgaaagaccggagggagtagatgctggaactttgagagtcattggtacgaatgaagaagatgtctataatgaaactaaaaaattaatagaaaacccagacctttatcaaaaaatgagtcaagctgttaatccatatggcgatggacaagctagtgagagaattgtgcaacatataaaatattattttaatttgacaaatgacagacccaatcattttgaatttacaaaagatttataa

SEQ ID NO: 2422 - DNA, 240 bp, Staphylococcus epidermidis
atgataggtacatgtggttctttagtaaatacatacatctttgagatttatttagctaaatcaatgcataaagaaactacacaaatgtctactggtagtacttggaggtatttagtggcagttattgcatgtgtattatggttattctttaaagaacacattaatattatcggagttttaattgggttaatgatttcttatattgtaatcatattgcgccctctactacaaagggagtaa

SEQ ID NO: 2423 - DNA, 729 bp, Staphylococcus epidermidis
atggatcacaaatccccactcgttagttggaacgtctttggtttcgatattgtttttaatttggccagtgttttaatggtagtgattacagcaattttagtttttattttagctatagtttgcactcgaaacttaaagaaacgaccaactggaaaacaaaacttcattgaatgggtatttgattttgttagaggtattattgaaagtaatatggcctggaaaaaaggtgggaatttccacttcttagcagtgacattaattcttttcatttttgtggccaacatgcttggtttaccgttcgcaattgtcactcatgaccatacgctatggtggaaatcaccaacagcagacgctacggtaactctaacgttatctacaactatgattttgttaacgcactattacggtattaaaatgcgtggaacaaaagcttatgcagctggatattttaaacctttctggccattagctattattaatgtattcgaagaattcacttctacattaactttaggtctacgtttgtacggtaatatttttgcaggtgaattattactcggtttacttgcatcattgttctttgaacaacctgcatggggttggataattagtattcctggattaattgtttggcaagcgttctctatattcgtgggaacaattcaagcatatatctttgtaatgctttcaatggtttacatgtcacataaagtggcagacggacattaa

SEQ ID NO: 2424 - DNA, 213 bp, Staphylococcus epidermidis
atgaatttaatcgcagcggcaatcgcaattggtttatcagcattaggtgcaggtattggtaacggtcttatcgtatctagaacagttgaaggtgtagcacgtcaaccagaagcacgtggtcaattaatgggtatcatgttcattggtgttggtttagttgaggcattaccaatcatcggtgttgtaattgcattcatgacatttgctggataa

SEQ ID NO: 2425 - DNA, 516 bp, Staphylococcus epidermidis
gtgactgcaacagctaatacatttattctcggtgcaggagttgaatgggggacaacaattgtaacactcgtaacatttgtaatcctcatcatacttttgaagaaatttgcttggggtccattaaaagaagtaatggacaaacgtgaacgtgatatcaataaagatattgacgacgcagaacaagctaagataaatgctcaaaaacttgaagaagaaaatagaaagacacttaaagaaactcaagatgaagttcaaaaaatcttagacgatgctaagattcaagcacgtaagcaacatgaagaaattattcatgaagctaacgaaaaagctaatggtatgattgaaactgctcaaagtgaaattaatagtcaaaaagaacgtgcaatttctgatattaataatcaagtttctgaactatcagtacttattgcatctaaagttcttagaaaagaaatttcagagcaagatcaaaaagaattagttgaaaagtatttaaaagaggcaggggataaataa

SEQ ID NO: 2426 - DNA, 540 bp, Staphylococcus epidermidis
atggcaaaggtagcaaaaaaatatgccaaagcattatttgatgtcgctctagatacaaatcaactagatgttgtctatgaagatttagaaacaattagccattcatcgtttgatttcatcaaacaacttaaagcaattgatagtaatccaagcttaactgcaaatcaacgtgaagaatttgtagaaagagtttacaacgaagcaaatccatatgtggtaaatactttaaaagtattagcagataaccgacatatttcaattgtagagaatgtttttaaatcattccaaaatttatataacaaatactacaaacaagattttgcaattattgaatcgacttacgagttaagcgaagatgaaatatcaagaattgtagaacttatcaaaaagcaaactgaattatcaaatgtaattgttaacactaaaatcaatcaagatttaattggtggatttagagttaaggttggaactacagttatggatggtagtgttagaaatgaccttgttcaattacaaagaaaatttgaaagagctaactaa

SEQ ID NO: 2427 - DNA, 1512 bp, Staphylococcus epidermidis
atggccataaaagctgaagaaatcagtgcattgcttcgctcacaaattgaaaattatgagtcagaaatgtccgttacagatgttggtacagtactccaaattggtgacggtatcgcattaattcacggacttaacgacgttatggctggtgagctagtagaattccataacggtgttcttggtttagcacaaaaccttgaagaatctaatgtgggtgtggttattttaggaccatatgaagaaattagtgaaggtgacgaagttaaacgtactggccgaattatggaagtaccagtcggagaggaaatgataggaagagttgttaatcctcttggacaacccattgacggacaaggtccaatcaatgcgactaaaactcgtcctgtagagaaaaaagcaactggcgtaatggatcgtaaatctgtagatgaaccattacaaacaggtatcaaagcaattgatgctttagtaccaattggccgtggtcaacgtgaattaatcattggtgaccgtcaaactggtaaaacaactgttgcaattgattcaatcttaaaccaaaaagatcaagatacaatttgtatttatgttgcaataggtcaaaaagattcaacagttcgtgcaaatgttgaaaaattaagacaagcaggtgctttagactacacaatcgttgtatctgcatccgcagctgatccagcaccattactttatattgcaccttattctggtgtaactatgggtgaagagttcatgtttaatggaaaacatgttcttatcgtttacgatgatttaactaaacaagcggcagcataccgtgagctatcattattattacgtagaccaccaggtcgtgaagcatatcctggggacgtgttctacttacacagtagattattagaaagagctgcaaaacttaacgatgatcttggaggcggttcaattactgctttaccaatcattgaaactcaagctggcgatatctcagcatacgttccaacaaatgttatctcaattactgacggacaaatattcttacaatctgatttattcttctcaggtgttagaccagcgattaatgctgggcaatcagtatctcgtgttggtggttcagctcaaattaaagcgatgaaaaaagttgcaggaacattacgtttagacttagcttcatatcgtgagttagaatcatttgcgcaatttggttctgatttagatgaatttacagctaaaaaattagcgcgtggtgaacgtactgttgaagtattaaaacaaggtcaaaataacccactgcctgtagaacatcaagtacttattatttttgctttaactaaaggttacttagatgatattcctgtccaagatatcaatcgttttgaagaggaatttaaccactgggctgagtcaaatgcaactgaattattaaatgaaattagagaaactggtgctttaccagatgctgataaatttgattctgctatcacagaatttaaaaaaggatttaataaatcagaagaataa

SEQ ID NO: 2428 - DNA, 867 bp, Staphylococcus epidermidis
atggcctctcttaaagagatagatagtcgtattaaatcgacaagtaagatgaagcaaataacaaaggcgatgaacatggtttctagttcaaaattacgtagagctgagaaaaatactaaatcatttagaccttatatggaaaagatgcaagatgctattacagctgtagctggttcaaatagtacttctaatcatccaatgcttaaatctagagatattaaaagaagtggttacttagtaatcactagtgataaaggcttagccggtgcctatagtacaaatgttttaaaaagcttagtaaacgatatcaattctaaacacaacgacagtagtgaatatagtctaatcgttttaggtcagcaaggtgtagatttcttcaaacatagaggatatgaaattgaaagttctttagttgaagttccagatcaaccttcatttaaatctattcaatctatagctaaacatgctattgatttatttagcgaggaaaacatagatgaattgactatttattacagtcattatgttagtgtcttagaaaataaacctgcaactaaacaagttttaccattatctcaagaagattcaggtcaaggacatggtcaaatgtcttcatacgaatttgaaccagataaagaatctattttaagcgttattttgccacaatacgttgaaagcttaatctacggtacaatcttagatgcaaaagctagtgaacatgcttcacgtatgacagcaatgagaaatgcttcagataatgcgacagaactaatcgatgatttatcattagaatacaatagagcgagacaagctgcgattactcaacaaattactgaaattgttggtggatcatcagctcttgagtaa

SEQ ID NO: 2429 - DNA, 1413 bp, Staphylococcus epidermidis
atgggaattggccgtgtaactcaagttatgggtccagtaatagatgttcgttttgaacataacgaagtacctgagataaataatgcattacacatcgaagttcctaaagaagatggagcgcttcaattaacattagaagttgcacttcaactaggtgacgatgtagttcgtacaattgcaatggactcaactgacggcgttcaaagaggaatggaagttaaagatacaggtagagacataagtgtacctgtcggtgacgtaactctaggaagagtgtttaacgtactaggagaaactattgacttagatgaaaaaattgatgattcagtacgacgtgaccctatccatagacaagctccaggattcgacgaattatcaacaaaagtagaaatcttagaaactggtattaaagtagtagacttattagcaccttacataaaaggtggtaaaattggattatttggtggtgccggtgtaggtaaaaccgtactaatccaagaacttattaataacatcgctcaagaacacggtggtatctcagtattcgctggtgttggtgaacgtacacgtgaaggtaatgatctttactatgaaatgagtgacagtggtgttatcaagaaaactgcaatggtctttggtcaaatgaatgagccacctggtgcacgtatgcgtgtagcattatccggattaacaatggccgaatatttccgagatgaagaaggccaagatgtgttattattcattgataacattttcagattcactcaagctggttcagaagtttctgcgttattaggtcgtatgccatcagctgttggttatcaacctacacttgctacagaaatgggtcaattacaagaacgtataagttcaacaaataaaggttcagttacatcaattcaagctgttttcgtaccagccgatgactatactgaccctgcgccagcaacaacgttcgcacacttagattcaacaacaaacttagagcgtaaattaacagaaatgggtatttatccagctgtagacccgcttgcttctacatctagagctttggaaccttcagtagtaggtcaagagcattatgatgtggcacgtgaagttcaatctactttacaaaaatatagagagttacaagatattattgcgattcttggtatggatgaattatcagatgaagataaacaaactgtggaacgagcacgtagaattcaattcttcttatcacaaaacttccacgttgcagaacaatttactggacaaaaaggttcatatgtacctgttaaaacaacagttgcagacttcagagatattttagatggtaagtatgaccatattcctgaagacgcattccgtttagtaggtagcatggaagacgtaattgagaaagcaaaagatatgggtgttgaagtctaa

SEQ ID NO: 2430 - DNA, 405 bp, Staphylococcus epidermidis
atgaatacacttagactaaatattgtcactcctaatggttctgtctatgaacgtgaagacgttgagatggctgtcttacaaacaacagctggtgaaatggggattatgtatggtcacattccaactgttgctgcattaaaaacaggtcatgtgaaagttaattttcacaacggaaatgaatttattgcagtaagtgatggctttattgaagcaagacaacatcaattatcaattatcgtccaaacggccgaacctgctagtgaaatcgatgttgaaagagctaaattagctaagtcgagagcagaatcacatttagaagaagatgatgataatacagacataaatagagctaaaagagcacttgaacgagcaaataatcgtttacgtgttgcagaattacaataa

SEQ ID NO: 2431 - DNA, 1266 bp, Staphylococcus epidermidis
atggataaaatagtaataaatggtggaaatcgtttaacaggtgaagttaatgttgaaggagctaaaaatgctgtattacctgtacttacagcgtcattacttgcttctgaaggacacagtaaactagttaatgtcccagagttaagcgatgttgaaacaatcaataatgtattatctacactcaatgcaaatgtagagtatgataaagataaaaatgcagttaaagttgatgcaactaaaactttaaatgaagaagccccttatgaatatgtgagtaaaatgcgagcaagcatcttggttatgggaccactacttgctcgactagggcatgctattgttgctttgccaggaggatgtgcgattggaacacgtcctatagagcagcacattaaaggatttgaagctttaggtgcagacattcatttagaaaatggaaatatttatgcaaatgctaaagatggattaaagggagcacatattcatttagattttccgagtgtaggtgcaactcaaaatattattatggcagcgtccttggcatcaggaaaatctatcattgagaatgtcgctaaagaacctgaaattgttgatttagctaattatattaatgaaatgggcggtaaaattacaggtgcaggtactgataccattacgatacatggtgttgaaaaactttacggtgttgaacatgcaattataccagatagaattgaagctggaacgttacttatcgcaggtgcaataactcgtggtgacatatttgtacgtggtgcaattaaagaacatatggctagtttaatatataagcttgaagagatgggggtagatcttgaatattatgaagaaggtataagagttacagcaaatggagatttaaatccagtagatgtaaaaactttaccacacccaggtttcccaactgatatgcaatctcaaatgatggctttattattaacagcaaatggacacaaagtgattactgagactgtttttgaaaatagatttatgcacgttgcagaatttagaagaatgaatgcgaatataagtgttgaaggaagaagtgctaaaattgaaggaaaaagccatttacaaggtgctcaagttaaagcaacagatttaagagctgctgcagccttaatcttagctggtttagttgcagagggaactacgcaagtgactgagttaaagcatctagatagaggatacgtcaatttacatggaaaactaaaaagtctaggtgcaaacatagaacgtgtaaatcgataa

SEQ ID NO: 2432 - DNA, 438 bp, Staphylococcus epidermidis
atggaaacgatttttgattataatcaaattaaacaaattatcccacatagacaaccttttttactaatagataaaattgtagagtatgaagaaggtaaaaggtgtgtaggactaaagcaagtatcaggtaatgaaccatttttccagggacatttccctaattacgctgtgatgcctggtgttcttattacagaagctttagcgcaaactggtgcagtagctatgttaaatagtgaagaaaataaagggaaaatagcattgtttgcaggcattgataagtgtcgcttcaaaaaacaagtcgtacctggagatacattaatgttggaagttgaaataactaaaataaaaggtcctattggtaagggttcggctaaagcgactgttgatggccaacttgcttgtagctgtgaacttacttttgctattcaagatgcttaa

SEQ ID NO: 2433 - DNA, 441 bp, Staphylococcus epidermidis
atgaaaacttttaaggcagtaagatttcaaattgtgaatgaacatggtgcaatatcagaatacgtcattgaagatggtgtgattataaataaagaaggaagtggcactgggtggttactagaaatagtaatttcaaatgaacactatgaaacatttaagcaatataaggataacaaacaacttttagatattagagtagtcatcacaagacctgctaacgatccagcgttatttaatgcaacagttaaaagcgttaaaaattttaaatattcaatgtcagtcgttttagaatgtcacatctacactttgagacaagaatacgctgagagtttattagaagaattagttgatgaaggacttacaggtgaaaagttgaaaaaaacatttaatcgtatgatgcaatcaaaacctaagttgaaagatgagaaaatcgaaagataa

SEQ ID NO: 2434 - DNA, 396 bp, Staphylococcus epidermidis
atgttaaataaaatagtcattgttggtagaatgacgaaagatgctcaaatctatgaaaaggaggataacaaaatagcaacattttgcgttgctacagaaagaaactacaaagatgataataatgaaatttctacagattatttactttgtaaagctttcggtaaaactgccactaatattgaaaagtacactagtcaaggtactttagtaggtataactggacaaatgcgttcaagaaaatatgaaaaagaaggccaaacacattttgttacagaattatacgttgaaacaataaaattcatgtccccaaaaaataaaaacaatgaaactccctctgataatcaatttgaaaacaacacttatcaacctgatgatttagaaataattcatatttaa

SEQ ID NO: 2435 - DNA, 660 bp, Staphylococcus epidermidis
atgaaaaaaacattagttgcatcatcattagctataggactaggcgttgtagcaggtaacgcaggtcatgacgcacatgcaagtgagactacaaatgttgataaagcagagttagctcaaaaagcgttaactaatgatcaatcactaaatgaaagccctgttcaagaaggtgcttataatattaattttgattacaatggtaattcatatcattttgaatctgatggttctacttggagttggagttatgaatcaacaaacaatgctacgcaacctgttcaaccaagccaatctcaagtagctacacaacaacaacctgtacaagtatcagcaccacaaaatgagcaaacagcacaaccacaaacaaaatcaacatctacaagtcaaacttcttcaagtaaagcttcaagtggttcatcagtaaatgtaaattcacatttacaacaaattgctcaacgtgaatcaggtggcgatattcatgcaataaacccatcttcaggtgcagcaggtaaatatcaattcttacaatcaacttgggattctgttgctccaagtcaatataaaggtgtttcacctgcaaaagctccagaaagcgtacaagaccgagcagcagtaaaattatataatactggtggcccaggtcattgggtaactgcataa

SEQ ID NO: 2436 - DNA, 690 bp, Staphylococcus epidermidis
atgacattttcaaaagagttgagggaagcatcaagacctattattgatgacatttacaatgatggttttattcaagatttactagcaggtaagttatctaatcaagctgtaagacaatacttaagagcagacgcttcttatttaaaagagtttacaaatatttatgcaatgctcatacccaaaatgagttctatggaagatgttaaatttctagtagaacaaattgagtttatgttagaaggagaagttgaagcgcatgaggttctagctgatttcattaatgaaccatatgaagaaatagtaaaagaaaaagtatggccaccaagtggtgatcattatattaaacatatgtacttcaatgcatttgcacgtgaaaatgcagccttcacgattgcagcgatggcaccctgtccatacgtctacgctgtcattggtaaacgtgcgatggaagatcccaaattaaataaagaatcagtgacttctaaatggtttcaattttatagtactgaaatggacgaacttgttgatgtgttcgatcaattgatggaccgtttaactaaacattgtagtgagacagaaaaaaaagagattaaagaaaatttcttgcaaagtactattcatgagagacatttcttcaatatggcatatattaatgaaaaatgggaatatgggggaaataacaatgaataa

SEQ ID NO: 2437 - DNA, 822 bp, Staphylococcus epidermidis
atgaataaacctaaaattgcactaacaatagcaggcacagatcccaccggtggggcaggtgttatggcggatttaaaatcatttcacgcgtgtggcgtttatggtatggccactataacaagtatcgttgctcaaaataccctaggagttcaacatatccataatttagaatcttcatgggtaaaggaacaacttgatagtgtgtttgatgatgaattaccacaagctatcaaaacgggtatgattgcaacaaaaaaaacgatggagttgattcaaagttacttaaaggaacattccaatattccttatgtgattgatccagttatgcttgccaaaagtggtgattcattgatggatgaaaatactaaaaatcatttgcaatcaacattattacctttggctgatgttgtcactccgaatatacctgaagctgaggaaattactggtattaaaattaatgatgaagaaagcatacgtaaagcaggtcaaatctttattaatgaaattggtagtaagggtgttgtaattaagggagggcattcagccgatttaaataatgctaaagattttctttttactaagaatgaaacgtatacctttgagaacaaacgctttgatactaaacatactcatggaactggttgtactttttcagcagttattacagcagaattagctaaaggtcgttccataaaagatgcagttaaaaaagcaaaagagtttatttcattaagtattgaacataccccagaaattggcaaggggagaggacctgtaaatcattttgcttatatgaagaaagtaggtttagatgatgaataa

SEQ ID NO: 2438 - DNA, 789 bp, Staphylococcus epidermidis
atgaataatttagaacgattacgttcagaaaatccactcgtaatttgctataccaatgatgttgtgaaaaactttactgcgaatggtttactaagtttaggtgctagtcccgcaatgagtgaggcaccagaagaagctgaagattttactcgaatggctagtgcgcttttaattaacatcggtacactcacacgtgaaaatgaagaagacattatcaaaataggtaaaattgctaatcagcaaggtacaccaatagtttttgatccagtggcagttggtgcttctacatatcgtaaaaatttttgtcaacgttttcttggtgaagttaatgtcacagtaataaaaggcaatgcttcagaaatattgacattaatagattttaatacaactatgaaaggtactgacagtgacagcgaattagattcagtaaatattgcaaaaaaagcggctaatactttaaatactgctattgtcattactggaaaagatgatattattgcaaaaaatgagaaaataattaaattatctaatggttctccgcttcttactaaaatcacgggggctggatgcttgttaggtggtgtattagcaagtttcttgtttagaaatactcaaccttcaattgatttattagttgaagcggtaagtgtctacaacatcgcagcagaatttgctgaacaagcgcctcatgtaaatggacctggtacttttctatctgaactgctagatcaactttatcagatgaatgacattacttataaaaatcaagtcaaaaaggtagagatatga

SEQ ID NO: 2439 - DNA, 642 bp, Staphylococcus epidermidis
atgatgtttgattcaaaacaattatcagtctattttatttgcggaacacaagatatacctaaaaataaatcaattgagcaagttctcaaagaggcattagaagctggaatcacgctatatcaatttcgtgaaaaaggtccgaatgcactaaaaggggaaaagaaaaaacagttagccttaaaacttaaacaattatgtcactcatatcacgtacctatgatagttaatgatgatgttcaattagcccaagagattaatgctgatggcattcatgtaggtcaagatgatatggaaattcaacaatttgcaagccaatttaaaaataagattataggtttaagtgttgggaatttgaaagagtatcaacaatctgatttgtctaaagttgattacattggagtaggtccaatgtatacaacatcatcaaaagatgacgctagtaaacctgttggtccatctatgatatctcaattaagattatatattcatgattttcctatagttgccattggaggtataaatgaaactaacgtgcagcctattgttgacgaaggtgcagatggtatttctgtcatctcagctattacacgtagtaccaatatagacaaaacggttaaatatttcttaagatatttcacctaa

SEQ ID NO: 2440 - DNA, 873 bp, Staphylococcus epidermidis
atgaagaaaaaagcgttactacctttgtttttgggaataatgatttttctagcaggttgtgattactctacacctgagaagcaagatggattcttctttaatacttttgttcaacctatgaaacatctcttacagtggttaggaaatgatgtttttcataataattttggactagcaattattgtattagttcttttcattcgtttaatcttgttaccatttatgttatctaactataaaaatagtcacatgatgcgtgagaaaatgaaagtggctaaacctgaagtagatggcattcaagaaaaggttaaacgtgcgcgaacacaagaagaaaaaatggctgcaaaccaagaacttatggaagtttataaaaaatatgatatgaaccctatgaagagcatgttaggatgtttacctatacttattcaaatgccaattattatgggattatactttgtattaaaagataagcttgtaaatggtttatctgaacatccgcatttcttatggttcaatttaactaagcctgatatttggattacagttattgccggtgtgctatactttattcaagctgtagtttcaagcaaaacgatgcctcaagagcaacgtcagatgggctatatgatgatggttatttctccaataatgattatttggatttctttacaagcatcatcagctttaggtttatattggtctgtcagtgcattattcttagtaattcaaacgcattttgctaatatttattactctaaacttgctaaaaaagaagttcaaccttttattgaaaagtatgaaagagaacataatccatcttcaaagaaaaaagggaaaaatactcaagtagtatcaaaaaagaataaaaaataa

SEQ ID NO: 2441 - DNA, 654 bp, Staphylococcus epidermidis
atgaactcaagaatgaagattaaaaaagcttatgagtatatgaaaagtttccatcaacatgatacaactggacatgatattgcacatgtggaacgtgtctataacaacgcttgttatatcgctaaacgagaaaatataacagatacacttgttatagaactatcatctttattgcatgatactgttgatagtaaattaactgatgaaattttagcatatgatcagcttaaacagttcttatctaccctagatttaagcagtgaaatatcacaacaagttctctatattattaaacatatgagttatcgagctggtaaaaataatcacgttaaactttcaatagatggtgaaatcgttagagatgctgatcgcctagatgcaataggagcaatcggcattgcgagaacattccagttttcaggacactttggtgaacctatgtggactgaaacgaagctttcaaatgaagagttacatacgtctctcgttgaagaattagacaattcagcaataaaacatttttatgaaaaattatttaaattaaaagatttaatgcacactcctactgcaaaaaaacttgctgaagaaagacatcaatttatgattcaatatctcaaacaatttatgtcagagtggaattttaataaagagtaa

SEQ ID NO: 2442 - DNA, 1485 bp, Staphylococcus epidermidis
atgatagaagtctttactatggcacttcatcaatctaatattataattaatattttattagttagtgcctttttattaaatttagtttttgcattcattattattttcatggagaggcgtacagcaaattctatatgggcgtggttattggttttagtttttctacctttagtaggattcatattgtatttattattaggtcgccaaatacagagagaacatatatttaaactcgccaaagaggataaagttggtcttgaaatgattgttgacgagcaattagaggcattgaaaaagcaagacttttctaagggtaatcatcaaattgttaaatttaaagaaatggtacaaatgttactttataataatgctgcttttttaacaactgataatgatctaacaatttatacagatggtcatcagaagttcgatgatttaattaatgatattagacacgcacaatcatatattcacatccaatactacattattcatagtgataatctcggaaagcaattgttacatgaattagaaaaaaaagctgaagaaggtatagaagttaaaatgctatacgatgatatgggctcaagagatttacgaaagaaagatctaaaaaagtttcgtcaaaaaggcggtcacgctgaatctttctttccatcaaaattaccacttattaatttaagaatgaataatagaaaccacagaaaaatagtagtcattgacggtacgattggatatgttggtggttttaatgtaggagatgaatatataggtaaatctaagaaatttggttattggagggacacacacttacgtattaaaggtgacgcggtaaatgcccttcaacttagattcatcttagattggaactcacaatcaactcgtgacaatttaacttatgaatctcgatattttcctgatgttgactctggtggtacgataggcatacaaattgcttcaagtgggcctgatgaagattgggaacaaattaaatatggttatttaaaaatgatttcatcagccaaagaatctatatacattcaatcaccatacttcattcccgatcaagcttttttagattcgattaaaattgcagcgcttggtggtgtggatgttaacatcatggttcctaacaaacgtgatcatccctttgtttattgggctacgcttaaaaacgtagcgtctttacttgaagctggcgttaatgtctatcattatgataatggttttctacattcaaaaacacttgtcattgatgatgaggtagcaagtgtaggaactgccaatatggataatcgaagctttacattaaactttgaggtcaatgcttttatttatgatgaaggcgtagcacgatcattaaaacaagctttcattaatgatatgaaattatctaacaagctcacttctgaagaatatgctaaacgaaatctgctagttaaattcaaagaagggatttcacaactactttctccaattttataa

SEQ ID NO: 2443 - DNA, 294 bp, Staphylococcus epidermidis
atggcagacatggagagtgcacatcactcagagcaaataaaaacaaatttaaaatcaagattaaatagaatagaaggtcaagtaagagcaataaatcgtatgattgatgatgacgtttactgtgatgatgtactaactcaaattagagcaacacgttcagcattgaatagtgtagctactaaattactagaccatcacatgaaaggttgtattatggaaaaaataaacgacggtgcgcaagaagaagcaatggatgaattgctcgtgacattccaaaaattaataaaagattaa

SEQ ID NO: 2444 - DNA, 210 bp, Staphylococcus epidermidis
atgaaattgaaaaaaggattgataaatgtttcaggtattaaaacaactgaacaagctaaacagctcaaagatcatttatctaagatgataggcatcaatagtgtggatatcgattaccaaatgaatgagattcgagtagaatttgacactcctgcaaatttaaataacattgaaaaagaaatttacgattacggatttcgtattttgtaa

SEQ ID NO: 2445 - DNA, 138 bp, Staphylococcus epidermidis
gtgaagaatcaggataagattcaaaatgtagtcaaattattatcatcattgggtgtgaatattaagaaaactaagtctcgtttagatattattaatactttgcctacatctaatcaagtaagtcatgaattaaaataa

SEQ ID NO: 2446 - DNA, 1212 bp, Staphylococcus epidermidis
atgaattattcttctcgtcaacaacctaaacgtaactggttacgtaaagtagactggatactcgtactagttatatcactattagcactaacaagtgttattttaatcagttccgctatgggtggcggacaatatagtgcaaatttcagtattagacaaattatttattatattttcggagctattattgcatttttaattatgataatttcaccgaagaaaattaaaaataatacttatattttatatagtatattttgcgttctattaatagggttacttattttacctgaaacttcaatcaccccaattattaatggtgctaaaagttggtacagtttcggtcctataagcatccaaccttccgaattcatgaaaattatacttatacttgctttggctaaaacgatatctaaacataatcaatttacatttaataagtcttttcagtctgatttaatgttattttttaaaattttaggtgtatccattatacctatggcattaattctattgcaaaatgacttaggtactactttggtgttatgtgcaattatagctggcgtcatgttagtaagtggaataacatggaggatattagcccctctatttattgttgcatttgtgagtggttctagtattatattagctatcatttataaaccatccttgatagaaaacctattaggaataaaaatgtatcaaatgggacgtatcaattcttggttagatccctattcatacagtagtggggatggatatcacttaacagaatctttaaaagctattggttctggtcaattattaggtaaaggttataaccatggcgaagtttatattcctgagaatcataccgactttattttttcagtgattggagaagaaatgggctttataggttcagtattattgatattacttttcttattcttaatatttcaccttatacgattagctagtaaaattgatagtcagtttaacaaagtatttatcataggatatgtatcgttgattgtttttcacgtgttacaaaatatcggcatgacggttcaattactaccgattacaggtataccacttccgtttattagttacggtggaagttctttatggagtttaatgactggtataggagtagttctttcaatttattatcatgaaccccaacgatatgaaatacccacattatctaaaaaatctaatacaatttaa

SEQ ID NO: 2447 - DNA, 1074 bp, Staphylococcus epidermidis
atgacaaaagaaaatatttgtatcgtttttggaggtaaaagtgcagaacacgatgtttcaattttaactgcacaaaatgttttaaacgcaattgataaagaacgatatcaagttgatatcatttatataacaaacgatggtgaatggaagaaaaaagataatattacacaagaaataaaaaatactgatgaactcgtcattaacgatgtagagactggagaaatctcacagttactcagtaaaggtagtttaggaaaatcatatgatgcagtattcccgttattgcatggtccaaatggagaagatggaactatccaaggtctttttgaagtacttgatataccatatgtaggtaatggtgtgttagctgcttcaagctcaatggataaactcgtgatgaaacaattatttgagcatagaggtttacctcaattaccttatattagctttttaagaagtgagtatgaaaaatatgaaaataatatcattaagttagttaatgataagttaacatatcctgtatttgtaaaacctgctaatctcggttcaagtgttggtataagtaaatgtaacaatgaagaagaattaaaatctgggatagctgaagcattccaatttgatcgtaaacttgtcattgaacaagggattaatgctagagagattgaagtagctgtcttaggtaacgattatcctgaaacgacatggcctggtgaggttgttaaggatgtagctttttatgattataaatcaaagtataaagacggtaagattagattagatattccagcagatttagatcaagatgttcaaatgacattaagaaacatggcattagaggcctttaaagctactgattgttcgggattagttcgtgcagatttctttgttactgatgataatcaaatttatatcaatgaaacaaatgccatgccaggatttactgcatatagtatgtatccaaacttatggaaaaatatgggcttatcttaccctgatttaattgctaaattgattgatttggctaaagaacgttatgaagataaaaagaaaaataaatataaaattgattattag

SEQ ID NO: 2448 - DNA, 1356 bp, Staphylococcus epidermidis
atgataaacgtaacattagagcaaattaaaaactggatagattgtgaaattgatgaaaaacatttaaaaaaaacgataaatggggtttcaattgattcacgaaaaatcaatgaaggggcgctatttataccttttaaaggtgagaatgttgatggccatcgttttatcacgcaagcgttgaacgatggtgctggagctgtttttagtgaaaaagagaataaatattctgaagggaaccaaggtcctattatttgggtagaagatactttaatagccttacagcaattggcaaaagcatatctaaatcatgtgaatcctaaggtgatagcggttactggttctaatgggaaaacaacaacaaaagacatgattgaaagtgtattatcaactgaatttaaagttaagaaaacacaaggaaattataataatgaaattggaatgccgttgactttactagaacttgatgaagacacagaaatttctattctagaaatggggatgtcaggttttcatcaaatagagttgttatctcatatcgcacaacctgatatagcggtcatcacaaacattggtgagtcacatatgcaagatttaggatcgcgagaaggcattgcaaaagctaaatttgaaataacaactggtctcaaaacaaatggtatatttatttatgacggagatgaacctttattaaaacctcatgttaatcaagttaaaaatgcgaaattaataagcattgggttaaattcagacaatacatatacttgtcatatgaacgatgtaaaaaacgaaggtattcattttactatcaatcaaaaagaacattatcatttaccaattttgggcacgcataatatgaaaaatgctgctattgcaattgctattggacatgaattaggcctaaatgaaacaataattcaaaataatattcacaatgtgcaattaaccgctatgagaatggaaagacatgaatcatcaaataatgtaacagtaattaatgacgcatataacgcaagtccaacgagtatgaaagctgccattgatacattaagtggcatgaaaggtcgaaaaattttaatattagcagatgtacttgaattaggacctaatagtcaattgatgcacaaacaagttggtgaatatttgaaagataaaaatattgatgttttatatacatttggtaaagaagctagttatatccatgatagtggtaaaatttttgttaaagaagcaaaatactttgataataaagaacagttaattcagacgctaatatctcaagttaaacctgaggacaaagtcttagttaaaggttcacgaggtatgaaacttgaggaagttgttgacgcattgttgtaa

SEQ ID NO: 2449 - DNA, 1530 bp, Staphylococcus epidermidis
ttgcaaaattttaaagaactagggatttcggataaaacggttcaaacattagaagcaatgggatttaaagaaccgacacctatccaaaaagatagcatcccttacgcgttagaaggagatgacatccttggacaagcccaaactggtactgggaaaacaggggcgtttggtatacctttaattgagaaagttgtaggccaacagggtgttcaatcattaattcttgcgccaacgagagagcttgctatgcaagtagctgagcaattaagagagttcagtaaaggtcaaaaagtacaagttgttacagtctttggtggtatgcctattgaaagacagattaaagcattaaaaagaggccctcaaattgtagtaggtacgccgggaagagttattgatcatcttaatcgtcgtacacttaaaactcaaggaattcacacgcttattttagatgaagcagatgaaatgatgaatatgggattcatcgatgatatgagatttattatggataaaattccagctgaacaacgtcaaactatgctattttctgctacgatgccaaaagcaatccaagaattggtacagcagtttatgaaagctcctaaaataattaagacaatgaataatgaaatgtcagatcctcaaattgatgaatattatacaatcgttaaagaattagagaaatttgatacatttacaaactttttagatgttcatcagcctgaattggcgattgtctttggtcgtactaagcgtcgcgtagatgaattaacaagcgcgctattatctaaaggatacaaagcagaaggtttacatggggatattacccaagcaaaacgtttagaagtattgaagaaatttaagaacgatcaaatagatattttagttgctacagatgtggctgcacgtggtcttgatatttctggtgtgagtcatgtttataattttgatatccctcaagatacagaaagttatacgcaccgtattggacgtactggtcgagcaggaaaagaaggtattgcagttacttttgtaaatccaattgagatggattatattcgacaaattgaagatgtcaataatcgtcgaatgaaagcattaagacctccacatcgtaaagaggtgcttaaagcgcgtgaagatgatattaaagatagagttcaaaactggatgtcaagagaaaatgagccacgtttacaaagaatatcaagtgaattacttaaagaatatgatagtacagaattagtagcctctttacttcaagaacttgtagaagctaatgatgaagtggaagtacaattaacttttgaaaaaccattagcacgtaaaaatcgcagtaataaaggcggttctagaagaagtaatcataaacgtggtaatggtaagtttgataataaaaatagacgatcaaaagggtctaaaggtcaatcaagcaaaaagaaaaaccaaaagaaatttgaccgtagagataagcaacaaaaaagtggtaatcaatcactaaaaggtcgcacatttgctgatcaccaaaaataa

SEQ ID NO: 2450 - DNA, 480 bp, Staphylococcus epidermidis
atgaaaaatgatagtacgtttcatagaagcccaatccaagcgctaaagtactattacataactagttgcataggtttatttattttgcttgttatacttagtttacttttgtattttagctatttaaatcattggtggccttttacatcctacatctttcttgggctaggtttgttatcgattttaaacacttgtatatctccactaattaaatatagatatcattattataaaattcacgaagattttgtcatattaaaaagattatttatttttaggaaagaagaattaagtaaaatagagagaatacaatttatcgatattggaactaatccgttatcaaaaaaattaaatcttaattccataactttatttactgcaggtcatacaatctcatttccaataatatctgagaaagaagcacaaaatattcaacaacaaatactattgagattgagaggtgcaaatgacgatgtatag

SEQ ID NO: 2451 - DNA, 1503 bp, Staphylococcus epidermidis
atgtatagtccgcaaaagctacatccaatttcttatattgatggcttgattagtgtgattaaatcaaatttcattgtaattatcatctttttatttaatataaaagattttaaatatgatgatttttcgtcttatattattccaggtataatgactttgatattttctatcggtttcattcataatattattaaggtttataatacacgatattggattgaagaggatcattttattttaactactggtgtttttaataaggaacgaaaagaactaaatattagtcgcatacaatctgcagatacgtctcaaggtttgattaatcaaattgttggcggcgttgaactcatcattaaaacaccaagtgatggcatagaattagggacaatttccaaaaagcaaagtgaagttattgaacaagaattgcgatctattcaagaacgcatgaataaccaggtaaatcaagaagctaaagagttaaatgatgagaatcatactcagacatatcaacaacatgccaaaccctatgcaatatttaaaatgccttttaaacaactattatttatgtctatgacaagtggagctatagcacttgcttttgtgacactatctcctattattggcagtctctcaagtgttattccatgggataaatttggtgaagaaatatcttcggtatttaaaacgatatatttcattgtcatttttattgtcatactagtgttattattaagttatataatcggaactatcatgtacttaataaagttttatggatatcaagttattcaagataatcatcaacttaaaattcaatatggattatttacaaagaaaaatatcactgtaccaactgaccgactgcaaggtgtacttgaacatcaatcttttatacgaaaattatttggttatacatctatacatttctatattacaagtgatatagatactactgaaggggaacccactgataatgatggaagaattatgattttaccgtttattccaagaaaagaggcatataaagtgattaggcctttggttcctgagatgacatttaatcatgctaaaattggcatgcctttaaaaggatttcatcgtcactttctaattccttccttatgtattattggtatgggcattattggatggtatatgtggtctttatggtctttaatcatagctttattaccaatcttattattttttgtttacgctatactttatacacgttttagtggttttgcttttagcgaatcagagctagttgtccaaaaagcgtctatattaaatattaagagattttatgttaaaaaagaaaaagttttaggaatggctattagccaacatccctttcttgaaagaagtcaactcgcaaattttcaatttgttattgctaagggtagtagtcagcaaaacattggtttgaagtttagtgaagtagataatgttcttaaactcaaaaattggtacatgaaaggtgatactcatgaagtcttataa

SEQ ID NO: 2452 - DNA, 510 bp, Staphylococcus epidermidis
atgaagtcttataaatatatgcatcaaaacggtattaaagtaatgagaattagtggtgctttttggacacttttacttgtgatagcattgtctattttaatattgcttaatgaattaaaattccattttattgatactaaaaatttaataattggagtaataattttaactacaatagtttgtattttatttatgattatagtgccttggtttaaatttaaacatcttagatattttttagatgataaagaaatacatattagagaaggtatcatttttatagatgtgcacgtcatcccttactttagaatacaaaatatagatatagttgagggatttatcatgagaaagttccaactcgcttcgctgtcattatcaactgctgggggaaattctgaaatagcattgatagatattcaagaagcacaaagattgaaaaaacaaattaaacaacaaaaatcaataacgacaaatgtaacttcattagaaaaattaaacgatgatatataa

SEQ ID NO: 2453 - DNA, 354 bp, Staphylococcus epidermidis
gtgatttatggaataggtatagatttaatagaaattgaacgaattaaaaatcttcagaatcaaacaaaatttattgaaagaatacttactatagaggaaagagacaaattaaatcaatatacaaacgagcaacgtagattagaatttttagctggacgctttactgtgaaagaagcatttagtaaggccttaggtactgggttggggaaatcagtatcgtttcaggatattaactgttacaacgacgctctaggtaaaccatgtattgactatcctggtttttatacacatgtgagtattacacatacggagaattatgctatgagtcaagttattcttgaaaaaaacgaatga

SEQ ID NO: 2454 - DNA, 1149 bp, Staphylococcus epidermidis
atgtcagagaagttttatagagcaacatatttaaatgtgaatttagatgcaattttagcaaattatcaaaatttcaatcaattacacgctaataagactgtcatttcagtcattaaagccaatggatatggattaggaagtgtgaaaatagcacaacatttaatgcgtcatggtgcaacattttttgcggtggctacacttgatgaagcaatagaattaagaatgcatggagttgatgctaaattattagttttaggtgttgttccaacagaagacattgagaaggctatacagcatcgtgttgctttaacagtaccttctaaagcatggttgaaggaaactatcaagcaaattcctgatgataaccaaaaaaatttatggctacatgtaaaattagatactggtatgggccgaattggaatgaaagatatagatgaatataaagaagtggttgatttaattaataaaagagatcatttagtttttgaaggagttttcacacattttgcgagtgcagatgaacctggaaattctatgaatgaacaatatactttgttcaaagagatggttaatcaagttgagaaaccaaactatattcattgtcaaaattctgctggatcactactcatggatggtcaattttgtaatgcaataagattaggaatctctctttatggatactatccttcagaatatgttaaagataatgtaaaagttcatttaagaccaagtgcgcagttagtatcagaaaccgttcaagttaaaacacttaaagctggtgaaactgttagttatggacgtacatatattgctgatgaagaaatgacaattgcaattttacctattgggtatgccgacggatatttaagatcgatgcaaggtgcgttcgtcaatgttaacgggagtcaatgtgaagtcattggacgtatttgtatggaccaattgatagttaaggttccttctcatgtaaaaacgggtgaaaaagtaatacttatggataatcacgttgattcaccacaatcagctgaagccgtagcaaataaacaaggtacaattaactacgaagtattatgtaatttatcaagacgtcttccaagaatatattattatgataataatgaagaggttactaacgaattgttaaaatag

SEQ ID NO: 2455 - DNA, 171 bp, Staphylococcus epidermidis
atgttatcttttaatcaaaatagaaaccacagtcttgaacaatctttaaaagaaggttatgcacaaatggccgatttaaacctctccctagcaacagaagcttttccgatagagtgtgaagcttgtgattgcaatgaatcacatttaatatctaattcaaagaatgaatga

SEQ ID NO: 2456 - DNA, 363 bp, Staphylococcus epidermidis
atgattagaagaggagatgtttatttagcggatttatcaccagttcaagggtctgaacaagggggagtaagacctgtagttatcattcaaaatgatactggtaataaatatagtccaactgtaattgtagctgcgattactggtaggattaataaagcgaaaataccaacccacgtagaaattgaaaagaaaaagtataaattagacaaagattcagttattcttcttgaacaaattagaacactagataaaaagcgtttaaaagaaaaattaacatttttatcagagagtaaaatgatagaggttgataatgccttagatattagtttgggattaaataactttgatcatcataaatcttaa

SEQ ID NO: 2457 - DNA, 1002 bp, Staphylococcus epidermidis
gtggaagaattcacaaaaagttataaagcccttgttaaagaaagtttaataactaacaataaaacattattaattaagaaatgtgaagcattcacaaatgaagttataaagaaagatgttttacctgaagatatagttgagatacataaagattatattaatacattagatttaactgaagaagatatattagaaacactcgatgtgttacaagaagtcgttaaaggatttggatatagttaccgagattaccaaagacttgttaataagcttcaagtccacgataaagaaatggatttagcctcaagacttcaacaaactatgctgaaagctgatattccacaatttgatagcattcaaataggagtgatatctgttgctgcacaaaaagtaagtggtgattattttaatcttattgaccataaagatggcacaatgagttttgctgtggcagacgttataggttcaggcataccagcagctttagctatgagtatgataaaatttggcatggatgcttatggacattcacaactacctagtgatggtttgaagcgtttgaaccgtgttgttgaaaagaacgttaaccaaaatatgtttgtcacaatgttttatggactgtatgaagagatgaatcatctactttactgtagctcagctgggcatgaacctggctatatatatcgcgcagaaactgaagcgtttgaggaaattggtgtgcgaggaagagttctaggtgtgagtcccaaaacacgttatagccaacaggaaatccctatttatcttgatgatttaatcataatttttactgatggtgttacagaggcacgtgatgtagagggtaattttattgataaagataagttgttagacttaattcaaaaatataagcatatgcatccacaggatatagttcaaattatttacgaagcgattttaaaattacaaaatcctgcgagaaaagatgatatgactattttaattataaaaagagtaaactaa

SEQ ID NO: 2458 - DNA, 327 bp, Staphylococcus epidermidis
atgaatctaaatattgaaacaataactcatgatgatttttatgaggttaaagttggtggagaattggacgtatatactgtacctgaattagaagaggtactagtaccaatgagacaagaaggcacacatgatgttcacgttaacttagctaatgtgagctatatggattcaacaggtctcggtttattcgtaggcacgttaaaagcattaaatcaaaatgataaaaatctctatatcttaggtgtttcagagcggataggtagattgtttgatattacaggtttaaaagatttaatgcatgttaatgaaggaacggaggtagaataa

SEQ ID NO: 2459 - DNA, 480 bp, Staphylococcus epidermidis
atgcaatctacacaagattatattgaaatgcggttgccagcttctgcagaatacgtaagtttaatacgtttgacgctttcaggggtgttttcaagagctggcgcatcttacgatgatatagaagattctaaaatagcagtgagtgaagcggtgacaaatgcggttaaacatgcatataaaaaaaattctgaaataggcatgattaatctttgttttgaaatatttgatgatagaattaaaattgttatttcagaccaaggagaaagttttgattatgaagccacaaaatcacatttaggtccatataatgataatgaaaatattgattttctacgtgaaggtggtctaggattatttttaattgagtctttaatggatgaagttactgtttataaagaatctggtgtaacaatcagtatgattaagtatataaaaaaagagcaggtgcgaaataatggcgaaagagtcgaaatcagctag

SEQ ID NO: 2460 - DNA, 771 bp, Staphylococcus epidermidis
atggcgaaagagtcgaaatcagctagtgaagtatcacctgaacaaattaaccaatggattaaacaacatcaagaaaacgaagatagccaagctcaagataaattagtaaaacattatcgtaagctgattgaatctttagcttataagtattctaagggacaatcacatcatgaagatttagttcaagttggtatggttggtctaataggtgctattaatagatttgacttatcatttgatcgtaagtttgaagccttcttagtaccaacagttattggtgagattaaaagatatttacgagataaaacatggagtgttcatgtacctagacgtattaaagaaatcggtccaagaatcaaaaaagttagtgatgaattaacaaatgaacttgaacgttcaccatctattagtgaaatcgcacaacgcttagaagtttcagatgaagaagttttggaagcgatggagatgggtcagagttacaatgccctaagtgtggatcactctatagaaacagataaagatggttcgacagttacattattagatatcatgggacaacaagatgataattatgatttaacggaaaagcgtatgatattagagcgtattttacctattttgtcagagagagaaagacaaatcatacaatgtacttttattgaaggtcttagccaaaaagagactggtgaaagaattggtcttagtcaaatgcatgtttcacgtttgcaacgtaccgcaataaaaaaattacaagaagctgcaagacagtaa

SEQ ID NO: 2461 - DNA, 2151 bp, Staphylococcus epidermidis
atggataacagtttaattgaaacaattgtaagtaaatatcaattttcggaaaaacaaattaaagcagttttaaaattgctgaaagaaaacaatacggttccatttatagcgagatatcgtaaagaagctacaggtggacttgatgaagtagaaattaaacaaatcaatgatgaatataactatatgttaaatcttcaaaaacgtaaagaagaagtaatacataatattgatcaacagggtcttttaacttcagatttaaagcaagacatattaacacagacgaagctccaaagagttgaggatttgtatcgtccatataaacaaaaaaagaaaacacgtgcaactgaagctaaaagaaaaggattagaagatttagcagattggttttcacaatcaaaattggatacaaaaattgaagataaagcccaattattcttaaatgatgaagtgactacaattgaagatgcaatagaaggagctaaagatattatagctgaacgtatttcggataatcctcaatatcgctctaaaatacttaaagatgtttttaatcagggactaattgtttcctcgaaaaagaaaaaagccgaagatgagaaacaaacattttctatgtactatgattacaatgaaccaattaaacgtattgctaatcatcgtgttttggcgatgaatcgaggagaaaaagaaaaagtattatcaataaaaattgattttgacacgacacgtattcaaagagaaatagcaaatgttgagataaaaactcaaaatgaggcaactccgtttattaaagaggctattcaggatagtcttaagcgattaattcttccttcaatagaaagagaaattagaggagatttaacacaaaatgcagagtctcatgcaatagatgtattcagtgaaaatcttagaaatttattactacaaccaccaatgaaaggtaaacaaattcttggagtagatccagcatttagaacaggttgcaagcttgctgtcgtcaatccatttggtacctttattgctaaaggtgttatttatcctcatccaccaatatcaaaagttgaggaagcggaaaaagagctagtaaaggtgataagtgactataatattgagcttttagcgattggtaacggtactgcgagtagagaaactgaacaatttgttgctaaagtaataaaaaaatatcaacttcaagctcaatttatcatagtcaatgaagctggcgcatcagtttattcagcatcagaaattgctagacaagaatttccagattttcaagtagaagaacgaagtgcagtttcaattggtagaagagttcaggaccctttaagcgaacttgttaaaatagatcctaaatctataggagtaggacagtaccaacatgatgtcaatcaaaaagatttaagtagtgccttaacgtttgtagtagagactgccgtcaatcaagttggtgtggatgtgaatactgcttctaaatccttgttacaatatgtatcaggtcttacatcaactatcgctcaaaatattattgattatagagaagaaaacggacctataaaacatcataaagaaataagtagtattaaacgattaggtgcaaaaacatttgagcaaagtattggttttttaagaattgttgatggtgaagaacctttagataatactgcaatacatcctgaaagttacgatgttgcatatcgcatgcttcatcaactagatttaactgcacaagatataggttccgttaaactcaaaaatacgttatcaaatgttaatatttcaacacttgtgtctcaattaaatattggtgaacctacattaaaagatataatacaatctttgattgcacctaatagagatccaagagatgaatttgaaacacctattttgaagtccgatgtattatcgattgaagatttatctaaaggcatgaagttgaatggtacagtaagaaatgttgttgactttggagcatttgtagatatcggtgttaaacaagacgggctagtacacatatcaaaattatctaagaaattcgttaaaaatccaatggatatgataagtgtaggagatattgtagaagtttggattttagatatagatgaaaataaaggcaaagtttcattgactatggttgacccaaatgaataa

SEQ ID NO: 2462 - DNA, 456 bp, Staphylococcus epidermidis
atgaataatttagcattacaaagccttaccgaaagtatagcgataaagtattttggcaaagcttttaagcacgaggtatattataataagcgtttacgtaccactggcggtagatatatattaagtagtcataatatagaaataaatccaaaacagtatgaaatgtttggagaaaaagcagtcattgatatcataaaacatgaactgtgtcattattttcttcatttagctggtgaaggatatcaacatcgtgataaagcattcaaaattttgagtgccaaagtaggagcacctaggttttgtactccgacagaatcttatcaagatagagctaattataaatataggtgcatctattgtgaacaagaatttattcgtataaagcgtgtgaatcttgaaaaaatgcgttgtggacgatgtggaggtattttaaaacttattcaaacaagaaagtga

SEQ ID NO: 2463 - DNA, 993 bp, Staphylococcus epidermidis
atggtagaaaaattcaaagcttttgtagtcgatcaagatgacaacggtactgtttcaaatagttataaagaacttactaaagatgacttacctgagggtgacgttttaataaaagtacattattctggcataaattataaagacgcactagctactcaggaccataacaaaatagtaaaacaatatccgatggtgcccggtatagatttagcaggtaccattgaagaaacaaatgctccaggctttgaagttggagataaagtcatcgtaacaagttatgatttaggtgtaagtcattatggagggttcagtgaatatgcacgtgttaaatcagaatgggtgattgaattacctgaagatttaacattggaagaagctatgatttacggtactgctggctatacagcaggtttagctatagaacaacttgaaaaatcaggtatgtctattgaaggtaaagaagtgcttgtacgaggtgccactggaggcgtcggtacgatttcattactcatgttaaataacttagggtatgatgttattgcaagtacaggtagagatgacgctgaagaaaaacttaaaaagctaggtgctaaagaaataattagccgtttaccagaagataatagtaaaccattagaaaagagaacatggcaagcagccattgatccagtaggtggtgaaaacttaccgtacatcgtcaaacgattggataacaatggaagtgttgcattaattggcatgactggtggtaacaattttgaaacaaccgtctttcctttcattttaagaggagtaagtataattggtattgattcagtatttactccaattaaactaagaaaacgtgtttggagaagacttgcaaaagacttaaaaccacaacaattacatgacatcaaacatgttatttcattcgatgaaatcccaaaagctatcgatcaagtcatcaatcatcataatactggacgtattgtcattgatttcaatgtttaa

SEQ ID NO: 2464 - DNA, 531 bp, Staphylococcus epidermidis
atgggggaaaggataagaagtgttcaaacaaccgaggtagagcagctacagctaattgctaaaagaacattttttacaacgtttagagaatcttatagtgatgaggacttcaaacaatttttcagtgatgcatatgatatagatatgttgagaaaagaattggaacaaagtaattcttttcattatttttatgaagttgatcaaaatatagtaggtttcttgaaattgaacataaatgatgctcagactgaaaataaaggacaagcatatttggaaatacaacgcatttactttgatgaagcatttcaagggagtggtagaggacaattatttatcaatttagctattgatcaagctatcaaatttgggaaatcgaaaatatggcttggtgtttgggagcataatcctaaagcgcttagtttttataaaaataggggatttagagttacagggtcgcatcagttttataccggaagtgtagtagataatgatttgattatggaaatggatgttcctacaaactataaataa

SEQ ID NO: 2465 - DNA, 2166 bp, Staphylococcus epidermidis
atgaataaactgacaattattgtcacgtattataatgcggaggaatacatcacaggttgcttagagagtattaagcaacaacgtacacaagattttaatttgattattgtgaatgatgggtcgacagaccaaagtaaaaaattaatggatgaagctattaaagactatgataaaaacattcgatttatcgatttagatgaaaatagtggtcatgcacatgcgcgtaatattgcattagaagaagtggaaacaccttactttatgtttttagatgcagatgatgaattagcttcttatgcaatcacgttttacttagaaaagtttaatgatactgatggtttaattgctccaatacattcttttactacacaacgtccgcaatttgtcgatttagatcgagtaagggttgaatattttaatgccaaagggaatattaattcatttttaagaaaacagtcagcttgtaatattatttttagaacagctattgtcaaagcgcaccatattcgatttaatgaaaatttaaatacatatgtggattggtcatttgttcttgaatatatgaagtatgtaaataagtttgttcgtatttttaacttcccattttatttccgtggggaagtctatgatccatttgaaacacttactttaagtgaacaaaattttgatattttatttaaagattacgtcaacagcttttatgatgccattaaacgagcaacaaacccaaaagttcgagaatttattgtcactaaaatgggaaataaaatcgctaatgaatttgaaccaactcgatatgatattaatgaacgctatcaaacacataaggatacgcttgttgaattatcgaaatttttacatgtccatttagttaaaaatcaaaagctaataaataaaattgaaacaattttgttaatgaataatgaaactgataaagcttttaaagttaatcaatttagaaaaacgttgcgacatgttaaaaatattgttttaagaagaaaaaataaagaacgttcattgtatggcttaacagataaagaagataatgttaaaccgaaaacgattgtctttgaatcgttcggtggtaagaattacagtgatagtccaaagtatatttatgaatatatgcaaaagtattatcctaattatcgctatatatggtcatttaagaatcctgataaaaatgtcgtaccgggtagtgctgaaaaggttaagcgtaattcagcagagtattatcaagcttactcggaagcaagtcattgggtatcaaatgcccgcacaccactttatttaaataaaaaagaaaatcaaacgtacattcaaacttggcacggtacaccattaaaacggttagcgaatgatatgaaagtggttcgtatgccgggcactacgactccaaagtataagcgtaattttaatcgtgaaacatcacgttgggattatttaatttcgccaaatagatattcaactgaaatatttagaagtgctttttggatggatgaagagagaatattagagataggttatcctagaaatgatgtattagtgaatagagccaatgatcaagagtatctaaatgaaattagaactcacttaaatttacctagtgataaaaaggttattatgtatgctccgacttggagagacgatgaatttgtgagtaaaggaaaatatttgtttgaattaaaaattgatttagacaacctttataaagaactcggagatgattatgtaattttattacgcatgcattatctcatatctaacgcacttgatttatctggttatgaaaactttgcaattgatgtttcaaactataatgacgtctctgaattattcttaataagtgattgtttaattacagactattcatcagtaatgtttgattatggtattttaaaacgccctcaatttttctttgcatatgatatagacaaatatgataagggattacgaggattctatatgaattatatggaagatttaccaggaccaatttatacagaaccatatggcctagctaaagaactaaagaatttagataaagtgcaacagcaataccaagaaaaaatagatgcattttatgatagattttgctctgtagataatggtaaggcgtctcaatatattggggatttaattcataaggatatcaaggaacaatga

SEQ ID NO: 2466 - DNA, 648 bp, Staphylococcus epidermidis
atgaaaaaagtattagcaagtgcaacgattttatcattaatgttagtaggttgttccaatggaggaaatgatgaatcaagtcataaagacgatagttctaaaacagaacaaaaggataaatcatcatctcaacatgacgcaaaaaaagattcgaaacgtaatgatacaaataataagcaagacaatcaggaaaataacaataataaagaacgaacaagtaatcaaaatccaaatgttggagagcaacgaacaagcgaaagaccaacaacaaattcaaacggaaattcatcggataatcaaaataaacaacagcaatcagtacaagataatcagaataaatatgtagcaccataccaaagtgaaaatgcgacacgtgttgctcgatatctttctccatttgagggcgaccgcagtcaagctttacagcatttaccaaattttgaaactgcactttccattgccaaaaatgaagctaatatgtatggaagcgaaaataaatcatataatgattattcaatagaacaaacagaagatggatttagatatgtgtttagctttaaagatccatcaaaaagtaatacttactcaattgtaacgcttaatcgacaaggtcaacctactgttgtagatcctaacttccaaccgtag

SEQ ID NO: 2467 - DNA, 1680 bp, Staphylococcus epidermidis
atgataaagcaaataaatatttcaaatatggacaaattaaaagagcaaatggaacgtgcacttagcgacggctatacgcatgtcatcccctattcaaatgaaattcatattcatcagtccatgatcaaagccatcactttacctaagacttcatttatagttgactatacaattaacaattattatttaaacgattgtaaatacttcgggctggactttgttgattttgaggactgggttaaaaatattaatttatatccaaatgttatttatgaaattaattcaacattagaacttattgataaatttgaagttgaaaatatctttgatttagcattattaacaattctaaaagggaatatcgcagttgaaggtcatgtcgtattagactttaaaggaccattaaaaacgagcaagggattttggcgctcatttgatcgtaatgatttaacttatagagataaattcttcttaaacaccatcgcttatgcacataaacaaagaatcccatttacgcgtgtaccatttaatgatcacgatagtattagatattatgattcagtactacttagtactaaatttaaagctccaagatggttagtaactcctattaagaattattcagttagaaaacacaaagagattagctatatttataaaaaggattcatcaaaacttaagaaccacgtcgtttttctaggatttgattttgggtatcgaggaaactctaagtatttatttaattactttgttaaacacaatcctatgatagagtcttactttataacagatgagagaacaggaccacattttatttcaactaacgatgaaaatgtgaagaatttaattgaaacagctacttttgtcattacggaaagctatattcctgacgatattcaccctaatggtaaaatcattcaattatggcatgggacacctattaaaaaactatttttagatagtaaagagccacatcaaaatttaaatatatataactaccgagctcgaaaatataataaatggacacaacaagattatttaattgtagattcagaaaaatcacaaacatactttgaatcagcgtttcctagtcaaaaaattgatatattacctgtaggatatcctagaaataattatttattaaatcgtatcaatgatgtaggtttacataaacgtatatttagcgagataaatatagatcctactaagcgagtattattatatgctccaacatggaaaacaaattcatctgatgacgatatgtttcctattaatgaacagttattaaaacattataatgtgatctataaaggacacgtcgagagtcaaaatgacttggttcctgaaggcgtaattattccgcctaataatattgaaacacaagacttaattattatttcagatgttgttttaacagactactcatcaattatttttgatgctttaaccgtagataaaaaaggttgcttatacacacccaatcactctcaatatgttgaagaacgtggcgtctatcaagacgtaatagacaccttaaaacctgtttggtataccgatgctgaactattaatgaatgatttaattactgatagcattccacaattaaacaataaatatacaaataaaaataatcagtcttttgaatatattagtaaacttatttcaaatcaattgaaataa

SEQ ID NO: 2468 - DNA, 1602 bp, Staphylococcus epidermidis
atgttagtagaatcttttaatccatttggtaatttattattatcatctttaattgcggcaatccctatcattttatttttactgtgtcttacagtatttaaaatgaaaggaatttatgctgctatcacaacccttgtggttacattattaattgcaattccattctttaaattaccagtaggaattgcctctggagcagttgttgaaggtttcttccaaggtatcttcccaatcggatatattgttattatggcagtattattatataagattactttgaaatcggggcaattcgcaactattcaagatagtattacaagtatttcacaagaccaacgaattcagctacttttaattggtttttcatttaatgcattcttagaaggcgctgcaggatttggtgttccaattgcaatttgtgcactattattagcgcaacttggcttcagaccattacaagctgctatgttatgtttagtagctaacgctgcatctggtgcattcggtgcaattggtattccagtaggtgttgtagatacacttaacttacctggtcatgtagaagcgatgggagtttcacaaacatcaacattaactttagcaattattaacttctttattcctttcttacttatctttatcgtagatggtttcaaaggaattaaagaaactttaccttcaattcttgttgtttctgtcacttatacagttttacaaggattacttacagtgtttaatggtccagaattagctgatatcattccatcacttgcttctatgttagcattagctttattctctaagaaattccaacctaagaatatctttagaattcaaaaagatgttaaaccagaagcaccgaaaaaacttaaaggtaaagaagtcttatttgcttggagtccattcattatcttaactgtcattgttatgatttggagtgcaccttcatttaaagcattatttgcaccaaaaggtaaattatctgctttagttgcaaactttgacttacctggtacattcagtaatatttcacacaaaccaattactttatcattaaacttaattggtcaaacaggtacagcaatcttaattacaattattattactgttttaatggctaaaaaagttaactttggtgatgctggtcgtttatttgttgaagcatttaaagaattatggttaccaatcataacaatttgtttcatcttagcaatttcaaaaatcacaacatatggtggtttaagtaatgctatgggacaaggcatctcaaaagcaggaagcgtattcccaatattatcaccaatccttggttggatcggcgtatttatgactggttcagttgttaataacaactctttattcgcgccaattcaagcttctgtagcacaacaaattggtacaagtggttcactacttgtagcttcaaatacagcaggtggggttgcggcgaaacttatttctccacaatctattgccattgcaacagcagctgttaaagaagtaggtaaagaatctgaactacttaaaatgacattacgttatagtattggattacttgtatttatctgtatctggacatttatcttgtcattcattctgtaa

SEQ ID NO: 2469 - DNA, 1146 bp, Staphylococcus epidermidis
atgaagtcgttcacattttttatgcataatatttatgcaatgggcggaacggtaaagtcggtgacacaacttgcaaatacactggcagaaaaaggacatcctgtaacaattatttcagtttttagaggcgcagactctccatattttgaattacattccgcaataaaagttaaagtcttagtggattatcgcttaaagcttaaaaatactagagctattacggcaaatcgtatcaaaaaatataccccctttttaaatacaaaagtgatttctcaatttgagccaggtaaaagtcagttttcgagttatgtagagaaaaaaatgattaaagcaatcaagcgtattaaaactgatgtactcgttggaacaagagctagctttaatattctcatttctaaatatgctaaagctgaaatagtgaccatcgcaatggaacatatgaattttgatgctcaccctgatcagtatcaaaaggaaattattgctgcgtaccgtaatatcaataagattacaacgttaacagtctcagatcagcaaaaatatcaatcacaacttaaaactcctgtatatgttatacctaatatggttactgaaaaaagaattgctgctccaaagaaaaatcgtattattagcgccggacgtttagaatatgaaaaagggtatgatttattattagagagtattcgtttaatacaagaagacttgcgtcaattgaattatgacgttcacatctatggttctggtagtaagaaaacattacttgttgactttattaatcaatatcatttaaatgatttgattaaaatctatgagccaacgcaagaattaaataataaacttgcacaaagtaaaatcgttgttgtaccttcacgcaatgaaggtttcggaatgattattttagaggcaatggtgcaagataatatagtaataagttttgaaggcaatgtagggccagattcaatcattaacaacggaaataatggttatttagtaaattatgaaaatgtgtctgaacttgcaaaacgtatagatttaacaacccaacattataatgagttagatcacatcattgaaaatagtaaagatactttgaaacaatttagtcaggaacatatatatcaattatttatgtctatgtttaaataa

SEQ ID NO: 2470 - DNA, 1479 bp, Staphylococcus epidermidis
atgaatactcaacatagcaaaacagatgtcatcttaataggtggcggaattatgagcgcaacattaggaactttactaaaagaattaacaccagaaaaagatatactattgttcgaaagattgagtcaacctggagaagaaagttcaaatgtttggaataatgctggaacaggtcattctgcattgtgtgaattgaactatacgaaagaaggtcaagatggttcagtagatattactaaagcaattcacatcaatgagcaatttcaattatctaaacagttttgggcatatttaatacgtgaaggtcatattgaaagtccagataaatttattcaatcagtgccacatatgagctttgtcaaaggggaagaaaatgttaaatttttaaaaagtcgagtggcgagtttgcagaaaaatgtattatttgaaaaaatgaaaatatctcaagatccagaaaaaattaattcatgggttcctttaatgatggaaggacgcaaatcagatgaagcaattgccatcacgtatgacgagacaggtacagatgttaactttggtgctttgactaaaaagttaatagctaatttacaacaaaaaaatgttggcattaattataaacatgaagttttagatataaaaaaattaaataatggtaactggcaagttgtggttaaagatttaaatacatcaaatgtaatgaattatgaatctaagttcgtctttatcggagctggtggtgcaagtttacctttattacaaaaaacaaagattaaggaatctaaacacattggtggtttcccggtaagtggcttattcttacgatgtaaaaatccagatgtcatacatagacatcatgcaaaagtctacggtaaagccgaggtaggtgcacctccaatgtcagttccacatttagatacacgatttgttaacggtgaaaaatcattactatttggaccttttgcagggttttcgccgaaatttttgaaaaacggttcatatttagatctagttaaatctgtaaaacccaataatatgatcacaatgttaagtgctggcgtaaaagaatttaatttgacgaagtatttagtttctcaattaatgctttcaaatgaagaacggatcaatgatttgcgtgtattcttaccagaagcgaaagatgaagattgggaagtaattactgcaggtcaacgtgttcaagtaattaaagatacagataagtctaaaggtcaattacaatttggtacggaagtgataacatcagaagatggttcacttgcagcattattaggtgcttcacctggtgcttcgactgctgttgatatcatgtttgatgtcttgcaacgttgttacaaatcagagtttaagtcatgggaaccaaaaattaaagaaatggtcccatcatttggtttaaaattgtcagatcatgaagatatatatcattcaataaacgaagaagtaaaaaaatacttgaatgtaaagtag

SEQ ID NO: 2471 - DNA, 1356 bp, Staphylococcus epidermidis
atgtttaaaacgttatattcgagaattgctatatatgcaattacagtcattttgtttagtgcattaatgagttttctttttacgaatatttattatcactttcatttgaaagcttctaatgatgcaaaaattatgcgcacacttaaagaagctcgtgaatatgaaagaacacaaaaacctaaacctctagatacgtatttgaaacatttaggtcaaatgaattatcaaattatgactgtcaacgaacatggaaccaaacatttttatggggaaacttttcgtaaaaatacaataagtcagtctgcaatcaaaaaagtgctcaacggtgaagattatcacggtattaaaaataaaccttatgcattttttgtaacagggttcttcgataatgaaacggataatacagtaggtattcaatttaaaacagaggatggggcattagcagtttttatgcgcccagatataggggaaacttttagtgaatttagaatttttttagctatattgataacacttttacttattatttcaatttcactagtcattgcatcaacatattctattattaaaccagtgaccgcattaaaaaatgcaacaactcgaattatgaaaggtgatttcagtacgcctatcaaacaaacacgtcatgatgaaattggaacgctgcaatcacgtttcaatacaatgcgtcaaaatttaggacaagtagatcaaatgagacaacattttgtccaaaatgtatctcatgaaattaaaacaccgcttacacatttacaacgattgcttacacaacttgaattgacgcaaaatgaagaagagaaacaactatatatcaatgaaatgtttgaaatcactaatcaagtaagtgaactaactaaggaattgctacttttatctgaattagataatgcttcccaccttacttttaacgataatgtccatttaaatactttaataaaggatattattagacatgaacaatttcgaactgatgaaaaagatttagttttgtttactgaattagaagatttgtatttccgaggaaatgaaagactattacatcaagctttcaataacctcatcattaatgcaatgaaatatgctcctcaaaatagcatgattaatatcactctaactagtacaaatcacttgattatatttaatattgaaaatgatggatcgattgcagaagaagatgcgaaacatatcttcgatcgtttttataaattgagtgacgaatctagtagtaatggtctaggtcttgccattacccaatcaattattcatcttcatcatggtaacattacgctcacttcagatgataaaacacaatttattgtaaaactatttatttag

SEQ ID NO: 2472 - DNA, 675 bp, Staphylococcus epidermidis
atgattaattgcttaatcgtagacgatgatgaaaagttattgcaatatgtttcaagtcatttagaaagagaaagtattcaaacacatactttcacaagtggagaagcatcactagattttcttgaaaataaaaatgttgatattgcgatagtagatattatgatgagtggaatggatggttttgagctttgtcagactttgaaagatgattatcatattcctgtcataatgttgacagctagagatgcattaagtgataaagaacgtgcatttctaagtggcactgacgattatgtcactaaaccttttgaggttaaagaattattatttagaattaaagctgtcttaagacgatatcaaattaatgctgataacgagttacaacttggcaacttaatattaaatcagtcttatatggaaattaccgtgggttcaaaaacgatgaatcttccaaacaaagaatttcagttgttatttttattagcctctaatcctaaacatattttcactcgagatgatattattgaaaaaatttggggcttcgattatgaaggagatgatcgtactgttgatgttcatattaaaagattacgtcaacgtttatctaaattgaaatcatcagtatctattcaaactgtaagaggtcaaggatatagggtggaccaaaatgtttaa

SEQ ID NO: 2473 - DNA, 1053 bp, Staphylococcus epidermidis
atgaatctagcttggaaagagattaaattttataagttcagatttatattaatcatgttcattatttttctaatggcgattatggttttatttatcagtggacttgctcaaggcctagcacgagaaaatatatcaatatttgatcaaattaaaggtaatcaatttgttgttcaaaaaatgaaagaaccacaattagaaaaatctattctatcacaaagtaaacaagacaatatttcaaaaattattgatgaaaaaccttttaaaatggcagataaaactttcaaaatcaatggaaacgaagaaaacgtgatggctataaatagcgtgaaaaatcatcagccaaatttgaaatctggtcattatcctaaaaatgaaaatcagatagcaataaatgaaaaactaactgcagaaggtctttatttagacgataaagttaaagtcaaaggtgacgatacaacttataaagttgtaggtatattaaaaaacacgatgtattctcatagtaacattgttatgatggaccaatctaaaatagaacaaagtagtaatgtcgcaacattttatgttacgaaccaattatctaaatcggataaaaataaaataaatcacatcaaaggcgttcaaacagctactacagacgatataacaagtaatatcgcaagttataaagcagagcaaacaccattgaatatgatgattatcagtttatacgttattacggcaattgtgttaagcgcattcttttatgtaatgacaatacaaaaaacatctgaaattggtattttaaaagcaattggtataactacaaagcatttattgacatcattgattttacaaatttcaatgattacgtttataggtgtagctatagcagaagtagttattttgctaataagtaaaatattgccagtttcaatgccattccatattgacatgcacaatattatcattgttcttgtcgtatttatgatagttggattaatcggtacatcattatcatttattaagttaattaaaattgatcctattgaagctattggaggtggccaataa

SEQ ID NO: 2474 - DNA, 669 bp, Staphylococcus epidermidis
atgggtctagttgttaaagacataagtaaaacatttggtgaaaaaagctcaaaaacagaagtgttaaaagatattaattttgaagtgaaagatggagaattcatcattttaaatggcgcttcaggttcaggaaaaacaacgttattgactattttaggtggtttgctatctcaaacatcaggtgatgtagtatacgaagggaaatccttatttgaacgacacactaataaagcgcatttaagactaaatgatattggttttatcttccaagactctcatttagttccatacttaaaagttttagaccaacttacattagtaggtaaagaagctggaatgtctagcaaagaagcccaagcaagagctaaagaattattaacaaaaattggattagaagagcaactaaatagctacccacatatgctttcaggtggacaacaacaacgtgtagcgattatgagagcacttatgaatcatccgaaaattgttttagcagatgaaccaacagcaagtcttgatgctagtcgtgctcaagaggttgttgaaatgatcagaaaacaaataaaagataatcaaatgataggtatcatgattactcatgatgaaagcttgttcaaatacgctgatcgtattatagaattgtacgatggtaagataaaaaacagttaa

SEQ ID NO: 2475 - DNA, 957 bp, Staphylococcus epidermidis
atgttactttttttatgttttctaatcgaattattacttattgtttcattatatacgaaacaatcgtttactcttaatttatttagttttatcttatataccatcattggttttgttatgatgacttatcatgtggtaactgtatcaataccatatgaaatgtttatcattgtaattgtagcaatgatactgttattgattaaatatcgttatattttcaagttgcaaacaggtcgtttttttattttaaaacttagtcaccatttttatactatggggctatttgctgtgagttgtttatatataagtactattcccctaattatcattaatagcttagctttatgggtcgcaaccattgcatttagtacaatttactcgtttatcggctacctatcttggtctacagcttttgaaaatcatcaatatcataaacacgtaaagttaattatggtgcttggagctggaattttctctgaagaagtgactacacttcttgctgcaagacttgataaagctttatccgtttatcattcacaacggactaaacctatcatcattgtaagtggtggccaaggtcctgacgaaccaatttcagaagcacttgcgatgaaaagataccttatagctcacaacgttccggaaaatcatatatttatggagaatcaatccacgaatacacgaaccaatttcttatactctaaatctatcattcattcgatgatgcctacttcaagtcagatgttgtgtgtaacaagtcaatttcatgttttaagagcgcttaaatttgctaaaaaagctcatctttctttcgatggcattggaagtcgtacaccataccactttttggcacaatctatgattatagactttttgggtttaatgtatcaatataaaacaatacttactatttatttcgctatgttgttttggcttgcaatactacaagccatataa

SEQ ID NO: 2476 - DNA, 456 bp, Staphylococcus epidermidis
atggtaagaagaatagaagatcacatctcatttttagaaaaatttattaatgatgttaatacattaacagcaaagttacttaaagacttgcaaactgagtatggcatatcagctgagcaatctcatgtgttaaatatgctaagtatagaggcgttaactgtggggcaaattacagagaaacaaggtgttaataaagctgctgttagtcgaagagtcaaaaaattgctcaatgctgaattagttaaattagaaaaaccacattccaatactgaccaacgtcttaaaataattaaattatctaataaaggaaagaaatatattaaagagagaaaagcgattatgagccatattgctagtgatatgacgagtgactttgacagtaaggaaattgaaaaagttagacaggttttagaaattatcgactatcgtatacaatcttatacttctaaactttga

SEQ ID NO: 2477 - DNA, 1389 bp, Staphylococcus epidermidis
atgagtcaatgcccaaattgtggtcatcaagtgaaagatgatacatcgcaatgtccaaactgtgggcaactattaactaagaagaaaaaaagaaagattaaagaccaatcatctcaatcgagtaatgagaattctaccaatatacgtcttcgtaaaattgttccgataggtattagtgtatttatcttaatacttattatcgtgttatttttccttttaagaaattataattcgcctaatgcacaagctaagatattagttaatgcagtagataataatgatgcacaaaaagttgctacattattgagtactaaaaataaaaaagtagacgatgttgaagcgcaacaatatattaattatgtaaaaaaagaagtaggtatcaagaagtatattcgagatatcaataatactgtagataaattgaataaaagtaattcaagcgtggcatcttatatacaaacgaaaagtggacaagatgtacttaagataagtaaaaatggtacaaagtatttaatttttgataatatgagtttcacagctccgactaaaaagccaattattaaacctaaagtagaaactaaatatgaatttagaacaagtagtaaaaagaaaactgtcattgctgaagcaaataaaaatacacctttgggtgaatttattcctggtacatatcatttaccagctaagaaaattacagaaaacggtacatttaatgggcatttaaattttgactttagagaaagccattctgaaaccgtagatgtagctgaagattacgatcaagcatttatcaatatcaaatttaagggtgcgagtaaattaagtgataaatcagaaaaagttcaaatcaatgatcgtacattcacttactctcattctaaagaatttggtccttatccaaaaacaaaagatataacgatttctgcaactggtaaggcaaaaggtaagacgtttagttctgagacgaaaacaattagtgcagacgatttgaaagataatacgaaagttacattggaatttgatagtgataaaataaatagctatgttgagaagaaagaaaaagaagaaaatagtttgaaaaataaattaactgaattttttactggttatgcaacggctatgaattcagcatttaatatgaatgattttaactttatatcgagttattttaaaaagaattcgtctatatacacatcaatgaaaagtaatttccaaaatcgaacgaacgtgactatgatatctccacaagtgttaagtgttcatcgaagcggacatacagtaagaacaactattcaacatattgattatattgggaattatataaataaagactatgaattagaaatagataatgatgatagtaatatgcagttggttaaagaattataa

SEQ ID NO: 2478 - DNA, 1212 bp, Staphylococcus epidermidis
ttgaaaagggtgtatcagtcagaaaatcaatcatttctttttattgttatattaggttcattaacagcatttggaccattggctattgatatgtttttacctggactacctaatattagtcatgattttgatatttctgcatctacaactcagcttactatctcctttttcatgattggattggcgttaggaaattttttggctggacccatatctgatattactggcagaaaaaaaccattaattttctcactgattatttttactattgcaagtttaggtattatattcgtcacaaatatatggattatgattattttacgatttattcaaggattaactggtggtgcaggtgcagtcatctcaagagccattgctagtgatatgtactcagggaatgcgctaactaaatttttatcattattaatgctcgtcaatggtattgcaccaattatcgcacctgcgcttggcggtatcattttaaattatgggccatggcgaattgtatttgtaatactaacaatgtttgggattgtcatgttaatagggactttatttaaagttcctgagtcgcttgaaaagagcctaagagtaaatagtaacataggtacaatgctaatcaatttcaaagaactttttaaaacaccccgctttgtattacccatgttgatacaaggggtgtcatttgtattgctatttacttatatttctgcatccccttttatagttcaaacaatttatggtttaacgccattaaacttcagtattatgtttgcttttataggcgttacactcattatttcaagccaattaaccggaaaacttgttgactatatagatagattactgttgctaagaatcatgtctactatacaagttattggtgttataatcgtatcactaacgttactcaaccattggactttttggatactttcttgtggctttgtggttttagtgtcaccagttacagggattgcaacgttaggattttcgatagcaatggatgagagtaaaggggccaaaggtagttcttcaagtttgttgggattgttccaaactttacttggtggcatcatctctccacttgttggtattaagggagagagtaatgcgataccttatataatcgttatcgttattacagcaataattcttatgattttacagttgattaatgtgaagatatttaaaaaagctaaaattcattga

SEQ ID NO: 2479 - DNA, 552 bp, Staphylococcus epidermidis
atgaaacaacgtgcgaaatataaaataataaaaagtttaatcgaacttttagaatactatccttttgatgaaataaccattaaaatgatatgtgcttatagtggcgtgaatcgctctactttttatgatcattttcaagataaatatcaattactagataagattcaaaattatcatttaaacaaatatatgtcattactacaatccttctataacgattttcatcatatcaaaacagatcaaaaaaaattatataaatttttcttattgatagccaaatatattaaacgtaaagaagcgttctacagagcaacgcttgtaacatatcctaataaagatattgcattagattacattaacgccactaaaacatgttatgaaaaagtcatggatagatatgaaacctcaataaataataaacgtatgtttatcatttattcagttggtggtcaagcaggtgtatttatcgattggttacgtaatggatgcctcgaatctcctcaagaggttgctcaagttcttttagcaaatacaattaaattacaacgataa

SEQ ID NO: 2480 - DNA, 648 bp, Staphylococcus epidermidis
atgaaaaaaatgatattaatcaatgtgattactatcattgtcctagttgttattggtgtgttaggcttttggttctggcataacacaacaagttatgtgacaactgacaatgcaaaagttgatggagatcaaataaaaatctcaagtcctgcatctggacaaattaaatctcttaatgttaagcaaggagacaaacttgataaaggtgataaagtagcagaagttttagcacaaggccaagatgggcaatcaaaagatatgaacatcaaaatgccacaaaaaggtacgattgttaaaacagatggtatcgaaggttctatgactcaagcagggaacccaattgcatatgcatataatttagatgatctatatataacagctaatgtagatgaaaaagatatttctgacgtggaaaaaggcaacgatgttgatgtagatatcgacggtcaaaaagcatcaatcaaaggtaaggttgaagaagtaggccaagcgactgcagctagcttttcattgatgccttcatcaaatagcgacggtaactatacgaaagtttctcaggtagtacccgtaaaaatctctttagattctaatccatctaaaaatgttgtcccaggtatgaacgctgaagttaaaattcataaaaattaa

SEQ ID NO: 2481 - DNA, 1977 bp, Staphylococcus epidermidis
atgacagcgaccttcattattatatatattgtagtagcgctcatactcattggtcttattaatttctttttaattaagcgtaaaagaaaaaataaagacagaagagtggaacaacgttcgacaatagattctaagagagaaagcaatcaatctaaatttaaagcaagcgatttagaacaaacaactaagtcaaatactgattcaacgcaatcaaatgatattgaagatgaaaaacgaaaaaatcactttgactcagaaatagataatgcatctcaatctatcaatacagaaagtaaagaggatagaaacgcattaagtcataagaaccaagaggaagatgacgcatcaaacgatgtgttgaaccctatcgatccaaattctactgaaggtagagtgaatgagagaattaaaaatcaagagtctaactttatttttggtaaaggtataacacgaggtaaaattttagcggcaatgttatttggtatgtttatcgcgattctaaaccaaactctattaaatgtggcattgcctaaaataaatacagagtttaatatttctgcctcaactggtcaatggttaatgactggttttatgttagtgaacggtatattaatacctattagtgcctttttatttaataaatattcttatagaaaattgtttattataggtttagcactatttacgttaggttccttagtttgtgcaatctcatttaatttcccaattatgatgagtggacgtatattacaagccataggcgcaggtatattgatgccgttaggttctaacgttattgttaccattttcccacctgaaaaacgcggtgtggcaatggggacaatgggcattgcaatgatattagcacctgcaatcggtccaacactttcaggttatattgtgcaaaattatcattggaatgtgatgttttacggcatgttctttataggtattattgctatcgtaattggtctattttggtttaagttgtatcaaagtacgacaaatccgaaagcagatatccctggaattatttatagtacgattggatttggttctttattatatggtttctcagaagccggtaataaaggatggggatcaaccgagattgtaacaatgtttattgttggtacggttttcattatcttctttattttaagagaactaagaatgaaagcgccaatgttgaacttggaagtattaaaatatccaacttatacacttacaactattatcaatatgattgtgatgatgagtttatacggaggaatgattttacttccattatatttacaaaatcttagaggtttttcagcattagactctggattattactattgccaggtgcattagtcatgggagcattaggtccggtggcaggtaaattgttagatacaatcggtattaaaccattagcaatatttggtattggtattatgacgtatgcgacatgggaattaagtaaattaaacatggatacaacatatcttcatattatgtggatatatattgtgcgttcatttggtatggcgtttataatgatgcctattatgacagcaggtatgaatgctttaccaccacgcttaatttctcatggtaatgcgtttgttaatacaatgagacaattagctggttcaattggtacagctattttggttacggttatgacgacacaacaaacaaatcatctttctgcttttagtgaagagttagataaaacgaatcccgtcattcaagaccatatgcgtgaacttgcccaacagtatggtggtgagtcagcagcaatgaaagtattactcgaacatgtcaataaacttgcatctgtagaaggtgtaaatgatgcatttattgttgctacaattattagtgcgattgcactgatattaagcttgttcttacagggcaagaaaaaggctcaattatcagctgaaaaagcaaatgctgaagattatccttcgcaacaagataaataa

SEQ ID NO: 2482 - DNA, 633 bp, Staphylococcus epidermidis
atgtctaaaacattacaaaaccaaagacaattcaactctcaatttgaacatcaagagatccatcgtggaaaaagatatggtaaaaagaaacgttcatgggtaagtctcattattcaagttttcgttttagtattaactgctattactggctatagcatgcttaaacaacctatatttaaaatttcatttgtaaatgaaactataaattttcatcaattaagaaattttcaagataccgttacgcaaatcggcaatttaaatttaggtaatattgatcaattacaacagtctgtcgataatctcatcattatatttaatattttctttgtcctatgtcttattagtttgtttgtaaccgtaattacaattatttttaatcgcacagcacttaaagtagtcaatatattacttttagctattatgctagtcattacattgtatttcagttatatcatacatacaattgctcagaaaatttccgaatctctaaaacaatattatttaacagtatcaccagaacaagtattaactgaagcagatgcgattcacaatgcactgatactcattggatgtagtattgcgttattgattgtaagtttgtttttccgtaatcgtttaccacgtattaaataa

SEQ ID NO: 2483 - DNA, 900 bp, Staphylococcus epidermidis
atgaaaaatagaatgatgaatcgcgtggttaataaatacattcttcacaatagatcgatactttttagtagtcatgatgaagttaaaaaatttttagaaaagagaagtatcgaaaatagtaaaaaacatcagcaacctgcgacacttaatgtaaagtcaaatttagataaacttactcttaatgatatgcaagtgtttagatttaattttagacatgagaagaatcaaaagatactctatctgcatggtggatataatactttgcaaccttctccatttcattggagacttttggataaactaactttaaatacattgcatgaggtcgttttacctatctatcccaagtcaccggattatcactacttagaaacgttcaaagcgattcgtgacgtttataatcaattagttgaagaagttggtgcggacaacattgttatgatgggggatggttctggtgggggactagcattaagttttgttcaatcacttatcaatgataatcaagaagtgcctagaaagttatttttactttcaccacttttagatgccactttaactaatcctaatattacgcaaacgttggaagaaaatgatatcttagttagtcgatttggtgttcatcaactcatgaaatcttgggcaaatgatttacctttatcagacgcgcgtatatcaccattatatggtactctaaaagggttgccacctatatatatgtatggaggtggcagagaaatattaagcccagacatgcatgcatttactcatgctctagaggaatgtgggaacgatgttgagtttaaagagtatcctaaaatggtgcatgattttcctatctatcccatacgccaatcccacaaggtgttaaaacacatcactaaatcaattttagagtag

SEQ ID NO: 2484 - DNA, 387 bp, Staphylococcus epidermidis
atgtctataagagaaaaattagtaatagagctcatgaatttaaaagacactgtaaaatacgaattgtcagaattaaatgaacaacaatatttgtttatgaacggcccagcacctcaattgatgaagcgtgctatgaaaatgagctatattctaggccaaaaagaagcaattgattaccttttattactcatcgacactagccatgagaatgtcttactagatcactgtcatgactatcaaaaacaaattcaaagtaaacaattctctttacaagaagatattattcaccaaataaatcagtcaaaggacttcgaatcatttctatcaacttactatgtaaataaaggcaaatatgatatcatcagcaaaatacaaactttcctttaa

SEQ ID NO: 2485 - DNA, 477 bp, Staphylococcus epidermidis
atgaacaagacatttaccgtaacccgaactgtgacagaagatgctatagatgataataatcatatgcatgacgcatattataatattatttttagcgaagtcattaataaattcaatgaggttcatggtttatcattaccagagagagaccgtctacagtatacagtttttactgttgaaacacatactacttttttacatgaattaacacttggtcaagaattcaatatagagttattcctttataattacgatgacaaacgaactcatttctttctgagaatgttaattgataatcaagaagttgttgcaaccaatgaggttatgatgttaggaatagataggacacaacgtcgtgttgcaccatttccaaaacattatctgaatgctatacaagattatgctcataagcaagaaaaaattgaatggccaccacaattaggccactcaattggaataccatataaaggagaataa

SEQ ID NO: 2486 - DNA, 948 bp, Staphylococcus epidermidis
atgacggtgaccgttagatttcaatctttatcgcaacctcttacattagtttcaaatgtgaaagagattcctaaagatgcaacgattatatggtatgattttgaaaatgccactgatgaagaaaatgaatatttaaaaaatcattttgatttcaattacttagaaatagatgatgctatcaatggtgacccacgagttaaatataaagaatataacgcgtatcaatatatgatatttcatagtattattaatgatgattactcaccaatctcactaagtgtatttttagaaggtaatgttttagtgacataccatcacaaacatttcccatcattaaagcgtgtagctcaatacaatgcagaaaatcatgatagtgaattagattgtgcagatatcgtcattcatattctggattgtatggtggataaatattttaactttgtttatggtattgaagataaagtgtataattttgaagctaagcatgtcgatgaccgctatagtaagagcgttatggaaaatgtttttcaattacgttcggatttaattaaaattaaacgcgtattatttccgatgcaagaagttgtagatacaatgaaacaagaaggaaatataattaaagatgccaaacatagaatgtatattcaacatattgatgatcatcttattaaacaaagaagtgttattcggacttctcaagaaatgacgaatgagattcgtgaaaattatgaatcattcacgtcatttaggatgaacagtataatgcagatacttacgcttgtatctgttatattctcaccactcacttttattgctggtgtatatggaatgaactttgaatttatgcctgagttgaaatggcattatgcttatttcgtgtgcttaactctaatgctaattataacaataatattaatcatattctttaaaaagaaaaaatggttttaa

SEQ ID NO: 2487 - DNA, 1050 bp, Staphylococcus epidermidis
atgagtgactcacaaagagaacagaggaaaaatgaacatgtagaaatcgcaatgtcacagaaagatgcgctggtttcagattttgataaagtgagatttgttcatcattccatccccagtattgatgttagtcaggtcgatatgacaagtcatacaacgaaattcgatttggcatacccaatctatataaatgcaatgactggtggaagtgattggacaaaacaaattaatgaaaaattagcaattgttgctagagaaactggaattgcaatggcggtgggatcaacacatgcagctttgcgaaatcctaatatgattgaaacatttagcattgtgcgtaaaacaaatcccaaaggaaccattttcagcaatgtgggtgccgatgtaccagtggataaagctctacaagcggttgaattattagacgctcaagcgctacaaattcatgtgaactctcctcaagaattagtcatgccagaagggaaccgtgaatttgcttcatggatgtcaaatattgaatctattgttaaacgcgttgatattccagttattattaaagaagttggtttcggaatgagtaaagaaacgttacaagcgttgcatgatattggtgttaactatgttgatgtcagtggacgcggtgggactaattttgttgatattgaaaatgaaagacgttcgaagaaagatatgaattatttatctcagtggggacaatctaccgtagaatccttacttgagagtactgaatttcaagatcgattaaatatttttgctagcggtggcttacgaacgccactcgatgctgtgaaatgtttagcattaggtgcaaaagcaatagggatgtctcgcccgttcttaaatcaagtagaacaatcaggtattacaaataccatcgactatgtagagtcttttattcaacatatgaaaaaaattatgacgatgttagatgcgccgaacattgagtgtttacgacaagcagatatcgtaatgagtccggagttgatatcatggatcaatcaacgtggtcttcatttaaatagaaaataa

SEQ ID NO: 2488 - DNA, 1209 bp, Staphylococcus epidermidis
atgatagaatttgatgcaattaccacattatgtttggcatgtgttttatatttaattggtcaaacaataatcaaccatgtttctattttaaggcgaatctgtattccggcacctgtcattggtggtcttttatttgcaatattagtggctatattagattcatttaatatcgttaaaataaaacttgactcggcgttcattcagaatttctttatgctcgctttctttactacaattggactgggcgcatcattaaaactattcaaaattggtggaaaagtcatgttgatttatttcactttttgtggaattatggctatttgtcagaatattattggtgtatcactcgctaaactcttaaacattaaacctttattaggtcttacagcaggttcaatgtcaatggagggtggtcacggtaatgctgcagcttatggtaaaaccttacaagatatgggtgtagattcagcagttgcagctgctttagctgccgctacactaggccttgtattcggtggactcattggtggtcccatcgttaaatatttaataaaacgctatgatcttaagccagagcatcgtgacgattcatttaaaaattatggtatcgttgaatacaatcaatcattacatacaaaatataaacctattcaagtcttttttatacaattttctatactcgtattttgcatggcattaggaacatatattggcaatacttttaccgatttaaccggagttaatattccaatgtatgttggttcaatgtttgtagcagtaattattagaaatgctacagactttattggttgggatatcgttgatttaaaaatgagcgaacaaataggtgatatttcattaggcatctttttatcattagctttaatgagtatccaactaactcaaatatattctttagctatcccactaatcataattgttcttgtacaagtcgtatttatggtactgttctcgattttcatattatttaaaggactcggcaaagattacgacgctgctgttatggtaggaggatttattggtcatggtttgggcgcaacaccaaatgcgatggctaatttagatgttatcactaaaaagtttggcaactctcctaaagcatatctagtagttcctattgttggtgctttcctcatcgacttaatcggtgtaattattgttatgagttttattcaacttttcagttaa

SEQ ID NO: 2489 - DNA, 321 bp, Staphylococcus epidermidis
atgaatgcacagtttaagaaaggtgctttagaattaatcgttctgcttattattaaaaaagaagatcagtatggttattcacttgtacaaaatatctcgagatacatgaccatagctgaaggtacagtttatcctctactaaggcgtttggttaaaagtggggaactgagtacgtattatcaaccttcaactgaaggaccgtctagaaagtactatcaattaactcaacagggggctgcgagggttgatcaattggaagaggaatggaaattgtttacggaagctgtagaacatttcattgaggagagtgagaatgaatga

SEQ ID NO: 2490 - DNA, 561 bp, Staphylococcus epidermidis
atgaataaaaatgattatttaaaagaacttaaaaggcatttgaaacatatgaataaagaagaaaaagaagatattttgaatgagtacgatacgcacttttatagcggacagcaagagggaaagtctgaatcagaagtatgtgaagagttaggtaatccaaaagtaataggtaaggaacttacagctacttttagtgtagaaaatgcacatcaaaaagtgtccttaatgaatatttcatccgcaattgtagcagtaatggggctaagtttgcttaacttttttattgttataataccagcttttttaagcattctgctcgtattaaccttcatcatttttactctagcttcactagttgcaccattgatgttgctcattaaaggaattatggatggttttcattccattatcctatatgacatatttatgactggtttaatgtttggtgttggacttgtacttgcagtagtgacttactacctcattaagtggctattttacttaactatgaaatatttaaaatggaatatctctattgtcaaaggaagtgtacaatcatga

SEQ ID NO: 2491 - DNA, 804 bp, Staphylococcus epidermidis
atgaaaaaaattgcagcgataatattattaataggcttgtcactaattattatttgtagcgtgggagtatatgcacaaaataaaaaattgagtaaagacaagcaatataatgatcaaacaacaaatttaatgaaaaactatgatgataatactgtgaaaagtatttatgttgatggaaaagtaagcgatataactgtgaaaaaaggtgaacatttttcggttaagtccaaagggaatgacaaaaatttaaacgtcactagcaaggtgaacaatcaacattgggtaattacagagcgtcaaacaaggccgcatattaattttagaatacaaggtcatgttagtaatcatattacgattacagtacctaaatatattaaaaacatagatattaaaactaatgatggggatttaaatgttgttggagtaaatagtgacacaggaagatttgatactgaatctggagacattaaagttcaaaacggacgatataaaaaggtgacgcttcataatgaggatggagatattcatacgaaagatattcattttaatcatgctgatattcaaaatgacaatggggatattcaaatgaaacaattgcctcctgatattcctttacgtattaaaaatgaagaaggggatataaacttgaattataaaaaagaacttcatcacacccaaatcatcactcgtaatgaagaagggcaaacagacatcgatcatcgtgtgttaaataatagtaaagttaacaatgggaataataaagtgaaattaattaatgaaaatggagatattacagtgaaataa

SEQ ID NO: 2492 - DNA, 609 bp, Staphylococcus epidermidis
ttggactttataaatcagcagacaacccaaactgcaaaagctttattaggtgttaaaattatataccaagatgactatcaaacatatactggatatattgtagaaactgaagcttatttaggtatacaagataaagcggcacatggttttggtggcaaaataacgccaaaagtgacatctttatataaaaaaggtggcacaatatatgcacatgtgatgcatacacatttattaatcaattttgttacacgaactgagggcattccagaaggtgtacttattcgtgctattgaaccagatgaaggtatcggcgctatgaacgtcaatcgtggaaaatctggatacgagctcactaatggtccaggaaaatggactaaagctttcaatattccacggtcaattgatggctcaaccataaatgactgtaaattatctatagataccaatcatcgcaaatatccaaaaactattgtagaaagtggtcgtatcggtattcctaataaaggagaatggacaaataaaccactacgtttcactgttaaaggcaatccatatgtctctagaatgcgcaaatcagattttcaaaatcccgacgatacatggaaataa

SEQ ID NO: 2493 - DNA, 573 bp, Staphylococcus epidermidis
atgagagaaaaagttagatttacacaagcttttaaattattttggactaactattttaattttaaagggcgctctcgtagaagtgagtattggtttgctatgttatggcatttaatttttatgattcctacaattattggttacgcttttggaattatctctttaatattaagtgaaacttttaaaagttatggatttctcttgttgggggtaggaattttaatcttttctgtgatttatattttgatttatagtttagttacattaatacctaatgttgcgatattatcaagaagattccatgatcgctcaatgacgatgactctcccgattattttttatgttttcactgtcattttatctggttttaattatataccagatatagataattcaccggtattaatatttatgggaattatctccttaatctactggattgggtcgatattaatattagtattgacttgcttagatagtaaaacagagtctaataaatatggaccaagtccaaaatacaatcgtaacgagacaaatttccatggtgataatgctaatccagttgataaataa

SEQ ID NO: 2494 - DNA, 117 bp, Staphylococcus epidermidis
atgcatcgacgtcctattgcatcaatgctgacatgtttattcatttcaactttaatcatggtatcggtgattaaaattaaacgtcttgaaagggataacaacttaaatcaaatatga

SEQ ID NO: 2495 - DNA, 1611 bp, Staphylococcus epidermidis
atgagttatagtataggaattgattttggaaccgcttctggaagggtgatattagctgacacatccaacggacatatcatatcaagatatgaggaagactatgcgaacggaacttatatgaactcattatatgataaaccgttacctgaaaactacttcttacaaaatgctgacgactatttacaaattcttgaacaaggtgttcaatttgtattagaagatagtaaagttaataaaaacgatgtggttggtattggagtcgactttacaagcagtacaattatctttctcgatgaacaatttgaaccgcttcatcgtcatgaagatttaaagacaaatccacacgcgtacgtaaaattatggaaacatcatggagctcaagatgaggcaaaccatatgattcagatgagtaagaataaaaattggttagattattatggctcaagcgtaaatagcgaatggatgataccgaaaatcatggaagttaaacatgaagcaccagaaattcttagaagagcacggtatatattggaagctggagattacattactagtatactaacaaattcaaatgtacgatcaaattgtggtattggctttaaaggtttttgggacaatgatgcaggatttaattacgagttcttccatagcgtggatcccgatttacctaaaatcgtcaaagaaaaatgtgaagcgccaatcatatcaattggaaaaagtgcaggtcgtttatgtaaagactatcaacagatatgggggctttctcaagatgtccaggtttcaccttttatcatagatgcacattctggcgtcttaggtgttggggcaatagaagctggagaattcactgcagtcattggtacaagtacttgtcatctcatgttagattcaaagcaagtacccatttcttctataactggctcagttaaaaatgctattatacctggattatatgcctatgaagctggtcaaccagctgtcggtgatttgttcgaatactcaaagaaccaagcacctaaacatattgtggataaagcaaatgaacatcatatgcctgtgcttaactatttagaagaattagcaagtcatattaaaatagaagaacaacatgttgttgttttagattggttgaatggaaatcgtagtatactaagtaatagccatctaactggaagtatctttggtcttacacttcaaacaccatatgaaatgattcatcgagcatatattgaagctacagcatttggaacaaaattaattatgaaacaatttgaagataatcatatccctgttcatacagtatatgcatctggcggtatcccacaaaagagtaaattactcgttgaaatttatgcaaatgtcttaaataaaaaggttgtcgtcttagattcgtctaatgcttcagcattaggtgcagcgatgttaggtgcaactgttggtaacgcatatagtacattaaaagaggcggcattatctatgaagcaacctatagcttatatacaagaacctgaattccaaaaagttcaagcatatgaaccactctaccataaatattgtgaactacatgatttattaggtcgtcaatatcctgaattatcatatttgatttaa

SEQ ID NO: 2496 - DNA, 138 bp, Staphylococcus epidermidis
ttgataaaagttgaatttaaaaagtcttatattgctattttaaagtataaagtgtttgatttgtttagccaaaaagctaccccttttatggcgaacgtcttaaaaaatcagggaattgaaagtaatgtaagactttga

SEQ ID NO: 2497 - DNA, 1011 bp, Staphylococcus epidermidis
atgatatctaaagttgaacatcaaagacacggtttagatttaattaaaattgataatgacgatacgaaaattgtatttacaaactatggtgcaagaattgtttcttggaaataccatgataacaatatcgttttggggaatgtagtagaagcagatgaattttattttgaagaaccttttaattttggtgctacggtaggtcgctatgcaggtagaattgaaaatgcatcatttaaattagatgatgatacttttcaattagaatcaaatgatggtcaacatcatttgcatgggggcagtcatggattaaatagacgtatttttgattatgaaatagttgatgatattggacaagtaaagattatattcacaacaacgattaaagaagaagaggacaattatcctggaaatatgatggtaaaggttattcacacttatgatgccaatcatcgatggtccgtacaatatgaggcaaaatcaacaaaaaaaacagtatttaatccttcaaatcatgtttattttaatttgaatcgtgataacaatgttgtctataaccactgtattaatagttcagaattaaaaatgtatatgttaaatgataaacatattgttaaagaggagcaatctcttgatttacatcgattattgggtacaaataaagtctatttaaaagatatttttgaaagtgacaatgaaactttgcaacaacaaattaatcattataatggcattgatcatcctttcgaatttggtggaaatgagcttaccattgataattctgaatttgaacttaatattaagactgatatgcctcactttgtaatgtttacgtttaatgatccacaagtttggaacaatgattttaatatttataaggcgcattctggattttccatcgaaactcaatatatgcctaatgatataaatatgtacggcgccaaagctcagtctattttagaggcagatacattatttacatctaaaacaagttttcaaattcatgaaaagtag

SEQ ID NO: 2498 - DNA, 681 bp, Staphylococcus epidermidis
atgattaaagtgaatgccatatctattggcaaaatagaaacattgtcttatggtaactataaaccaatgcaatcagcgttaaacaaaattccttttaaaggtcaaatgtggctcaatcgacttgggttcgtggacgatgaacaagcctatcataaacatggtggtatacataaagcgatatgttgttttagtaaatctaattatcaattatttaaagatgacttacatcaattacctgaatatgcaatgtttggtgagaatttgacagttgaacatctagatgaagccgatgtttattttggtaatcagtatcaactaggcgatacaatcatagaagtatcagatatacgagaaccttgttggaaaattcaagctaaatatgcaatacctaatttagttcaaaaaatgacgcaatctggtaaaactggattttattttagagttataaaagaaggatatgtacatcagagtgataatttaaaactcattaaaaaggcagaatcaaactcacgtctatctgtgaaagacttaaatcatctattctataatgagcgtgataatttaagattaatttatcatgctcttcgaaatccttatctttcacctgatcgaaaggaaaaactacagaaaatgaaaacgcgtgccgaaaatagaaaattcattaattctgacgataagtag

SEQ ID NO: 2499 - DNA, 693 bp, Staphylococcus epidermidis
atgaaagatgcaaaagagctaaaattgatgaccttagaagatgtacttggtcaaattgaaaatggtatgacactaggaataggaacagggagcacaattgaattattaattccccaaattgctgaattaattcagaaaaagaattatacaattaccggcgtctgcacttctaataaaacagcatttttagctaaagaattagctatgaatatagttgatgtaaatgatgttgagaaaatcgacttagcaatagatggcgctgatgaagtagacagtgcgcttaaccttattaaaggcggtggtggagccttatttagggaaaaggtcatagatgaaatggctgaccgatttgtcgttgttgtagatgaaagtaaactcgtcaactatttaggagaaacatttgcattaccagttgaagtcgataaatttaattggtaccaagttgccaaaaaaattgagtgttcttatgatattcatgtaagtagaagaattaatgaagatgtaccgtttattaccgacaatggtaattacatattagattgttcattgcaaaatcgaattcctgcttatgagctacacgaatttttaattcatttaactggcgttcttgaaacaggatatttcctcgatattgccgatcaagtaatagtaggaacacaagaaggcgtaaaaatattaaataaagagacttag

SEQ ID NO: 2500 - DNA, 180 bp, Staphylococcus epidermidis
ttgaaagtttttttatatttcatttactttttcgttgcgttttttgttgttgattctttaattagcttggtatttccaattgaatttgatgtgtatacaaatttaattactgcattcttttttgcagtttttatgacaccattattttttgtattaaaacaagacaaaaacaaaaaatag

SEQ ID NO: 2501 - DNA, 1149 bp, Staphylococcus epidermidis
atgaaaaactctagattttctgggttccaatgggctatgatggtctttgtatttttcgttattacaatggcattgtccgtgatactcagagattttcaagcgactatcggagtgaaacgttttgtctttagcattaaagatttagctcctttcatagctgcaattgtgtgcatattaatatttaaacacagaaaagaacaattagcaggattgaaattttctatcagtttaaaggtgattgagcgtctacttttagcactcattctaccacttatcattttaatgattggcttgtttagctttaatacttatgctgatagtttcatcctattacaaacttcagatttatcagtatcattactaactatactaattggtcatattttaatggcttttgtagtggagtttggtttccgttcttacttacaaaatattcttgaaacaagaatgaatacattttttgcgagtattgttgttggtcttatttattcagtatttacagctaatacgacatatggtgtagaatacgccggataccatttcttatatacattcatgttttcaatgattattggtgaattaattagagctactaatggtcgtacaatttatattgcaactgcctttcacgcatccatgacttttgctctcgtctttttatttagtgaagaaacaggcgaccttttctcaatgaaagtcattgcactttctacaacaattgtgggtgtttcatttattattcttagtctcatcattcgtgctattgtttataaaacgacgaaacaaagtttagacgaagttgatcctaataattatttatctcatattcaagatgaagaaccaagtcaagaagacacctcttcaacttcagatcatgatgtatcatctaaagatgaaacaaagcaacaagaaattgataatgacaaatatcaatcaaagaaacctaataagagtgacgatgcgattgctacttctgattataaagaagacgcctcttcagttaataaagaaacggatacaaatcacaatgataagcttagagatcattcaacttataccgaagatagacactcatcagttgtcaacgatgttaaagatgaaattcacgaagttgaagatcataaagctgacacagataaatcacagtaa

SEQ ID NO: 2502 - DNA, 936 bp, Staphylococcus epidermidis
atgtatcaacttgcgcaatctaatctatggacaggtcgtttagatagtgaaactgatcctacacaatttaggcatttccaaactgttaaattcggtgatttaagtcaattagatttttcggagaaacacaaaggcgtgggcttattaggatatgcaattgataaaggagtagaattaaacaaaggacgtgtaggtgcaaaagaaggccccaatgccattaagcgagcttttgctggattgccagatttgaatcaatgtgaagagattatagactatggtaatgtagaacacaatcatgagttgctaatagatacacagcgcgaattcgcagaccttgctgctaagtctatgaaacgacataaacaaacatttttacttggtggtggtcatgatatagcatatgcacaatatttagctactcgtaaagtttttcctgagtcgtcaataggtgtgattaatatagatgcgcactttgacacacgtgatgaggattattcaacctctggtactagttttagacaaattctagaagaagatgataatgcagattatttagtgttaggtatatctcaaggtggtaatacacaagctttatttaattatgctaaagaaaaagatattcaatttgtatatgcagatgaattactacatcaggtgtctccccctattaaagatatgatagaacgttttatccataatcatgatacggttatgttcacaatttgcatggatgtagtagatagtgcatttgcaccaggagtaagtgcaccagctgtcctaggtatatatccacatacagttttcgaacttgctaaacgtgtcattccaagtgaaaaagtaaaatctataagtatagctgaaatgaatccaacgtatgattcagatcaaagaactgctaaattagttgctaatttagtacatcattgtttaatttaa

SEQ ID NO: 2503 - DNA, 1119 bp, Staphylococcus epidermidis
atgacaaattattctacttatgtaaattggagaagaacgtttcatcaatatcctgaactttcagatgaagaatatgaaactacagaaacgttacggaaaatactcaaaagttatggtatacgtatactggatgtccctttaaaaacaggtttagtagcagaaattgggcaaggagaggaaatgatagcggtaagaacagatattgatgctctgcccatagaagaacaagtgaagcatgaatttacatcaaagcatcatggtgcaatgcatgcatgtggtcatgatattcatatggcaagtatattagctactggtactcaactaaaagagattgaagatgaattaaatggacgcgttcgattaatatttcaacctgctgaagaattaggacatggtgcatttgaaattataaatactggagtacttaaaggagctaaagcagtacttggttttcataattatcccactttaaaagttggtgaatttgctattaaatcgggtgcaattacctctgctgtagatcgttttgagtttaatgttaaaggtaaaggtgcgcatgctgcaaaacctgagcaaggaaacgatccagtcatcgttgtaggacaacttatcaatagtttacaaactattgtgagtcgaaatttatcagcttttgatagtgcagttgtaacaatcggtgaaatttcttgtggtaacacatggaatgttatagctgacaaagcttatatacagggcactgttcgttcattcgatgaggataaacgtcattatattgaaaataggatgaaaaatattgctgatggtttaagtcgtgtttttaatgtggatattgatttaacttattcaagactacctggtgcagtagtaaatgatgcacatctaacacaagaagcaatagaggtcgctaaaaatgttggctatcatgtatcaatgctcgatgaaccggttactattggagaggatttctcaggttatacagaagaataccccggtgttttcgcatttattggctccgacagtaaatttgatttacatcatcctaattatcatccggatgagcgtattttggaaaaagttcctcaatatttcgtacagctcgttcaacgtttattgacataa

SEQ ID NO: 2504 - DNA, 798 bp, Staphylococcus epidermidis
atgtcaccacaaccagattgtggggaagattcttatcatggccaccatcgattagatggctttaaaatactagtgactggtggcgattcagcaattggacgtgcggcagcaattgcttatgctaaagaaggtgcagatgtagcgattaattatttaccaagtgaacaacaagatgccgatgatgtaaaacaaatcattgaaaatgttgggcaaaaagctatcttaattcctggtgatattagagatgaacaattcaactatgacatggttgaagaggcttatcagcaattaggtggtttagacaatgtaacgttggttgctggtcatcaactttatcaagatgaattatcggagtttaaaactcaagattttactgaaacatttgaaacgaatgtctatccggtattttggacagtccaaaaagcgcttgagtatttacaaccaggagggtcaattacaacaacatcttcagttcaaggttataatcctagtccaattcttcatgattatgctgcaacgaaagctgcaattatatctttaacaaagagtttttcagccgaactgggacctaaaggtattcgtgttaactgtgttgcgcctggaccgttttggtcaccacttcaaattgtcggtggacaaccacaaagtgctatacctacttttgggcaaaacacaccgttaggacgtgctggtcagcctgttgaatgtgctgggacatatgtgttattagcgtctgatgatgcaagttatattaccggtcaagtatatggtgtgactggtggaactcaaatagattaa

SEQ ID NO: 2505 - DNA, 612 bp, Staphylococcus epidermidis
gtgaaaaaaataaaagctgaaacactttcagataagcaaaattacaaattacttagtggaagtatcatacctaggccgatagcatttgtaactactcaaaatttaaaagggaatatcaacgcagccccgtttagtttttttaatgtagttaatcatacaccacctatgatcgcaattgctgttcaacgtacaaatggaaatagaaaagacacctcaataaatatagaacaatcaggtgagtttgttgtgcatattactgatgaggctattgttaatgatgtgaatgaaactgctgccccgttagaatatggtgttaatgaacttaagagaacttctctaagtatgattgattctgatttaattaatgttccagcaatcaaagaagcaaaagtaaggtttgagtgtaagcttcatcaaatagtacaattgggcaacaaagataacgggagtgatttgataattggtgaaattgtcatgtaccatattgatgaagaagtttattttgaagatagtaaaattgatgcaaatcaattaaatccggtagctaggttagctggaaatgattactctttgttaggtcaaacatttacagttaatcgtcctacttcataa

SEQ ID NO: 2506 - DNA, 588 bp, Staphylococcus epidermidis
atgaaagcatatctatataaattcatgccgttgctcattttagttataggactgattgtcttatacgttattaatgattatcccatattgttacatgtcatagtgattattgcttttataacgagtggattgaaaaatgtatattttgttaataataatattagaaatcatattatatggatgagccctaaactcgatcgtatccttggtatgctttcgggcatactatattctggtatttacgtggttagctttatagagcaacagcctttatggatagtgatacttattctggtattaacagtgggtactgcagttttattagaaacgaaattacatattacatcatctcaattagaggagaggttatcatctgaacggataaaacgtaaagtaatatcaagacataaggcacaacgtcttaagaatatattttttactgtgattgttgtagtaatcatttcaatgctcatatcattatatttaaagttaatggttatttttggacttgcattagcgatattcatctttgcatcaataagtgtggctatttttgaaaaatactttactattattgaaaatatgtaa

SEQ ID NO: 2507 - DNA, 1302 bp, Staphylococcus epidermidis
atgaaagagatgaagaatggcaatgcttgggcattaattcctttattgttatttgtcttactatttctaggtgttggtattatttctggtgattttaccactatgccattaaatgttgctattacaattactgttattgttgccttactgatgaatcgcaaggaaacttttgcgaaaaaagtagaggtatttacaaaaggtgcaggtcactctaatatcattttgatgatgcttatttttatccttgctggagctttttcgacgactgctgaaaaaatgggtggcgtgtcatctacagttaatttaggcttatcacttattcctcaaaatctaataattgttggactatttattatttgtatgtttgtatcaatttcaatgggaacttctgtcggcacagttgcagctattgcaccagtaggttttggatttgcacaagcaacagatgtaccagctgcattagccatggcaacagttgttgggggagcgatgtttggtgataatctatctatgatttctgataccactattgcagcagtaagaacacaaaaaacaaaaatgagtgataaatttaaggtcaattttaaaattgtattaccaggtgcgattattacaatcatcattttattctttttaacaaatggtatttccatagatcatactaaaagctatgattataatttaattaaagttataccatacttgttagttttgattcttgcgttagttggtattaatgtaattattgtattaataggaggtactgtattagccggtataattggactgattgatggttcttttggttggaatggccttttaaatgctatttctaaagggattatcggaatggaagatattgctatgattgcattgcttataggcggtctagtaggaattattcaacataatggtggtattgattggttgcttaattttgtaaggtcaaaagtaaaatcaaagcgtggtgcagaactaggtatagcgagtttagtgagtgcagctgacatttcaacagcaaataatacaatttctattattatggctggaccattagctaaaaatattgctgatgaatatgatgtcgatccaaggaaatcagcaagtatattagatatctttggtgggtgttttcaaggattattaccatacagcccgcaagtgatttcagcagcaggtgtagccggaatttccccattcctaatgttacaatatagtatttatccaatattattaggtgtttgtggattagtagcaattattttaagagtacctcgtttaaatcaatcgtcaaagaaataa

SEQ ID NO: 2508 - DNA, 513 bp, Staphylococcus epidermidis
atggcaaaatataatgtggaaaatgaatatgttgaaatcgacattgagagattacttaaatatacaccagaggtcgtttatgaggcatggacaaaaacagatatcttaaaaaaatggtttatgaccacacaacgcacgaataaatcgtttgatgcagatattcaagagggaggaaagtatcgcatcattgatagtagaaatggtaaacaaaacatcatagaaggtacatatgaagagttagttttagatgaatatatcaagatgacgattggaatgccaggactaagtgaggaagaggatgtcattgaagtagagttctttgaaagagagaatggcgggactcaaatgttcttttactatcgctcttttattgaaaaggaaagacgtttaacaacattagaatataagcaaaagaaaaaagaatatcatgattcaacagcacatggatttgaattgatgattgatcaaatgcaaaatgtgatagatgaaattgaggaacagcgtcataactaa

SEQ ID NO: 2509 - DNA, 762 bp, Staphylococcus epidermidis
atgattttagatgaacgagtaaactctaatttcgatcaattaaatgataatgatatacaaattgcacattatgttaatacacatatagatgtttgtaaaaatatgaaaatacaagatttagcctcacagacacatgcttcaaatgctacgattcatcgcttcactcgtaaactaggttttgatggttatagtgattttaaatcctttttaaaatttgaagatagtaagaatcatcaacttccttctgattctatggagcaatttaaacaagaaattgaaaatacattcaactatttagaacgtattgattatcgtttattaactcacaaaatgcatcatgctacaacaatatacttatatggtactggacgtgcacagatgaatgtcgctgaagaagcacaacgtatactgttgactatgcataaaaatattatattgttacatgatgttcatgaactaaagatggtgttaaacaagacaattcctgaagatttgtttttcattatttcactttctggcgaaacacatcaacttaaagaagtcacacaattgcttcaactgagacaaaaatattttatttccgtaacaacaatgaaggacaatacattggcacaacaagctgattacaatgtctatgtttcaagcaataccttctatttaaacgatggtaccgattattccagttttattagttatcacattttctttgaaacactactaagaaaatataacgaatataaagagaatcatgaattaacatag

SEQ ID NO: 2510 - DNA, 1590 bp, Staphylococcus epidermidis
atgaatgcaattaaacgatttggtagtgcaatgatagtacctgttttgatgtttgctttcttcggtattgttttgggattcgctacattatttaaaaatccaaccatcatgggaggcttagctgaacagcatacattttggtttaaattttggtctgttattgaatcaggtggttgggtaatatttacacatatggaaattgtctttgtagttggtttaccgttatctcttgctaaaaaagctccaggacatgcagctttagcagctctaatgggatatttaatgtttaacacttttatcaatgcaattttaactcaatggccacatacttttggcgctaatttaaaaaaaggtgtagaaaacacaacaggattaaaatcgattgcaggtattgaaacgttagataccaatattttaggtgcaatcattatatcaggaataataacgtggatacataatagatattacagtaagcgtttacctgaaatgttaggtgtatttcaaggattaacatttgttgtaacaatctctttctttgtcatgctaccagtggcagcaatcacatgtgttgtttggccaacgattcaacacggtattgcttcaattcaatattttattgttgcatcaggatatataggtgtttggttatatcatttcttagaacgtgtactaatacctacaggattgcatcattttatctatgcaccaatcgaagtaggtccagtagttgttaatcatggtttgaaagcagaatggttgcaacacttaaatcagtttgccgaaagtaacaaaccacttaaagaacaatttccatatggttttatgttgcaaggaaatggcaaagtttttggttgcctaggtatagcattggcaatgtatgcaactacaccaaaagaaaatcgtaaaaaagttgctgcattattaataccagcaacacttacggcagtagtagctggtattacagaaccacttgaatttactttcttatttattgcgccatttttattcgtattacatgcactactagcagcaactatggatacactgatgtatggatttggtgtcgtaggtaatatgggtggcggtgtactagattttatagcaactaactggatacctttaggaaaagcacattggatgacatatgtctttcaagtagtaattggtctaatctttgttgcgatttactacttcttatttaaatatttaattttaaaatttgatattccattaccaggacgtaagaaaggtgaagaagaagtcaaattattttctaaacaagattataatgataaaaaaggagattcaactcgcaatcattcacctaatagtgaatatgaagaaaaggcgatgtactacctagaaggtcttggaggaaaagaaaatattaaagacgttacaaattgtacgactcgcctacgtttaactgttaaagacgaaagtaaagttcaagaaagtgcctattttacacataatcaaatgtctcatggtttagtaaaaagcggcaagagtgttcaagttgtcgttggaatgtctgtacctcaggtaagagaagcgtttgaaaatattgtaaatgatgatctatcttag

SEQ ID NO: 2511 - DNA, 531 bp, Staphylococcus epidermidis
atgttgattgataaatttgaaacctacatcattaatgttgcaggtttgaaatctcgctcaacgcgaaaaaaattaatacatttatgtaaagaaattactttttgtgaatcctttcagtattctatcattaagcaaaacgatgtgttcgcattggaagttagcctccccaagcaacaactaccttatctgataagtttcttaagtttccacaattatgctatttatcaaatacttttacccagccgtgtaaatgaacttcttgattcagaacaactttaccaatctattaagcgctttgatttagcaatcgatggtttacaagatgccttcattaaagataaagtcattgatattatgaatatgtttgtgaatcatcacaatgtaaattatacattaaataataattgcgcaagcgtcacatgtcctcctgagattttcacaaagctgcttcaaactattgcaacgcgtaatattgatatcctatcagcaagttatagagcaaagatgctacataaagcacgcatttcataa

SEQ ID NO: 2512 - DNA, 636 bp, Staphylococcus epidermidis
atgtataaagcagtagtgtttgattttgatggtactgtcattgataccgaaaaacatttgttcgatttaataaatacacatttaaaaatccatcaagaagcgccgatttctttagaattttataaacaatttattggcggtgaaactactggattacatacatatttagaagatgctattggtttcaaaaataaagaaaaaatttatgatcaatattatcaaacaattattgaattgccggtaaatcccacaatcattcaattgatgcaatatttaaaaaaacgtcatatcccaatggcgattgccacaagtagttataaaaagaatatatatcctatatttaaacaattaggactagatacatacattgatgttgttgttggtcgtgaaaatgttgagagtgttcaacctaatcccgaaatttatttaaaagctgtacaagagcttaattataatcctacaacctgcttagcaattgaagattctgtcaatggtgctactgcagcgatgctagcaggattagatgttgtcgttaatacgaatataataacgaaggatcaagatttttcgacagttcaatatgttggacaagatatggaatttgaagatataaagaattttttatttaaagaataa

SEQ ID NO: 2513 - DNA, 186 bp, Staphylococcus epidermidis
ttgactattattatcggactcattgtaattattttgttaatcattagtttacttccaaattataaagcaatggtattagctaagcagcaaggccaaaaacctacacgatatactattatggtaggcattgacttattattaattatacttatattagtaacattagtattaaaattgattatgtag

SEQ ID NO: 2514 - DNA, 357 bp, Staphylococcus epidermidis
atgaataaagcgcttgttatacgtgcaatcaaattttctttaatatttatgactgcatttttaattcttaatttattgactatgaaagaggcttcaatatcgtctattattgtacgaactgtcattgcagctattgttttctttgtcatttatatcattgtatttacaattttaagttcgtcagaacgtaaaattatttatggtacaactttacctattgcgctttttatatgccttatattcggatcaattttcttcactccgcgtataggtatcattgtcggactaattttgggtgtgattgctggtgtcatatgggagttcttaaatagaaaaaatggaggtcacacatcttga

SEQ ID NO: 2515 - DNA, 1377 bp, Staphylococcus epidermidis
atggaaaataatgagttgcaaaggggattgaatgcacgtcaaatgcagatgattgctcttggtggaacaattggtgttggtctttttatgggagcaacaagtacaattaagtggacaggtccatctgttattctcgcatatttaattgctggtatttttttatttttaatcatgagagccatgggtgaaatgatatatattaatccaaccactggttcttttgcgacgtttgctagtgactatattcatccagcagctggctacatgactgcttggagcaatgtatttcaatgggttgtcgtcggcatgagtgaagtgattgcagtaggagaatatatgaactactggttcccaagccttcctaattggataccaggagtgatagcagttctctttttgatggcggctaacctagtttcagtaaaagcgtttggagagtttgaattttggtttgccttaattaaagttgtaactattgtattaatgattattgcaggattaggattaattttatttggtataggtaatggagggaatccaatagggatttctaacttatggtcacatggtggatttatgccaaatggattcattggatttttctttgctttatctattgtgattggatcataccaaggtgttgaattgattgggatttcagcaggtgaaaccaaaaatcctcaaaaaaatattgtaaaggcagtcaacggagtaatatggagaattttaattttctatattggtgcaatttttgtcattgtatcagtatatccttggaaccaattaggtaatattggtagtccttttgttgcaacctttgctaaagtgggaattacgtttgctgctggtttaattaactttgtagtcttaacggcagcattgtctggttgtaattcaggtatttttagtgcaagtcgaatgatttatactttggcaaaaaaaggacaaatgcctaaagtatttactaaagtaatgaaaaatggcgtacctttctatactgtatttgcagtatctatgggaatattaattggtgctttattaaatgtcatacttccattaattattgatggagctgatagtatctttgtatatgtatatagcgcctctattctaccgggaatgataccttggtttatgattttatttagtcatctaagatttagaaggttacatcctgaaaaggttcacaatcatccttttaaaatgccgggaggagcaattgccaattatttaactatcatgtttttactcctagtattagttggtatgttacttaacaaagagactgcggtatcggttgtcattggtatcgtgtttttaacagctgtgacactttattattttattagatatcacaaaaaggaacgacaaatataa

SEQ ID NO: 2516 - DNA, 768 bp, Staphylococcus epidermidis
atgacttctcaagaaattgcaaatcaattagaaactagttctacttctatcatacgtctaagtaaaaaggtgacaccaggtggttttaatgaacttaaaacacgtttgtctaaatttttacctaaagaagtcacacaatataatgttgagttagttgataacgaaagtacaatttcacttaaaaacaaattgcattctcgctctaaggcagcgttaagtaatgctaatgaaaccattaacgctgctatcatcgatgaaatttgtgatctaattaaaaaatctgaaactatatttatttatggctatggtgcctcttttgttgtagcaacagatttatatcaaaaattatctcgcatcggtctaaatattcaactagtgcatgaaactcatattttcacaactatgttagcaacacgtaactctaacgattgtgttatatttatatctaacaatggtactcaaagtgaaatgcaatctattgctaaagtcattgcagattatcacattcccattgcgactatttcaagcacttctgataatccagttgcaaagcaatctaatattgttttaacctatggacaaaccgatgaaaatgagatgcgcatgggagccacaacttcattatttgcacaaatgtttactattgatatattgtactatcgatatattgcgctaaattatcaatcatctttagattttattactcaatcaaaaatcgcattagataattaccgtaaacatctctcgaatatagatttcaaacattaa

SEQ ID NO: 2517 - DNA, 1425 bp, Staphylococcus epidermidis
atgagtaaagaagaacgtcttgccaaagacattacccacgcattaggcggttctcaaaacataagtaatatcatccattgtatgactcgagttcgtattaaagtacacaatgatgcaaaagttaattatgatgaattaaaatctatcaatggcgtattaggcgttgttgaagatgaaagaattcaagttgttgttgggccgggtattgttaataaagttgctaaacatatggctgaccagtcaggagcaactctagctgaagagacgactgaaaatcaaagttataaatcacaagcagaaaaacgtgcgtatgaacataaacaacaattccaaagtcaacgtaaacaaagtaaatggaataaagtgttaaaatctattgctaatatctttatacctttaataccagcatttataggtgcaggattaatcggtgggattgcagcaatactcagtaacttgcttacagccggttccatttcaggtcaatggattgaacaaattgtgacagtcttaaatgttattaaagatggcatgctattttacttagctatttttactggtataaactctgcaaaagtatttggtgctacaccaggtttaggtggtgtcatcgggggtactacactactaaccggtatcacggatgacaatccaattaaaaatattttcactggagaacatctagctgcaggacaaggcggtattattggtgttatctttgcagtttggttattaagcatggttgagaaacgtctacataaaataatacctaactctattgatatcatcgtaacgcccacaataaccttactacttattggtttgttaactatatttataatcatgccactagctggctttgtttccgatggacttgtttatgtcattaactggattattggagtaggaggtattttcagtggattcattataggagcattctttttacctttagtcatgctgggattacatcatatcttcaccccaatccatatcgagttaatcaatcaaactggctccacttacttgttacctattgccgcaatggctggtgctggacaagtcggtgcggcgattgcattgtgggtgagatgcggtaaaaataaagaattacgtaatacgctcaaaggtgcccttcctgtagggttcttaggtataggtgaacctttaatttatggtgtaacactgccgttaggtcgccctttcttcactgcgtgcataggtggcggtgttggtggtgctgtcattggtggtatcggtcatattggtgcgacagctgtaggaccaagtggtatttcattattaccattgattgccaataatatgtatctcggttacatcgtaggtttactagctgcttatgcgggtggctttatctttacttatttcttcggcacaactaaagaaatgagaaatcctgaataa

SEQ ID NO: 2518 - DNA, 888 bp, Staphylococcus epidermidis
atgaatcatttaactactgaaacgagaaatatacaaacaatgcatttggatgaaatgaatctaaaagatgcattaaagactatgaatcaagaagatcaatttgtacctaaagcgatagaacctgttattcctaatttaacaaaagtgatagagagtgcaattcaacgctttaataatggagggcgaattatttatattggtgctggtacaagtggaagacttggcgtactagatgcggcagaatgtgtcccaacttttaacgtttcaccaaatgacattattgggattatcgctggtggacaaaaagctatgacggtagctattgaaggtgcagaagatgatgctgaacaaggtgcacaggatttaaagaacattcatcttcaatccaaagatattgtagtgggtatttctgctagtggacgtacaccatatgtaaaaggtgcactagattatgcaaataaattgaatgcagaaacagtcgcactctcttgtaacgttcacagtgatataagtaaaaattcaaatcacgtattagaaatcaatgtggggcctgaagtattaacaggctctacgagattaaaatcaggtactgctcaaaaactagttttaaatatgatttctacaatgacaatgattggcgtgggtaaagtttatgataatttaatggttgatttacggcctacaaatcaaaagttaatccatcgttctattcgcatcattcaagatgtgtgtgatttaaatcatcaagaggctatagaattatatgaaaaatcagaccacaatatcaaaatagctatcgtaatgcacttatgttccacaacacaacaagatgcaagacttcgtttaaaacaaaataatggagtgattaagcaagctatcaacacttaa

SEQ ID NO: 2519 - DNA, 1053 bp, Staphylococcus epidermidis
atgcttggtttctcagtctatctaggacagaatttagatcgagattatattttaaatatggctgacttaggctatgatgtagtttttacttcactacagatacctgaggaagacaagaaaaatcaaatggcttatttgggagacttatgccaactattatcagcctatcaaatcacttatattatcgatgtaaccccttcattacttaatcaaactatttacagttatttgaaccaattacctcatggggatttttatattcgtatagataatcaattaaatattgaccttatcaaagacattatcagtcaaggcttcaaatgctgccttaatgctagtacgttaactgatagcatgttagcgcacatatatcgtactgattttaataatcaacttttatactgtcataattattatcctagacctgatactggtttatctatctcatttattgaagaaaaaaatcaactcattagaaaatacgatgcgcatgcaaaaatttgtgcttttatacctggcacgcagaaaagaggtcccctattcaaaggtcttcctacagttgaaaaacatcgttttgaacatcctcttattgctgcacaagaccttcaattaacgggtatatctgagattataattagtgacacgctattatcacacatttatgcggaacaattatctaatatgtggctatatcgacactttattttacacttagatcaactagactcctcatttacatcacaagttttaaagatacacacatcaagattagattcacctgaacatttaattcggtcccaatattctcgcacagataatcaacagactgtcccaatgataggatcggcacatagagatcaaggagatatcacaattgataatcacctgaatggtcgttatgaaggagaaattcaagttataaaagcttctatgccaggtcattcccacatcaattgtattggtcatgtttgtgataaagatgttccattgttatcactgattcaaccaggagatacttttaaatttgtatatacgaaggagaataacaaatga

SEQ ID NO: 2520 - DNA, 336 bp, Staphylococcus epidermidis
atgaattatttagaaatttcactacatattgaacaacaacttgttaaattactctctctgagtgaaagtgcgaaatactatgcactcatacatcataacaaatttgaatcttttatagatgatttcaaccttactgtaaatcaagagatgaaatgggcaatgtctcatcaattgttgttgaattctaatgatacgcttgtgtcatactgtcaattgattcgaaggttaaacgattccccacttttaactttaaaccaaggacatataatttattacattaatacacaacaaacactcattcaccgacagttacttaaacataaacaagccctttag

SEQ ID NO: 2521 - DNA, 747 bp, Staphylococcus epidermidis
atgaaaaaagataaaaaaaggcaaagttataggtttaaagatatagtatggcgtgatttcagtttaattgcgataggctttctatgtatatttatatttagctttataggtttaacaattgctgctatagcttttcaaaatattaatgaattacaacttactatgattggaactttaggacaatttatgtcatatattttagtgatattagctttttattttttacatatcaattcatttgtagatagagttaagagtggttttgactatttgaaaaagcattggttgtttataattatcgtcatgtgtgcatcttttattatttctaatgtttatgacaaattaattgaactattacctaaatatttgcaatatagtgaaacgcaaaatgaacttgaacttaatgaattatttaaaagtggtatatttatcccttttgcatttgtacttattgtaattgtaggacctattgttgaagaattggtatttagacatttgttaataggtgaactaggtaaaaagtttaactttattgtgatgggggttatatcagcattgtcttttacatatatacatgtgagtgatgctaagtccccatttgaatttggagcatatttaatactggcaatagcattagtatatgtttacttaaaatcgaatagaaacttagcttcatcaattagcttacatatgttaaataatttcatatcattcatttggacaattatagttgtattcagtaaatga

SEQ ID NO: 2522 - DNA, 690 bp, Staphylococcus epidermidis
ttgaataaattagaacgtcaaaatcgaataattcaaactattcaaagttctgacaaaattactgcttcgcaacttgcaaaacaatttaaagtatctaagcgaactattttacgtgatattgatgaattagaagatcaaggggtaaaagtatatgctcgtcatggcaaattaggcggttatcaaatcaaagatgcacatgctaaaatcaccttatcgttaactgaacagcaactttcggcattatttttaacactaaatgaaagtcagtcctattccactttaccttatcaaaatgaaattcgagcaataatcaagcaatgtttaaatttacctcaaacacgattacgtaaattgcttaaaaaaatagattattatataaaatttgaagattctaatcatgtcacattacctcatttattttctgatattttaatttattgcacggagcgcaatgtgatgttagtagatttaaatgaagatggtcaaactcaagctgaaaatgttatttttataggtttaatatgcaaaaatgccgtttggcatgctgttgtatttgaaatcggtagaggttacactcgtgaattatctatcatgaatattcaagatatctcatattcttttgaaaaaacgatacaaactcaagatatctcaattgaaaattatagacagtttttagcgccttctgaatga

SEQ ID NO: 2523 - DNA, 816 bp, Staphylococcus epidermidis
atgacagaactttatttaaaaaaattagatgaatatatatgtcaatggatacgcggtttagacaatatcattccgcgtttggttgagaagatggaaacatcaacaaaaaaagataggtttgatttagttaccaatgttgataaacaaattcagaatcattttcaaaactttcttcaggaatattatcccacacatcaattattagctgaagagaaagataactcagatataacaccttacgagggtcacctttggattatggatcctatagatggaacaagtaatttagtgaaacaacaagaagattactgtatcattataggatattttattgatggggaacctaaactttcatatatttatgattatccacatcaaagattatatagagcaattgctggtgtgggagcttacgagaacaatcaattaatgacattgccaaaaagaataggtttaagagatgcaattatttcatttaaaccacaagtgttaaaagaagagacgattcaatctttatttcaatcagcctttgattttagaattattgggtcttgtggtcttgattctattcgagtgataaaaggtcagttcggggcacacattaacacgaatcctaagccatgggatatttcagcacaatttctttttgcaagagaactaggtttgattatgacacaaataaatggtgaacctcttgattttagtacggcaggcccatttatcattagcaatcctggttgttacgatgatatgatacgtatcttaaatgaaggagaagcctattcaaagagtaatcatcatatagagcatggttaa

SEQ ID NO: 2524 - DNA, 951 bp, Staphylococcus epidermidis
atgcaaagatcagataaaagaaaaatgagcctgccgatgaaaatactactatgggtagtgggaattttatttctattagcaatcattgcagttatttatgtaagtgcaaaaatatttattacaggagacaagatacataaccccttaaatcgaaatcattctgaactacgttctggaaaagtaaatttaaaaaatggtgatccatttactattgcactctttggcgtagattctgatgaaaagcgaaaacaacaaggcggtggggaacgtagtgatacaatcatggtactttccattaatccgaaagaaaagaaaactgagctagtaagtattccacgtgataccaaagcagaaattgcaggtcgaggtactgaagaaaaaattaaccatgcctatgcttatggcggtcctaacatggctgttaaaacaattgaaaaattaatgaatgttccaatcgatcattacgctacgattgacatggatggactacatgacatgattgatacattaggtggcgtagatgtcgtaagtaatagtacatttacaatgggtgctaatcattttgttaaaggtgaaaaaacacatgtagatggtgatgctgccatggactttattagaagtcgtaaagaagatggtgcaggaggcgattttggtagacaagagcgtcagcaacttattttagaagcaatggcagataagatgacaagcgcatcttcaatcactcattttaatacattaatgaatcaaatccagaaaaatgttaaaacagatttaaaattaggtgatctcaatacaattagaactaagtataaagatgctaatgaccaagttaatcgacatcagttagagggtgaaggtggtatacaaaatgacggtttgtactatttcataccaagtgatgcatctaaaaatgaaaatacacaattactaagagacaatttaaatttataa

SEQ ID NO: 2525 - DNA, 2952 bp, Staphylococcus epidermidis
atgtctaatgagataaaaattaatctagatggtaaagattatcttgttgaagtagggacgaatttactcgaatttattcgttccagaaatacatttgtaccagccatttgctataacgaatcgatgggaccaattcaaacatgtgatacatgcatggttgaaatcaatggagatattgcccgagcatgtggaacatcgattgaatcctcaatgacggtaaatacatttaatcaccacgtgaaaactagccaaaaagaagcattagatcgtattttagaaaaacatatgttgtattgtacagtttgtgattataataatggcgattgtgaaatacataatacgatggataagtggggaatacaacatcaaacttataagtataagagaaaaccatatgaaaaagattatggccctttttatagatatgatccaaatcaatgtattttatgcggacgttgtgttgaagcatgtcaagatgttgaagttaatgaaacaatacgaatagattgggaaagagatcatccaagagtaatttgggataatgatgtcccaattaatgaatcatcatgtgtttcatgtggtcaatgtgcgactgtatgcccatgtaatgcaatgatggaagttaatatggaaggtaatgtgggatatctcacagatacagaacctggttcactagcatctatgattgatattattaaaaaatcagaacctggctacggtactttattagctgtatctgattctgaagcagaaatgcgtaaagaacgtgtcaataaaactaaaactgtttgtacatattgtggcgtaggttgttcgtttgaagtatggacgaaagatagagaaattttaaaagttcaaccttcccatgattctccagcaaataaaatagcaacatgtgtaaaaggtaagttttcatggggacacattaactcagatcaacgattaacgaaacctttagtgagaaaagaaggtatgtttcatgaagttgaatgggaagaagccttacaagttattgctaacaattttgaaagaattaaagagcaatatggcgcggatagcttgtcatttatttcttcatccaaagctactaatgaagaatcttatttaatgcaaaaattatctcgtcaagttattggtacaaataatgtagataattgttcgcgctattgtcaagcaccagcgaccaaaggattggtaagaacagtaggtatcggtggagatgcaggcgggattgttgatttagaaaaagcatctatgactgtattaataggtactaacacggcagaagcgcaccctgtaattgcttcacgaatgaaacgtgcacaaaagttatttggtcaaaagtcacatgtttttgatataagaaaacatgaaatggcagaacgtgcagatgctttttatcaacccaaacctggcaccgatttagcttggttaagtgctgtcactaaatatattattgataacaacttacatgataaatcgtttatagaaaagtgggttgatcactttgatacatattaccaatcactagaaccattttcaatggtatttgcagaggaagtaacaggaattccgcaagaacgattaatacaatttgcgcatgaagtagcaaaagctgattcagtagcgatatgttgggcgatgggtataacacaacaagatattggaagtgattcaagtacggctatttctaatttattactgattactggtaattatagaaaacctggtgctggagcatatcctttaagaggtcataataacgttcaaggatgtagtgacatgggtagtatgccagatcaatttccagggtaccaacttatcagtgatgataaaatacgtgctaaatttgaaaaagagtatggagtaaagctaaatgataaacctggtagagataatcatcaaatgattgaaggaatacataatggtgatattcattcgttgtatttgtatggagaagatacaggtatcgtagattctaatattaattttgttcaagctgcttttgaaaagttagactttatggtagttcaagatgagtttttaacatttacagctacgtttgcagatgtagttctaccagcaagtccttcactagaaaaagatggaacttttactaatacggagcgacgcatacaaagattgtataaagcattagattcgcttggagattcaaagccggattgggaaattttccaacttattgcaaatcgactaggggcgaattgggagtatcagcatccaagtgaaattatggatgaaattgcacgagtaacaccatcgtatgcaggtgtaagttatgatcgtttagaaggttttaatagtttacaatggcccgtaaataaagatggtaaagacactccaatactttatatcgatgggtttaattttgaaaacaagaaagctaaattatatccattaacctttgataactattttaaagaagatgaagtatatgatttacatgtcaataacggtcgattacttgagcatttccatgaaggtaatatgacgtatcaaacagaaatgattaaatataaagtacctcgagcatttgttgaaatttcacccgagcttgcacaaagtcgtgacattcatgaaggagctgaaattaaattgatttctgagactggagaggcttctttactagcacacattactgatagagtaaaaggaaaagaaatatatattccattaaataatgatgcattagaaaatggagatttaggtgctattaatgctcttacgaatagtgacgtagatccttatacagatacgccttcctacaaacgaacacatgcacgaatggaagttgtgacgaaaagaggcaaatctccattgaatccaatgaatttccgagttaataaacagcggcaaccacaatatagtgttcaagttcaaaaaaaatgggagcgctcagattatgtattcccaggaaagatgagtgattga

SEQ ID NO: 2526 - DNA, 471 bp, Staphylococcus epidermidis
atggcagagagaattactgaaattaaacgtttaaaaaaatcatatgagcaaattaaacaagaaagtttgaatgatgttatcgatgcaattgtagaaaataaagatagtattttaaaagcaatacgtttaattggtatactagatgaagctaaaattctggatgcattaaatggtggtttaaaagcaagacaagtcatcattaataaatttgccgttgaattgaataaagatatatattcaggcgttttaacaaatatggcacaacttgtctttttgctaggagaattagatgttaaagatttaagtgaattattatctcgtttaaacagagggatacatgctgcgaatctaacaaaacctggtgacaaaacaacaattaaaaatcttgttggatttttacgtgatgatgatctcaatcgtagtatgacttatatgttaaatctgcttagaggaatgtctagtaataactaa

SEQ ID NO: 2527 - DNA, 276 bp, Staphylococcus epidermidis
atgttattaaaaatcatagaaggagtgacgcatatcaatcctaaagtattaaaagctctagcaatcacatctaatgtactattagttattggaatcatttgtctaattatgctaaaactcatgttagctattgcattttttgttgtatcattaacaattagtctcgttatttttaatgttatgttcagacaccgtacaggtatgaaaattgcaattaatgtctctttctttatagtgatgattgctatcgtagtagcctattttgtattatcttaa

SEQ ID NO: 2528 - DNA, 777 bp, Staphylococcus epidermidis
atgttaaagaatactcggcttcgtatgacaacattgttcataattagcatactcgctattttagcaatactttttcttatatttgatacaaacctttttaaaaatgatgttaaacatacatttaaagaagcggtgtcacttcaaacaagtgaaggaaatatccatactaaagaagttaatggtaagtttatatatgcttccaaacaagatatagagaaagctatgcaaataaaacatagtgataacaatttgaagtacatggatatatcagaaaaagtacctatgtcagagaaggaagttaaccatattttaaaaggaaaaggtattttagaaaataagggatcaacgtttattaaagcccaagataaatatgaagtgaatatcatatatctcattagtcatgcactagttgagacaggaaatggtcaatcagatttatcaaatggaattaaagaaggtgaccatcactattataacttttttggtattggtgcttttgacgaagatgctgtaaagactggtaaaagttttgctaaacagaagaagtggaccactcctgaaaaagcgataatgggcggcgcgtggtttgtgagattccattactttaaaaataatcaattgaacttatatcaaatgcggtggaatccacaaaatccaggccaacatcaatatgctagtgatattcagtgggctaataatatagctgatttaatggagaaatactatgataaatatggaataaaaaaagatcatataagaaaaaaatattacaaataa

SEQ ID NO: 2529 - DNA, 1125 bp, Staphylococcus epidermidis
atgaaaatagcaatagtaggcgcaggtataggtggtttaactgctgctgcgttattagaagaacaaggtcatcaagttaaagtgtttgaaaaaaataattctataaacgaattgagcgctggtattgggataggagataatgttttaaaaaaattagggcatcatgaccttgctaaaggcattaaaaatgctggtcaaaatcttactgcaatgaatatttatgatgagcaaggcaccccattaatgagcgctaagtttaagactcattccctaaatgtcgcattatctagacaaactttaattgaaatcatacagtcatatgtcaaagaatcatctattcacacaggctttaaagttactaaaattgaacaaacgagttgtaaggttaccctacattttatcaaacaggaaagtgaatcatttgatttgtgtattggtgctgatgggatacattctgtagtaagagagtctgtaggtgcgcgaactaaaattcgttacaatggttacacatgttttagaggaatggttgaagatgtacaatttaatgaccaacatgttgcgaatgaatattggggtgttaaagggcgagtaggtatagtcccattaattaatcaacgtgcttattggtttattactgttcatgctaaagaaggagatccaaaatatcaatcttttggaaaaccccatcttcaagcatattttaatcactttccagatgaagtgagaaaagtgttagaaaagcaaagtgaaacaggtatattacttcatgacatatatgatttaaaaccgctgaagacattcgtttatggacgtactattttaatgggcgatgctgcgcatgccactacgcctaatatgggacaaggtgctagtcaagctatggaagatgcaattgtattagttaattgtttagaaaaatatgattttaataaagcgattgagcgttacgataaacttagagttaaacataccgcaaaagtgattagacgttcgaaaaagataggtaaaatggctcaaaagcatcataaattaactgttaaacttagaaataccgcgttgaaattgataccaaatgctttggcatcagctcaaacaaaatttttatacaaatccaaagaaaagtaa

SEQ ID NO: 2530 - DNA, 954 bp, Staphylococcus epidermidis
atgacaaaagtttatattgcaggcgcaatacctgaagtgggacttaacttattgaaagaacattttgaggtagacatgtatgatggcgaggggcttattgataaagaaaccttaaaaaaaggggtagaacatgcagatgcattagtaagtttactatcaacttctgttgataaagatattattgatagtgctaataaccttaaaattatagcgaattatggtgcaggttttaataatattgatgtcgaatatgcaagacaacaaaatatagatgttacaaatacaccacacgcttcgacaaatgctactgctgatttaacaatcggcttaattttatcagtagcgcgtagaattgtagaaggagatcatttatccagaacaacaggctttgatggttgggcacccttattcttccgaggtagagaggtatcaggaaaaactattggtattataggtttaggtgaaattggaggtgcagtggctaaacgcgcacgtgcatttgatatggatgtactttacactggtcctcatcgtaaagaggaaaaagagcgagatatcggtgtgaaatatgtagatttagatactttacttaaaaatgcagattttattacaatcaatgcggcatataatccttcactgcatcatatgattgatactgaacaatttaataaaatgaaatctactgcctatttaattaatgcaggacgtggtccaatagtaaatgaacaagctttagttgaagcacttgataataaagctattgaaggtgctgcattggatgtatatgaatttgagccagaaatcaccgatgcattaaaatcatttaaaaacattgtgcttacacctcacattggtaatgcaacatttgaagctagagatatgatggctaaaattgttgcgaatgatacaataaaaaaattaaatggtgacgaacctcagtttattgtcaattaa

SEQ ID NO: 2531 - DNA, 318 bp, Staphylococcus epidermidis
atggcttggttatttctaatgatagccggaagttttgaaattttgggtgttgttcttttaaacgagctatcacgtacaaagaataaaatttatgtcatttttttaggattagcatttatattaagctttagtacgttaaaatttgcaatggtatctattcctatggggactgcctacgctatatggacaggaattggtacagctggtggtacattgattggaatgattttttatggagagtctacacgtataagtagaattttatgtattttattaatcatcatttcagttgttggattacgtttaataagttattaa

SEQ ID NO: 2532 - DNA, 327 bp, Staphylococcus epidermidis
atgcaatggcttaaagttatattagccggttttattgaaatcatctgggtcaccggacttgatcaagcgcattcattgtttacatggatattcaccctcttttttattgctttaagcttttttctagtcattgatgcttcgaagcacttaccagttggtacagtatatgcattttttgttggaatcggtgctgttggtacagtgttagttgatatgattttcttcaaccaaccatttactttcactaaaatatttttaataatgacccttattttaggaataataggattaaaacttacaactgatgcaacgaaagaagggagataa

SEQ ID NO: 2533 - DNA, 474 bp, Staphylococcus epidermidis
atgaaaaaaatcaaaacaatctcgacattggtagctggacttggtatagcatttctaggtcacacaacacatgctgatgcggctgaaaataataatcaacaacaaagtacgtataactatagtacaactgatgtatcattttctaaatcaggaaatttatatacttctggccaatgtacttggtatgtttacgataaaactggtggaaaaatcggatcaacatgggggaatgcaaatagctgggcatctgcagctcaagcagcaggattcactgtaaataatacacctgaagaaggtgcaattatgcaatcatctgaaggtgctttcggacatgttgctttcgttgaaagtgtcaataatgatggttcaattactgtatcagaaatgaactatgatggtggtccattctctataagtacacgaacaatctctgccagtgaagcaagttcatataattacatccacctaaactaa

SEQ ID NO: 2534 - DNA, 495 bp, Staphylococcus epidermidis
atggacaaagaaacgaattacaatgaattagaatctaagaatgtgtctaatcaagcttcaacagacaatttatcgaatgacaatacaattcaccaccaatcaactattcaaaatgaggaaagtcaagataatcgtttaatggcaatgttaatttatttattaagtttatttactggtatcattggtcctttgattatttggttactcaaacgtaaagagtctcgacttgttgatgtatctgggaaaacgtatctgaactattttatttcttatactatctattcaacagtaggcgtgatatgtatgtttatgattgttcctttaatgaatataagtgaaagtttagccatcttattattaattttgctactggtggtagtcttcatcttattggcattgttaataatgtcatttgtgtgtacaattattgcttgcgtaaaatatatgtctggcaaaacttacactatcccactcacgataccgtttataaaataa

SEQ ID NO: 2535 - DNA, 1071 bp, Staphylococcus epidermidis
atgaaaatagctattgtaggttcaggtaatggtgcagtaactgctgcagtggatatggtagataaagggcatgatgtacgattatattgtcgtaatgaatctattagtaaatttgatgcggccctagaaaaaggtggttttgattttaataatgagggagaagagaagtttatagagtttactgatattagtgatgatatggagtacgttttagatggtgcagacatcgtccaagttattattccttcatcatttattgaatattatgctaaagtgatgtcaaaatttgtgacgaacgaccatctcattttctttaacattgctgcttcaatgggctcaatacgatttatgaatgtattagaagatcgtcatattgatgtacatccacattttgcagaagcaaatacattaacatatggtacacgtgttgattttaacaatgctaaagtagatttatctttaaatgttcgccgtgtgttcttttcaacatttgatcgtagtgagttaaatgaaagttatgaaaaggtatctaaaatttacgattatcttgtgaaagaagaaagtttacttaaaacgaatcttgaaaatggtaacccagaagtacatcctggaccaacattattgaacgttggacgtattgattactcagatgagttttctttatataaagaaggcataacaaagcatactgtgagattattacatgctattgagatagaacgtttaaatttagggagaaaattaggttttgaattatcgactgccaaagaatcaaggattcaaagaggttatttggaacgtaaagatgaggatgaaccgttaaatcgtctttttaatactagccctgtgttttctcaaattccaggaccgaatcatgttgaaaatcgttatttaactgaagatattgcatatggattagtattatggtctagtttaggacgtgtcattgatgtcccaacacctaatattgatgctgttattatgatagcttcaacaattcttgaacgcgatttctttgaagagggcctcactatcgaggaattaggcttagataaattaggattagagtaa

SEQ ID NO: 2536 - DNA, 1398 bp, Staphylococcus epidermidis
atgactcaaaagtatagatatcctacatttttagaatctatttcaactattttagttatggttgtcgttgtggtaatcggttttgttttctttgatgttccgatacaagtactattattaatttcttcagcttatgcagcattgattgcacatagagtggggttaaaatggaaggatttagaagaagggattactcatcgattgagcacggcgatgccagccctctttattattttagctgttggaatcattgtaggaagttggatgtattctggaacagttccagcgttaatttactatggacttaaatttttaaacccaagttatttattagtatctgcatttataatcagtgcaatgacttcaattgctacaggaacagcttggggatcagcatcaacagcaggcattgcactcatatcaatcgctaatcaattaggtgtaccagcaggtatggctgctggtgccattattgcaggggcggtttttggtgataaaatgtctccattatctgatactacaaatttggcagctctcgtaactaaagttaatatttttgctcatattaaatcgatgatgtggacaacaatccctgcatctataatagggttggctatatggtttattgttggattacaatttaagggagacgcaaatacacaacaaattcaaaagctattaaaagaattatcaacaatttataacttgaatttttgggtatggatcccacttattatcatcattttatgtttaatatttagaatctctacagtaccgtcaatgcttatctctagtattagtgctttagttattggaacattcaaccatcaatttaatatgaaagatggttttaaagcttcttttgatggatttaatcatacgatgctacaccagtctcatatttcggataatgccaagacgttgatagagcagggtggaatgatgagcatgactcaaatcattgtaactatattttgtggttatgcttttgctggtattgttgaaaaggcaggttgtttagacgtaattttagagacaatagctaaaggagtaaagtcagttggaacactaatattaataactgtagtttgtagtattatgcttgtatttgcagcaggagttgcttcaatagttattattatggtaggcgtacttatgaaagatatgttcgaaaagatgaatgtctcaaaggcagtgttatcgcgcacacttgaagattcaagtacaatggtattgccgctcattccatggggcacatctggtatatattatgcacagcaacttaatgtttcagttgatcagttctttatatgggcaatcccatgttacttatgtgcattcattgcaataatttatggctttacaggtataggaattaaaaaaataagtagaaaataa

SEQ ID NO: 2537 - DNA, 813 bp, Staphylococcus epidermidis
atgaaaaaattattcggaattattttagtattggctttaacgattgccttagctgcatgtggtggaggtaaagataaggaaaaaactatcacagtaggtgcatctccagcaccacacgctgaaattttagaaaaagcaaaaccattattgaagaaaaaaggttatgatttaaaaatcaaaccaattaacgattacacaacgcctaataaattattagacaaaggtgaaatcgatgcgaacttcttccaacatacaccatatttaaatactgaaagtaaagaaaaagggtataaaattgaatcggctgggaatgttgaattagaacctatggctgtatactcaaaaaaatataaaagcttaaaagatctacctaaaggtgcaacagtatatgtatcaaataacccagctgaacaaggtcgtttcttaaaattctttgtagatgaaggtcttattaaacttaaaaaaggcgttaaaattgaaaatgctaaatttgatgacataactgaaaacaaaaaagatattaaatttaacaacaaacaatcagcagaatatttaccaaaaatctatcaaaatcaagacgctgacgcagtaatcattaattctaactatgcgattgaccaaaaattaagtcctaaaaaagattcgattgctttagaatctcctaaagataacccatatgcaaatttaattgcagttaaaaaaggtcataaagatgatgaaaatatcaaagtattaatggaagtgctacaatctaaagaaattcaagattatattaaagataagtatgatggagctgtcgtacctgctaagtaa

SEQ ID NO: 2538 - DNA, 696 bp, Staphylococcus epidermidis
atgggtaaatcttacggtgaaatatttcatgaaatggtgacaatgccgaatgttcagtggccagaggtttggcaagcgattttagaaactctatatatgactgttgtttcgacactttttgcatttgtctttggacttatattaggggtattactctttttatctgcgaaaagtaactcattggctgctaagattttctacacgattgtgtcattcattgttaatttatttagagcaattccatttatcatattaattttactgttaattccatttacaagtgtacttctcggaacaatcagtggtccaactggtgcattaccagcacttattattggtgcagcgccattctacgctagattggtcgagattgcttttaaagaaattgataaaggtgttatagaagctgcttggtcaatgggagcgaacacttggatagttgtgagaaaagtactacttcctgaagcaatgcctgcattagtctcaggtattaccgttactgcaattgctttggtaggttctacagctattgcaggtgttattggcgcaggtggtttaggtaatttagcatatttaacaggatttactcgaaatcaaaatgatgtcattttagtttcaacagtatttattttaattattgtatttataatccagttcctaggggattggcttacaaataaaatcgataaacgctaa

SEQ ID NO: 2539 - DNA, 1026 bp, Staphylococcus epidermidis
gtgattaagctaaaccaaattgttaaacgctatcataccaaggacaaagatgttcttgctgttgatcacgttgatttaaacattgaatccggctctatttttggtgtgattggtttctcaggagctggtaaaagtacgctcataagaatgtttaacaacttagaatctccaacgtcaggtgaaatcattatagatggagacaatataagtcaattatctaaatcacagttacgaaaaaaacgacaaaaggtgagtatgatttttcaacattttaacttgctatggtcaagaaatgtattgaaaaatgtaacatttccattagaaattgctggcgttccaagtggtcgagctaaacaaaaagcattggaacttattgaacttgtcggtctaaaaggtcgagaaagtgcgtatccgtctgaattatcaggcggacaaaaacaaagagtgggtattgcgagagcattagctaatgatccagatgtattgttatgtgatgaggcgacaagtgcattagatccacaaactacagatgaaattttagatttattattgaaggtaagggaacaacaaaatctaactattgtacttataacacatgaaatgcatgttatacgaagaatttgtgatgaagttgctgtaatggaaaacggtaaagttattgaacaaggagcggtaagtaaagtatttgagaatccacaacatgaagtaacgaaacgttttgtgaaagatgatttaaacgatgattttgaagattctttagagtatttggagccattagatcatgatgcatatattgtgaggttaaactttactggtgataatacgactgagcctatcatatcttatatgacgaagacacataacatagatgtgaatattcttgaagcggatattaagaatactaaaaacggttcgcttggatttttagttattcacataccacatataagtgaggaacatttcaagcaatttaaacataatcttcacgaacaacacgttaatgtggaggtgctaagacatgggtaa

SEQ ID NO: 2540 - DNA, 297 bp, Staphylococcus epidermidis
atgaataaattgaaggatattgaagacataactgttaattttaataaagataaacatctcatatttggttatacaccaatgtgtggaacatgtaagatttctgaaaggatgttggatattgctaatgaaatcttacaattgccaataaaaaaaatagatcttaatttttatcctgaatggagtaaagagaaacaaattatgtctgttcctgtattgctgcttatgcgtagagatgaagagataaaaagaatctatgcatttcagtcagttacttatttgttagaaaatttaaaataa

SEQ ID NO: 2541 - DNA, 387 bp, Staphylococcus epidermidis
atggctattgtaaataaggttattattgtcgaaggtaaatcggataagaagagagtacaacaagtgatcgctgaacctgtaaacatcatttgtacacatggcactatgagtatagataagatagacaacatgatagaaacgctttatgacaaacaagtttatgttcttgccgattctgatgatgagggtgaaaaaattagaaaatggtttaaacgttatttaagcgaaagtgaacatatttatgttgataaaacgttttgtgaagttgctaagtgccccaaaaattatttagcacatgtattaagtagatatggttttaatgtaaaaaaagaaaagaaacttatgaataatttaaaaactgaaaggctagttttagtaaatgaataa

SEQ ID NO: 2542 - DNA, 381 bp, Staphylococcus epidermidis
gtggcagtaccgagcgaatttaaatattctaaagagcatgagtgggttaaaattgaaaataatgtagcaacaattggtattacagaatacgcacaaaacgaattaggtgatatcgtatttgttgagctacctgaaactgacgatgaattaaatgaaggtgacacattcggtagtgttgaatcagtaaaaacagtatcagagttgtatgcgccaatttctgggaaaattgttgaagttaatgaagaattggaagatagcccagaatttgtaaatgaatcaccatacgaaaaagcatggatggttaaaattgaaattagtgacgatagtcaattagaagaattattatcagcagatcaatactcagaaatgattggtgaataa

SEQ ID NO: 2543 - DNA, 354 bp, Staphylococcus epidermidis
ttgattaaattttatcagtatcccaaatgtacaacgtgcaaaaaagctgcaaagtttttagatgagcacgatgtgaattttgaatccattgatattgttcaacatacaccgactaaaaaagaattcaaagatatcgtagataaaacgggtgtgaatattaataagttgtttaatacacatggtatcaaatatcgcgaattaaatttaaaagagaaacttaaaaatatgtctgatgatgaaaaactagaactacttgcttcagatggaatgttggttaaacgtccattagctatctctggtaaccatttgactttaggatttaaagaaaatgagtatcaacaccaatggttatag

SEQ ID NO: 2544 - DNA, 324 bp, Staphylococcus epidermidis
atgaaaaatattcatcaaactgaagaatttaattctactattgatagtaccgatccagtaattatcaagtttgaagccgactggtgtccagattgtaaagcgatggatatgtggatagatccgattgttgaaaaatataataattatcaatggtatgtggtcgatcgtgacgaattagaagatgtaacaactgaaaatgatgttataggtatcccaagtattttaatattccaaaatggtgaaaaattagcccacttgcattcagcaaatgctaaatcacctgaacaagttgaatcattcttatctgaacatttagatcaataa

SEQ ID NO: 2545 - DNA, 543 bp, Staphylococcus epidermidis
ttggaattacaagaagctatatctaatcgtagaagcgtcaaaaaatttaaacacgatatggtggttgatgatcaaacggtttacgatgcaatatataaagctgctgacgctccaaatcatggtatgagagaaccatggagattggttcatatttcaaaagataaactcggtgattttagtagggatatcacaagatttgcttttccagatagtcctgaaaagcgagaggatcactttcatgcagtaacaaatttgggtggcatgttgttgttgattttaaaagatgatccaagacaacgtcaaagtcgtgaaaattattttgcatttggagcgtttgctcaaaatttaatgttacttttatacgaagcgggcattggtacttgttggaagtcgccacaatatatctttgatcctaaaatacgaaaagtcttaggtgtaaaagataatgaaatattagcaggatttttgtatcttactgatttagaagaagtaccaactaaggctaaacgtaaaaataaaaatcttattaccgaatttgaataa

SEQ ID NO: 2546 - DNA, 717 bp, Staphylococcus epidermidis
atgacccatgtagatatcgcggcgacaattgcaccagaagaaaagctttctaaaactttactcaatgatataaaaataaacgagaaatcaatagatatcgttgaattgcgcattgaccaatggccatcctttaataaggcattattaaaggaagtgattaagcaattaaaaatattccatttgaaaatattagtaacatatagaacttcaattcaaggggggaaaggagctgtaaatgagcaagagtatttaaatatattaggtgaattaattgagtgcccacaatttgatatgattgatattgagtggagcagtgccgtcaatattgaaaaatatatgcttcttgttcaacgtgcacaacaaaaagggcttgaagttgttctttcgcatcataattttcaagaaacaccggctttagatgaacttaaatttatttactttaaaatgcaaaagctcaatcctgattatttaaagcttgcggttatgcctaaaagtcaagaggacgtgttacatttattagaagccatgtcactgacagcgaagcacacatcatgccgaattgtcggtatatcgatgtctagtttgggtaaagtcagccgaattgctcaaggcgtatttggtggaacgctgtcttatggttgcatagaagaaccacaagcaccgggacagatacatgtctctaagttaaaatctttggtttcattttatgaggattaa

SEQ ID NO: 2547 - DNA, 423 bp, Staphylococcus epidermidis
atggcagttcaatatgaaactaaagcaactaacgtaggtggacgtaaaggtcatgtccatactgacgataacgcaataaatgtagatgtattaccaccacaacaagctgacggtaaagcgactaatccagaacaattatttgctgcaggttacgcttcatgctttaatggtgcatttgatttaattttaaaacaaaataaagtgcgcgatgctgaacctgaagtaacgttaacagtacgcttggaagatgatccagatgctgaaagcccaaaacttagcgttgatattcatgcaaaagttaaaaatgttttatcacaagaagatgctgaaaaatatttacaagatgcgcacgacttttgtccgtattctaaagctacacgtggcaatatcgatgtaaacttaaatgttgaagtagtagaataa

SEQ ID NO: 2548 - DNA, 501 bp, Staphylococcus epidermidis
atgaacaatatccgtttattgaatcaaaacgatttggattcctatattgaattaatgaaatttggtcaccataactatgaatgggatcgttactatttagaaaatgttggcattgatagactcaaaactatcctgtctaatcatactgattattggaatatatttggtgcttttgaagatgatgaacttgttgcaacatgtactttaaaacaaatgaattatgtaggtaaatgccacaaagctattcttgaaaataattttgttaaaaataatgatgaaattgttaaccgagaattaattaatcatattattcaatacgctaaagaacataacattgaaacattgatgattgctattgcatcaaataatataagtgctaaagtgttttttagttctataggtttcgaaaatcttgcttttgaaaaaaacgctagcaaaattggcgatgaatattttgacgaaaattggctcatttattcaacaactgagtcatcagaataa

SEQ ID NO: 2549 - DNA, 588 bp, Staphylococcus epidermidis
ttggttaaaacattatatctaatgagacatggtcaaacagtatttaacttaaaaggtaaaatacaaggggctagtgactcacctttgactgctttaggtgtacaacaagcgaatgcagcacaacaatattttaaaacgaaaaatattcattttgactatctttattcatcaccacaacaaagagcacgtgacacgttagagaacactgtgccaaaccaacaatattggtgtgtaaaagatcttaaagagtggggatttggattatttgaaggggaaagtatcgagttattaagagctattaaacaacctaaatatttgtatggtgatgctgttgtaccatttgaaggagaatcaagatctgaagttgaacaaagggttaatcgagcactctatgaaatgatggatacaacagatggagagacgattctagcagtgagtcatggtagcacaattggtttatttgtaagaaatatattagggtatgataggggaagtaaatttgaaataggaaattgtaacattgtaaaatttgaatacgatggagaagaatttatatttaaagatataattaaccccattaaaaaatag

SEQ ID NO: 2550 - DNA, 237 bp, Staphylococcus epidermidis
atgtctgctcatagtcaatgtaactatgtcaatcctaattcaatttctttagattgggaatgtttaattataagcaaaacagatatgctacttgatggtgtacctaaagaattaattaatacttggttagatcaaaatgttatcgagccgttttgtgttcgtaataatgaaataaactttaaaactaaagatgtttggaatgcgcttaagacccataactggtattattcaaattaa

SEQ ID NO: 2551 - DNA, 204 bp, Staphylococcus epidermidis
atgtctttttatgattttattttaggatttatcaatgacgatacaccactaggccatttagcacaatacattttaaatgatgctggtttcccaaaggaagagaaaaacaataattctataagaacttatgtgcttcttaattataatgatcgtcagttaatcgaaagtacaaatcgtgcaattagtttatatcaattaatttga

SEQ ID NO: 2552 - DNA, 189 bp, Staphylococcus epidermidis
atgagcttacatttccaaattttgctgtgtctttctatcttatttatcatcgcaggaacgatattattggtaacaatgcttaaaactaaaagagaagaacgaaaagaatcttatctaggttttactgtaattttcttaatctttggttttgctatcttaatttatacttttatattcggaattttataa

SEQ ID NO: 2553 - DNA, 555 bp, Staphylococcus epidermidis
atgaaattaacatctaaaagcatatacttatcatttatattttttatttttagtctcatgttatttaccaaccaaagttttgcaaatgataataaaagttttcagctaaaaccaggtgatattattattacaaaaggtcctgttttaaatggtttttttggtcactgtagtttggcaattgatcatgacactgtacttcaaattgaaggccccggggataaaccattaacggaagattttgaatcttatcgtgacagatatggaaaaggtaaaaatgaatggataaaagtctatagatgttcacaccctaacgctggatcaaaagcagctcaatgggcaaagaatcattatgagaacagtgatagcgaatatcttgttacactcaacttaaaaagcaaaacatttacatattgcactaaaattatatatcaagcatataaatacggggtagacaaaaattccgtaagtgatcacggtttatatattatttcaccctatgcgctaacagataattttacagatgaatataaattaaaattagtaaaaacatattaa

SEQ ID NO: 2554 - DNA, 234 bp, Staphylococcus epidermidis
atgaataaaaatctattaaaaaaatacttgaatgatgatagtttcaaagcagttgtcgttgttattgggaataagagaattgtattagagaatgatattcatgttgattatgaaaacgaagttattatttatccatgtaaaaattgtacacgtattataccgtttagttcaatttcctatttagaacttattgataagcaagaccaatttattaacttttttaaagaaggatga

SEQ ID NO: 2555 - DNA, 747 bp, Staphylococcus epidermidis
atgagaaacaaagacaatcagcattcgagattatattatattattttgacaatcgttattatcgcaatttgtgttgttgttgtaatactttttaatactttaaagacaaaccgttctcattctacggatggatacgcagattttactgaattaaaaaaagatacgataaaaaataaagattggcgtattaaaacaaaacaccgtaaaaataaggatattttagtcactgcaattcacggtggaggtatcgaacctggtacgactgaaattgcacgacgtatttccaatgttggaaaatataatttttatacctttgaaggtcttcgaaaatctaataacgatcaactacatgtaacatccactcattttaacgaacctatattagataagttacttaaaaacactaaagaaacattatctatacatggattctctggagatgaccctattgtttatatcggaggtaaagataaagagatgtctcactctatcgcaaaagaattgcgtaaaaaagactttactgtaaaagaaagtcctaacagaatcgatgcaaagtcatcagataatatagctaataaaaatgaatctaattcaggtgtccaattagaactcacgactgcattgcgaaaacagtttttcaaacattataaattagatcgacatacacgtagtgattcagataaatatactaaagatttttacaaatttgcgaacgcagtgcaaaaaggtgtcgaaaaggtaaattaa

SEQ ID NO: 2556 - DNA, 285 bp, Staphylococcus epidermidis
atggaaaaccttacaaaagaacaaaaatatacaatagctaaattttataaattatatatggaaaggtctaatgcggggcaaccagaagaagaagctaatcattttaaagattctgtaacggcacaagatgattatttttgtgatagaaaatatgaagatttcattcataactgtaaagtcttaataaatgaaggttacttagatggcgaggttgaagataacaaaatatataatattcaggttacaacaaaagcttttacagaaattgagcgtagctttggttaa

SEQ ID NO: 2557 - DNA, 225 bp, Staphylococcus epidermidis
atgaaagactggacaattaacaatcactccaaacgacaattgattattcaaaacaatcatgatgatatttcgattatagaaccattgcgaaatggttcttttaaaatacttgctgaatttaatgccttaaatacagattacattcaaatttatgaccacacacttgttgtttctatacatgagaaagagattagtgtgtttgatcgatcgtcacagtcaatttaa

SEQ ID NO: 2558 - DNA, 201 bp, Staphylococcus epidermidis
atgaataacggtacagttaaatggtttaatgcagaaaaaggttttggtttcatcgaaagagaaaatggcggagatgtattcgtgcatttctcagcaatcgttgaagatggatataaatctttagaagaaggccaaagcgttgaattcgatatcgtcgaaggtgaacgtggtgagcaagctgcaaacgttgttaagatgtaa

SEQ ID NO: 2559 - DNA, 942 bp, Staphylococcus epidermidis
atggaaaataaacctgattattttcaccacattgaacatagaaagtttcaaagtagctcaaaaattacattatggttatctttagttattactatgatattcactgtagttgagttcgtaggaggtattgtgtcgaattcactcgcgttactctctgactcatttcacatgctaagtgatgttctagcattaggtttatcaatggtagcgatttatttctcgagcaagccacctacaaagaactatacatatggttttttacgcttggaaattatcgtagcttttctcaatggcttagcacttattgttatttcactaggaattatgtatgagggtatcatgagaattatacaccctagacctgttgaaagtggcattatgattctaattgcgtttattggtttaattgccaatatcgtattgaccatcattttaatgatttctctaaaaaaagagaataatattaatattcaaagtgcattatggcattttattggtgatttattaaattctttaggtattattgtggcgtttgtgttgattcattttactggatggaacattgttgacccaattattagtattctcatttcattgattattttaagaggaggatacaaaattattaaaaatgcttcaaaagttctgatggagcgtgtgccggatcgatatgatacagatgaaattatgggagcaatgaaagatgttgaaggcgtgatagatattcatgaattccatttatggagtgttacaactaatcaaagttctttaagtgcacatgttgtactaagtgatgactacattaaatcgccttatgctacaataaataaagtttcggatttgttaaaaacacaatacggtttagaacatgtaacacttcaaattgaaaatataaacctcaatcatttagatgaggagtatttcaaacaacttcaagaatag

SEQ ID NO: 2560 - DNA, 126 bp, Staphylococcus epidermidis
ttgagttataaaaagttagagaagttacaaacgaatactcatttaagttatttaaatgggattaagggtataataactttaaaattaaacagacgtaaaaagatggaggaaagacatggaaaataa

SEQ ID NO: 2561 - DNA, 504 bp, Staphylococcus epidermidis
atgaagcatcaaaaaaatcagagcaggtttaaactactaatagctggcataatagcaggacttttatctggtgtagtcaaactaggttgggaggtaatgttcccaccccgaacacctagtagagatgccactaacccacctcaacaactcttacaattactaggaataccgtcaaatattacccatctcacatacaatttttctgagcatgcattaccttggataagttttatcgtacactatagtttttctatcgctattgcaataatctatatttatatcgcaaagaaatatacaaaaatcacactaggttatggtgctttatttggtatagttatttggattgtttttcatttaatcttaatgccaattatgcatgtcgtaccgaatgcttttgatcaaccattttcagaacacctatcagaattttttggacacattgtttggatgatggttatagaaatggtcagaaggtatttctataatattcaattaaataaataa

SEQ ID NO: 2562 - DNA, 162 bp, Staphylococcus epidermidis
gtgacttatgattctgaaaactctcaaaatacaattcaaactcaagaacaagctattgatgaaagtaataattctaaagatactcaatataatcaaaattcaaatacaacttcaacaattcgcaataacaacctaactacaatccaaataacaaatatttga

SEQ ID NO: 2563 - DNA, 417 bp, Staphylococcus epidermidis
atggaattatatagtatgcctatgtttaataaatttttagttaacgacatagataaatcatcggaatggtatcaagagaatttaggttttaaaagtatttttaaatttaaaaatgaacaaaatcaaattttaatggagcatttacgattagcaaaatatcaagatttgatgttaatttctggcaaacagtttgaagtcggtaatgcagtttatacaaatatacttgtaccaaatattcgaattttaaaacaacgaataccttctcaatatatcgtggaagatcttgaagaaaaaccatggaattctattgaaatgacaattaaagatttagataatcatttaattacgcttacacaaagtaacataaaaaatgaagaatttaatgctttgatgcaacatacttcaaaaacattttaa

SEQ ID NO: 2564 - DNA, 345 bp, Staphylococcus epidermidis
atgcgtagtgtaattaagttggaaaatacatttatattcataatcacaatcgccgtttatgttaaattagaattttctatatggctgtttttacttttactattagttccagatatatttatgttaggatatgtgattaatagaaaaacagggagttatgtttacaatattggacacacgtatatcacacctataattatcgcgctattatatttatacattgatgaaaggttactattacagattgctttaatatggttagctcatattagtatggatagaactttaggtttcggactcaaatattcatcagatactgataaaacgataatacaaaagatgtaa

SEQ ID NO: 2565 - DNA, 1308 bp, Staphylococcus epidermidis
atgagcaaagtaaataaacctttatatttctatcttatgttatttctgttgacaactttaattggtgcttttctactctatttgccctatacagggaagaaacctattaactttattgacgcattgtttgtagcttctagcgcattcacagtaacaggtctatcaccagttgatgttggaacacaatttaatatttttggagaaatcattatcttattacttatacaaattggtggattaggtattgtcactgtagcaatgctaactctcatctttttaaataagaaaatatcaattaacaatagaattttatttatgattacttggaatattgacgaacccggtggtgtaattaaacttattaaacatctagccatatacagcatcgccactgaattatttggtacactttgtctatgtttatcgtttattccaaaatttggcataggtaaaggtctatttttaagtttattcacttcagtttccgcatttaacaacgcaggattcgccctttttaaaaacaacttaatcgatttttcaaatgatccggtaatcattatcactattccaatacttatcattttgggaggtttgggacatttagtcgtggttgatttgtggaacgccaaaagttttagaaaattatccttacactctaaactcgtgttaactaccactggattattaattttgataggcacggttttcttctttttactagaaaatcaaaactctatgttacacatgggattaattgaaaaaataggaaatgcatttttccaatcagtgacaacaaggactgcaggatttaacacaattgacgttggaaacattaaaacaccgacagctttattacttatggctctcatgtttattggaggtgcaccattgagtgctgcaggtggtataaaggttacaacttttgttattgcaacaatcgctatttttaatacgatacgcaaagaaaaaaacaactctatatttaatagagaaatatcagaaagatacatacagttgtctttcgtaactattctcatttctattgcatttatcggtatggttacgtttatacttaccataatcaattccaatatacctttaatcaaaatactcttcgaagtcgtatcagcattcggtacagtcggtctcactatggatttaacttccgaatactataattggactgagtttattattatcatcgtaatgttatgtggtaaaattggattactgaatattagtagagcgcttgttccacctaaagaccctaaaaattatagatataccaaaggacacattcacttataa

SEQ ID NO: 2566 - DNA, 234 bp, Staphylococcus epidermidis
atgaaatttagagaatggacaataacgattaacggaaaagggcctataaatgttgtagccaatgaagatactttactcatattacagaaatatcaacatgtcgaagtagcattaaaaatagataatgagacggttcaagttaaatctctcggttataacgaagatataattattaaccataatactaaagaaattacgattaatgtaaccaactttttagaagatgatgaataa

SEQ ID NO: 2567 - DNA, 171 bp, Staphylococcus epidermidis
ttgagtttaaaggaaatatggaaagttctcataaataaaaaatggcaaactgaagaaatatgttatttaatattgtatatatttttagcgagtatttttaccacgccattgtttggtattcctttgggagttttagcatacttatatcttaatgaagaaatattgaagtag

SEQ ID NO: 2568 - DNA, 126 bp, Staphylococcus epidermidis
ttgaatatttacattgccatcgtattaggattaatttttgtattcttatctgatatggattatagaaggagaaacaatagtacaaatatggataagaaaatgataaagattagcttttttacatag

SEQ ID NO: 2569 - DNA, 543 bp, Staphylococcus epidermidis
atgaaattgaaactattaggaacattagcactctcgtcaataatattaacagcatgtggacaagaaaatgtaaaaaaaacagaaagcaatccaaaagaagaacaaaataaaacggataatatgcaaactaatgggagcgtaacaaattctaatagtaatcaaaaacaaaaaacagctcaaaaacaaatttccgctcaagaagcagaacaaattgtctcgaactattacattaataaagggattaataagcaacaagttcttgaatttaaaacaaatatagatagaagcaatgctaatgaatattatgttgaacaccttgtaagagatgcagccggaactcctataaaattttgtgctgtagtaaacaaaagtacaggtgaagtgatcaatcgatttaatgacatgaatgaggaagaaatgaaggaatttgaggaatttaaaaaaagaagtcctaagtaccataattctggtgaagaaaaaaataaaatgcaagaaaattcttcatcttccgaacaacaagaagtccacaattctgttatataa

SEQ ID NO: 2570 - DNA, 180 bp, Staphylococcus epidermidis
ttgtttgattcaatttcaaaattatcaattaatgagacagttggtgatggtgctgaaataaatgacgttgtaaataaacgtgatgaatataaagagagtatacggtattataataatcatttagttttagtgaagtataatgaaaaatctatatgtaagttaaaatatcttcgaaattag

SEQ ID NO: 2571 - DNA, 495 bp, Staphylococcus epidermidis
gtgcacgtaagggcgaaattagagccctcacatggcgtgatattaactacgatgatgagtttcatacatataaacaaaacagactatcacggtgaagtgacagcccctaaaacaaaagcagcaatacgtgatatatatttacctgttcatatgatgaatgatatcaaagaatatttaaaatggtacaaagaaaacaatgtatataaagatgactatgtattattcggtacattcttcaaagctagcgaatcaactatagatcgtttgtttaccactgcattaaaaacattagatgaacaactgccagacggtcagaagttctctagaatcgttatacatgaattaagacatagccatgcgtctatgttagtcaatcacggtgcaagtatcatggtgatagctcaaggtttaggccatgcaaatagcaacgaagtatataacagatatggccatttatatcccagtacacaaaaagaaatagtaaaatacttataa

SEQ ID NO: 2572 - DNA, 231 bp, Staphylococcus epidermidis
atgaaaatatttaattggaatattattaatgaaactagtttcgatattacttgtgactacttttcaaaagatataatcattgttgataaagcaacaaatagacaactcgtatactttaagtacaatattaaggaagatatttatactgaagatgaaaaggttcataaagtaattacacaaattaatactatggataaatcaatcacgatttatgataatattgcgtcctaa

SEQ ID NO: 2573 - DNA, 471 bp, Staphylococcus epidermidis
gtggctaagaaaaaatcaaaatcaccaggtacgttagctgaaaatcgtaaagcaagacatgactacaatattgaagatacaattgaagcgggtattgctttaagaggtactgaaattaaatctatacgtcgtggtagtgccaatttaaaagatagctttgcgcaagtgagacgaggcgaaatgtacctgaataatatgcatattgcaccatatgaagaagggaaccgttttaatcatgaccctttacgtacacgtaaattactcttgcacaaaaaagaaattcaaaaattaggtgagcgtacacgagaaataggttattctattattccgttgaagttatatttaaaacatggtcaatgtaaagttttattaggcgttgctagaggtaaaaagaaatacgacaaacgtcaagcacttaaagaaaaagcggtaaaacgagatattgatcgcgcagttaaagcccgttattaa

SEQ ID NO: 2574 - DNA, 2379 bp, Staphylococcus epidermidis
atgaatttaaagcaatccatcgaagaaatgataaaacaacctgactatgaacccatgtcagtatctgactttcaagatgcgttaggtttaaacagtgccgactcatttagagatttaattaaaatactcgttgaattagaacagtctggtttaattgaacgtacaagaacagacagatatcaacgtaaacaatccaacaaaacaaattcaaaactaatcaaaggaacgttaagtcaaaataaaaaaggctttgctttcttaagacctgaagatgacgagatggatgatatttttattccaccaactaaaatcaatagagcattagatggagatactgtcatcgtggaaattcaaaaatctcgtggagaacataaaggtaaaattgaaggtgaagtaaaatctattgaaaagcattcagttacacaagttgttggaacgtatagcgaagcaaagcattttggtttcgtattaccggatgacaaacgtattatgcaagatatctttatacctaaaggacaaaatttaggtgctgtagatggtcataaagtattagtacaaattacgaagtatgccgatagtactgacaatccagaaggccacgtctcagcaatattaggtcataaaaatgatccaggtgtagatatactttccatcatttaccagcatggaatagaaatcgagtttccagatgatgtattacaagaagctgaagaagtaccggatgtaatagaaccatctgaaatcgaagggcgtcgtgatttaagagatgaattaacaatcactatagatggcgcagatgctaaagatttagatgatgccattgctgtaaaaaaattaaaaaatggcaacaccgagcttacagttagtattgcagatgtaagttactatgtaaaagaaggatcagctttagataaagaagcttatgatcgtgcgacaagtgtgtatcttgtcgatcgagtaatcccgatgattccacaccgtctaagtaatggaatatgctcattaaatccagaagaagatcgtttaacattaagttgtcgaatggaaataaatgaacgaggcgaagttgtaaaacatgaaatctttgatagtgtaatacattcaaactacagaatgacatatgatgcagttaacaaaattatcactgatcaagattctgaaatacgttcacaatataaagatttaacacctatgttagatttagcgcaagatttatcaaatagattaattcatatgcgcaaacgtcgtggagaaattgattttgatattaatgaagcgaaagtacttgtgaatgacgaaggtattccaacagaagtgctaatgagagaacgtggcgaaggagaacgtttaattgaatcattcatgttagcagccaatgaaacagtagctgaacacttcaataaattggaagtaccatttatttatcgtgttcatgaacaaccaaaatctgaccgattaagacagttcttcgactttattaccaatttcggtattatgataaaaggtacaggtgaagatattcatccaacaacattacaaagcattcaagaagaagttgaaggtagaccagaacaaatggttatttcaacgatgatgttacgttctatgcaacaagcacattatgatgatgttaatttaggacattttggtttgtctgctgagtactatactcactttacgtctccaatacgccgttatcctgatttaacagtgcatagattaattcgtaaatatttaatagagaattctatggataaaaaagaaatacgtcattgggaagagacgttgccagaattagctgagcacacatcacaacgtgaacgccgtgccattgaagccgaacgtgatactgatgaattgaaaaaagctgagtatatgattcaacatattggtgatgaatttgaaggtatcattagctcggttgctaattttggtatgtttatagaattacctaatactattgagggtatggttcatatcgctaatatgacagacgattattatcattttgatgaacgacaaatggcactaatcggtgaacgtcaagcaaaggtctttcgcattggtgatacggtcaaagttaaagtgacacatgttgatgtggaagaacgcatgatagatttccaaattgttggcatgccattacctaaaaagacatcatcacaacgacctgctcgtgagaaaaccattcaagctaaaacacgtggcaagtcgttagaccacactaaaagtgatcgtaatggtaaaggtaaaaagaaaaaacgtaagcaacgtaaaggtaaaaatgcacgtaaaaaagataaacaaggtaatacgcatcacaaacctttttataaagataaaagtgtgaagaagaaatcgcgtcgaaagaaaaaatag

SEQ ID NO: 2575 - DNA, 741 bp, Staphylococcus epidermidis
atgcaaattaaactaccaaaaccattcttttttgaagaagggaaacgtgcagtgttacttcttcacggctttacaggtaactctgctgatgtaagacaacttgggcgttatcttcaaaaaaagggctatacatcttatgctccacaatatgaaggacatgcagcgcccccagaagaaatattaaaatctagcccttttgtttggtttaaagatgttttagatggttatgattatttagtagatcaaggttacgaagaaatagcagtagctggtttatcattaggtggcgccttcgcattaaaactaagtttaaatcgtgatgtgaaggggattataactatgtgtgcacctatggagaataaaacagaaggttcgatttatgaaggctttcttgaatatgcacgtaactttaaaaaatatgaaggcaaagatcaacaaacgattgatcaagaaatggaacaatttcatccaactgaaaccctgagagaactgagtgacactctaaatggagttaaagaacatgtcgatgaagtaattgatccaatacttgtcgtacaagcagaacaagatacaatgattgatcctcaatcagcaaattatatatataatcatgtcgattctgatgaaaaagaaatcaaatggtatcaacattcaggtcatgtgattaccattgataaagaaaaagagaaagtctttgaagatgtatatcaatttttagaatcattggaatggacagagtaa

SEQ ID NO: 2576 - DNA, 234 bp, Staphylococcus epidermidis
atgcatacattaatcatcgttttattaattatagattgtattgcattagtgactgttgtattactccaagaaggtaaaagtaatggactttcaggtgctattagtggtggcgctgaacaattgtttggtaaacaaaaacaacgtggcgtcgatttattcttgcatagattaacaataattttagctattttattctttgtacttatgttttgtattagttacttaggtatgtag

SEQ ID NO: 2577 - DNA, 459 bp, Staphylococcus epidermidis
atgacagactcaaatgctaaagaaataagaactggacgtttaattgcgataagttcattagtgttttgtattttacttatcatacaccactttattgtattagatgaatcaacagctaaatcaattttatctttagctggtcaaaaaacatcagatacagcagtgaaaaacattttaaatagtgaccgatacactggaattatgtatattttagcttacttagcaggtactgttgctttctggaatcgccatccatatttatggtggtttatgtttgccgtatatatttctaatgcactatttacactcgtaaatctttacttatttattcaaggtattttagatgtaaaaaatgtacttgcagttttaccaattttaattgtagtgattggatctataattctagcaatttatatgctagttgtttctattacacgtaaaagtactttcaatagatag

SEQ ID NO: 2578 - DNA, 1305 bp, Staphylococcus epidermidis
atgccaattattacagatgtttacgctcgcgaagtcttagactcacgtggtaacccaacagttgaagttgaagtattaactgaaagtggtgctttcggacgtgcattagtaccttctggtgcttctactggtgaacatgaagcagttgaattacgtgatggagataaatcacgttatttaggtaaaggtgtgactaaagcggtagaaaatgttaacgaaatgatcgcaccagaaatcgttgaaggtgaattttcagttttagatcaagtatctattgataaaatgatgattcaattagacggtacacacaacaaaggtaaattaggtgcaaatgccattttaggtgtttctattgccgtagctcgtgcagctgctgacttattaggtcaaccattatataaatatttaggtggatttaatggtaaacaattgccagtacctatgatgaatattgttaatggtggttctcactcagatgcaccaattgctttccaagagttcatgattttacctgtaggtgctgagtcattcaaagaatcattacgttggggtgcagaaatcttccataaccttaaatcaatcttaagtgaacgcggtttagaaactgcagtaggtgatgaaggtggtttcgcacctagatttgaaggcactgaagacgctgtagaaactattattaaagctatcgaaaaagcaggatacaaaccaggtgaagatgtattcttaggatttgactgtgcttcttctgaattctatgaaaatggtgtttatgattacactaaattcgaaggtgaacacggtgctaaacgtagtgcagcagagcaagttgactacttagaagaattaattggtaaatatccaatcatcactattgaagatggtatggatgaaaacgattgggaaggttggaaacaattaactgatcgtatcggtgataaagttcaattagttggtgatgatttattcgtaactaacactgaaattttatctaaaggtatcgaacaaggtattggtaactcaatcttaatcaaagtaaaccaaatcggtacattaactgaaacattcgatgctattgaaatggctcaaaaagctggatatactgcggttgtatctcaccgttctggtgaaactgaagatactacaattgctgatatcgcagttgctacaaatgcaggccaaattaaaacaggttcattatctagaactgaccgtattgctaaatacaatcaattattacgtattgaagatgaattatacgaaacagctaaatttgaaggaattaaatctttctacaatttagataaataa

SEQ ID NO: 2579 - DNA, 1518 bp, Staphylococcus epidermidis
atggcaaaacaaccaactgccttaatcatcttagatggtttcgcaaatcgtgaaagtgaacatggcaatgcagttaagcaagcacataaacctaattttgatcgatattatgaaaaatatcctacaacacaaatagaagctagtggcttagatgtaggtcttcctgaaggtcaaatgggtaactctgaagtaggacatatgaatattggtgcaggacgcatcgtatatcaaagtttaactcgtattaataaatcgattgaagacggagaattctttgataacactgtattaaataacgctgttaaacatgttaaagacaatggctctgcgcttcatgtattcggattgctttctgatggtggtgtacacagtcattataagcatctatttgctattttagaattagctaaaaagcaaggaatagataaagtatatgtccacgcatttttagatggtcgtgatgttgatcaaaaatctgctttgaaatatatagaggaaactgaagataaatttaaagaattaggtgtaggccaattcgcttctgtttcaggacgttattatgctatggaccgtgacaagcgttgggatcgtgaggaacgtgcctataatgctattcgtaactttgaaggtcctacatttacttcagctaaagcaggcgttgaagctaattataaaaatgatgtgactgatgaattcgtcgaaccgtttatagttgaaggccaaaacgatggtgtgaacgatggagacgcagtaatcttttataatttccgtccagatagagcagctcaactttcagaaatctttactaataaagcgtttgatggatttaaagttgaacaagtggacaacttattctacgctacattcacgaaatataatgacaatgtagatgctgaaattgtatttgaaaaagttgacttaaataatacaatcggtgaagttgctcaagataatggcttgaaacaattacgtatcgctgaaactgaaaagtatccacatgtaacatactttatgagtggtggacgaaatgaagagtttgaaggagaacgtcgtagactcatcgattctccaaaagtagcgacttatgatttaaaacctgagatgagtgcatatgaagttaaagatgcattattagaagagttagacaaaggtgacttagatttaattctactgaactttgctaacccagatatggttggacatagtggtatgcttgaaccaacaattaaagcaatcgaagcagtagatgagtgtcttggtgaagtcgttgacaaaattattgatatgggtggtcatgccatcatcactgcagaccacggtaactcagatcaagtattaactgatgacgaccaacctatgacgacacacacaactaatcctgttccagttattgtaactaaagaaggtgttacattaagagaaactggacgtttaggcgatttagcgccgacattattagatttattaaatgttaaacaaccatctgaaatgacaggtgaatcactgattaaacattag

SEQ ID NO: 2580 - DNA, 762 bp, Staphylococcus epidermidis
atgagaacaccaattatagccggaaactggaaaatgaataaaacagttcaagaagctaaagactttgtaaacgaattaccaacattacctgatcctaaagaagtagaatcagttatttgtgcaccaacaatccaattagacgctttagtaacagctgttaaagatggtaaagcaaaagggttaaaaattggagcacaaaacgcttactttgaagaaagcggtgcttatactggagaaacttcaccagtagcattatctgaattaggtgttaaatatgtagtgattggtcactcagagcgtcgtgactatttccacgaaactgacgaagaagtaaacaaaaaagcgcatgctatcttcaatcacggtatgacacctattatttgtgtaggtgaatctgatgaagaacgtgaagctggtaaagcaaataaaatcgtaggtaatcaagtgaaaaaagctgtcgaaggtttatcagatgatcaacttaaagaagttgttattgcatatgaaccaatttgggctatcggtactggtaagtcatctacatctgaagatgcaaatgaaatgtgtgctcacgtacgtcaaacattagctgacttatctagtcaagaggttgctgacgctacacgtattcaatatggtggtagtgttaaacctaataacattaaagaatatatggctcaatcagatatcgatggcgctcttgtaggtggcgcatcattaaaagttgaagatttcgtacaattgttagaaggtgcaaaataa

SEQ ID NO: 2581 - DNA, 1191 bp, Staphylococcus epidermidis
atggctaaaaaaatcgtttcagacttagatttaaaaggtaaagttgttcttgagcgcgctgattttaacgttccaattaaagatggtgaaatcactaatgacaacagaattgttcaagcattaccaacaatcaaatacattattgaacaaggtggtaaattagttttattctctcacttaggtaaagttaaagaagaaagtgataaagaaggactttcacttaagcctgttgctgaaaacttatctaagcaattaggtaaagaagttatattcgttcctgaaacacgtggcgaaaaacttgaaacagcaattgaaaacttaaatgaaggcgatgttttattagttgaaaatacacgtttcgaagatttagatggtaaaaaagaatctaaaaatgatcctgaattaggtaaatattgggcgtcattaggtgatgtatttgttaatgatgcatttggtacagcgcaccgtgaacatgcgtcaaacgtaggtatttctactcatctagaaacagcagctggttacttaatggaaaaagaaattaaatttattggtggcgtagtgaatgatccacaaaaaccagtagttgctattttaggtggcgctaaagtttcagataaaattaatgttatcaaaaatttagttaatatcgcagataaaatcttaatcggtggcggtatggcttatacatttattaaagcgcaaggtaaggaaataggtctttcattattggaagaagacaaaattgattttgctaaagacttgttagagaataatggcgatcaaatagtattacctgtagattgtaaaatcgctaaagaattttctaatgatgcaaaaatcactgaagtatctatcaatgaaatcccttcagatcaagaagcaatggatattggacctaaaacagtagaattatttaataaagaattacaaggtgcacatactgtagtatggaatggacctatgggtgtattcgaatttagtaattttgctaaaggtacaatcggtgtatgtgagtctattgctaaattggaagacgctactactattattggtggtggtgactctgccgcagcagcaatttcattaggtttcgaagatgactttacacacatctctactggtggaggagcatcattagaatacttagaaggtaaagaattacctggtataaaagctattaatgataaataa

SEQ ID NO: 2582 - DNA, 1011 bp, Staphylococcus epidermidis
atggcaattaaagtagcaattaatggttttggtagaattggtcgtttagcattcagaagaattcaagatgtagaaggtcttgaagtagttgcagttaacgacttaacagatgacgatatgttagctcatttattaaaatacgatactatgcaaggtcgtttcactggagaagttgaagttatcgaaggtggattccgtgttaacggtaaagaaattaaatcattcgatgaaccagatgctggtaaattaccatggggcgatttagatatcgacgtagtattagaatgtactggtttctatactgataaagaaaaagcacaagctcacatcgatgcaggtgctaaaaaagtattaatctcagctccagctaaaggtgatgtaaaaacaatcgtattcaacactaaccatgacacattagatggttcagaaacagttgtttcaggtgcttcttgtactactaactcattagcaccagttgcaaaagttttaagtgatgaattcggtttagttgaaggtttcatgactacaattcacgcttacactggtgaccaaaatacacaagacgcacctcacagaaaaggtgacaaacgtcgtgcacgtgcagcagcagaaaatattatccctaactcaacaggtgctgctaaagctatcggtaaagttattccagaaatcgatggtaaattagacggtggagcacaacgtgttccagttgctactggttctttaactgaattaactgtagtattagacaaacaagatgtaactgttgaccaagttaacagtgctatgaaacaagcttcagacgaatcattcggttacactgaagacgaaatcgtatcttctgatatcgttggtatgacttacggttcattattcgatgcgactcaaactcgtgttatgactgttggagatcgtcaattagttaaagttgcagcttggtacgacaatgaaatgtcttacactgctcaattagtacgtacattagctcacttagctgaactttctaaataa

SEQ ID NO: 2583 - DNA, 1014 bp, Staphylococcus epidermidis
gtgaaagacttaattaaagttcaacaaaagcttatacctgatcttattgataagatgtatagacgcttttatattttatctactatctctcaaaatcaacctgtaggaagacgaagtctaagtgaacatatggatatgactgagagagtattacggtctgaaacagatatgttaaagaagcaagaattaattcgtgtcaagcctacgggaatggaaattactaatgaaggtactgaagtattagcacaactaggtgaatactttaacgtttatagcgatgaccataaattggctagagctatcaaagataaatttcatattaaagatgtacatgtcattccaggagattccgattctaaccgaactgtaaaacgtgaaatgggtcaacaggctgggcaacttttagaaggtatactttatgaagatgctattgtatctgtaactggtggttcaacaatggcgtgcgttagtgagtcgatacatttattaccttttaacgtattctttgttccagctagaggtggacttggagaaaatgtcgtttatcaagcgaatacaatcgcttcgagtatggcccaacaagctggtggttattacacaacactctatgtcccagacaacgtgagtgagtccacatacgatacgttaatgttggaaccttctgtcatgcatacactggataaaatcaagcaagctaatataacaatacacggcattggtgatgcgctgaagatggcgcatcgacgtcaatcatctcaagatgtgattgataaccttcaacatcatcaagccgttggagaagcttttggatattattttgacgctcagggtcaaatagttcataaggtcaaaacgattggccttcagctagagaatcttgagaacaaagagtttatttttgcggttgctggtggacaatcaaaaggagaagctattaaagcttatctttcaattgcaccggaaaacactgtattgattacagatgaagccgcagcaaaagtcattttacaatag

SEQ ID NO: 2584 - DNA, 237 bp, Staphylococcus epidermidis
atgtcgaattataatcattctgacgaaaaaatcgaagttatagatccgagtgatgatagatataaaagagatgattattttaataaaaattcatctcaaaataatcaaaatttaaaaacttttaatcaaacttattcttatagttgcactcattcaggatgcggctgtatgttaggctgtttaactatttcacttatttcattcttactttcattactaattttttggattatataa

SEQ ID NO: 2585 - DNA, 612 bp, Staphylococcus epidermidis
atgagcggtatctccaaatttattagtgcgattgtagtattgctattattaataggtttagcatttggtatttactcatttgtcgatagttcaaaaaaaggcaacgaacgactcaatgataaaacaacacagcaagaaaagaaaaaggacgataaagataaaaaggaaaaaaaagacaaaaaatcggaggaagaaaaaaagaataatacacaacaaacgcaacaagttcctcaaactcaacaaacgcagcaaactgttcaaacgccacaaagacctacgactcaaactccggtgaaacaaaatccacaaacaggagaaaagagagcaaaagagccaaaaactgacgaaagaaaaaaatctagacaagacagttcaaattctaaagaaagcccaagtcaaaaagatcaatcgccaacacaacaaaagccacaacaaaataaatctaaccagtcatcagcaaatcgtcaaagcacccaaaataaatcaaatcaaacacagtcaaccagaccacaaaacaatggaaatagtggcaatcaaaatgctagttcaggacaaaatacacaaaaacaaaataataacaatcaaaattctcaaagctcaaaaaaggattaa

SEQ ID NO: 2586 - DNA, 900 bp, Staphylococcus epidermidis
atgaaacgctatttaatcactggtggaactggcatggtcggttcacacttagtcaatgaaattaaacaaaccgatgcacatattacaattttaaccagacaggataaaacttctaatcatcccaaaatcacgtatatcaactggtcaaaagagggatggcaacatcaagtaccagacatagatattgttattaatttagctggtgcaacgttgaataaacgttggacaccttcccacaaacaagcgatgatgcttagtcgtattcaatcaacgcaaacactatttgaactttttgaaacacgtgaacacaaaccagaagttttatttaacgcaagtgcaatgggctactaccctccagatttatttacaagttataccgagttatatcaaacacttccatttgatttcttatcagaaattgtataccaatgggaacgttttgcgaataaatttaagcaattcggtacacgtgtcgttttaggtcgattcggccttattctatcagacgatggtggcgctcttgaaatgatggaacttccgtatcgtttatatgttgggggaaaactcggctctggaagacaatggtactcgtggattcatatcgatgacttaattagaggtattttatttactatcaatcatgataacgctgaaggtccatttaatttaactgcacctattcctgaaagacaaaatttatttggttatactttagcacgtgcgatgcataaaccacatgaaacgtggacacctaaattgatactccgtacagtgttaggtcagatgtctactgtcatattagatacacaaaaagtacttccaaataaattacatgcactaggttttgagtttaagtataataatttaagaaatgctttagatgatttaattaaagcttaa

SEQ ID NO: 2587 - DNA, 192 bp, Staphylococcus epidermidis
atgaaagatactcaattaacatatatattattaatcattgcgagtgttttattaattgcaaatggtatatttgcatttgaacgtacgttatcaatgatattaatgtcaatattatttatatcagttggaatcattttattatcaacaacattgaataccatgtatcaatcatcaaaacactccaaacgttaa

SEQ ID NO: 2588 - DNA, 585 bp, Staphylococcus epidermidis
atgaatttaattcctacagttattgaaacaactaaccgcggtgaacgtgcgtatgatatatattcacgtttattgaaagaccgtattatcatgctaggttctcaaattgatgataacgtagctaactctattgtgtcacaattattattcttgcaagcacaagattctgaaaaggatatttatttatatattaattcaccgggtggcagtgtaactgctggatttgctatttatgatactatccaacatatcaaaccagacgtacaaacaatctgtattggtatggcagcgtctatgggttcattcctgttagcagcaggtgcaaaaggtaaacgatttgcgctacctaatgctgaagttatgattcaccaacctttaggtggtgcacaaggacaagcaactgaaattgagattgcagcaaatcatattttaaaaacacgtgaaaaattaaatcgtattttatcagaacgtacaggtcaatctattgaaaaaattcaacaagatactgatcgcgacaacttcttaacagctgcagaagctaaagaatatggattaattgatgaagtaatggagccagaaaaataa

SEQ ID NO: 2589 - DNA, 945 bp, Staphylococcus epidermidis
atgagctttgcatcagatatgaaaaatgaactaacacgcatagaagttgacgaatcaaatgcaaaagcagagctcagtgcattaattcgcatgaatggcgcgcttagtctatcaaatcaacagtttgtaattaatgtacagacagaaaatgcgacaacagctcgtcgaatttactctcttatcaaacgtatatttaatgttgaagttgaaattttagttagaaaaaagatgaaattgaaaaaaaacaatatttatatatgtcgaacaaagatgttagcaaaagaaatactgaatgatttaggtattttaaaagagggagtttttactcacgatattgatccggatatgattaaagatgatgaaatgaaaagaagttatttaagaggggctttcttagcaggtggttctgtaaataaccctgaaacatcttcatatcatctcgaaattttttcacaatatgaagatcattccgaaggtcttactaaattgatgaatagttatgaactcaatgcgaaacatttggaacgtaaaaaagggagtattgcatatcttaaagaagctgaaaaaatttctgactttcttagtttgattggtggctatcaagcattactaaagtttgaagatgtaagaattgtccgtgatatgcgtaattcggttaatcgtctcgttaattgtgaaacagcaaatcttaataaaactgttagcgcagcaatgaaacaggtagaaagtatacaattaattgatgaagagattggccttgaaaatttacctgatcgtttgagagaagtagcgaagctcagagtggaacatcaagaaatatctttaaaagaattgggtgagatggtttctacagggcctatatctaaatcaggtatgaatcaccgtttaagaaagttgaatgaattagcggataaaataagaaatggtgaccaaattgaattataa

SEQ ID NO: 2590 - DNA, 996 bp, Staphylococcus epidermidis
atgaaacaaatgaacgtagtacttattggtggtggcactggactttctgtccttgctagaggccttagagaatttccaatagacattactgccattgttactgtagcggacaatggtgggagcacggggaaaattagagatgtcatggatattccagcgcctggtgatattcgtaatgtcattgctgctttaagtgactcggaatcgatattaactcaattgttccagtaccgttttggtgaaaatcaagtagatggacattcattaggtaatttagttattgctggaatgactaacattaccaatgactttggacacgctattaaagagttaagcaaagttttaaatattaaaggccaagtcattccttcaacaaatacaagtgtgcaactcaacgcagtgatggaagacggtgaaattgtacatggagaaaccaatatacctaaaacacataaaaaaatagaacgtgtgtttttagaaccaagtgatgttgaaccaatgaatgaagcggtagaagctttagaacaagcagatttaatcgtcttaggaccaggttcattatatacaagtgttatatcaaatttatgtgtcaaaggcatttcagaagcattattacgtacatctgccccaaaactttatgtatctaatgttatgacacaaccaggagagactgataattatgatgttaaagagcatattgatgcacttactcgacaagttggtgaaccatttattgattttgtcatatgtagctcagaatcatatagtaaagatgttttacaacgatatgaagaaaagaattcaaaaccagtagcagtacataaagaacaattaaaagatagtggaattagagttttaacggcgtctaatttagttgaaatatctaatgaacactatgtcagacataacacaaaagtattatcaaaaatgatttatgaacttgccttagatttaacaagtacaattcgctttactcctagtgataaaaagaaataa

SEQ ID NO: 2591 - DNA, 909 bp, Staphylococcus epidermidis
atggcaaacaacgaaaaagaaatgggtaaaagtgaattgttagttgttacaggtatgtctggagcgggtaaatcattggtgattcaaagtctcgaagatatgggttttttctgtgtagataatttaccacctgtactgttacctaaatttgtagaattgatggctcaaggaaatccttcattgcaaaaagtagcaattgcaatagatttaagaggtaaggaattatttaaatctctagttaaagaaattgatattattaaaagtcgcaatgacgtgattttagatgttatgtttttggaagctaaaacagaaaaaattatttcacgttataaagaatcaagaagagcgcacccactaaatgaacaaggacaaagatcattaatagatgcaataaatgaggaacgtgaacatctatcagaaatccgaagtatcgctaattacgtgattgatacaacaaaattaaaacctaaagaattaaagcaacgcatttcaaagttttatttagatgaaaactttgaaacatttactatcaacgtgacaagttttggtttcaagcatggtatacaaatggatgctgatttagtttttgatgtcagatttctacctaatccatactatgtagaggaattgcgtccatttactggtttagatgagccagtgtacaattacgttatgaagtggaaagaaacccaaatattttttgataaattaacggatttactaaaatatatgattcctggatacaaaaaagaaggtaaatcgcaattggttattgctataggttgtacgggtggacaacatcgatcagtcgcattagctaaacgtttagctgaatatcttaacgagatttttgaatataatgtttatgtgcatcatagagatgcgcatattgaaagtggagagagataa

SEQ ID NO: 2592 - DNA, 933 bp, Staphylococcus epidermidis
atgactgaagtagattttgacgtagcaataatcggtgcaggtcctgccggcatgacagcagcagtatatgcatcacgtgccaatttaaaaactgtcatgattgaacgcggtatgccaggcggtcaaatggcaaacactgaagaagtagagaattttccaggatttgagatgatcacaggccctgatttatctacgaaaatgtttgaacatgcaaaaaaatttggtgcggaataccaatatggcgatattaaatctgttgaagataaaggtgactataaagttatcaatttagggaataaagaagtaacagctcatgcagttattatctcaactggagcagagtataaaaagattggcgttcctggtgaacaagaattaggaggacgtggagtaagttattgtgcggtttgtgatggagcattctttaaaaataaacgtcttttcgtaattggcggtggagattcagcggtagaagaaggaactttcttaactaaatttgcagataaagtaacgattgttcatcgtagagatgaattacgtgcacaaaacatcttgcaagaacgtgccttcaaaaatgataaggttgactttatttggagtcatacacttaaaacaattaatgaaaaagatggtaaagttggttcagttacacttgaatcaactaaagatggtgctgaacagacttatgatgccgatggtgtattcatttatattggaatgaaaccactcacagcgccatttaaaaatcttggtattacaaatgacgcaggatacattgtcacacaagatgacatgagtactaaagtacgaggtatttttgctgcaggtgatgttcgtgataaaggattacgtcaaattgttactgctacaggagacggtagtattgcggcgcaaagtgcagctgactatattacagaattaaaagataattaa

SEQ ID NO: 2593 - DNA, 1440 bp, Staphylococcus epidermidis
atggcacaaaaagaaaataacatcattccaatgatttttgatgaggctttttaccgaaaaatggctacccaaaagtggcaacaacagaactacaagaaagcggcagaatattatgaaaaagtgcttgagttgtcacctgaggattttgatattcaacaacactatgcgcaatgtttagttaaattaaatatcggcaaaaaagcagaacatcttttttatgagaatattgttaaagactttcatgtagaagaaagcttctatgaactaagtcaattaaatatagaattaaacgagccaaacaaggcattcttgtttggtattaattatgtaatattgtcagatgataaagattttagagaaatgcttgaaaaaacattcgaagtcacgtacacaagtgaacaaaaaattgaattagaagcacaattgttttcaacacaacttttatttcaatttctcttttcacaaggtaggctagaagaagcccgagcatttattttgaatcaatcttacgagattcaacagcatagggtgattaggaatttacttgcaatgtgttatttgtatctaggtgagtatgatagtgccaaagcaatgtttgaagaacttttaaaggaagataattcagatgtgcatgcactttgtcactacacattattactttataataaaaaggaaacagaaaaatatcaaaaatatcttaaaatacttaataaagtagtaccactaaatgacgacgaaacctttaaattaggaattgtattgagttatttaaaacagtatcgtgcttctcagaatttactttatccactttataaaaaaggtaaatttgtctctattcaactgtataatgcattgagcttcaatttttattacctaggaaataaagacgaaagtattgagatgtggagcaagctcactcaaatttctaaagttgatgtaggttatgcaccttgggtaattgaggaaagtaaaacggtatttgaatcacgagtgttaccattattactagatgataataatcattatcgactttacggtatttttttacttcatcaattaaatggaaaagaaatactaatgactgaagatatttggtcaattcttgaatcaatgaatgactatgagaaactttatctcacatatttggtacaaggcctcacactcaataaattagattttatacacagaggtatgcaaaggttgtataattttaagcaattcaaatataacatgtctttatttacagattggattaatcaagcagaaatgattatagctgaaaatgtagatttagtagatgtcgatagatatgtcgctgcatttgtttacctatcatatcgtcgttctagtcaaccattcactaagagacaattgatggacgattttgatgtttctagatacaaactgaataaaacaattgaatttatattgagcatataa

SEQ ID NO: 2594 - DNA, 528 bp, Staphylococcus epidermidis
ttgagaagattaagtaaagaaaaatatcatcaagtgaatcctttatggcatatatatagaaaaattaaattcataaaagtgctaaagcaaacgttgattatagaaattgcaagatttattcctagtatgaaacttaaaaataaaatatataaaaagcttttaaaaatggatgtcgggaatcatacttcatttgcatataaagtgttgcctgatttgttttatccagaatacatttcggttggcaagaatacagtcattggttataatacaacaatattaactcacgaagtacttgttgatgagtggagagtggggaaagtcattataggcgattacactttaataggtgcaaatacgacaatattgccaggaataactataggaaagcatgttaaaattggtgcgggtacggttgtgtctaaagatgttcccgattacagttttgcatttggtaaccctatgcaaatacaattagattcaggaggtgacaacgaatggcacaaaaagaaaataacatcattccaatga

SEQ ID NO: 2595 - DNA, 840 bp, Staphylococcus epidermidis
atgaatattacattaggatatatcgatcctgttgcctttagcttgggaccaatccaagttcgatggtatggaattattattgcttgtggtatcttacttggatacttcattgcacaagcagcattgaaacaggttggattacataaagacactttaatcgatattatattttatagcgcgattgttggattcatagttgcgagaatatattttgttacatttcaatggccatattacatgaatcacttgagtgagataccaaaaatttggcatggtggtatagccatacatggcggcttaattggtgggcttatcacggggattattgtttgtaaaatcaaaaatctacatccatttcaaataggagatattgtggcaccaagtattattttagctcaagggataggacgctggggaaactttatgaatcatgaagcgcatggaggaccagtatctagagcttttctagaacatttacatttgccagactttattattagaaatatgtatattgaaggtcaatattatcacccgacatttctatatgagtcaatttgggacgtgataggttttgtcattttaattactttaaggaaacgtctaaaacttggagagacattctttggttatcttatttggtattctgtaggacgcttcttcgttgaggctatgagaaccgatagtttgatgcttacgagtcatatacgtgtagcgcaacttgtttctgtcgtgcttattatgattagtgtgatattcgtaatttatagaagagttaaatatcaaccaataaaatataaaaattcaggaccattaacatggccgattaaaaaggctaagtga

SEQ ID NO: 2596 - DNA, 933 bp, Staphylococcus epidermidis
atgttaacaacagatagattagttaatacgttaaatttagaattacttactggtgaagaaggtttagatagaccaattaaaaacacagatatttcacgtccaggattagaaatggctggatatttttcacattatgcttcagaccgtattcaattattagggacaacggagttatcattttataatttacttccagatgaagagaaaaaaggaagaatgagaaagttatgccgtcctgaaactccagcgattattgttacacgtgggttagaaccaccagaagaactcatacgtgcatctcaagaaacgcatacaccaattattgttgcgaaagatgccacaacgagcttaatgagtaggttaacgacatttcttgaacatgaactcgcgaaaaccacttctttgcacggtgtacttgttgatgtttacggagtaggtgtactaattacaggagattctggcattggaaaaagtgaaactgcattagaattagtcaaacgtggtcatagattagtggctgatgataatgtagaaatcaaagaaattactaaggatgaacttgtaggcaaacctcctaaacttatcgaacatttgctagagattcgtggtctcggtatcattaatgttatgactttgtttggagcaggatcaatattaactgaaaaacaaattcgattaaacattaatttagaaaattggaataagaataagttatacgatcgtgtaggtcttaatgaagaaacattgaaaattcttgatacggaaatcactaaaaaaacgataccagttagaccagggcgcaatgtagcagtaattattgaagtagcggctatgaattatcgtcttaatatcatgggtattaatacagcagttgaatttaatgagagacttaatgaagaaatcgttcgaaatagtcataaaagtgaggagtaa

SEQ ID NO: 2597 - DNA, 2835 bp, Staphylococcus epidermidis
atgaaaggaccgtcaattgtagtaaaaggtgcgcgagcacataatttaaaaggagtagatattgaattacctaaaaacaagttgattgtcatgactggactttcaggctcaggtaagtcttcgttagcgttcgatactatttatgctgaaggtcaacgacgttatgtggaatcgttaagtgcatatgcgcgacaatttttaggacaaatggacaaacctgatgtagataccattgaaggtttgtcaccggcaatatctatagatcagaagacgacaagtaaaaacccacgttctaccgttgccactgtgactgaaatctatgattatattcgattattatatgcgcgtgtcggtaaaccgtactgtccttaccacggtatagaaattgaatcacaaactgttcaacaaatggttgatcgtattttagaattggaagaacgtacaaaaattcaattactcgcaccagtcatttcacatagaaaaggaagtcatgaaaagttaattgaagatataggtaagaaaggatatgtgcgtttacgtgttgatgatgaaatcgtcgatgtaaatgaagtgcctcaattggataaaaataaaaatcacacaattgaagttgttgttgatagacttgtagttaaagacggcattgagacgcgtctagcggactctattgagacagcacttgaacttgctgaaggtaatttaacagttgacgttattaatggagaggaacttaaattctctgagaaccacgcatgtcctatttgtggtttctctattggtgaattagaaccaagaatgtttagtttcaatagtccgtttggtgcgtgtccaacttgtgatggtttaggtcaaaaactaaaagtagacctagatttagtcattccagataaaaataaaactttaaatgaaggcgcaattgaaccatgggaaccaacaagttcggatttttatccaactttattaaaacgtgtatgtgaagtctacaaaattaatatggataagccatataaaaaattgactgatagacaaaaaaacatactgatgaatggttctggagaaaaagaaattgaatttacatttacgcaacgaaatggtggtactcgtaaacgtaaaatggtttttgaaggtgtggtacctaatattgaccgtcgataccatgaatctccctctgaatatacacgcgaaatgatgagtaaatacatgacagagttaccgtgtgaaacttgtcatggcaaacgtttaagcaaagaagcgttatctgtatatgtaggcgactataatataggtgaagtcgttgaatattcaattaaaaatgcactttattatttcgaaaacttaaaattaagcgatcaagataaatcgattgcagatcaaattttaaaagagattatttcaagattatcatttttaaataatgttggtttggaatatttgaccttagatcgttcatccggaactttatctggaggggaagcacaacgtattcgtttagcaacacaaattggttcacgattaaccggagtactgtatgttttagatgaaccttcaattggattacatcaaagagataatgatagattaattaacactttaaaagaaatgcgtgatttaggtaatacactcattgtcgttgaacatgatgatgatacaatgagagcagctgattatttagttgatgtgggtccgggagccggtaaccacggtggagaggttgtctcaagtggcacccctaataaagtaatgaaagataaaaagtccttaacgggtcaatatttaagtggaaaaaaacgaatagaagtccctgaatacagacgcgaaatcaccgatagaaagattcaaattaaaggtgctaaaagtaataatttaaaaaatgtaaatgtagacttcccactatccgtcttaactgtagttacaggtgtgtcaggttctggtaaaagttcactcgtcaatgaaattttatataaagcattagctcaaaaaattaataaatctaaagtgaaacctgggaattttgatgaaatcaaaggaatcgatcaattagataaaatcattgatattgatcaatcgccaataggtagaactccacgttctaacccagccacatacacgggtgtctttgatgacataagagatgtctttgcacaaacgaatgaagccaaaatacgaggttatcaaaaaggtagatttagttttaatgtcaaaggtggacgatgtgaagcttgtaaaggtgatggaattataaaaattgaaatgcattttttaccagatgtctatgtaccttgtgaagtgtgtgatggtaaacgctataatcgtgagactctagaggtaacatacaaaggaaaaaatattgcggatgtgttagaaatgactgttgaagaagctacgcatttctttgaaaatatccctaagattaagcgtaaattacaaacacttgtagatgttgggttggggtacattactttaggtcaacaagctactacattatctggtggtgaagcgcaacgtgtaaaactcgcatcagaattgcacaagcgttcaacggggcgttctatttatattcttgatgaaccaactacaggattacatgttgatgatataagtcgtttattaaaggtattgaatcgtatagtggaaaatggtgatacggtcgttattatcgaacacaatcttgatgttattaaaacggcagatcatattattgatttaggtccagaaggcggtgaaggtggaggaacaatcatcgcaactggtacacctgaagaaatcgctcaaaataaagaatcttacactggtcaatacttaaaaccagtattagagagagacagagttgaatag

SEQ ID NO: 2598 - DNA, 1986 bp, Staphylococcus epidermidis
atggtagaacatgttccatttaagttaaagtctgaatttgagccacaaggtgatcagccacaagcgatacaaaaaattgtggatggcgtaaatgaagggaaacgtcatcaaaccttattaggtgcaactgggacaggtaaaacttttactatgagtaacgtaattaaagaggttggtaaacctacacttattattgcacataacaagacattagcaggtcaactatatagtgaatttaaagaatttttcccagaaaatagagttgaatatttcgttagttattacgactactatcaacctgaagcatatgtgccttcaacagatacctttattgaaaaagacgcctccattaacgatgaaattgaccaactacgacattctgctacaagttctttatttgaacgtgatgatgtcattattattgcaagtgttagttgtatctatggtttaggtaatcctgaagaatataaaaatttggttgttagtgtacgtgttggtatggagatggaacgaagcgaattgttgagaaagttagttgatgtacaatactcacgtaatgacatagattttcaacgtggtacatttagagtgcgtggggatgttgttgaaatattcccggcttctagagaagaaatgtgtattcgcgtagaattttttggtgatgaaattgatcgtatcagagaggttaactatttaactggggaagtaattcgagaacgtgagcattttacaattttcccagcttcgcacttcgttactcgtgaagagaaaatgaaagtagctattcaaagaatcgaaaaagaattagaagagagactaaaagaattacgtgatgagaataaattattagaagcacaaaggttagaacaacgtactaactatgatttagaaatgatgagagaaatgggcttttgttcaggtattgaaaactattctgttcacttaactttaagaccattaggttcaacaccatatacattacttgattattttggagacgattggcttgtcatgattgatgagtcacacgttacgttacctcaaattcgtggtatgtacaatggggatagagctcgtaaacaagtattaatagaccatggatttcgtttgccaagtgcgttggataaccgaccattaaaatttgaagaatttgaagaaaaaacaaaacaacttgtttatgtttcagctacaccaggcccatatgagttagaacatacagatgaaatggttgaacaaattatacgacctactggtttacttgatcctaaaattgatgtgcgtccaactgagaatcaaatcgatgatcttttaagtgaaatccaagatcgcgttgacaaagatgagcgtgtacttgtgacaacacttactaaaaaaatgagtgaagatttaactacatatatgaaagaagctgggattaaagttaattatttacactcagaaattaaaacattagaacgaatagaaattattcgagacttacgtatgggtacttacgacgcaatagttggaatcaatctgctgagagagggtatagatatacctgaagtatccttggttgtaattttagatgcagataaggaaggcttcttacgttctgatagatctcttattcaaactattgggcgagcagcacgtaatgacaaaggagaagtcattatgtatgcggataaaattacagattccatgcaatatgcgatagatgaaacacaaagacgtagagaaatacaaattgctcataacaaagaacatggcatcacgccgaaaacaattaacaaaaagatccacgacgtcattagtgctactgtggagagcgatgaaacaaatcaacaacaacaaactgagttacctaagaaaatgacaaagaaagaacgtcaaaaaacaatagaaaatatagaaaaagaaatgaaaaaagcagccaaagatttagatttcgaaaaagctacagagttaagagatatgttatttgaattaaaagcagaagggtga

SEQ ID NO: 2599 - DNA, 234 bp, Staphylococcus epidermidis
atgatttggtatgtttgtgcggccttttttccttgtatattagttgtgctgtttagtgtggtgactagaagtaaatggattggtacattagtcacattgataataataggtgcatcagtttataaaggattctttcacaacgaatggattatttttatagatgtgacaagtttattagctggttatttaataatagatcaacttgaatttcataagaaccaaaatgattcttaa

SEQ ID NO: 2600 - DNA, 642 bp, Staphylococcus epidermidis
atgggagtgcatcaatattttaaaagactatcagatttagaaaaattaataagattaccaggtaaatttaaatattttgaacataatgttgctgctcattcttttaaagtaactaaaattgcgcaatatttagctactgtcgaagaatatcatggaaataaaatcgattggaagagtctctatgaaaagtcactcaaccacgactttgctgaagtgtttacaggtgatatcaaaacaccggtaaaatacgcaagtaaggaattaaaacatttattctcccaagttgaagaagaaatggtagatacgtttatcaaagaggagataccaacacaatatcagcacgtgtatcgtgaacgtttacaagaaggtaaggatgattctctagaaggtcaaattctatctgttgctgataaaattgatttattgtatgaaacatttggagaaatacaaaaacgtaatcctgagccactattttttgaaatatatgaaatgagtttagaaactattatacaatttgatcacttagaatctgtaaaagattttattgaaaatgtaatacctgaaatgctcacagaaaactttattcctcgaactgaattacgtgaaacaacaatgtcaattctaagcagaagaaatgggtga

SEQ ID NO: 2601 - DNA, 801 bp, Staphylococcus epidermidis
atgaaaaaaacgctaactgtaacgttaagttcgattgcagcttttattgcaattaacactgcagctaacgcacaagaatctgagacgtcgcaactagactcatatgcaacgagtgatgtaattacaaatcaatcaaacttaggtatttacactgtaaaacctggagatagtttatataaaattgctttagaacatcatcttactttagaagaactttatgctttaaatcctggtatagaacctcttatttttccaggagatgaaattgtagtatctgaaactgcatttgaacaatttaataacacaaacacattcgtaaattatgaaactaactatattccagtaggatataataatgtatcaactgatacatccaacactacttatgataattataacagtgaatcaactgatacatactctgtgccaaacgcctacaatggtctaagaagtgtatctaactcaggtaatttatacactactggtcaatgtacttattatgcattcgatcgtcgcgctgagctagggaaaccaattggaagtctatggggcaacgctagtaactgggcatattcagctaatcaggctggctttaatgtagatcacacacctgaggttggtgctgtattccaaagtggttcgggtcaaaatggggctggcgcttatggacatgttggcgttgttgaatcaatcaattctaatggttctgtaactgtttcggaaatgaactggaatggtggcgttaacgtaaaatcttacagaactattagcaatcctaattcatataattacattcactaa

SEQ ID NO: 2602 - DNA, 1002 bp, Staphylococcus epidermidis
atgatgactgatcccgatttttggaatgatcaaactaaagcacaagatatcattgataagaacaatgcactaaaatctatagtaaatgggtattatcaactgacaaatgctgttgatgatatgagtgcgacgagagagttattacaagaagaatatgatgaggatatgaagaaagaattagaagaggaagttcaacaatttgaagaacaaattgatcaatatgaattacaattactcctcgacggaccacatgatgccaataatgctatattagagcttcatcccggtgctggcggtacagaatcacaagattgggcaagtatgcttcttaggatgtatcaacgttactgtgaacaaaatggctttaaagttgaaacagttgattatcttccaggagatgaagcaggcgttaaaagtgttacattacttataaaagggcataatgcttatggatatttaaaggcagaaaagggtgttcatcgtttagttagaatttcacctttcgattcatctggtagacgacatacttcttttgcatcatgtgatgttattcctgattttaataatgatgaaattgaaattgagattaacccagatgatattacagtggatacttttagagcttcaggcgctggtggacaacatattaacaaaactgagtctgcaattagaattacacatcaccctacaggtattgtagtcaacaaccaaaatgaacgatctcaaataaaaaatagagaagctgcaatgaaaatgttgaagtccaaactttatcaattaaagttagaagagcaagagcaagaaatggctgaaattcgtggcgaacaaaaagacattggatggggaagtcagattcgttcttacgtctttcatccatattcaatggttaaagatcatcgtacgaatgaagaaactggtaaagtagacgctgttatggatggagaaataggcccgttcatagaagcttatttaagaaaagaaatggatcgacaagacatataa

SEQ ID NO: 2603 - DNA, 2535 bp, Staphylococcus epidermidis
atgggatttttatcgaaaattgttgacggcaataaaaaagaaattaaaagattaggtaagttagcagataaagtacttgctttagaggaagatactgcgatattaaccgatgaagaaatacgtgaaaaaacaaaatcttttcaaaaagagttagcagaaattgaagatgtaaaaaaacaaaatgattatttagataaaattttacctgaagcttatgcacttgtacgtgaggggtcaaagagagtatttaatatgattccttataaagtacaagtaatgggtggtattgctatacataaaggtgatattgcagaaatgagaacaggtgaagggaaaacattgactgcaaccatgccgacgtatttgaatgctttagctggtagaggtgtacatgttattacagtcaatgaatatctatcaagttcacaaagtgaagaaatggctgaactatataactatcttggcttaactgtaggtttgaacttaaatagtaagtcaactgaagaaaaacgtgaggcttacgcacaagacatcacttatagtacgaataatgaacttgggtttgattatcttagagataatatggtgaactatgctgaagagagagtaatgcgtcctctacattttgcaattattgatgaggtcgattccatattgattgacgaagcaagaacacctttaattatttctggtgaagcggaaaaatctacttctttatatactcaagcaaatgtttttgcaaaaatgcttaaagctgaagatgattataactatgacgaaaaaaccaaagctgtacatcttacagaacaaggtgcagataaagctgaacgtatgttcaaggtagataatctttatgatgttcaaaatgtggaagtgattagtcatattaatacagctttaagagctcatgttacattgcaacgcgatgttgattacatggtcgttgacggtgaagtattaatagttgaccaatttactggacgtacaatgcctggacgtcgtttttctgaaggtttacaccaagcaattgaagctaaagaaggcgtagcaattcaaaatgagtctaaaacgatggcatccattactttccaaaactatttcagaatgtataataagttagcggggatgactggtacagcgaaaaccgaagaggaagaatttcgtaatatctataatatgacagttactcaaattccaactaacaaacctgttcaacgtaaagataattcagatttaatttatattagtcaaaaaggtaagtttgatgcggtagttgaagatgttgtagaaaaacataaaaaagggcaacccgtcttactaggtactgttgctgttgagacttctgaatatatttcaaatttactaaaaaaacgtggtgtcagacatgacgtattaaacgctaaaaatcatgaacgagaagctgaaatcgtttcaaacgctgggcaaaaaggtgcagttacaattgccacaaatatggctggacgtggaacagatattaaacttggtgatggtgttgaagagttaggtggacttgctgttattggtactgagcgtcatgaatcaagacgtattgatgatcaattacgtggacgttcaggacgccaaggtgatagaggagatagtcgtttttacctatctttacaagatgaattaatggtacgttttggttcagaacgcttacagaaaatgatgaaccgtttaggaatggatgattcgacgccaatcgagtcgaaaatggtatctcgtgctgtagaatcagctcaaaaacgagtagaaggtaataactttgatgcgcgtaaacgtattctagaatatgatgaagttttacgtaagcaacgtgaaattatttataatgagcgtaatgaaatcattgatagtgaagacagttctcaagtcgttaacgcgatgttacgttctacattgcaacgtgcgattaatcattttattaatgaagaagacgataatccggactatacgccatttattaattacgttaatgatgtgttcttgcaagaaggagatcttcaagatacagaaattaaaggtaaagattcagaagatatttttgaaattgtgtggtctaaaattgaaaaagcgtatgcacagcaacaagaaacattaggagaccaaatgagtgaatttgagcggatgattttattacgttcaattgatacacattggactgatcatattgatacgatggatcaattgcgtcaaggtattcatttacgttcatatgcacaacaaaacccacttcgtgattatcaaaatgaaggtcatgaattatttgatatcatgatgcaaaatatcgaggaagatacatgtaagtatatcttgaaatcagtggttcagtttgaagatgatgtagaacgtgaaaaatctaaaagctttggtgaagcaaaacatgtaactgctgaagatggcaaagaaaaagcaaagccacaaccgattgtaaaaggtgatcaggtaggtagaaatgatccatgcccatgtggtagtggtaaaaaatataaaaattgtcatggaaaagcgtaa

SEQ ID NO: 2604 - DNA, 570 bp, Staphylococcus epidermidis
atgattagatttgaaattcatggagataacctcactatcacagatgcaattcgcaactatattgaggagaaagtaggtaaattagaaagatactttaacaatgtgccaaatgctgtagcacatgttagagttaaaacttattctaattctacaactaaaattgaagttacaattcctttaaaagatgtcactcttagagctgaagaaagacatgatgatttatatgcaggcattgatttaattactaacaaattggaaagacaagtacgtaaatacaaaactcgtgtaaatcgtaaacatagagatcgtggagatcaagatatctttgttgctgaagtacaagagtctacaacaaacaatcatgcagatgatatagaaagtgaaaatgatattgaaattattcgttctaaacaattcagcttaaaaccaatggattctgaagaagcagtattgcaaatgaatttattgggacatgatttctttatttttaccgatagagaaactgatggcacaagcattgtttatagacgaaaagatggcaaatacggtctgattgaaacaactgaataa

SEQ ID NO: 2605 - DNA, 675 bp, Staphylococcus epidermidis
atgcgtaaatgtatccagtgcaatcaacctattcatgagaccattcatatttataacttatttaaaccacctcagatattttgtgaacgatgtgaaacattatggcttaactccaaaattcataaagatggtaggtgtcctaagtgccttaacaacaaaatttctactgatggcgaatgtcatgactgtcaattcttaagtaaaacattttatttaatggaacaattgttttgtgattatagttatgatggtatgatgaaagaaatcatacaccagtataagattaagcgagacttctatttggcagaagtattggcgagaaaattagttttacctcaaacgcaatatgattatatagttcccattccttctccaattgaacgcgacattgaacgtacatttaatcctgtgaccactgtcttagataaaatgggcatctcatatcaagatgtattaggtacacatatacgtcctaagcagtcaaagttaggaaagattgaacgttcaaaagcccctaatccattttatataaaagatgaagagataaatatcgaagggaaagtaatactactcatagatgatatttatacaacagggttaactattcatcacgcagggtgtaaattgtacgataaaaaagtcagaaaattcaaagtgtttgcgtttgcacgataa

SEQ ID NO: 2606 - DNA, 1164 bp, Staphylococcus epidermidis
ttgcaatattttgtgacttacaattcaacgatattggataaaacaatcacatactgtagacgatgcattcaattaggcagaatggatagtattacagatatatgtctcgtaaaaagttttcaaaaagcaacaaaagcgaattatcagttaccctttgaattatcaaagcaacagcaatacgcttcagaaactatcgttcaagctataaaaaataataatgacctcttgttatatgccgtcacaggagcagggaaaactgaaatgatgtttgagggaattaggatagctcgtcagatgggacataatattgctattgtatcacctcgtgtagacgttattattgagataagtcatcgaattaaagatgcttttatcgatgaacatatagatgtgctacatcaatctagtagacagcaatataatggtcattttgttattgctactatccatcaattattgaggtttaaacagcattttgatactgtatttgtcgatgaggtagatgcttttccgttgtctatggatccacaattatcaaatgcaatacaacttgcttcaaaatcgaatcattcacatattttcatgacggccacaccaccgcgtcattttttaaaacaattccccccagaaaaaataattaagttaccagcccgttttcaccgatccccccttcctattcctaagttcaaatatttcaaattaaaatcaacacgaaaacaaaatttattacttaatatatttagatatcaaattaaccaacaacgttttactttggtctttattaataatatagaaattatgaataaaatgtatcaacagtataaaatggacatccctgatttgatttgcgttcacagtgaagatgatttacgatttgaaaaaattgaagctttaagacgaggacaacacaaaattgtattcactacaactattttagaaagaggatttacaatgacacacttagatgtcgttgtagttgatgctggaagttttcaacaagaggctttaattcaaattgctggtcgcgtaggacgtaaacagcagtctccaagtggcttagttttatttcttcatgaaggtgttacattatcgatgattttagctaaaagaaacattatttcaatgaatcgtttagcaattaaaaggggatggattgatgcgtaa

SEQ ID NO: 2607 - DNA, 867 bp, Staphylococcus epidermidis
atgaagattgcagttatgaccgattctacaagttatttaccacaacatataatagaacaatataacataccagtcgcttcactaagtgtaactttcgatgatggagtgaatttcactgagagtgatgatttttctgtagatgatttttataaaaaaatggcttcatctaaaactataccaacaacaagccaacctgctattggcgattggattgaaaattttgagagattaagagaacaaggatacactgatgtcatcgtgattaacttatcaagtggtataagcggaagctatccttcagcaacacaagctggtgaaatggttgaagatattcaagtacatacgtttgatagccgtcttgctgcgatgattgaaggtagctttgcaatttacgctgctcaattggtacaaaagggatataaacctgatgatattattaatgaactaactgaaataagacaacatattggtgcatacttaattgttgatgatttaaaaaatttacaaaaaagtggtcgtatcactggagctcaagcttgggtaggtacattattgaaaatgaaacctgtcttgcgttttgaagaagatggtaaaatacatccacacgaaaaagtacgtactaaaaaacgtgcgctaaaatctttagaaacaaacatttttaaagaaatagaaggcatggaagatgtgacagtatttgtaataaacggtgataaaactgaagatggaaagtcatttcttcagcaattaaaggaagatcatcctaatgttcatattcagtattgtgaatttggaccagtgatagcatcacatttaggatcaggcggtttaggattgggttacttcccaagaagaatcgacattaattaa

SEQ ID NO: 2608 - DNA, 642 bp, Staphylococcus epidermidis
atggataaatccataattactattaaacaagcacattcaattgaaaatgtgataagtaaatcacgctttatagcatatattaagcctgtttcgactgaaaatgaagcaaaagcttttatagatgaaattaaaacaaaacataaagatgcaactcataattgttcagcctatactgtcggaccagagatgaatattcaaaaggcaaacgacgatggcgaaccaagtggaacagctggcatcccaatgcttgaaatactgaaaaaacaagagatacacaatgtttgtgtcgtcgtgacacgctacttcggtggtatcaagttaggtgcaggcggtcttattagagcatatagcggcgccgtgcgtgatgtgatatatgatataggtagagtcgaactaagagaagctattccagtaaccgttacgttagattatgatcagacaggtaaatttgaatatgaacttgcctctactacattcttattaagagaacaattttataccgataaagtaagttatcaaattgacgtagtaaaaaatgaatatgatgcttttatagactttttaaatcgaattacttctggaaattatgatttgaaacaagaagaccttaaactattaccttttgatattgaaaccaattaa

SEQ ID NO: 2609 - DNA, 1080 bp, Staphylococcus epidermidis
atgtatacactattacttatagcttttactatgatagtcagtttaataattacacccattattattgtaatatcaaaaaaattagatttagtagatcgtcctaatttcagaaaagtacatacgaaacctatctcagtgatgggaggaacggtcattttattttctttcttaatagggatttggctcggacaccctattgaacgtgaggttaaaccgcttatattaggtgcaattacaatgtatatggttggattgattgatgatatttacgatctaagaccttatttaaagttagcaggtcaaattgttgcagctttaattgttacgttttatggaattacaatagactttatttcattgccaattggtccaacgattcattttggcatattcagcattcctattacagtaatatggattgtagcaattaccaatgctattaatcttatcgacggacttgatggacttgcctcaggcgtctcagcattggcattaatgactattggattcatcgctattttacaagcgaacatatttattatcatgatttgctgtgtacttttagggtctttacttggtttcttattctataactttcacccagcgaaaattttcctaggtgatagtggtgcattaatgataggatttattatcggtttcttatccttactcggctttaagaatatcacatttattgcattattctttcctatagttatattagcggtgccatttattgatacattatttgcaatgattcgtcgaatgaaaaaagggcaacatataatgcaagcggacaagtcacatttacatcataaattacttgctttaggatatacgcatagacaaaccgttttacttatttattcaatagcgattatgtttagtttatctagtgttatcctctatttatcccaaccgttgggtgcacttatgatgttcattctcattgtctttacgattgagttgatcgttgaatttactggattaatagatgataattatcgaccaatattaaatttaattacaaaaaaaggaaatggtaagcaacatcattatgatgagcatcaccgttcataa

SEQ ID NO: 2610 - DNA, 1077 bp, Staphylococcus epidermidis
atggaaatgtttgaagctatcatatataacatatctgtcatggtggcaggtatatatttatttcataggttacaatattctgaaaataaaagaatgattttttctaaagaatatgtaacagtactaatgacattcgtttctttacttttagcggcataccctatcccatttcaaaacgaatacctcgtccatttaacatttgtacctcttttgtttttaggacgttataccaacatgatatatacactcacggctgcttttatcgtatctttagtcgatgtatttatctttggaaactcaattatttatggtattacattaatcgttattgcaggtattgtcagtgcagtgggaccattcttaaagcaaaacgatatcatttctttacttattttaaatttgattagcattatcattttgttatttttagcattattaagccctatttatgaactcgtagagattttagtgcttatccctatttcatttattattacaattgcttcagcaataacattcgttgatatatggcactttttctctttagtcaatcgttatgaaaatgaagataaatacgattatcttacaggtctaggtaatgtgaaagaatttgatagacacttaaatgaggtctcaagtaaagctgaagaaaagaaacaaagtttagccttacttctcattgatattgatggctttaaagatgtaaacgatcattattcacaccaatcaggagatgctgttctcaaacaaatgtctcaactattaaaaaactatgtcccaaaccagttcaaaatatttagaaacggtggcgaagaattttctgttgtaataagagattacacactagatcaaagcgtgaaattagcagaaaatattcgaagtggtgttgaaaaatcttctttccacctaccaaacaaagaagtaatcaagctatcagtttcaattggtgtaggatacttaactcaagaagatcgtaaatctcaacgtaaagtatttaaagatgctgatgacatggtacatgtggctaaaagtgaaggaagaaataaagtcatgtttaatcctattgtcaaattataa

SEQ ID NO: 2611 - DNA, 762 bp, Staphylococcus epidermidis
atgtcagattcaatcactatcattgatgaaaataaagtgattgatgtagtcttaattgctgggcgaatcttacttgaagcaggcgctgaaacatatcgaattgaggatacaatgaatcgtattgcccatagttatggtttacatgatacatacagttttgtgacatcaactgcaattattttctcattaaatgatcgtactagtacgaggttgattcgtattcgcgaacgtacaaccgatcttgagaaaattgctttaaccaatagcctatctcgtaaaatttcgagtaagcaacttacaattgacgaagcaaaaagtgagttactgcaacttaaacgtgcgtctcttcagtattctttcttaacaaatctcattgctgcctttgtagcttgtggttttttcttattcatgtttggtggcgtagcttccgacgcttggattgcatgcctagcgggtggcatagcttttttaacgtttagtttcgtgcaaaaatatatacaaattaaattcttttcagagtttgtagcatctgctgttgttattagtattgcagcaatattcactaaactaggtatagctaaaaatcaagacattattactattgcaagtgtcatgcctctcgttcccggtattttgattactaacgctattcgtgacttacttgccggagagttacttgctggtatgtcacgtggtgttgaagctgctttaactgcatttgctattggtgcaggagtagctattgtattactattattataa

SEQ ID NO: 2612 - DNA, 495 bp, Staphylococcus epidermidis
atgtttatttatctgtttcactttatcattagtttcattgccacagtccttttttcaattatatttaatgcacctaaaaaattgctattagcttgtggatttgttggagctgttgcttggacaatatatcagatgacagtaggtatggatttaggtaaagttggcgcttcatttttaggaagtctaatattaggattaatgagtcatacaatgagtagacggtacaagcaacctgttattatatttatcgtccccggcattatacctctcgttccaggtggcgcagcatatgaagctacaagatttttagtatcaaataattatacgaatgcagttaatacttttttagaggtaacattaatttctggtgcaattgcattcggtatacttgtatctgaaatagtctattacatttattcacgcatcaagcaatcttatggtaaaatcaagggtaaaacttataaaaaatcctataatatgaataatagagtataa

SEQ ID NO: 2613 - DNA, 1239 bp, Staphylococcus epidermidis
atgaagaaacaaattatcgaaagattaacgagatatgtaaaaattgatacacaatctaatcctgattccaagacgacaccatctacgaataaacagtgggatttattaaatctattagaagaagagcttcaatcattaggtcttaaaacagacatggatgaacatggttacttatttgctacactcgaaagcaatattaattataatgtacctactgtcggttttttagcacatgtagacacttcaccagatttcaatgcttctcatgtaaatccgcaaatcattgaagcctataatgggcaacctatcaaacttggtgaatctcagcgtatcttagatcctgatgtttttcctgaattaaataaagttgtgggtcatacactaatggtgacagatggtacatctctactaggcgccgatgataaagcaggtgttgtagaaataatggaagggataaagtatttaattgatcatcctgacattaaacacggtacaattcgagttggctttacacccgatgaagaaattggacgaggcccgcatcaatttgatgttagtcgatttaatgcagattttgcatatacaatggatggcagtcaattaggagaactacaattcgaaagtttcaatgcggcagaggtaactgtcacttgccatggtgttaacgttcatccaggttcagctaaaaatgccatggttaatgcaattagtttaggtcaacagtttaatagtttacttccctcacatgaagtgcctgaaagaactgaaggatacgaagggttctatcatttaatgaattttacaggtaatgttgaaaaagcaactctacaatatattattcgcgaccatgacaaagaacagtttgagctacgtaaaaaacgcatgatggaaattcgtgatgatattaatgttcattataatcattttccaattaaagtagatgtgcatgaccaatattttaacatggcagaaaaaattgaacctttgaaacacatcattgatatacctaaacgtgtctttgaggctttagacatcgtacctaacactgaacctattcgaggtggtacagatggatcacaattatcttttatggggttacctacacctaatatttttactggttgtggcaatttccacggtccttttgaatacgcttctatcgatgtaatggaaaaggctgttcatgttgtcgttggtattgctcaagaagtagcaaacagccatcaatcttataaataa

SEQ ID NO: 2614 - DNA, 315 bp, Staphylococcus epidermidis
atgaaaagagtttcttattcagtagaaataaagtataaagcagttgaaatgaaagcagcaggattttcaacaaaagaaattatgaaagaattaaatattagaaatagaacacaagtgaaaacttggtggcgatggtatcgaaatggggaaagttatagattttcacaacaagttggtaaacaatatacctacggtaaaggattagaagagctgtcagaagtagaacaattaaaattagaaaataagagaaaagatatagaattggatattttaaaaaagtacaaggcattggaaaggaagtggtaccaacagtag

SEQ ID NO: 2615 - DNA, 1467 bp, Staphylococcus epidermidis
atggaatttttaactaaacaagaagttcataatagagcaaaggaagctgtaggtaagacaataaaagaattaaatgatggcttttctgtttcagaaactaagagttctgtgggggatgcttttgaaaattggtttgggaaaagtaaagatagtgagagtagacctgatatggaagaggcaggtgttgaattaaaggcaacaccttttaaaaaattaaaaagtggtaaatatagcgccaaagaaagattagttttaaatattattaattatgaaaaagtagcacatgaaaaattcgagactagttcatttttaaataaaaataatactatagagctagcgttttatgagtataaaaaagatgtatctagagatgactggattatacatgaggctgttttatatgaaatgaaaaaaaatccaattgattatgaagtaataaaaaatgattgggaattaatacataactatattaatgatggtaaagcacatgaattaagtgagagcttaacaacttatttatccccttgtacgaaaggagcaagtgctaaatctgttagaactcaaccatattcaaacataaaagctaaacagagagcattttctttgaagtctggatacatgacatcgatattgagaaagtatattttaggcaatgaagagattgattctattgttaaatcaccgtttgagctaaaaaataaatctattgaagatatagtgcttgaaaaattcaaaccatattataatcaaactatagattccataggagaaaaatttaatgtagatagaggtgggaaaaattaccataatcgcattgcttctgctattttaaatttaaaaggcaaaattaaaggaaatgagacttttccaaaggtagacgaatttgaaaaagcatctatagttgttaaaacagtaaaatttaataaaaataatattaataaagagagtatgtcatttcctgctttcagatttaaagatttaattaaagaaaaatgggaagatgaagatggtaatccattagctcaatggcataattttcttctggaaacgagatttctcttttttatcgtcaaagaagaagaaggtactgaggtgtttaaaggcgttaaattcttttcaatgccagaagacgatatcgaaggtcctgtaaaaaaagtatgggaagacacaaaagataagttattaaaaggggtgtgtctcaaagcaacttataaaaaggatggtaacgtatatagaattgaaaataattttattaataaatcagatgaaatgatatgtcatatacgaccacatgaaagctactctgactatagggtgaacggtaaatatgcagatgaattgccatctcgtacaaattggattaatcgacctaatgatacattaaaatattcagataaatggatgacgaaacaatgtttttggataaataattcttatattaaagaacaagtcaaagaatttctttag

SEQ ID NO: 2616 - DNA, 1239 bp, Staphylococcus epidermidis
ttgaataatttaaaagtagcagaattatttgcaggggtaggtggatttcgtctaggtttagagagaacaaaaaataaaatgtttgaaattacttgggctaatcaatgggaaccttcaaggaaagtacaacatgcctttgattgttataataaaaggtttaaaaacggtgtacatattaatcaagatatagcgacaataagtaatgaagaaatggctaatacgagagctgacatgatagtaggtggatttccctgtcaagactactctgtagctaggagtcttagtggagaactgggtatacaaggaaaaaaaggcgtgttattttgggaaattataagatttattcaaaatacttatccaaaatatttattattagaaaatgtagataggttattaaaatcaccttcaagacagagaggaagagattttgcagtaatgttatcaactctgaatgaattgggatattcagttgaatggagagtgattaatgctgctgactatggaaatgcgcaaagacgaagacgagtatttatttttggttacaaaaaagatcttgaatatggtagaaaaatgagtaaatttagcttagagaatattatttatgatgaaggattgttcgcttcagggtttccagtagaaaaagtacctaataaagaaagaataaataatataaaaattgataatgatatagtagaaatttctaataattttagtttcagtttttttaatagtggagtgatgagaaatggagaaatacttaccattgatactatacctaaatatgaaaaacccactccactaaaagatgttattcaagatgaagtaactgataattatgaattgaacatagatcaaataaataagtttaagtatttaagaggtcctaaaaaaattaaaagaacatctaaggatggtcatgaatattacttttcagaaggaggaatgtctgaaactgattctttagacttgcctgcaagaaccatgttaactagtgaagcttctgtaaatagaagtagccatctattaaaggttaatgatacttatagaacactaactccgatagaagcagaaagactgaatggattcccggataattggactgatacaatgcctgatagaatgagattcttttgtatgggaaatgctttggttgtaccaataattactagaattgctaatcagatagaaattattgaaataaataataatgataaatatagccaattagaattattttaa

SEQ ID NO: 2617 - DNA, 192 bp, Staphylococcus epidermidis
atgagaaatgctatagaagaattgatcttctccgatgtaagtagttatgacatctatgtaaacacaggcgttaaccaagggttggttggagacatcaaggatggttatttgacgattgattctatcccgtatattgatgctgaaagattatactattatagtttagagcgcaaagccctcgttacaagttga

SEQ ID NO: 2618 - DNA, 300 bp, Staphylococcus epidermidis
atgtcgttttatgaacgggtattaaaactaagcgaaaataatcatcgtactgcttttgaatttcgttttgaagaattattttcagaggaagaatggtgcgcattatcgctagctgaacgtcaggaacaagaaaaagcatttagatgcgaagtgaacaagcgagacgatatccgtataccattttcaagtgaaaacgatgctaaaaataagttatttaatattgtttatgcttacaattccgtaaaaaagaactttaaacaggctgaacattctagaaatcctagaggtcgaaacgtttaa

SEQ ID NO: 2619 - DNA, 693 bp, Staphylococcus epidermidis
atgacaaaattaaaagagaaagttgcagtcgttacaggtgcgagtagcggtataggagaggcgattgccaaaaagttaagtcaacaaggtgcatcaatagttctggttggtcgtaacgaacaacgcttaaacgaaatagcccagcaattaaataccccggctaaagttgtttcagcggatgtcactgtaaaatcgaacatagatgatatgttaaaagctgtaatagaccatttcggtcatatcgatattgttgtgaatagcgcaggtcaaagtttatcatctaaaattacagactataatgttgagcagtgggatactatgatagatgtaaatattaaaggtacactccatgttttacaagcaacattgccttatttgttaaaacaatctagtgggcatatcatcaatcttgcatcggtatcaggatttgaaccaacaaagacgaatgccgtttatggtgcgacaaaagcagcaatacatgcaatcacacagtctcttgaaaaagaattagcacgtacaggtgttaaagtgactagtatttcaccaggaatggttgatacccctatgacggaaggtactgattttggagaacgcaaaaaacttgaagcacagaacattactgatgctgtagtatatgctttaacacaacctagtcacgttaatgttaatgaagtaacgataagacctgtttaa

SEQ ID NO: 2620 - DNA, 1245 bp, Staphylococcus epidermidis
ttggataaacgtcaatttgaaattttagatatgctagttaaatttaatactgaaagtccacctggacgtaatacagatccattgcaagatgaaattgaaacgttacttaaacaactggatttttcaatacaaagagaacagttatatgacaatgatagtgtgatagtagcaaccttaaaaggacacaatcctcaagcgccaaaactgatattgaatgggcatgttgatgtagcttctgtagatgacgatcaatattggcagtatccaccttttaaacttaccaacaaagatgaatggttatacggtcgtggtgttagcgatatgaaaggtggtatgtcttcgttattctacgtcttggagcaattacatcaagaaggactacgccctgaaggggatattattgttcaatcagtagtcggtgaagaagtaggtgaagcagggactaaacgtgcgtgtgaaataggacctaaaggtgacttagctcttgtcttagatacgagtgagaatcaagcacttgggcaaggtggcgtgattactggatggattacagttaaaagtaagaatacaatacatgatggtgcgcgtagtcaaacgatacatgccggtgggggcttgtttggtgcaagtgccattgaaaaaatgacaaaggtgattcaatcgcttaatgaacttgaaagacattgggctgtcatgaagaagagtcctggaatgccgccaggtgcgaatacaattaacccagctgtcatagaaggtggacgtcatcctgcatttattgcagatgaatgtcgattatggattactgttcattacttaccgaacgaaagttatgaatctgtagttgatgaaatagagaaatatttaaataaggttgcagaagcagatgtatggctcagagagaatccacttgaatttgaatggggtggtacatccatgattgaggataaaggagaaatcttcccaagtttcactgtgccgacacatcatccaggttttaagcaattagaaaaagcacatgaatatattcataataaaaagcttgaacatggtatgagtacaactgtaactgatggaggttggacagcacattttgccattcccacaatactatatggcccaggtagtttagaagaagcacatagcgtagatgagaaaataaaagcaagggaattagcacaatatagtgatgttttatatacatttttaaaagagtggtatgcacacccacaatcctataaatcatcatag

SEQ ID NO: 2621 - DNA, 2166 bp, Staphylococcus epidermidis
atgcaaactcgattgggagaaaaagatattaatttaccgcagtattacaacaatagggagttaagttggctagattttaactacagagtattacaagaatcatatgataaaaataatccgttgcttgaaaaacttaactttatttcgatcttcagttcaaatttagatgaattctttatggttcgagtggctgggttaaaagaccaagtcaaaatgggatatgacaaacctgaaaataaagcacaaatgacgcctcaagaacaacttgatgctattaaaattaaaaatacagactatgtgaacactcaatatcaacgttataacgaattaattaaagaattagccaattacgatatagagatggtaaaacctgaagacttatcagatgcattgatagaaaaattagaacaagagttcaagttaagtgtcttgccgacactgactccgttaggtattgatgcgtatcatccatttccaaagttaaataataaaagtttaaatatttttgttgatatcgatacggaagatgccattaattcagctatcgttcaaattccttcattaattccacgctttttaactttaaatgagggtacaaaacaatacgttgttatggtcgaagatgtgattacgtatttcatcaattatctatttacaggatacgaagtactaaatacttttactttccgaataacacgtaatgcagatttaaccattcatgaagatggtgctgaggatttgcttatagaaattgaacgtttcttaaaagaacgtaagagtggttccgctgtacgtttagaattagattgtcgcacttctgaaaaagagaatgtagaatggttaatcgatcaattagaaattgaagataatgatatttattatttggatgggccactggatttaacattcttatttggattggttgatcatctatctcataagctcaaatatttaacgtatgagaaatatacccctcaaccacctaaatcattaggtaacaagaatatctatcaattatcattagaaagagatatattcttccaccatccgtatgaatcttttgaaccaatagttgactttattcgacaagcagcagatgatccaaatacaatcgctatcaaacaaaccttatatcgagtgagtaaggattcgccgattattaacagcttaaaagaagctgctgaaaacggcaagcaagtaacggtgctcgtagaattaaaagcacgctttgatgaagaaaataacgtacattgggcacgtatgcttgaagatgctggctgtcacgttatttatggtatgacacatctaaaaacgcacagtaaaattgcgttagtcgttaaacgcatcaataatgaactgacgtcatttgttcatttaggtacaggtaactataacgataaaactgctaaattatacacagatatgggtatcatcacgacaaataaagatatcgctgaggatgcaattaacttctttaattacttgagtggttactcaacaaaaccagaatacaataaattgattgtagcaccatacgatattcgagacgttttcattgatcgtatcgataaagagatacgtagtcatttacaacatggtaatggtaaaattatgatgaaaatgaactctttaaccgataaaacgattattgaaaagctcttcgaagcatctcaagcaggcgttaaaatacaactcatcattcgtggtatctgttgtctcaaaccaggcattccgggtattagcgaaaatatagaggttgttagtatagtgggtcgtttgcttgaacattcacgtatttactacttccataataatggtgaggcgcatatttatttatcttcagcagacgttatgacacgtaatatgattaaacgtgtcgaaatattattccctgtcgaagataaatcaataggacaacgattagttaattatatgaatttacaattatctgacaaccaaaaaggtcgttaccaagatgcacagggcgtttatcattacgtcgaaaacaattcatcacctttaaactctcaatcttacttgatgcaagaagcaattaagtatggagaagaactaaaaaaacaatcggtacaaccttcaggacaacccgttcattctagacgtggaggtagttggatgcgaaaattaaaaaacacatttaaaagataa

SEQ ID NO: 2622 - DNA, 1533 bp, Staphylococcus epidermidis
atggaagaaagaattggtttgatagacattggttccaacacgattcgacttgttatatttggctacaataaaaaaactggactcaatgaaatactgaatataaaaacacctgcacgattaagtcaatatctcacaaagtccaatgaaatgaatgatgaaggtattcatgttttaaaagagacattaagcagttttagaaaagttgcagataaatttaacgttgatgcattatatcccatcgcaacagctgctattcgtcaatctaaaaatcgtgaagctatcattaaagaaattaaacaagatattcatatcgaaattcaaattgtacctgaagaagatgaagcattttacggttactatgcgattacacatactaccgatattgaaaatggaatttctgtcgatatcggtggcggttctaccgaagttacccttttcaaagataagcaacttaaagagtctcacagctttccattcggcgtggtatcacttaagcgtcagttttttggtgataaagaacataatgacaaaacagccattaaaaatatggaacagtttttacgtgagcaatttagtcagctagactggctatccaatcaacatattgcgcttgtaggagtaggtggttctgcacgtaatgttgcacgcattcatcaatcagcacatgcataccctatcggtggcgttcataactatacgatgacttcgaaagatattaacaatgtttatgatttaatccgtaaaagttctcgcgatgaactaacaaatctagacggtttaagtcgcgaccgcgtcgatattattctgccggctatctccgtctttaaaacgcttttcaaaaaaattgacgccacacaattcaccttctcaagaaaagggattcgtgaagggtttattatgaaccacatcagcaaacgatatcctgatgagtttaataaaagtcatgtacgtaaagatgcattgcgtcatttagcgaacgaatatcatattgaagaaacgagtgctaatcgtcgtgtgaaattagctgaatccttattgaatcaaattataagtgaacgatcacttaatatttcggaaatagaaaaagaattatttattgaaggtgcctacatctattacctaggtagtttcattgattcagactcaagttcaccacatacgtattacttaatcgcaaattcaatgattaacggcttttcacataaagatcgtgtgaaattagctttgttagctagttttaaaaacaaatctttacttaaattttattgcaaagaaacacagtggtttagtaataaagaaatagatacaatacaagctttaggggggattattaaatttgcaaacaccttgaatatctcacatactagttttgtagaggaagttaaactaaaagcaaagaaagatgacaaatacgatttaatagtttattacaaaggatcacctattgcagaagaataccaagcaaatcgtcagaaaaagcatattgagaaaattttaaaaggtaaggtttctattatatttacaaaatcttaa

SEQ ID NO: 2623 - DNA, 819 bp, Staphylococcus epidermidis
atggaacgtttagaaaacaaaatcgcagtgattactggtgcgagtactggtattgggcaagcatcagccgtggcgttagcaaaagaaggcgcacatgtgttagcgcttgatatatcagatcaattagaagaaactgtacagtctattaatgataatggtgggaaagcaactgcatatcgcgtagatatttcagatgataaacaagtcaaacaattctcagaaaaaatagcacaagattttggacatgtagatgttatttttaataatgcgggtgtagataatggcgccggacgtattcatgagtatccagttgaagtgtttgataaaattatggctgttgatatgagaggaacgtttttagtaactaaatttttattacctttaatgatgaaacaaggtggttctattattaatacagcttcattctctggacaagctgccgatttataccgttcagggtataatgctgcaaagggcggtgtcattaatttcacaaaatctatcgctatagaatatggacgtgaaaatattcgtgctaatgccatagcacctggaacaatcgaaacaccacttgttgataatttagcaggtacatcagatgaagaggccggacaaacattccgagaaaatcaaaaatgggtaacaccattaggtcgactaggaacaccggatgaagtcgggaaacttgtagcatttttagctgccgatgatagttcatttataactggtgaaactattcgtatcgatggtggcgtgatggcttatacatggcctggagaaatgctaagtgatgaaagttggaaaaactctactaaataa

SEQ ID NO: 2624 - DNA, 189 bp, Staphylococcus epidermidis
atgttttctactagtaataaagctaaaaagactatatttggagctatgacttgttcaaaatgtggtaagacactcaataatgatgaaaacattaccattaaaatcaatactaaagaattaaaaggttatactcacttatcaaattgggctgatgcacagtataaattgtgtgaaatctgctcagaataa

SEQ ID NO: 2625 - DNA, 1077 bp, Staphylococcus epidermidis
atgccagaatctaaagcattacttaaatctttaacagatgttaatggcatttctggacatgaaatgcaagttaaatcattgatgaaagattatttaacacctgtcagcgacgagattgttgaagaccgattaggaggtatttttggtaaaaagaatgctactcatggaactaaatctttaatgatttccggtcatttagatgaaattggctttatcgttacacaaattgatgaacaaggatacatttatttcacgcccattggtggctggtggaatcaagtcatgttatctcaaaaagtgacgattactactgaaaatggtaaagagatacgtggaattattggttctaaaccaccacatgccctctcaccagaagagcgtaagaagcctgttgatattaaaaatatgtatatcgatattggtgtaggtagtaaagaagaagcgaaagaagcaggaattgaattaggtaatatgattacaccttatagcgaattcgaatcgctagccaatgataaatacttaacagctaaagcgttcgataatcgatatggatgcgcacttgctgttgatgtacttcaacaacttaaagatgaaaacatagatatcaatctatatgccggtgcaactgtacaagaggaagtaggtttacgtggtgctaaagttgcagcaaatttgattaaacctgatttagcaatcgctgtggacgtcggggttgcatacgatgttccaggtatgacgagtgaaaaaaatgaaggtaagttgggtgatggcccgttagcaatattaatggatgccactagtatcgctcacgatggtttgcgcaaacatattaaagacgttgctgagcatcataatattcctgtacagtgggcaacaacacctggtggtggtacagatgcaggtagcattcatgtagccaatgaaggtatcccaacaattacaatcggcgtgccattaagatacatgcactctaatgtatctgtgctcaacattgatgattatacaaattcagtgcgcttaattactgagattgttcgctcattaaatgatgacagttatcaagcgcttatgtggtaa

SEQ ID NO: 2626 - DNA, 468 bp, Staphylococcus epidermidis
atgaaaaaagtcatatcgcttttagtagtaatagtgataagtgctgtatctctttcagcatgtgggaaagaacgcacaaaaacttatgaaggcgaagtcaacggaaagcaagtgattacatctttgacatacaaagatgatgaagttctcaaacaatctactatagcaacagttaaatatgatgatttaggcattactaaagatgaagcgaaacaaatgtttaaaaatgatgagcaagcctttaaagggatagaaggtgtcacatataaagctgattttaaagatcgaaaggccatcgaacatatcgatattgattataaagatgcggatatcgatcagcttaagaaaaatttaggtttcatatcatccgatgccaaaaaaggtgaccatgtgagtatggatagggttgttaaacaactcaaacgtaatggtttaaaagataaaagtaaaatgaatgaagataattaa

SEQ ID NO: 2627 - DNA, 1578 bp, Staphylococcus epidermidis
atgtcagttttaactgtcatgcaattcatagtcaatattatcatcatgattgtgttattaacgattatgattcttggggttatttggttatttaaagacaaaggtcaaaatcaacacagtgtactaagaaattttcctgttttgggtcgaatacgttatatttctgaaaaaatcggtcccgaattaagacaatatttcttcgcaaacgataatgaaggaaaacctttttcacgaagtgattataaaaatattgttttagccggaaaatataaatcacgaatgactagtttcggtacaggtaaggattatgaagaagggttttatattcagaatacgatgttcccacttcaagcaactgaattacatatcgatcatactgaattcatttctacattcttatatcatattgagaatgagcgcctatttagtagagaagaacacagaaaaagcgctcaggttgatccgtttttcttaactgatgaacatgcagtaatattaggctctaaccttaaacatccctttaaaattaaacgattagttggtcaatctgggatgagttatggcgctttaggtaaaaatgcaattactgcactgtcaaaaggattagctaaagctggtacttggatgaatactggtgaaggcggactatctgaatatcatttaaaaggcaatggcgacatcatttatcaaataggtccgggactctttggtgttagagatcatgatggtaattttaataaagatatgtttatcaatcttgccgaacacgacaatgtacgtgcatttgaaatcaagttagcacaaggcgctaaaacacgtggtggacatatggaaggcaacaaagtcacagaagagattgcacgcattagaaatgtgaaaccatatgaaactattaattcacctaatcgttttgattttattaaaaatccaacagatttactgaatttcgttaatcaattacaatcaataggtcaaaaaccggtaggctgtaaaattgttgttagtaaagttgaagaaatagagacgttagttaaaacaatggtaaacatgaatacatacccaagctttattactgttgacggtggcgaaggtggtacaggcgctactttccaagagcttgaagatggtgtaggtttaccattatttacagcacttcctatcgtttcaagtatgttagaaaagtatggtataagagataaagttaaaatttttgcgtctggcaaattagtgactccagataaaatcgcaattgcattaggattaggtgcagatctcgtcaatattgctagagggatgatgataagtgtaggatgcatcatgagccaacaatgtcatttaaatacatgcccagtcggagtagcaacaaccgatcctaaaaaagaaaagggacttattgttgatgaaaaacaataccgtgttacaaattatgttacaagtttgcatgaaggattatttaacatcgctgcagctgtaggcgttcatagtccaaccgagattacttccgatcacattatctatagacaattagatggtactacaacgtccattcagcattataaacttaaattaatttcttaa

SEQ ID NO: 2628 - DNA, 783 bp, Staphylococcus epidermidis
atggatattaaacaatcttcagagaaacaaggtcgaccgtatcatttatcagacagtgggacagttaaaaaaagaaattttatattaataccagcttatattttattacaaagtatcgtaccaatcattgttgttttcggctcattagggatcactgcaatgataacacaacaagcaccaccacaatggttgtatcatttttcattgagtttaagttttgtgattgctcaaggtctaatattagttatcttttataaaatgcatcaatctgaaataaatgatgtggtgaagcaacaatggatagttgcaaagaataaaataattaaaattgtaatagttgcgattgttgtatatttattattaattatagttcgggtgattggaacagcattacctaatcatttaagttatcatctcacgcaatacgaacaacgtacattaggactatttaaatcaccttatgtgttgttagttacttttatatccatggtattcttacgtccaatggtagaacaaatcatttatagatatctcatcatccatgaattaggaaaagtatggaatagacaatttgtaattggtttgtctattgttattgaaacgatcgtacatgtttacgacatggcatcgatttttgaaattcttccatatatcgttattgcttcagcagctacaatactatatattaaatcgcgggataatttaattgtcgcttatatatttcaagtgattttgcaatgtatcctttttatagaaattttaagtaagtataccaacttttaa

SEQ ID NO: 2629 - DNA, 363 bp, Staphylococcus epidermidis
atgtcaaaggaagtacaacattgttattgtcaaactcaaactaccgttgagggaaaatttaaattaaagaaaatagtcaaaagggattttttgcttgttcctctatatattttggcaatttttattttacctgatttgttcgctaatattacaacgtggatattagctatagttaatggttatttatctgaagattatttaaatagcttttataatgatgcaagtactgtatatgcgtttgtcggagaggcaattgttattcttattttttatttattacataaaagaacgatgataacgactgcaatgactaaaattaaagaattaaaaaatatatacctttacttattatttgtgcgttaa

SEQ ID NO: 2630 - DNA, 180 bp, Staphylococcus epidermidis
atgtatattgtgtcagtagtgggatttacatattttcattgtaccgatgcagtttcaccatttgaagcaggaccttactttattgcagcagtcgtatttgttataggttaccattttagccaccgtaatttagcagtaccaattgctttgcatatgattacaaatttaatagcattttga

SEQ ID NO: 2631 - DNA, 663 bp, Staphylococcus epidermidis
ttgctacttaaggttgaacatcttacatacaaggttgataatcgtacgatcttagatgatattaatttgaatattaataaaggagacacgattgctattgtaggtccttctggaagcggtaagagtactttactcaaacaattgaatcatttaattagtcctacgagtggagatttatatttgaatgatcaatcttactttgattataagccggaagagataagaacacgtgtgagttatttaatgcaacaaagtgagttaattggttatacaattgaagataatatgaaatttcctgctgaggctagaaatgaaacttttgaccgtgataaagcgaaacaactcatctctcaagtgggactaggtaattatcagttagatgctcaaattgagcacatgtctgggggagagcaacaacgtattaccatcgcacgacaactcatgtatgaacctgaagttttattattggacgaagctactagcgctttagatacatataataaaaagaaaattgaagaaattatatttaaactagcggataaagggattgccattttgtggattacgcatagtgatgaccaaagtatgcgtcattttaagcgtagaatcacaattactgacggtaagatatcgagtgatgaggagttgaatggtaatgagtaa

SEQ ID NO: 2632 - DNA, 777 bp, Staphylococcus epidermidis
atgagtaatacagcactttgtctgacagcacttttattactaatccctatctttatttcttataaagaaggattacatattatcaaagatttagttattgctacaattagagcaaccatacaattattgattttaggttttttattacattatattttcgaaattaatgaaaaatggttattagtgctttgtgtgttagtcattattattaatgcatcttggaatacaataagtcgtgcttcacctgtcatgcatcatgttttttggatatcatttgtggctatatttgtgggaacagcactaccattggcggcaactgttgctacaggtgcaattaaatttacagcgaatgaagtgattccaattggaggtatgttagctaataatggtttaatcgcgattaatctcgcttaccagaatttagaaagagcatttgttcaagatgtttctgatattgaatccaaacttacgttagcagcgacacctaagctcgcatcaaaatcatctattagagaaagtatacgcttagcgattgttcctacaattgattctgtaaaaacatatggtttagtttcaattccaggtatgatgacgggattgattatcggaggcgttgacccacttcaagcaattaaatttcaattgcttgtcgtgtttattcatacaacagcgacgattatgtctgcactcattgcaacgtatatgagttacggtcagttctttaatgctcgtcatcaactcattgctagaacgcaacgcacaagacaaagtagttaa

SEQ ID NO: 2633 - DNA, 1179 bp, Staphylococcus epidermidis
atgactgtcgcacgcacaacaacatttatattaagtgtttttatcgtaggtatggttgagatgatggttgcaggtattatgaatttaatgagtcaagatcttcatgtttctgaagcggtggtcgggcaactggtgacgttgtacgcgcttacctttgcgatatgtggtccgttattagtgaaattgactcatcggtttgcttcgcgatcagtattattatggacgttaattatctttatcttcgggaatggtatgattgccattgcgcctcattttgcaataatagttgtaggacgtattttatcttctgccgcagcttcactcattattgtgaaagttttagcactcacggcgatgctcacatcagcaaaaaacagaggtaaaatgattggcattgtttatacaggttttagtggggcgaatgtctttggtgttcccatcggtacagtgattggcgactgggtaggatggcgatttacatttttatttattattgttgtaagtgtatttgttggtattttgatgttaatatatctaccaaaagaagatgaattgtcacattcaaatcaaacacttcgttcagctagtattgaatcacaaactggctcaagcgtcataagacctcgtgaggttattaaatatctgatgattacatttttagtactggttgctaattctgtaacattcgtctttattaatccattaattttatccaatggacatgaaatgtcttttgtgtctttagcactgcttgttaatggtgtagcaggtgtgatcggtacttcattaggcggtgttttatctgataagtttactagtaagcgttggttaataatttcgatttcaatatttataataatgatgataattcttaatttattattaccaggaacaggcttattattagtcggcttatttatgtggaatttaatgcagtggagtacaaatccagctattcaaagcggtattattgaacacgtcgaaggtgatacaagccaagtgatgagttggaatatgtcgagtctcaatgccggtattggcgttggcggaatcgtaggtggactcgttatgacacatttatcagtgaaatatgttacttatactagtgcattgataggtttaattagtcttatcattgtattcactttaaaaaatagacactatgctaaaaatttatga

SEQ ID NO: 2634 - DNA, 1356 bp, Staphylococcus epidermidis
atggttcaagtcaagataggtaactgtaccatcaatggcttacacaaaaagaatattgatgcattcttaggtatcccatatgccaaaccattcaataagatatctcgattccaacattcaaagcttatggaactaagcgaaccaatgattgatgcaactcatattcaatctatcccaccacaaccctacaattcacttgaagactttttttcaatgacagattcatcgtttaattcttttaaacaaaatgattattgcctatttttaaatatttggaaaccatcatccaatcaaaatcatttacctgtagtgatttacttttatggtggtagttttcttcaaggacatggtacagctgaactatattgtcctgaacacatagtagaacaagaaaatataatagtagttacttttaattatcgcttaggtgcactcggttacctagattggtcttattttaatcaacatttgaactataataatgggatttctgatcaaattaacgttttaaaatgggtacatcaatatatcgaacattttggcggtgatccaaataacgtgacactaataggtcaatctgcgggtagtatgagtatcatgacattaatgcaaatgcctgaacttgatgattattatcataaagtaatgttattaagtggaacgttaacaactgatacaccactcaatgcacatactaaagtacaacatttttcacaactcatgagacattattttcctaataaaacacttaagacacttaccagtgatgacattttatatctaatggagtctcaaaaaatagagcgcggaagatctcgtggacttgatttgatttatcaacctattaaagaccatcatatgtcacgatccattaaaaaattctcaaagccgacattcatgagttatacacacgatgaaggtgatatttatattgaagacgcaacacgcactttaccttctgaacgttttattcacttgatgactcaatatggtgcacacgtcgaaaaaattgatgtcattacaatgaaacaacaaagaaatttaataacagagcactgttttgttcgtccgacttatctatttttaaatcaaatgaatagttgcgacacttggctagcacgttttgattggcatcaaccccatacctcctactttaaaagtgcatatcatatattggatttagtattttggtttggtcacctctctattttgactaaaaatcattattctgtaacccaacatgatatgaatttaagtcgtaacatgatatctgacttagcttattttgcccgaaaaggtaggatgccatggaaatgttatgaacctcaacatcaagcgttacatatctataaataa

SEQ ID NO: 2635 - DNA, 1680 bp, Staphylococcus epidermidis
atgaaaaataaaaacaaatcaaaaagtaataagataagcctttctcaacttgtcctccttggtcttggttcattaataggatcaggttggttatttggagcgtgggaggcatcttcaatggccggtccagccgccatcatttcctgggttatcggtttcttagtcattggaacgattgcctataactatattgagataggaactatgttccctcaatcaggcggtatgagtaactatgcacagtatactcacggctcattacttggttttattgcagcatgggcgaactgggtatcattagtaacaattatccctattgaagcagtgtctgctgttcaatatatgagttcttggccatgggattgggctaaaccaatgggatctttaatgaaggatggctcaatcagtacttacggtttgatcgctgtttacatcattattgcaatcttttcattattaaactattggtcagtaaaattattaacatcatttacaagtttaatttcagtattcaaattaggtgtccctattttaaccataattatgttaatggtttccggttttgatacaggtaattatggacactctatcggtacatttatgccttacggaagtgcacctatttttgctgcaacaacaacatctggaattatcttctcatttaatgcattccagacaattattaacatgggatcagagattaagaatccagagaaaaacatcgcacgtgggattgttatttcacttacattaagtgctatattatatattgttttacaaagtacgttcattacatcaatgccaagttcgatgttgcatgaacatggatggagcggtatcaatttcaattcaccatttgcagatatggcaattttattaggtcttaactggttagcgatattactttatatggaagcagttgtgtcaccgtttggtactggagtttcttttgttgccgttactggacgtgtgttacgcgctatggaagaaaatgggcatattcctaaattcttaggtaaaatcaataaaaagtataatatcccacgtgttgccattgcatttaatgcaattatcagtatgattatggtgacattgttccgcgactggggtacactagctgcagttatttctactgcaacattagttgcatatttaactggtccaacaacggttatttcattgcgtaaaatggcaccaaaaatgactcgtccattcaaagctaatattttaaaatttatggcacctttatcctttgttttagcatcattagctatctattgggcaatgtggccaacaacagcagaagttattttaattattattttaggtttacctatttatttcttctatgaatataaaatgaattggaagaatactaaaaaacaaattggcggaagcttatggattattatctatcttattgttctcgcattcttatcatttattggaagtaaagagttcaaaggcttaaattggattcactatccatgggatttcttagtcatcgtaatcgttgctttaatcttctatcaactaggtacgacaagttactttgaaagtatttatttcaaacgtgcaaacaagttgaataagaaaatgggtgacaaattgcgtaaaacacgaaaaaaagcgcgtcataaagattggaaagaacgcgatagacaagaacaaaatcaataa

SEQ ID NO: 2636 - DNA, 285 bp, Staphylococcus epidermidis
atgaataaacaaaaaaatgagcaagttgagcaatttttagctaaagaaagccaatggcaagattgttataaatttttgagaaatttaatttttaatgaaactgaacttgaagaaaattataaatggatgcatccttgttatacgataaacaataaaaatgctgtgctaatacatggatttaaaggttatgtagcgttgctttttcaaaaaggagcaatacttgaagaaaagtatcatacattgattcaacaaactgaaagactacaggctgaagctgtctcctaa

SEQ ID NO: 2637 - DNA, 1053 bp, Staphylococcus epidermidis
atgaaagcagcagtatggtatggacaaaaggatgtacgcgttgaagatcgcgaacccaaagcaataaaagacaatgaagtgcaagttaaagtctcttgggccggtatctgtggtactgatttacatgaatatttggaaggacctatctttatttcaactgatcaaccggacccactacttggtcaaactgcacctgtgactttaggtcatgaattttcaggtgtcgtagaaaatgttggtaaagacgtatcacgttttaaaaaaggggatcgtgtggtagttaatccaacagtgtctaaaagagaaaagccggaaaatgttgacttgtatgatggttattcatttataggactaggttctgatggtgcatttgccgagtttactaatgctcctgaaacaaatgtttatcatctacctgataatgtttcagcacgagaaggtgctcttgtagaaccaacagccgttgttgtccaagcagttaaagaaggcgaattattattcggtgatactgtagcagtatttggcgctgggccaattggtttgttaactattgttgcagcaaaagctgctggtgcaagtaaaatatttgtctttgacttatcagaagaacgtttagcgaaagctaaaagtgtcggtgcgactcacgtgtataactcaggtaacgtcgatccagtacaaacggtttatgaacatactgacaacggtgtagatgtgtcatttgaagttgctggtgtaggtattactttacaacaatctattgaagtaacacgtccacgtggtactgctgtcatcgtatcaatcttcggtcatcccgtagaattcaatccattattacaaatgaataaaggtgtcaagttaacaactacaattgcttatacaccaactacattccaacaaacaatagatttaatcgctaacggtagcttaaatgttaaagacgtcgtaacagatcaaattgaattagataatattgttgaaagtggcttcaatcaacttgtaaacgataaatctcaagctaaaattttagtccgtttaaatggtgaccaaaaataa

SEQ ID NO: 2638 - DNA, 1257 bp, Staphylococcus epidermidis
atgttaagtattaaaaacttaaccaagatttattcagggaataaaaaagcggtagataatatttctttggatattcaatctggtgaatttatcgcttttattgggacgagtggtagtggtaaaacaactgcactacgcatgattaatcgtatgattgaggcgacagatggacagattatgatgaatggaaaagatgtccgtaatatgaatcctgttgaattgcggagaagtatcggttatgtcattcaacaaattggtttgatgccacatatgactattcgagaaaatattgttttagtacctaaacttttaaaatggtctaaagagaagaaagatgaaaaagctaaagaacttattaaactggtagatttacctgaagaatatttggatcgttatccagctgaattgtcaggagggcaacaacaacgaattggtgttgtgcgcgctttagcagctgaacaagatattatattaatggatgaacctttcggtgcattagatcctattacacgcgatacattacaagatttagtaaaggaattacaacaaaaattaggaaaaacatttatttttgtcactcatgatatggatgaggctattaaattagcagacaaaatatgtattatgtctaagggaaaagtcgttcaatacgatacacctgacaatattttacgatatcctgcaaatgactttgttagagattttattgggcaaaatcgcttgattcaggatcgtcctaatatgaaatctgtggaaagtgctatgatcaaacccgtcactgttaaagcagatgattcattgaatgatgcagtaaatattatgagaacacgtcgagtagacactatttttgtagtcaataatcaaaataaattattaggatttttagatattgaagatatcaatcaaggattacgtgcgcgtaaagaattaattgataccatgcaaagggatgtctacaaagtacatatcaattcaaagttacaagactcagtgcgtactattctaaaacgtaatgttagaaatgtacctgtggtcgataatgatgaacatctcattggtttaattacacgtgcaaacttagtcgatattgtgtatgactcaatttggggcgaagaagattctgatagttatgagatcccaaatgaaagcttagatgagaataatcacgatttaccacaaaatcaaactgatacacgaacaaatataaatgaagatgtgaatgattatcatgatgctcaacatagaggtgaggattaa

SEQ ID NO: 2639 - DNA, 636 bp, Staphylococcus epidermidis
atgaaagcattcttacaagaatacggtagtcaacttttatcaaaagcagtagaacatttttatatttctatgtttgcattattgttagcgattgtagtagctgtccctttaggtattttattatcaaaaacgcaacgcacagctaatgtggtattaacagttgctggcgtgcttcaaaccattcctactttggctgtgttagctatcatgattccaatatttggagtaggaaaaacaccagctattgttgcattatttatctatgtattattaccaattttaaataatacagtattaggtgttaaaaatatcgataaaaatgtcatccaagctggtcaaagtatgggaatgactaaatttcaattaatgaaagatgtagaaatgcctttagctttaccacttattattagtggtattcgtctatcaagtgtatacgtcattagttgggcaacactcgcaagttatgtaggtgcaggtggacttggggatcttgtatttaatggattaaatctttatcaaccacctatgattattagtgcagcgattgttgttactttattagcattagttattgactttatactttcattagttgaaaaatgggttgtacctaaaggattaaaagtatctagataa

SEQ ID NO: 2640 - DNA, 945 bp, Staphylococcus epidermidis
ttgaagaagtatcttaactatccactgattctgattgcattatctctcatcgtgttatctggatgcagtttaccaggcttaggtgatggaaatgctaaagatgatgtgaaaattacaacgactgaaacaagtgaaactaagattataggtcatatggaaaaattattaattgaacatgaaactgatggaaaaatcaaaccgacgttaattggtaacctagggtctagcattattcaacataatgcgttacaacgtggagatgcaaatatgtcagcggtacgttacacaggtactgaattgacgagtgtattagcagctaaacctactaaagatccagataaagccatgtctgaaacacaacgcttatttaaaaagaaatatgatgaaaagttttatcattcacttgggtttgcgaatacatacgcattcatggtgacaaaagaaacggctaaaaagtatcacttagaaaaagtatcggatttagagaaatataaagatgaactacgtcttggaatggatacccaatggatgaaccgtgcaggtgatggatatccagcttttgttaaagattatggatttaaatttgatagtgcgcgtccaatgcaaattggtttagtatatgatgccttaaaaaataataaattagatgtagcagttgggtattcaacagatggacgtattgcagcttatgatttgaaaatattggaagatgatcgcaaattcttcccgccttatgacggtagtccacttgcaaatgaacaattaataaagaataatccagaaatcgataaggcactaaaaaaattagaaggtaaaatctcaacagaagaaatgcagaagttaaattatgaagcggatggaaaaggtaaggaacctgcagtgatagctgaagaatatttaaagaaacatcattactttgaagaaaagaaaggtggtcataagtaa

SEQ ID NO: 2641 - DNA, 696 bp, Staphylococcus epidermidis
atgaaaggtaatttgttacattcaatcatcgaatattactcactgaactgggcctttcttctagaactgttcttcaaacatctattaatgtcggtatatggtgtgttgtttgcatgtataattggaattcctattggtattttcatagccaagtatagacgtttatcgtggccggtaattacaattgcaaatattatacaaactgttccagcaatcgctatgttagccatacttatgttggctatgggattaggaccaacaactgttgttgtaactgtattcctatattcgttattacctattattaaaaatacttatactggtattgtagaagttgatgaaaatattaaagacgctggtaaaggtatgggaatgacggggaatcaaatattaagaatgatagagttaccattatctttatctgttattattggtggtgttagaattgcacttgttgttgctatcggaatagtagcgattgggtcatttatcggtgctccaacactaggtgatattattattcgtggtacaaattcaacagatggaacaacattcatcttagcaggtgccataccaattgctttaatagcaattatcatagatataggattacgttatctagaaaaacgtttagatcctactcgtaaaaacaaaaaagattcaatgcaaaaacatcaagtacaaaaattacattaa

SEQ ID NO: 2642 - DNA, 702 bp, Staphylococcus epidermidis
atgattgaacatttaggaattaatacaccttattttgggatattagtatcattaataccatttgtcatagcgacttatttttataaaaaaacgaatggtttctttttactagcacctttattcgtaagtatggttgcaggtattgcttttttgaaattgacaggaattagttatgagaattataaaatcggtggcgacattattaatttcttcctagaaccagctacaatatgctttgcgattcctttatatcgcaagcgcgaagtattaaaaaaatattggttacaaatatttggtggtatagctgttggtacaattattgccttgttattaatttatcttgttgcaataacattccaatttggcaatcaaattatagcatctatgctacctcaagctgcaacgacagcaattgcattacctgtatctgacggtatcggtggtgtcaaagaattaacctcactcgcagttattttaaatgcagttgtcatttctgctttaggtgctaaaatagttaaattatttaaaatatctaaccctattgccagaggacttgcactagggacaagtggacacactttaggtgtcgcggcagctaaagaattgggtgagactgaagaatcaatgggaagtattgcagttgtcatcgttggcgttattgttgtagcagtagttcctatccttgctccaatcttattataa

SEQ ID NO: 2643 - DNA, 450 bp, Staphylococcus epidermidis
ttggaacaaacgcatctcgttaaaaacaaagcggttgataacaagaagtcaatgaaatacagtatttttcaacaagcattaacgattgcagtgattttacttatatcaaaaattattgaatcatttatgcctattccaatgccagcttcagtaattggacttgtactattatttatcgcattgtgtacaggcattgtgaaattaggtcaagttgagactgtgggaactgcattaaccaataatattggattcctattcgtaccagctggtatttcagtcattaactctttaccaatccttaagcaaagccctattttaattattttacttattattatttcaacacttttattattaatttgtactggctttgcgtcacaattattagtgacgaaatcacttttcccttctaaagagaaaaatgaagaaacaagtcacataggagggtaa

SEQ ID NO: 2644 - DNA, 759 bp, Staphylococcus epidermidis
atgaaagcgttaatcgttgatgatgaaccacttgcaagaaatgaattacaatatcttttaaatcttaatgatgctatagatgaaattgaagaagcagaaaacatagaagaaacattggagaagttactctacaacacatttgacttaatattcttagatataaatttaatggatgaaagtggtattgatttagctcaaaaaattaataaaatgaagcgatcaccacatattatctttgcaaccgctcacgagaaatttgcagtcaaagcctttgaattaaatgcaaccgattatatattaaaaccttttgaaaaagaacgtattaatcaagctgtaaataaagttgacatggctaaagataaaccaaaaaacaaagataaaactatcacacctaaatatattgattatagtgatgatgagcgcgctcaaacacatgtacttccaattgaagtggatgaacgtattcacatcttaaatttcacagacattatcgcattatctgttaataatgggattacaacgatagatacaacaaaacaaagttatgaaacgaccgaaacacttaatcattacgagaaaaaactaccttcctctctatttattaaaatacatcgcgctactatcgttaataaagaacatatccaaacaatagagcattggtttaattatacgtatcagctgacgttaacacatgaatttaaatatcaagttagtcgttcttatatgaagacttttaaacaacaacttggtcttcaataa

SEQ ID NO: 2645 - DNA, 1776 bp, Staphylococcus epidermidis
atgcttaatttatttattttattacttgaacgcgtgggattaattattttactcgcatatatactcatgaatattaatcattttaaaacaatgatgagcgaacgtgacaaatggcgttcaaaattccaactaatcattatttttggtatattctctatgatttcaaattttacaggaattgaaatagaaaatggccatatcgtatctggtgatatttattaccacttaagcaaagacgcctcaatggccaatacccgtgtattaacaatcggtgtttctggtctaataggtggaccgtgggtagctataattgtaggcattatttcaggattatgtcgtttatatattggcggggctgacgcatatacctatcttatttcatccatagttatcgctatcatatctggttactttggtcatcaaacaataaaacaaaatacatatccgtccattaaaaaaggtgctattatcggtgcaataactgaaattattcaaatgggctgtatattattatttacaaataacttacatcacgcaattacattagtcagttttatagcactaccgatgattatcattaatagtttaggtacagccatatttttaaccatcattttgtcgaccatcaagcaagaagaacaaatgcgtgcagtccagacgcatgatgtattacaactcgctaacgaaacactaccttactttcgatctggacttaatgaaaaatcagcccaacaagctgctgaaattattttaaaattaatgcaagtgtcggcggtcgctattacaaataaaaaagatattttaacacatattggtgcaggcagtgaccatcacgtagcacgtaaagagataattactgatttatctaaagaagtgattcaatctggaaaattaaaagtcgctcatacgagagaaggaattggatgtcaccatcctaattgccctcttgaaggagccattgtcgtccctctttatatacataatgaagtcgcagggactttaaaattttatttcacagataacaatattatttcaacttcagaccaacagctcgcaaaaggtctcgccaatatattttcctcacagctagaactaggtcaagctgaaatgcaaggacaattattgaaagacgctgaaattaaatcattacaagcacaagtcaatccacatttcttttttaatgctattaacactatatcagcactagtaagaattgatagcgaaaaagcacgacgtttactgattcaactcagtcagttcttccgctctaatcttaatggtgcacgtaataatacgattactttacaaaaggaattacaacaagtagcagcatatttatccttagagcaagctcgctatccaaatagatttaacatacactatcgaattgatgatcagtgtcaagatgcgctcatcccaccttttataattcaaatattagtggaaaattctattaaacatgcatttaaaaatcgtaaaaagaataatcatattgatgtggatgttagcatgaagcaagactacttaagtatatctgttcaagataatggtcaaggcataccagctgatcaattagatactattggatatacgacagtaacgtctaccactggtactggtaatgccttagtcaatcttaataaaagacttactggactatttggaacaacatcggcactgaacattcaatcttctcaatcaggcacgactgtaagttgtttaattccatataaatcttctaaggaggaacactttaatgaaagcgttaatcgttga

SEQ ID NO: 2646 - DNA, 1401 bp, Staphylococcus epidermidis
atgaatacatcacaaaagtttaggggagataatcgcttattattagggattattttaggggttattacattttggttatttgcacaatcacttgtaaatctagtcgtgccattacaatcatcatacaatagtgatattggtactattaatatagcagttagcttatcggcactattttctggtctgtttattgtaggtgcaggagatattgcagataaaattggtagagtaaaagtgacatacataggcttagcacttaatattgttgggtcggttttaatcattattacgccattaccaagtctattgattattggacgtgctattcaaggattgtcagcggcatgtataatgccagcgacactcgcaatcattaatgaatattatatcgggacagcacgacaacgtgcattaagctactggtccatcggttcatggggaggtagtggtgtttgtactttgtttggtggtttaatggcaactaaccttggatggcgctcaatctttattgtttcaattattctgacaatattatccatgtttctcattaaacatacacccgaaacaaaagcagagcctataggagatcaaccgacagagacaaagaaatttgatgttgttggtttaatcatcttagtggttagtatgttaagtattaatgtgataataactcaaacctctcaatttggtttgttctcaccatttattttgggacttattgcaatttttgttatatcgttaattatattcgtgatttacgaaaataaaatcaaacaaccacttgtcgattttgatatctttaaaaacaaaggttatacaggtgcaacgatttcaaactttatgttgaatggtgtagctggtggtacattgattgtagtaaatactttttatcagcaaaaattagattttaactctcaggaaacaggatatatttcacttacatacctaattgcagtattaattatgatacgtgtgggtgaaatgatattacaatcgttaggacctaaaagacctttgttactcggaagtgccttgaccgtcataggattaatattattatctttgacgtttttacctaatgcttggtatatagcgtcaagtgtcattggttatttattatttggtaccggtttaggtgtttatgcaacaccatccacggatacagctgttgcacaagcaccagatgataaagtaggcgtcgcatccggtgtatataagatggcatcatccttaggaaatgcatttggtgtggccatctcaagtacagtttacagcgtacttgcagcccaacttaatctgactttaggtggttttactggagtaatgtttaatgcgcttatagcattattagcattcctttctattttgttcttaataccgaaaaaacagtctaatgtataa

SEQ ID NO: 2647 - DNA, 933 bp, Staphylococcus epidermidis
atgaaaatagcaattgcaggttctggcgcattaggtagtggatttggtgctaagttgtttcaacatggttatgacgtcactttaattgataattgggaacctcaagttactacaatacaacaggacggtctacatatcgatattaatggtgaagcgcatcatttcaggctacctatgtatagactaacggaaattcctaaagcaacgtcctatgatattgtttttctatttcctaaatctatgcaattagaagaggtgcttagtcatattcaaccccatcttcatgataatacaattgttgtgtgcactatgaatggtttgaaacatgaacgtcttatacaacaatatgtttctatagatagaattgtacgtggagtaacaacgtggactgccggtattgatcaacctggtcacacgcacttaatggggcaaggtcctgttgaaattgggtgtctcgtgcccgagggaaaagaaagcgtagatatcattgttaatctgctacaaaatgcagaattaaaaggtgtaaaaagtgaacatttacatcaatcaatttggaagaaaatatgtgttaatggaacagctaattcattatgtactatacttgaatgtaatttggcagcactgaataatagtgatgacgctaaaaatttgatatataaaattacacaagaaattgttcatgttgcaacagttgatgatgttcatcttaatgttgatgagatttttgattacttaattgctttaaatgataaagtaggcccacactatccttctatgtaccaagacttaattaaagataatcgaacaactgaaatagattatattaatggagcagttagtaaattagggaaagagaatcatattgctacacctgtaaatgattttgtaacaaatcttgtacatgctaaagaaaatcaacgtggtgcacaatga

SEQ ID NO: 2648 - DNA, 837 bp, Staphylococcus epidermidis
atgcataaacgacttttcatcactttattaggttttatcattttactagctggatgcgattattctaaagaagagaaccaaactggtatattttataacgtttttgtaaaatctatggatggatttcttcattttcttggcagagtctttcaggataactatggctttgctattatttctattgtactcatagttcgtttcatcctattacctttcatgttaatacaagttaagaatatgcatatgatgcgcgaaaaaacaaaagtcgtccaaccagaattggatgctataagagataaaatgaaacacgcaacatcacaagaagaacgtaatgcagccaatcaattgcttatgaaaaagtatcaatcgtatggaattaatccattaaaaaatatgttagggtgtcttcctgttcttatacaaatgcctatattaatggggctttatatgagtttgaagtacccttcgagtcacggaattactgaatacccacatttcttatggtttgatttaacgcaacctgatttgattatgacaataatcgcagcaatcatgtattttgttcagccacttgtaaactcaatccattatccaaaagatcaaagaaaaacatattactttatgatggtattttcaccgatattcataacatatgcgtctctacattctgctgcagctttgggcttatattggagtataagcgctgcttttctaatagtgcaaatgcattttgctcactctcattataagaaagtggcactacatgaagctaaaaaactcaaacaaaaattagagcaaaataaagacaatagtgagttattaaccgaagagtcataa

SEQ ID NO: 2649 - DNA, 1518 bp, Staphylococcus epidermidis
atgaagataaaactgtttgtcattgttgtcatttttttgatgactattttatcgataatttcaataacaacacgagaaatcgcacatagtaagaatgagacgatattgacacatgcttctcaaaaacatattgataaaatggttgagacagcaatgaagaaaggagatatccccggactagcaatattgatcatcaaagacaataaaatctttttaaataaagggtatggttatgccaatattgaaaaaaaagcaaaggtaaatccacatactcaatttgaaattgcatccaatactaaagcttttacaggttatgcaattctacaactagctcaagaaggaaaaataaatttaaatgacaaagtaagtacatttatacccggatttaaaatgaagtatgaagacaaagaaagagatattactattgaacagctattagctcaaactagtggtatccctggagatatcactgaagaaaatcgttactctaaacagtacgatagtattgaaaatatcgttaattttgcaaaaggaaaacgtctgaaccatgtacctggagaaacttttgaatattcgaatatgaattatgatattttaggtcttattattcaaaatgttacccatcaatcctatacatcatacatccaaaagcatgttttagcccctttaaagatgaaacataccacttttaaagtaaataataccaaatctaataacgaagcattaggttatatatgggaagataatgaaaataaagttgcacaaccagagtttaacattggggatactcctgcggcatatatgatgtcaagtacaagtgatttagcaaaatgggtccaactacagatccaccctacttcaaaatcacaagccaagttaattcgtcaatcgcatcaggtattatctaactcattaaatagtgagcctaacgcagatagctacggttcgggatggtttataaatactgatgaccatctcgtatttcataccggcgttttagataatttctcttcacaaattttattaaatattcgtaaatcttatggcattgtcgtattagccaatacaaattcaaatcaagtgactcgtttagcggaacatttaaatactcaaattatgaataatcgtcattacacaactatagaagaaaaagtgaaccaaacgaaagatatgcaacttatcatttccacattggccgatatattcatggtcatatttagtatcttagtttttagtaaaatcttaaaattacgtgaaggccacatcttcatccgtaaatgtttacgaacttcaatcatgttcagcatcattttgttgggatttgtagcaatgaatattcttttttatctacttcccttgataatattaggagatgcaacttgggggtttgttttatcatggttacctttacattcgaaatatttagttgtaagtgtctatctagccataaccatgttactggtttggttatctttaataagtataacttaccgttctgataaaaagaaaaaacattaa

SEQ ID NO: 2650 - DNA, 1830 bp, Staphylococcus epidermidis
atgttcattcaatttaaaagacttttgattggtagacctaaaagaaacagagacttaaaaaacgagaaaatttcaaaatttaaaggattagctatcctatcatccgatgcattgtcatcagttgcatatggtcctgagcagatattaattacattatcggtgataggagctgtggcatcttggtatacgctgcctattgccggagcagttttaatattattaacagctctaattttatcttatagacaaattatttatgcttatccaaaaggtgggggagcgtatattgtttctaaaacaaatcttggtgagaaatggggattgctagctggagggtctttattagtcgactatatattaacggtggcagtgagtatttcttcaggagcagatgcttttgttgctgcatttccccacttatatcattttaaagtgcttattgcatgtttattagtactctttattttaatgatgaatttaagaggtttgactgaatcagcaactgtattatcatatccagtctacttatttattataggtttaattgttttgatagtcgttgggacatttcgcgtagctactggacaaatcgcaccacatattcattccactgtaggtagtactgtgcccggtgttacgttatttttacttttaaaagcattttcatctggagcatcatcacttacaggtgtagaggcaatatccaatgcagtaacaaattttaaaaatccagcacctaagaatgcagtcaaaactttagtcactatgggtacaattttagcagtgttattagtaggtattgttgtactctcatatatatatggaattatgcctcaaactgaaacgaccgtgctttcacaacttgcgtcccaaatatttggtgaaaatgtagcgttttattttatacaagctactacagttatgattttggtattggctgctaatactggttttacagcatttcctatgctagctgcatcaatgtctaaagacaaatatatgccacgtatgtttactgttcgtggtgatcgtctcggttattcaaactcgattattatattaggtgtattagccatcattttaattatcctatttgaaggaatgacagagaacctcattccattatatgcagtaggtgtttttattccatttacgcttgctcagtttggtatggttttaaaatggcttcgggaacgtcctgaacgatggggaataaagcttactatcaatttaattggtggtacgattacgtttatcgtattcatgattttactcattactaaacttaatcaagtatggccaattcttttatttttaccttttattgtatttatttttattagaattcatgtacattatgagaatatagcatgtgaattacgatctgaaattgatatacacgatattcctgttgtagatcgcaatttagctattgtacctattcaaagtattacaactgtagttgataaatctatttattatgccaaattattagctaatgatgatgttattgcagtgcatgtgacatttggtgatgaagatgagcaggcttttatgactaaatggaaaaaacattttcctgatgtaagacttgtgattttacattcagagtatagaagtattattcatccgatttcacgatttatagataaaattcgtaaaaaagcgaatgataaaaattatttaattacagtagtcgttccagaatttatccctaaaaaggcttggcagcacttattgcacaatcaaacgagtttacgtttaaaattgcatttaatttatcaaaaaaacgttactctgtgtactattccattcaaattaataaaataa

SEQ ID NO: 2651 - DNA, 1377 bp, Staphylococcus epidermidis
atggcaaaacaactacaaagagagttgaataataggcatattcaattaattgctattggtggtgctataggaactggtttatttttaggttcaggacaaacaatttctctaaccggaccttcattactctttacttacatgttgataggtatagtgttatttgcttttatgagagctcttggtgaattattattaagtaactctaaatttaattcattcgtagatattgcaaatgaataccttggtccatttggtggatttgtaattgggtggacctattgggtttgttggattgtctctagcatgtcggacctcactgcgatgggacaatattttgcttattggtatccacaagtcccacactggttgacagtactatttattgtactcctacttatatcatttaatttgcttggcgccagattatttggagaacttgaattttggttttctataattaaagtcgttacaattattacgatggttattgtaggtttagttctgatttttttatcatttaaaacagaatatggacatgcttcttttggtaatttgatacatcatggcgggatgtttccacatggtgcagctggatttttaatgtccttccaaattgctgtatattcatttatcggtatagaacttataggagtcacagctggcgaaacaaaaaatccagaaaaaacaattcctaaagcaataaataacgttcctatacgaattttattattttatataggtggtttacttgtaatcatgtctgtcattccatggtttaaagttgatcctgatagtagtccgtttgttaaattattcacactaattggtgttccctttgctgctggcatagttaattttgttgttttaacagcagcagcatctgcaacaaatagcggaatatattctaatagtagaattttatttggtttagcgaaacaaggtttaggtcctaaagtattgacaaaaactaattctaatggtgtaccttatctctcaatgttagtatcttcaataacattgttaatcgcagctttattaaattttattttcccagatgctattaaattatttatttatgtaacgacactatctaccgtcctattccttgtagtgtggggaatgattatcgtttcttacatcgcatacgtaaagaagaatcctgaacaacatcaatcaagtgcatttaaattatggggcggaaaaattattgcctatattgtgttatcttttttcatatttatctttattttgctattctttagcaaagatactagagtagctatttttatttcaccattatggtttatcttcttgttcttttattataagaaatacaagaataatgctgaatctttagccgatagacagcgacattaa

SEQ ID NO: 2652 - DNA, 810 bp, Staphylococcus epidermidis
atgaaaataggtactatttctgacctacacattgaccgtcatccacacttaaatcctgaaatatatttagaaaagctttgtcaggtgattaaacaaaggtctattgagttacttatcatagcaggggatatatctaatgactataggataagttacgattttattcaaagcattcaagaattaagcgggatacctacttattttgttccgggaaaccatgatttatggtctgaccaagcagataaaacttcaacagaaatactatcattctttcgctcaaaagaggaatgcttgatcggcaatccaatcattattaatgatcaatatgcaattgtaggccatgtcggttggtatgattatagctatgcagatcatcgtttttctcagcaaaaaatagcaagtggtaaacattatggtgcaacttggcaagataaagtgagaacagattggtcattatcagacccgaaactatcccttttagctgctcaagaggtggaaaaagacattaacaatgtaagcccacgtcaaattattttagttacgcacgttgtaacacatcctcaattcgtagtaccaacgcctcatcgtatttttgacttttttaatgcatttattggtactcatgattttgatactatttatagaaattatcctattcgatttagtataatggggcatgttcattttagaaaaaaacttgttgaaaataacatattatatatatgtccgtgcttaggatatcaaagacaatggatgacagatgatatagcatatgaaataaatcatgctttagtcgattttgatatttag

SEQ ID NO: 2653 - DNA, 525 bp, Staphylococcus epidermidis
atgctattacaatttaataattacgatattaaagcaacacaaattatgagtcattggcctaaacatccaaccaatccctacaaaggctatgttggtcatcctttgttagttaaatttggccatcatcaaacaatatttcctgatgcttttgcgccatttcttaaacaatatgattctcgaattgtagatggtacaggtacatcattaaatcaacttgaaaaatttatcgacaaaggtcagccagtgatcatttatcatactagtttgggttctaaaccgcttcgacgtgtatttcatttcgacaatcaaccaacaaaactagtctcaaatattcacgttactttattaatagggtatgatgatgactattattattatattgatccgttatggagtcgtttatcaaaatttgttattttcccatctattattcctaactctaaacaaatcattaaaattaaaaagcacactttggaaaatagttataatgccccaggaaaaaaatgcatatatatcgataattaa

SEQ ID NO: 2654 - DNA, 1200 bp, Staphylococcus epidermidis
atgatgactacaagttccaaacacttatctaaaatattaatcgttatacttggcgttatgactgcatttggtcctttgactattgatatgtacggaccatctttacctaaagttcagcatgcgtttggttcatcaatttcagaaatacaacttacattatcctttgctatgataggtttagctattggtcaatttgtattcgggccactatcagatgtattaggtcgtaaaaaaatggcactcattttattgattggatatttaatagcctcattactatcagtgtttacagttcatttaacaatatttttaattatccgtttaattcaaggtttagcaggagggggtgcaatcgtcatagccaaagcttctattggagataactatgacggagacgaattagcaaaatttttaacttctcttatggtcataaacggtataatcaccatcattgctccactgttaggtggcctcgctttatctattgcaagttggagaatgatttttatatttttaacaatcattaccttaatagtcatcttaggcatcttattaaagatgccagttgggctccatcaagaacaatctcagttaaattttaaagcaatatttaaagattttggtctgttattaacaaaacccaccttcgttattccgatgttattgcaaggattaacttatgtcatgttattcagttattcgtcagccgcaccttttatttctcaaaagatgtatcatatgacaccacttcaatatagtgcaatgtttgctattaatggagtgggtttgatagtcgtcagtcagataaccgctattatagtagaaaagataagccgatatgcgatgctcatatatttaacaatcattcaaatgttaggtgttgtaattttaatatttactttaacattacatcttccattgtatgttttacttattggcttttttattaatatatgtccagtcacttctatagcaccactttgtttttctatggcaatggctgaacgcacaggtggaagtggcaatgcttcaagtttacttggcctattccaatttattttaggaggcctcatttctcccctagttggtttgaacggtcagcatgatatgtccccgtatctaattattattagtgctacagctgttttacttattgcactacaaattatttatttcaaattatttatgaaaaacacatag

SEQ ID NO: 2655 - DNA, 702 bp, Staphylococcus epidermidis
atgaaaagaacagataaatatagagattcatacaaatatgatgaccaatatcaaaatcatcgtaaacgttcagaagaagatatgtatcgacaacatcaagagtcccaacagagagcaaattcaaatcgtgcaacacaaagtgaaaatgatagagagtatgaaaatcatcctgaacgttattacaatggaagagactatcgacgtgagcagcaattggaagaagaaaatgaaaaatcaagcaaaactaaaaaatggctgattgcaatcatagttattttactcattattgtagctatctttatcacgcgtgcaattatcaatcataataatgataaagtaagtaatgaccctaacgtttcacaaaactataaaaaagaagttgaaaatcaaaacgacgacattaatcgacaagttgattcagccaaaagcgatataaaaaataaaaaggacacccaatcccaaattgataaactacaaaatcaaattgatcaattaaaacaaaatgaagaaactaatgcggattctaaattcacaaaattttatcaaaaccaaatcgacaaactgaaaaatgcaaataacgctcaacttaataacgaaaatcaaagtaaagttaacaacatgcttgaagacatcaatacaaaatttgatagtattaaagctaaactagaaaatatcttgaatggatcaaattcaggaaactaa

SEQ ID NO: 2656 - DNA, 1152 bp, Staphylococcus epidermidis
atgtcaccatataaagttatcattgcacctgattcttttaaagaaagtatgtcggcaaaggaagctgctttagctattaaagatggattccaagaggtgttcgattccagtactatatatgacattattcctatggctgatggtggcgagggaacaaccgaagtattgaaagaagccttaaatgctacctcttattgcgtagaagtaaaagatccacttaatagaaatatcatggctagttatgcgagaagcgacgaacaccaaacagctatcattgaaatggcagctgcttcaggactagcattattgagtaaagatgaaagagatccatctattacaacttcgtacggtaccggccaactcattaatgatgcacttaatcacgatgttaataaaattattttaggaataggtggaagtgccacgaatgatggtggtgtaggaatgttaaaggctttaggtgtctcttttaaagataaaaacaatcaagagattcgcgatggaggtttagccctatctcaaatagaatacattgatattactcgtataaacccacgattgaaagatgtgaatattaaagtagcctgtgatgtaactaatccattattaggagacaatggagcaacaatagtttatggtccacaaaaaggcgctcaacaaaagatgataccaaagttggattccgcattacgtcactatcatgataaaattgaaagagaattaaatatgaatgtaaaagatatcccgggcgctggtgctgcaggaggcatgggaacagcgttaattgcgtttctaaacgctgaattacgtcctggaattgatgtagttcttgaagagactcaatttaaacaaagaataaaagatgcgaatttagttgttactggcgaaggtaaaatggataaacaaacaatctatggcaaaacacccattggcgtagctaaagttgcaaaatcatatgatatacccgtcattgctatttgtggtagtttaggaaaagattacgaagtaatttatcaccacggtatcgatagcgtgtttagtatcatggaacgtccatgccaccttgacgaagctttgaaagaaggcgcacttcatgttaaacatacaacaacaaatatcgcacgacttttacaattaaaaattgaaaactga

SEQ ID NO: 2657 - DNA, 1473 bp, Staphylococcus epidermidis
atgaattacttaaaacaatatgaatcatttttttggttaataggaatttttatcttttatcttataatggcaattctaacaccattatcaactacggattggcatgcatataaagttaatctaagtcaatatttgactcaagaaaatggtcgttatttaggacatttatttgaatgggttgccgtacataatatcataataagagctttaatatatgcgataacttcgtttttagttatctatttagttgcttatatggttcaattacatacgaatcgtttttattttattttgagttttgtgttaatggttactgtacctaatacaatttatagcgaaacttacgggtggtttactggattttttagttatatacctgctacagtcctatcactttttattctttttactgtagttaaaatgattgagtcgcacgatacagtttctgaaatgcaattatgggtatttttattagtaagtttgtttggacaattcttcttggagaatctttccatcgctaatagcttaattattttaataggaatggtagtctatttctttgttaaaaaaagactcagttatttcttaattgtaggatttatgcttagttgtataggtaacattataatgtttttaaacttcaattattttttaattaaggatggattaaatacgcattattcaatttccgatagtcatggaatgatacataaagcaggtgtgacgttatttaagcttgtaccagaatatatgtttattaatcaaatgattattcttaccgtgatatcaatagtaagtatagttttacttaagcaaaataaaagcctgaagcatatgagagtttatattaaaataccactactcttaggtttaattactttacctatttataagatcttcgtttacaatcaatttcattttgaattatataaagcttcattttctatagccgttttgaatacaacgatttgcttcatttacatgataagtgtgatatacgttgtgtttaaaatgatacagcaaagatacataagaatgattgtgatggggagttttatagctatggcttcatctgttttgccacttttatttgtgacgcctataagttatagaaatttttattttatttatactttatggatcgtgatattactttgtttaattcagcaatgtgatgtgctatttaaacaacttgaacatataattaaaatatttgcgattatcatcagcatcattatgatgattggatttacttttatacatattagtagtgtgcacagaatagacttcattaaagaacaaataacacaacatcatcgctatcagaaaataacattggaaagattaccatttgagcgatatactcatatgactacaccaaagtcgaaggaacaacttcaagatttcaaacactattatgatttgcccaaagacatcacatttaaagtagtcccatatggtacaaaacaataa

SEQ ID NO: 2658 - DNA, 279 bp, Staphylococcus epidermidis
gtgaattatatggttagtcacattgttggatttattgtaagttttattatttcatattatttaaattgttattttgtatataaagtaaaacctacaatagaaaagtttttaagatttcctatcactcagatagttaatatggtaatgcaaacgttattattatatatattcgtaaagtggttgaatatcgcttcagaaattgcaccttttgcgggtctaatcattacaatcccagtgacattcatactttctaagtggttacttagagataaagtttaa

SEQ ID NO: 2659 - DNA, 882 bp, Staphylococcus epidermidis
gtgactcaaaatgaaaatttgaagttagcgcaacgaggtgcatttcttagtttagtcatctatattatactttctattgcgaaatatatgactggatatgtttatgattcggcggcagttagagcggatgctttaaataacatgacagacattttagtttcagtagcagttatcgtcggacttaaaatctctattaaacctgctgatcaaaaccacccatatgggcacttaaaatctgaaaatatttccacattgctagtatcattcattatcatgtttgtgggaatacaagttattatagaaaactttccgagattatttacacatgattcacatattcctaactttattactattattataagtatgatcagtggacttgtgatgttatgtgtctttgctattaattatcgattatctaaaagaacgaaaagtagctcattaaaatcagcagctaaagataatttatctgatagtttagtcagtattggcactgccattggcctaatgttcacacaaattggatttccaattatcgatattatattggcaaatattttaggtttattaatcgtgtatacaggttttggaatttttaaagagtcgattttcaccctaagtgatggtttcaatgaacaagatttagaagaatacagactagacatattagaagttgaagatgtaattgatgttaataatattaaaggtagatatcatggaagtagtatctttattgatgtgaccattgtagtagatccttatctttcactttatgaagcacatcagatttgtgataaagttgaaattcatttgcataataaaggaatttcgtctgtatatgtacatccagaaccctatactacaaaagacgaagtaaaataa

SEQ ID NO: 2660 - DNA, 687 bp, Staphylococcus epidermidis
atgccaaaattaatactatgtcggcacggacaaagtgaatggaatgcgaaaaatttatttacaggttgggccgatgtcaaactatcaaaacaaggaattgaagaggcgcaatcagcaggtaaaaaaatttacggcaatcaaattgaaattgatattgcgtttacctctttactcactagagctttagaaacaacacaatatattttagcaggttctgaccaacagtggattcctgtttataaaagttggcgtttaaatgaacgacattatggtggtttacaaggtttaaataaagatgatgcgagaaaaaaatggggggaagatcaggtgcatcaatggagacgctcatatgatgtacgtccgcctagagaaagtgaagaacaacgagaagcatatttaaaaaatcgtcgttatcaacatattgatcaccgtatgatgccttattgtgaaagtttgaaagatacattagaacgagttgttccgttctggactgatcatatttcacaacacctattagatgataaaactgtacttgtttcggcccacggaaattccattcgcgcattaattaagtatttggaaggtttatcagaagaagatatcgtcggatatgaaattaaaacgggtgcaccgctagtatatgaactcacagatgatttagttgttaaggataaatattatttataa

SEQ ID NO: 2661 - DNA, 789 bp, Staphylococcus epidermidis
atgaaaagacttttactttgcattgttgcacttgtttttgttttagcagcctgtggcaacaattcatctaacaataaagataatcaatcaagcagtaaagacaaggatacgttaagagttggtacggaaggtacatatgcgccctttacttaccataataaaaatgatcaattaacaggttatgatattgatgtgattaaagcagttgcaaaagaagaaaatcttaaacttaagtttaatgaaacgtcatgggattcaatgtttgcaggattagatgctggtcgttttgatgttattgcaaatcaagtgggtgtgaataaagatagagagaaaaaatataaattctctgaaccttacacatattcaagtgctgtacttgttgttcgtgaaaatgaaaaagatattacatcattcaatgatgtaaaaggtaaaaagttagcacaaacgtttacgtctaattatggtcaattggctaaagataagggtgcggacgttactaaggtagatggatttaatcaatcaatggacttactattatctaaacgtgtagatggtacatttaacgacagtttatcttacttagattacagaaaacaaaagcctaatgctaaaattaaagcaatcaaaggacatgcagagcaaaataaatcagcatttgcattctctaagaaggttgatgaaaaaacgattgagaaatttaataaaggcctagaaaaaattagagataatggtgaattagctaaaattggtaagaaatggtttggtcaagatgtttctaaacctgaataa

SEQ ID NO: 2662 - DNA, 720 bp, Staphylococcus epidermidis
atgtttctaaacctgaataatgaacaacaacatgcattagatgcagccaaacaagcatttggtccaatgttagagggattggtgaaatactcaatccctattactttggtcactttcattctaggtttaatcattgcattgtttactgcacttatgcgtatatcaaccagtaaattgcttagaggtattgcgcgtgtctatgtatcaattattcgtggtacacctatgattgtacagttatttattattttttacggtataccggagcttggaagattggtaactaacaatgctgataatcaatggacacttgcacctgttattgctgcagtcattggtttatctttaaatgttggtgcttatgcttctgaaattatacgaggaggtatattgtctattcctaaaggacaaacagaagcggcttattctataggtatgaactatagacaaactgtgcaacgtattatcttaccacaagctattcgtgtatctataccagcactaggaaacacatttttaagtttaattaaagatacatcattacttggatttattcttgttgcagaaatgtttagaaaggcacaagaagttgcttcgacaacgtatgagtatctaactatttatttgttagtagctttaatgtattgggtcgtatgttttgtcatctcaattatccaaggatggtatgaatcacgcattgaaagagggtatcgctcatga

SEQ ID NO: 2663 - DNA, 732 bp, Staphylococcus epidermidis
atgattgaattgtctcatatccataagtcttttaatgaaactgaagtgattaaaggtattgatttgaaagttaatcaaggtgaagttgtgacactaattggacgttcaggttcaggtaaaacgactttacttagaatgattaatgctttagagatacctactgaaggtacagtgtatgtcaatggcatgacatataatgctaaagataagaaatctcaaattaaagtaagacaacaatcaggaatggtttttcaaaattataatttatttccacataaatctgcattagaaaacgttatggaaggtcttataacagttaaaaagatgaataaagcaacggctaatgaagaagcaatgaatttattggctaaggttggattggtacatgttaaagatcaacggccacatgctttatcaggtgggcaacaacaacgtgtcgcaattgcacgtgcattagccatgaatcctaaagtgatgttatttgatgagccaacatctgcacttgatcctgaattggtcaatgatgtattaaaagtcattaaagaattggctgacgaaggtatgacaatggtcattgtgactcacgagatgcgttttgccaaagaagtttccaatcaaattgcttttattcatgagggcgtcattgcagaacaaggtacgcctgaagatatatttaatcaccccaaaacagaagagcttcagcgatttttaaatgtgattaatgaaaaatag

SEQ ID NO: 2664 - DNA, 147 bp, Staphylococcus epidermidis
atgtataaagattataacatgattcaacatactctaccttcaattcatatccccacaaataatatttcacgacatgtaaatgatattgtagaaacaattcccgatactgaattcgatgaattcagacatccccgtggcttaatataa

SEQ ID NO: 2665 - DNA, 1248 bp, Staphylococcus epidermidis
atgaaatttgtaaatttaacttctgaagaattcgagcaatttacttcagaaaatttctcgcattacacacaatccagtatacattataataatagatcgaaaacaaaaggtgacgtacatttagtgggagttaaagatgatcaagaagatgtcattgctgcgtgcttattaacagaggcacgttctctaaaattctttaagtatttctacacacatagaggaccagtcatggactttaacaatttagttttagttcgcttcttttttaaatcacttactgcttatttaaaaaaacacaattgtttatatgtactcgttgacccttatgtattagaaaatttacgtcaacctaatggagaaatcattgaatcctttgataatcgcgcattgattaaaacaatggaagaattaggctataaacaccaaggatacactgtaggttatgatacaatgagccaaatccgctggttatcagtacttaaccttaaagataaatctgaagatcaattattaaaagaaatggattaccaaacacgtcgaaatattaaaaagacttatgaaatgggtgttaaagttaaaacattacccattgaagaaacagatacattttttgaattattcaaaatggctgaagaaaaacatggctttaaattccgtgaagagccttattttgttgagatgcaaaaaacgtatgaagatcatgctatgttaaaacttgcttacatcgatttacaagattatttagatacgttgcaaactaaacatcaaaaccttaatcaacaactaaaagatgttgaaaaaacattagaagaaaatccaaattctaagaaaaataaaacgaaacatacacaagtcaagcaacaattcgatagtaatgcgcgtaaaatcagacaaactaaagagaaaatagcagaagaaggtcaagttcttcatcttgctgcagcattatatatatataatgatcacgaagtgtattacttatcaagtggctctaaccctaaatataatgcttatatgggagcatatcgattacaatgggatatgattcaatttgcaaaagaacataatatcgatagatataatttctacggtgttaccggagactttagtgaaaatgccgaagatgctggcgttcaaaaatttaaagaaggatttaacgctaaaatttatgaatatattggtgattttattaaaccaattaaaccactgttttataaagttaaacaagagttagaaaaccgtagataa

SEQ ID NO: 2666 - DNA, 363 bp, Staphylococcus epidermidis
atgttgaggaagttattagtcggggttagtgtactaactttattattagcaggttgcatgagccacgagtacgcagacaaaatagataaagcggttaaactacaagagaaaaagcaacaaaaaattgccaaaaacgattcaggtgatgaagttaaacattttgataaaaaagatgccaatatttatgtgtttgacaaaggaaaatatgttgtattggagtataaaccacttagtgatgatgctgaagcgcgttactatacttatgaatttaaagataaaaaagcatattataataaagactttaatgcaaaagcatactaccaatctcatgagcctgactacaaagaagagaatatgtattaa

SEQ ID NO: 2667 - DNA, 597 bp, Staphylococcus epidermidis
atgaaaaaattaatcggattattgatgattttatgtatggttttgctatacagttgctcaggtccaatggactctccaaagcattctaataatagcaaacctgtagtggtaatatacggtgattataagtgcccttattgtaaaaaaactgaagatcgcgtaatgccaaagcttaagaagaagtatattgatacaaacaaaattaaatatcaatatgtgaatttggcattcttaggaaaagattcaattgtaggttcaagagcgcagcatgcggtaaatcattatgctcccgagaagtcacttgaatttcagaagttaatgtttaatcaacaaaaagatgaacataagcaatggattacaacacgtcttgttgataagcaaattgatgaattaagtatcagtgatgacacaaagaaaaaaataaagactgattataaaactaaaggttccatctcgtggaaaaaagccaaggaagatcaacaaattgcgaagaaaaatcacatcaagcaaacacctacagcgtttgttaatgataccaaggttgaagatccatatgacttttctagctacgagatgttgctagaaaacgaaaagtga

SEQ ID NO: 2668 - DNA, 471 bp, Staphylococcus epidermidis
atgacgatagaaaaaaagaaaaataagattatttttactagaacttttagtgcaccaattaataaggtatttgatgcttatacaaagcgggaactatttgaacaatggtttcatcctcaagacgcatctgtcacagtttataattttaatgctacgaaaggtggaagcgctttttatgctattcaagcgcctcagatgacaagttatactattgctgaatatctgcaagtggatgcaccatattatatagagtatttagactattttgctacctcaaaaggggaaaaagacacaagtatgcctggtatgcatattactttgaattttgaagaagtaaaaggaaagactactgtaacatctacatcgacttttccaactgaaggtgctgcccagcaagcgatagatatgggtgtagaacaaggtatgaattcaactcttaatcagttagagaaattactaaatcaaaagtga

SEQ ID NO: 2669 - DNA, 822 bp, Staphylococcus epidermidis
atgttcaagaacaacaaaagtattgaagatacttatgcaacaaaatctattattcagaatatcgttggtcaggcacaaatcaaacaagtgatggcaaaacaaacacccatgagatatacgttgaaagcaatcatggctgggtttctattatcaatcgttacagtttttatgttagcaattaaaacacaattcgcttcaacgcataacgacggtttaatcaatctgatgggagctattgcgtttagtttaggtctcgtattagttgtgttaaccaactctgaattattaacaagtaattttatgtatctgactgttggttggtattatagagcaattagtgtaagtaaaatgatatggatttttattttctgttttataggtaatatcttaggtggatttattttatttttcctaatgaaatatgcacatgttatgacgccagaaatgacagatagcttaacagcattagtacataaaaaaacagtagaatcgacttggttaaacattttgattaaaggtatattttgtaatttctttattaatatcggtatttttatttcaatgcagtttaaagaaggattagccaaagcattctttatagcttgtggagtgatagtttttgtatttatgggttatgaacacgttgtttttaatgctggattatatgcaggtatgatgttctttaatatggatggattatcttggttgggtgtgctgaaaaatattgtttttgcattccttggaaactatatcggtggaggcatttttattggattagtgtatgcatatttgaacggtaaacgtgacagccttcaaccatag

SEQ ID NO: 2670 - DNA, 537 bp, Staphylococcus epidermidis
atgtcaaatattaatattagggtggcacatgaacaagatgttgaagaattacatagcatcatgcaagttgcttttacccctttaagagaacttggtattgattggccatcagttcacgctgatcttgaaatggttagggataatttaagacaaaatactacatttgtacttgaaaatgaaaaagaaattatttcaacgattacggtctgttattcatggagtagtgtaaaacccatttcaagttatccgttcgtttggtggtttgcaacacgaccaacatatgatggacaagggtatggtagtcaacttttaaaatatgtagaggagacatttttacgcgatactttaaaagctgctgcggtaaccttaggaacatcagcacgtttgcacccttggttattaaacatttatgaaaagcggggttatgaaatatacgctaaacatgaaaatgatgatggtgatttaggagtcataatgcgtaaaattttaataccagaacaatttaatgaggacattttgggccgaccgccattttag

SEQ ID NO: 2671 - DNA, 1476 bp, Staphylococcus epidermidis
atgaaaaaattgattactcttattgtcatgatatcttttgttttagcgagctgtgggggtacctcaagtactgacaaagacaccctcaatgttgaaatacctttgaaaactaaatcaattgcaccttacgaaactgatatcccagttaaaacaggtgccttggaatcgctttttaaaatgtcgaaaaatggtaaagttaaacctttattagtcaaaaaatatcatcaagtatctgacaatcaactagaactcacattaaaagataatattaaatttcaaaacggtcatcatttaacaggcgaagctgtaaaacgcagtcttgaagagggaatgaaaaaaagtgatttgttaaaaggatcacttcctatcaaatcaatcaacgctcatggacaaaaagtcacaatcaatactaaagaaccttatccagaattaaagtctgaactcgcaagcccatttgctgctatatacgacacaaaagctaaaaacaaagtaactgatcaacctgttggtacgggtccttatcaaattgacagttataaacgttcgcaaaaaatcgtattaaaacaattcaaagactactggcaaggtacgccaaaattaaaaagaattaatgtcacttatcatgaagatggtaatactcgtgttgatcacttattagcaggcaaatcagatttgactactgatgttccaattgaacgcgttgatgatgtaaaaaaatctaacaaagcaaagattcaaagtacatcaggctttagaacgcatttaatgttatacaatcatgatagtaaaaaagttaataaaaaagtaagagaagcactagatatgattattaatcgaaaagacattgctaaaaatgtttctaaaaattatgctgatcctgcatcaggtcctttcaaccatcgattaaaatcattagaaaaagaagaaattcaatcacaagacatcaagcgtgcaaaggaacttttagctaaagaaggttattccaaatcgcatcctcttaaattaaatatggtcacatacgatggccgaccagaattgcctaaaattggacaggtgatacaatcagaagctaaaaaagcaaatgttgatatacaattacgcaatgtagatgatatcgaaggttatctccaaaacaaacaggcttgggatgtttcaatgtatagttatttaagtgtgccacgtggtgatacaggttatttctttaacactgcatacttacctgaaggtgcattaaataaaggtaattatagtaatcctaaagtcactcagttaattaaaaaattaaatactactttcggtgacaaacaacgtgctcaagtgactaatgaaatactaaatgaatctaaaaaagatgttcctaacagctatatcacttacaactctcaaatagatggtgtgaataataatgtaaaacattttaatgttacaccagaatctatctatttaattgattataaattaagtaaaaaagaataa

SEQ ID NO: 2672 - DNA, 720 bp, Staphylococcus epidermidis
atgataggtaatattctagtcgctcatggtatgagaaaaggaaatcagaatgaagctttagaagaatttatcggaactctattaaaagatgagcaatattattatgagttagcttttttagaaagtgaaacacaaaatcttgaaatcataatggagaagatgattaagcaaggaattacaaaatttcgtattgtacctttactcatttttagtgcaatgcattatgtcagtgatattccacaaatacttaaagagatgaaagctcgatatccacaaattgatagtaaaatgagtgcgcctcttggtacacatccatatatgaaaacattagtagaaaatagaattgctgatgaaaaagtcagtgaagattcaacccaagcaactatagtaattgcccatggaaatggaagtggacgttttacgaaagcacatgatgaattaaaagcatttgttaaaacgcttgatagtcatcatcctgtttatgcaagagctttatatgggacattagcatttaaaaatgatttagataaaatctcagagcaatatgacgagttagtcattgtcccattatttttatttgatggtagattagtgaataaagtaaaacgccttttaggtgaaatgacattgcatagtcaattacacataacgccatcgattaactttgatccaattttaagattaattattagagaaagacttgaagcgttagatatttaa

SEQ ID NO: 2673 - DNA, 135 bp, Staphylococcus epidermidis
atgcacaaagattataatatgactcaatatactctactaatggaaacttcagttcttatccccacaaatgatattgtagaaacaactccgagactgaattcgatgaattcatttgtttggacaatcaaagactag

SEQ ID NO: 2674 - DNA, 315 bp, Staphylococcus epidermidis; identical to SEQ ID NO: 2614

SEQ ID NO: 2675 - DNA, 1836 bp, Staphylococcus epidermidis
ttgataactaaaccagaaccaattcaatctaatgatttaggtgaatttgatgttaaagtagcaaataaaaagggagaaataatttgtgaaattaataactatactgtaaaaaaagttaacccacacaaaaatgatgacttaacttatcaatatattttagaaaaaagagaagagaaattatacgctaaacccaaaagaaagttattagtatacgaaaattacaatgatacattattccaaagacttaaagataatggattttctcctatttccattgataatttaaacgaattatactctaacaataataaagaagttatagacgtgctactaacatcagataaaacagattctttaaaatcgttaaaacttttccttgagaaaattaagcagctttattcattaatatctgttgatactaagattttctatattaataaacaatctactacaaaaaatgttatggcaagcaatccatttgaacaagctaaagaaggattaattaaagtactaggtaaagaaaaaaataaaaataatattaaactaataacctatgatgaaaaaaccaactttgaaaaaattcttaacgaaatgaaaaataacagtgtccacaaagaagtgaaatattataataatgaaagatatgtaaaagttttgaagaaatttaacgttcctgtttctcctattccacaaaaaagtaaaatcaaaaaaaacatattaatagttggtggtttaggtggcttaggtatagagttgactaattatttgataaaaaataacaatattataattataggtcgttcagagttaaaattaattaaaaataaactcgcctcccttaagaataaagctaatatatataaaactaatttatcatattttaaagtagatatctcagataaagaaaatagttcaaaaaagttaaaaaaaattagtgaaatatacaatcagattgatgatatatatataactgttggtaatgaaccattaggttttatcaataatatagatagttcaaacttcatagaaaatatttcaagcgtaattattggtactgaaatattgttaagcacttttaaagataaaggtttgaaaaattttatctctttctcttcaattaatacactattaggagtacctggagaagcagattatatagttgctaattcatatatggatggatttagcgagtgggcatctcaaatctatagccatattaattttaaaactatttcttggggaggatggaacaaaacaggtttaagaaaagaaattatttccaataataatagtggtttcaaacctttatcacctcaaatagccttagaaaatatggcaaaagtaattgatcaaaaagacaaatatataataatcgctgatttagaagaagacaaggtttctgctttatcaaatacaacaggtctttatttttcaaataaaaattttctcgagaaaacaagaaatccagataatttgaaagagactagaaacactaaaaccacttcggaacaaaatatcaatgaagtagttagcaaaatatggcagaacctctttggcttaaaaaatattaatccagatacaaagttttttgaccttggaggagattcaatcttagctacctatctctttaaagaattagaacaacatttcgaaggattaattgatatatcagatatatttacttacccatcaattaattccataagtaagtatatatattccgctcaaaaatataatgataaaaatataaggtataagaatgacagcctagacgataaattacaaaagttaaaaaacggcgaactatcagttagtgatttagaaaacgaggtgtaa

SEQ ID NO: 2676 - DNA, 4686 bp, Staphylococcus epidermidis
atggaaaatttaaaaaaatatatatatgaggaagtttccaaaaataatatgtcaattgataaagccaaggagttattaggggaaatccaaaaaaaacatgaagatatagcaatagtcggtatagcgtgtaaatttgctaatgcagaaaaccaacaagagttttggaataatttattagaaggaagagaatttaaaagaggatttcaagaaagacggttaaattatattaagaatatttcttcgtcccctctatttactcagtttttgggaagtatacctttaaaaggagaagagttaaatgatatcaggccaagtggttacctttctgacatagataaatttgacccggaatttttcaatatttccccgagtgaagctagagctattgatccggatcaaagagtaatgttagaaaatgttcaagatgcattaatagatgctggttacactcgagaaaaattaaacaatagtaaaactgctgtttttataggtaaagataatactaatgacacattataccgttatattactgaagaagaatctagtagtatgacaggaaactggcctagtctaatttctggacggattagtcatcttttaaacttaaaagggccgtccctactcattgactccgcatgtagttccggtctaactggagtgcatttagcatgtaagtctcttcaaaataaagagagtaacttagttatagtgggtggcgtctcaataaattcatttccttcgtttaataagtttccttattcattaatggaatcatcagataatactttgagaccttttgatgaaaatgctaacggtactagattctgcgaaggtgttgctacagttatattaaaaccactaaattccgccctcaaagataaaaacaatgtttatgctgtaattaaaggaagtgcaattaacaatgacggcaacacaaatggaattacctctcctaatgttgactcacaagaactagttctacacgatgcatggaaggacgctcaaattaatcctgaaaatattcaatacatagaaacgcatggaacgggaactaaaattggcgatccgattgaagtaaaaggtttaacaaatgccttttctaagcataccattaaaaggcaattttgtggtatagggtctgtaaaagggaatattggtcatactgtcgcagcttctggtttagcctcattaattaaagtggccctttccttaaaaaataaaaagataccaaaaacaataaattttcagatgcctaataattttttgaattttcctactacgcccctatatatggtgaacaacacaacaaaatggggatattctaatagcaatttaaaattagccggagtcagttcttttggttttgctggaactaattgtcacatagttctaagtaatattaaaaatgaaaatatatatagaaattataaagaaaattatagcgatagaacgaattatataataacgttatctgctaaaaataagaatgcgttaattcagaatgttaaaaactatttacaaaaattgtctacaactaaaaatataagtattgaagatattagttatactaccactttaggcagagaccactttaattatagattagcattactagttaatagcgttacacaacttcaagattccttacgtgaatttttacttaataattcaacaaatgtattaagcaaaaatatttattttggtattcataaaaaaatacccaatagtagaaaaccgattagtgaggaggaaaaaagctctcaggaattaaatagattaactaaaaagattaatgtcataattgaagaagaaataaatgctgttaatattaataaatttagtgaattaatatgcaagtattatattgaaggcgcttcaataaattgggataagttaaatcagttcaataaaagaggaaagattattagccttcctttatacccgtattctaagcgtatcctttggagtaaaataaaggtacctaataatgaacatttaatcgataataatattcatccattagtacataaactagcaattgattcaataaaagaaaaaatatatgtatcaagtttaaatttcgagagtcactggagcattacagatcatcaagtaaaaggtaaaaacgttttacctggtacagcgcatgtagaaataattcgaaaagttctgtctgagtacctacatacaaacaaaatctctcttcataaccttatattttattcacctattgtattaacagaaactattaaagaaatacagataataataaacaaagataaaaatgtagtgcaaatttgcagtaagaacaacaatgaatttaatatacatagtgaaacaagttttgaaataaactctaacgaccaatgcttctatgatatcgataaatttaacaaaaaagatgatgtgaaaaggcaagatattaattacaagcacaattttatcaaaaatgatacatttacattcggtccaaggtggttgaattttaagtctttagcttataggtcaaagaatgcagagtttcaacagttagcagaattaagaataaatgataaatttaaagatgatttaaaagaaaactatatacattctgcactattagataatgcggttaatctttacattgatgaaaatgatgaagaagtttacttaccattttcgtatggaaaaattaatatctttcatgaaatgccggaacacttttattcattagtaacaaaaaaagaaactaagaaagaaactaagaaatttgatatatctctgataaatgaaaataatgaaatttttattgatataaaggattatataataaagaaatctcataatactgatggaattatacgtgacaatatctttcagaatacgtacaacgttaaatggcaaccttcagaaaatactttaactcctttatctatagataaaactaaaatagttatattgtaccaaccaactaactttagtaaaagtttagctaaaacattaatcgaagaaaatcctgataactacattcccatatgtatatccaatcctaaagtgaatgatgaagcacatcattatttaaatcttaactcatacgatagttataaagaattatttaagtgtttaaaaactgaaaacatagatactatagtagatgtatcactgtatgaagactttaaaaagcattgtgaaaactctatagatagcaaacattatttttatatgtttaaagcgttgtttgatataacatttaaaactgattttacttataaattaatcttaaataacgcttatgaaattgatggtaatgaagatcatatttctcctacgtcaactgaaatatcagggttcttcaaaggtattttggaagaggttccaaaagcgaaattttcaatatatgacatagactttaaaactgattttaaaaaaatattaaacgaaatttggaaaccaacaacttcatttttaaatggatatagaaacaataaaaggtatattcctgagataattaaagaaacggaaaaaacttcaaatataaataaagatgtatattcaaattcggattcatatttaattactggcggtttaggagatataggattgcacatagctaaaaatatatctaatcaaaaaaaagtcacttttcatttactaactagaagaagaaaaccgtttaaagatgatatattaaaagaaattacaaataacggttctactgtctgtatccatactttagacataacaaatgaacaaaaaatgaaagagctatctttaaaaatcggaaaagttgatggaatatttcattgtgctggtaatgctggagatggttttgtatacaataaatctataacttcattttctaacgtactagatcctaaaaaactaggaatgttgcatatagaaaagtattatttacatgaaaatataaagtttttagtttgtttttcctctattgtttcattattaggaggagccggacaaacagattatgcagccggaaactcatttatggatggattcataattaacttaagaaaaaaaggttttaatgctatttctataaactggccttcttggaaaaatataggtatggctaagagatataatgtttctgatcaaaaaactatattcagttctatttcaacagaagaggccacatcgataatagaaaaatcaattgttcacggactaagtaactttataccaagtaatattaattactatttgattagtcaagttaatgaactattacctattaagttctccgattcactattaagtactgtaaaagacttacaaccaaattcacgtttagataaaactattaacaaagttactcttaaaggccaaactaaggacttcactaatacagaaattatagtttctaatgcttatgcaaatatattaaatattgaagaattagatgtttttgagagttttaattcgctcggtggcgattcaataatggctacaaatttattaaaagagttagaaaagaactttgaaggtatagttgaaattactgatattttcacatatggcagtgttaaggaactttctaattttattgatgaagagttaagaaaaaaaaataatgcttacgaaaaaaataatgatcttatttctttaatggaagaactatctcaaggacatgctaacgtagacgaaactttatctaaattaaacgggggggacaaaaatgagtaa

SEQ ID NO: 2677 - DNA, 1503 bp, Staphylococcus epidermidis
atgagtaataaaaaagtgattataatcggagctggcatagctgggttgtcactaggtagctatttacaaatgaatggttatgaggttcaaattttggaaaaagagtctcaagtaggaggactctgtacatcttggaaaagaaaaggctatcttatagatggatgtataacatggttagtaggctcaggagaaaatcatatatttcacaaattttggaaagaactgggaataatacctaagttacaattcaaacaaagtgaagtttttggaaaggcttatttacctaataataatgagtttaatctgtattctaacgctgaaagattaagagatgaattcaagagattagctccagaagacaatttattgatagaaaatttatatcaagctataaaaggtatttcaaatagtgaattagatttagagaagtctcctgaattatttacctatgaagactttataaatttcaaaaaaaaatctggtacttatatgaaagttatgaaagattggaaagttaaaattaaggattttgttcaaaattttaagtcacctttgatacgggaaaactttgaacaaattttttggtttaactctaatacctatatgagttattttattgctactttagcatggtgtgacatgaaaagttgtggttattctttagatagctcccttgaattttcaaaagcaatccaagaaaaatttgaaaatttaggtggcactatacactttaattattctacaaaagagattatagttgaaaataataaagctatagggataaaaaatacaaatggtgaatctttaagaggcgatttaataattagtgcatgtgatgggtatacaactatatataaaatgttaaaaggtaaatataaaaactctgatattgattttatatatgaaaatttaaacactactaagcctaaattacgtgtgagtttgtgtttacgtaaaaataaaaaaagtttgcctcattattttaacttctattctaagaaaccaataaaaacatcagatagtacatcggatagtaatatttatgttaataattattctgaccgtaattttttaaaacccaacacctcaattttagctttatctgtgaatactgattataattattgggaaaatttaaaaaaacatagaagaaatctttataaatatgaaaagaaaagaattgctaaagaattaattcaagagttcgaatcaatgtttggtgatatcaatgagcatattgattttattgatattgctactcctgtgacatttaatagatacactaataattataatggatctatattaggatgggaaaaagaggctttttcttttgaaaacgaagacaaagtaaaacgtgaattacctaatttatctaatttttatatggttggtcattggtctttagtaggcggtgggctccctagtgtaatgttgcaatcacggaatttggctcaattaatttgtgctaaagatgacaaaacttttagtactcataattaa

SEQ ID NO: 2678 - DNA, 6393 bp, Staphylococcus epidermidis
atgaatcaatataaattaaaagaactaattctaggctacgtaaaaaatcaaaaattaaaccctgaaattgcagcaacattattaaaaaatataactcataacaatgaaaataattatactcgtgctaataaaaatataaaagaaaataaatttgccattatcggtattgctggaagatttgcagatgcacaaaatatccatgaattttggactaacctaataaaaaacaaatcctctattacttctattccatcaaatagattgaaagatattcaggattttaatatagatataaataacactcgtttttttaaaggtgggtttatacctaatattgatttgtttgatgaaaaattctttagaatttctccaaaagaagcacaacttatggatcccaaacaaagaatatttttagaaattgcttaccatgctcttgaagatgcaggttatacaaaaagtaaaatttatggaagtaatacaggtgtttttgttggtgtcgataatagtgtagataccaaattctcttacttatcaaatatcaaagaaaagaatctgcttgcgactacaggaaattcccctagtatactagcaagtagaatatcttatatcttaaatcttaaagggcctagcgtgttaattgacacagcttgttcctctagcttagtctctgttcattatgcttgtaattcaataaaaaataaagaatgtaaaatagcaatagcaggaggaatcaacttatttgaactccccatagacaatgaagtaatgacagatattgaaaataaagaaaaaaaattaagagcttttgacagcaaatctagtggtacgacttggggagaaggcggaggagctatcatattaaaatcttatgaccaggctattaaagacggtgatcgaatatatgccattataaattcaacttacattaacagtgacggtgcatcaaatggtataactgctcctaatcaatcagctcaaactaagctaataacagaagcttggaataatgcaaatatatctcctgaaaagatttcatatattgaaacacacggtactggaactcctttaggtgaccctatagaatttaaaggtcttacaaaggccttctctcagtatactaaaaaaagacaattttgcggaataggatctattaaacctaatataggccattgcgttggtgcttctggtatagcttcatttattaaattgatcttatcaatctattacaaaactataccagctacaataaatttcgaagagccaaatagttttattaactttcccgatagtcctctatatattaacactcaaaataaaaaatgggatgacaaagagcgctatgctggaataaattcatttggctttagtggcactaactgccatattcttttatctaataatttagctgaaactacttctgattctgcggaaactcaaaaaccaaaagaggatattttgtgtttatctgctatagataatggttctctaaaacgtgtaatcgaatcttacattacatacttagaagagcaaaaagaacttaatatattcgatttttcttataccaataatacatttaaaactaattttgaaaaaagaaaaatttttccagtatacaataaaactcaattattaaatgatcttaagagatattcattcaatgaaaagataaatacaaaaatacctgatagtaaattggaaacagcatttaattatatgcaaaaaaacaagatttcatggactgaaatttataatgaatataatgtaaaaaaagtttctattccaaactatccttttaaaaaaaatcgtcattggattaatgatgtcatcgatgaaaatgaaatcagtattatcaattcaaataaaaaactcaattcaacagaatataaattatcagttatatgggcaaagctcttcggattaaaagtagttgatctatcaaaaaatgattttttcagtttaggtggagattctattatagcgagctctttaaaaaatcaaattaagaaaaccttcaataaagaagtttctttttctgacatatataacaattcaaacatattatctatagcacgcttgttagaaaaaactaaaaatagttctgaagacattccgttagcacaccacaagcctttttatcctgtcccttacaatcaacagcaaatatatgttgcacaccaacgtaacccttattcgacaacttataacgttccgatatgtttggaaattaaaggtaagatttcatataagcaattagagagctccttagaaaaattagttgaaagacataccgttttcagaactaattttttagaaagagataatgatattatacaaataattaataataataacttttcttttaaaatcgaaacaatctcagagtataaattaaaagaaactataaaaagtttccaaaagcctttcaatcttcaaaaagatagtttactacgtgcaaagttacttaaagtttctgaacaaaaacattatcttttaattgatacccatcacattatcgcagatggtttttcaatcccaattatagaaagagatctactatatttttataacaacaaaccattatctccattagatattcaattttatgactacagtgagtggcttaacaataaaacggtaaatagttcgcaaaaaaagttttggaagaaagaaattggggaaaatccaagagagtcaattttaccttttgaaggtaataagttagagaaacctgtcccatcttctaattctttttcttttaaaatacctaaatacgattttaacaaacgcgacaatcaaacaagtgattttactatgtttatagctgctattcacatacttttatacaagtatacaggaaattctaatattgttgttggcagtccttttttaggaagaaacaataaaaaactggaagatatggttggaatgtttattcaaactttgccaataatctccgatatatcaactgatgattctatcagaactatattaaataagttaaatagaaaaataaataagataaaggattatcaaaattacgcaccagagttaattaattctatactcgaaaataaactagataataaagagaaatattatcaagttttgttatcttatcaaaactctagagacaatgttattcataataacgatttgaaatttaagaatataccgttaaatacaaataatagtaaatttccaatttctatatctgtctttccagaactcgaacattttactatagatattcaatatcaagaaactattgttaataataaagaaataaaaactttttctcacgattttaaaactattctttctacattaaacacaataaatctggatacaaaaatagcagcacttaactttgataataaacgatatgtaccactaaagtcgcatgacgattcataccaagatagttatcacaaccttttgcgtaaagcattaaatgactacaagtctcatatcgctcttgaatataaaagtacaaaaattacttacaaaaccttaaataaatatattaaaaatggagcagcttttttaaacaatataggtataaatagacaagaaaaaattgcgatattacttgaaaactcagtgagttatattattagtattttaagtgtcttagaacataactctatatttatacctctagatattgaggcaccattatctagaaatttatcaattattaaaaaaaataatataaaatatttaataacatattgtgattatgaagatgttttacctaatgatatcactattattaaagaaaccttctataaaacaaatggagaatttaaaagaaggatagctaatccagaagacatagcttatattattcatacttctggaactactggagaacctaaaggtgttccaatttctcattattcattagctagctattcaactaacatagtgaagtccttaaataaaacaaagttcacaaaatcgattttaacctctagtatatgttttgatttaggatatactagtatttttgtccctcttctaaatggaggaactgttattattgaagataaaaatacttatatagattctaaaaaattggctaatataatacgttcacataatattacttatttaaagttgactcctagtctttttacatcctttaatccagacgattttataaattgtcaatcattggatactataatatttggaggagaggttccaacatcaaccaatataaagaaatttagtaatgtgcttcctaaattaaaatttgcaaatcattatggtcctactgaagctactataggttgtataactaagtatatattagaaaaagatgtacaaaataacacctatattaacaatattggctgtccaatgaataatacacgagcacttatattaaataaaaactttgaaattatgcctaaactaattaaaggagaattatatatatctggaccttgtttaactcctggttatacaaatagaaaagaccttaataaaacaaagtttataactttaaatgggtgtcgtttttacgctacaggagatttagctaagtataatgaagatacatcaattcaatattgtggaagaaaagatgatcaaattaaacatatgggatatagaattgagttatcagaaataacaagaattgttttgcaaatagaaaatgtaaaacaagcagctactattttctatgagcaatcaattcttctcttttttactggaaatatacatgctgataatgtcatggttaaattaaaagacgttttacctatgtatatggtacctaatttttgttataaaataattgaactacctctaaaatcaaatggaaaattaaacgaattaaatttaatacaatatcacgttaaagaaaaaaacacttcttctcctaatgaagtaggtaataaagaagaatatataatttccaacgcctggtcacgtactctaaatacccataatatatctaatagtgaagacttttttaaaaatggtggaaattcattaaaagccttgcaattagttaattttattagaaaatctggttacaacatagaaatttcagatgtatatgagcaacgcactataaagaatatttcaaaagtgataaaagaagaaaagggagaaagcaatattaaaacagaaagtggctattataaaacaacgcctaatcaagaatggattatcaaaaatttttataataccatcaactatcaaaatctttcttttactattgaatcacacgtagatttggatttgtcacttctaaataagacattaaatattttagtcaaccatcatgatatattgaaaaccaaatttaaatttttacgacaaaaagtagtaaaaccagtcatttatgaagatatcaattttaaaattaaatttaatacttctaataattttgattctaaagaaagagaacgttttatacattctttacatgataatatttctattgaaaacggaataaaccttgttttaggtattcacaaattttctgataaaatactactaacttttatatctaatcagttagtaatggatcatatgtctctccggatacttttagatgatttcacttatatctactactgtttatatacaaaaaaagaaataaatttaggctctaaaactaactcgttttcaatgtggagcgaaaaactaagtgaaatagacttttctaacgaaataacattttggaataatattgaatctcttagcgttccaccgctaaataattctagtattaaaagaaatttaattaatattagaactttaaccactaaatgtaataataccttagctagaagagttcattcattttgtcaaaaaaataatataaaagaagagtacttaatactttccgctttactagattccctagaatatacttacaaaaagaacaactacaagattcttttagggaaccatggccgtttttataatattagtaacttggacgtttctagaaccattggcagattttcaattacatacccaatagtatttaacgtcaacagtaatgatagaactattagtagagtaattgaaactattaataatataccaaacaacgggataggttatggtttcttaaaatataaatcgaaaaatttaattgatggaagacatgctgacatatcttttaatttcatggatgattttgatactgctatttataataaccttttttcactaacaaaaatacaaagtaataataatattaactcaaaatcttattttccatataatttaaaattaactgttattaaaaaacatcaagatttaattttaaacttcgactacaataatctttcgatctctgaaaaaaatattaaagaattaaataaaaaaataaacgaaattatatttgagtatataaatagggggtga

SEQ ID NO: 2679 - DNA, 1647 bp, Staphylococcus epidermidis
gtgataataattaaatattttaaaaaaaatagtattttaatttttattttactattatcacaccttattattgttgttactactgtatggcaacctactattatccataacattgtagatacactaaattttaaaaataatgttcacacttttcatcttatttatcaattattactcttaagtgtattcagtctaaccggaggtataataaacagtatctcttctgcttatctatcaaaaaacatatcgtctaagctaagagaggaaacttttaaaaaagtattgaccttttcaatttctgaaattaataagataggagaaagtggattaactatcagattaacaaacgatatcaatcatataagagtctctatacctatatttttcgacttaatatttaggttacctttacttatcatattttcgtgtttcatggctataatcactgttcctataatgtggtgggttattttacttctaattgtaacaatcattataatttctatatggatatcgtataaaatttccaaaaattatatacataatcaaattgctttggagaaattaaacaatttatctaaggaaaatattgaaggaattaaacttataaaaagttatgttcaatatgacgaagaattaaataaatttattttatccagcaataagcttaaagatattaatattaaaattgctaaagtattgtctttgattatgccatcttttttgtttataggaaacatattcaccttaattgttattattcttggttatttatatttcagtagtgatccaaaaggagctggctatatagttgcatttatgagttacatgttgcaaatgatggtaggtattgtcactgcaggtattacaactatagctcttgctcaaggttttatagctgtaaaaagaattaaagatattttccaaaacactactgatgcaactaataaaatccaaacttataattttccagagcatccaacaattgaatttagaaatgtaagcttcaaatatccagacagcgattattatgccattcaaaatataagttttaaaatcaactatggtgatactatcgctataataggagaaagtggctccggtaaaactactattgctaacttaatcaccaatttattcaatgttactgaagggataatatacgtaggtgggataagtattaacgatttaactagagaagatattaataaaaatattgcatatgcattacaaaatcccatattaaaaaaaggaaccattaaaagtaatttaacacaaagaaaacaacacattaccaataaatatatatataaatctttagaagtttcagagtgcttggattttgtccgaaatttaaataagcaagtagaagaaaaaggaaataatttttctggaggccaaagaaaaaggttatcaatagcccaagagattataactcgatcaaaaattaatatttttgatgatgtaacagattcccttgatttattgactgcaaaaaaagttttttctaatttaaacaattttttaaaagacagaactattatatatacttctcaaaatcttcctaattctttaaaagtcgacattgtattattacttaaagatggtaaattaaaatcatataaaaaaggagataccaataaataa

SEQ ID NO: 2680 - DNA, 1719 bp, Staphylococcus epidermidis
ttgaatgattttttaacactttttaaagattataaaaaaaaactttacatgatattatcttttttattaatatacactattcttcaagttctaacaccaatactaatagggtgggctataggattaattggcgaaaactcaataaaaaataatctttcagctaataaattcagtataactatgatttttatatcgataaccctattaatgagttttattttaaattcatattataactatttgttctctataatagtgagtaaaataactcatagtattcgaattaatctattatctcgaatacataaaaatacactagttcatttaagatctaaaggctcagggcaattactaagtagatttacaaatgatttagataatatccaaaatggattgaatgactctatattacctctagtctctaattcttttttggtattttttattttaatttctatgtttatcattaattattctatggcactaataaccgcagtattgataccattaatgattataatagttagttttttagtttataaaagtaatcactatactaatatacaacaatcagaaatttcacgactcaacggttttttacacgaaactatttcttcacataagcttactattattaacaataacagtaaagagtcttattttaattttataaagttaaataataatcttacaatttcgtcgttcaaagcacaactatattcatctattatacaacccatagttttagctttttatataatgaatatcagcttagttatatattatagtgtgaatattttttttaatactaacttagccattcatataactgttgtagtaactttcattaatttttgctacgatttttatcaacctatagttaatatttcaaagtcttattataaaatacaaaacactttaacaagtattaaaaatatatcaaatgaattagccacccctattgagttttctaatacaaaaaatagggatcttagtgttataaaaagtatagaatttaaaaatgtgagtttttatttaaataacacaaaaatccttaatgatatttctttcaaaataaaaaagggagaaaaagtttctataataggtcctactggaagtggtaaaacaacaatactacacttgcttaatagactttacgatgaatttgaaggtgaaattcttattaataataatccaatatcagattataatattagtacattgagaaaaaaagtagctattgtttttcaagaaacagttatatttacaggaagcataaaagagaacataacctttggtaatttttatgtaccacaacaagacatcgaacagatagctataaaagttggtttacatcattttattaactccttaccagataaatacaatactataataactcccaaaagccaccctttttcatcaagtcaattacaacttatctctttagtcagagcattattacaaaactctgatctaatattacttgacgaagccgtctcaaacctaaataatgaatcagaaaataatttattttataatattagagatttaactttcaataaaactattataactgttactcataagatgaaatctgtaaggaattgtgataacataattatattaaaagaagggaatttaattgatcaaggaaaccatcaaaaattattaaataataatttctattaccatttatgtgctgaacaaactaattaa

SEQ ID NO: 2681 - DNA, 687 bp, Staphylococcus epidermidis
atgcaaattattttcttaccatttgctggaggagaccattcatatttttatagattttctaagtatcttattcctgaaataacaatttccccaataaaattaaaaggaagaggagaaaatttaggtggtactctttattctagttttatagaaatgaaagaagatattttatctcaaattaacataccgaatgatgaggaatatataattttcggccatagtatgggaggaatgctagcttacgaattatactttgatctcgaagaaaaattgggatatcctgcttcaaagataataatttctagttgtcctcctcctaacttaattaataaatatagtaatgcccctaaacattcactatctaactatgaatatatgaaagaaattataaaaatcggtggcacttcctctgatattttaaattgccctaatttaatagatttaatggttcctgtgatcaaaaaagatttctataatataaagagatactctaatgtagaaaataatagaataatacattcaagattaataattttgtggggaactgaagaaacaaaattaactaatatcattaagctatggaagctatacaataataaaaatattcattttattatgttgtctggtaatcactttcacctaaataatcacatagaatatattgctaacataataaattacagatag

SEQ ID NO: 2682 - DNA, 726 bp, Staphylococcus epidermidis
atgaataataattttttaaaaattagttatctaaatattgatgaaataagcattcaagaatgtttaaaacttttacacttatgcagtaaagaaaaaaaaagtcagactaaacagcttatttatgatctaaactataaacaaacaatttgtgcaaactcattgatttattatttattatattgtaaaacgggcttattgcattacaaacctattttacaatataataagtttgggaagccgtatcttaacccaatagtagaatttaactttaatatttcacattctgaaaattgggtggtcttagcacaatcagattctgatgttggtattgatattgaaaaaatacaaccagatatctataatatagctaaaaattattttagcaccaccgaacaacattatataaattctagtttttctaaaactgaaaaaaataatcgatttataaaaatttggactttaaaagagagcttcgtgaaatttttaggtacaggcttaaatacacatttaaatacattttctatatgtgatatagaagaacccatacatactgtaagatttcataaagagccaattaaaaataatatatatttaaaaagctttaactttgataataacttttacattgctacttgttcaagagcaacttatattgaaatggaaaaaatcaacataaatgatttgcttgaattttccaaaaaatctcgtattctttctttcacataa

SEQ ID NO: 2683 - DNA, 306 bp, Staphylococcus epidermidis
atgaatcatcttcatcataattactacgttagtctcaaaaataataaagatgacactgaagcacaaatgaatgcaactttcgaagtcacttatcaattatatagaatcttaaaaaacaatacgaatcatttaaaaataacacaaaatactataactgttgtcttattcattacaccttcagaagcaattaatctcggctttatatatcgtatatctttacgtatcatctcaccagaaacgttaattgctcaattcactcaagaacttacaaagttacaaagtaattacatgttgcgaaaattataa

SEQ ID NO: 2684 - DNA, 207 bp, Staphylococcus epidermidis
ttgttattaacaaacgtaggaacaacaagtgctactgaaaatcacttatctcattctcaaattcaaaattcagcaagtagttatattcagtcacatggtattaacttaaaacaatgttcaaaggttttagtagcgaaatcaaatgatatcggcggagatgtaccaaatggattatacaccagttatgtttggaaaggaggaacataa

SEQ ID NO: 2685 - DNA, 1344 bp, Staphylococcus epidermidis
atgactgaacaacgctttacaaaacttttcaaatttttatttgaagatcctacttttaatgaactcccagcaaaagcaaaattgctttactcattgcttactgaacggcagaatctttcaaaatcaaatgctaaacaatatggtattcaatctcaatttattgatgaggagggtcgtttattctctatttattctaatgatgaacttataaataaaatcaaagtatcagaacctacactaattaaacttaaaaagcaactcattgaatcagatttattagaagaagtccgtcttggaaagaatcaaacaaatcgcttatatcctaaaaaaccttatgatgaatatttttatgcttatgatatagatgaattttatcgtatccctcatgctttatttgataatccatattataaaaatttatcagctgatagcattatagcttatgcattttatcttagtcgttatgagtatagtgtttataaaagtcatttttcagataataataatagtatttattgtgtattgactaatgaagaaatggctttacgtttatcttgtgaacgtaaaaagatttctcgtattaaaaatgaattaatatcttgtggtttacttattagccaaaaatctactttaggcaaagccaatcgtatttatataaacttgcctaaaaccagtcatctcaaggaacttaaaaaatgggacgtcaggaacttaaaaaatgggacgtcgggaactaaaaaaacgggacgtcaggaacttaaaaaatgggacactagtgatattgattctagtgatattgattctagtgatattgattctagtgatatgtatgataaaaaacgtacttatacatcaaatgataatgaaaattcaaatcattcaagccatacagattattcaaatcaaacaaatggtgaatttaacgatcaaaaaacagaacaagatatgttacttcaaaatttacctgaagctgttcaaattaatttgaaatattttaataatttagaaattcgttgtattaaagatgtaatgaataaagcaaaagcaaatttcaacaagcatgtctcaattgaagaacgtgtgacttatgaagattgtgcttatgatattggagaagcattacgtcgtatcaagttgttaaatcgtcagaaaaacgaaaatgtatgtgaccttgcagcttatatgatgcaaacatttaaaaatgtatttgttgattatatccgaaaagaacaacaaaaagcatatttagtaaataagaaagaaaacaatttttctattgctaactttgagcctcaaaatgatatgcaagctatggcgaaaaaaatgtttatgaatcatatttag

SEQ ID NO: 2686 - DNA, 261 bp, Staphylococcus epidermidis
ttgtatcaaatttggaagaaaaagcacaaaaaaacctattataaatggcatgttgatgagacatacatcaaaataaaaggaaaatggtgctatttatatagtgcaattgatacagatggtcatacattagatatttggttacgtaagaaacgagataatcattcagcatatgcatttattaagcgacttattaaacaatttggtaaatctcgaatgataattagttatattttttctgcctttgcaacaaaacctttttag

SEQ ID NO: 2687 - DNA, 801 bp, Staphylococcus epidermidis
ttgaaaactataactataggaaacttcaaaggaggagttggtaagacaactgtagccactttactttcttatatagcatcagaaaaatataagaagaaagtattacttttagattttgatcctcagggtaacgccactcaaattatgaaacgaacttatccagaagccgtggatgaacgcaaaacatttatagaaactttaaaaactggaaaactagaagagagtattattaatttatcaggatatttatctctcatacctgcagattcatcattagcaaatttatcagatattgtttcgaaaacagatatactaaagaaacggtatatactgaaaaatgtagtgaaaaaaatcggaaagaattatgattttgattttatatttatagatgttcctcctacaattaattctgatttcactaataatgctgtatatgccagtgactatattttgatggtgtttcaaactcaacaatcggcatatgagagtagtctgtcattcgttaattttcttagagatagaaaaaaagaatcgaatttagcgtttgaattaatcggtgcagttccagtacttattaaaagaaacggcaaagttgacgagcaaattttaactttttctaaaaaagccttttctgatgctttatttaaaaatcaaatatatcaaagagaaagaataaaaaaatttggtgctgaaggtataaaaaataaggatatgcatgataaaaaagtattacatatgcttgatcaaatatataaagaattggttgaaaggattaaattcattgaaggagatgcgaaataa

SEQ ID NO: 2688 - DNA, 201 bp, Staphylococcus epidermidis
atgggcggatttttagataatatagatacttctgaagtgaagtatacagagaattataatccaacttctaaaagtactactatgagggtagatagtagtataaaaaaaagactcggtcaaatggcccttgataaagatacttcgattaaatcaatcgtagacgaagttttaagtcaatttttggagaataataattattaa

SEQ ID NO: 2689 - DNA, 558 bp, Staphylococcus epidermidis
atggctaaaattggttatgctcgtgtttcaacacaagatcaaagtttagatagccaaatcgatactttaaaaaactttggctgttcaaaaatatttaaagaaaaagtgagtggtcgaaaaacgaaaagatcagagttagacaaatgtctagagtatttacgtgaaggagatacattagttgtttataaacttgatcgtttaggtcgaacaacaaaacagttaatagaattggctcaatggttggaaaacaataacatcgaattacagattattgatatgaatatcaatactaaggatgcaatgggaaaaatgttttttactatgatgagtgcctttgcagaactcgaagccaatcttttaagcgaacgtactaaaaaggggcttgcttctgcaagagctagagggcgcgtcggtgggcgtccaccaatgcctgatcataaaaaaagagaaattaagttcctatatgatgaacaaaaaatgactggtgaacaaatagccgaagctactggcgtaagtagatcaaccgtatatcgtgtggttaaagattcaaagtattaa

SEQ ID NO: 2690 - DNA, 228 bp, Staphylococcus epidermidis
atgacttttcagatagagaatattcaatataatggtgtggaatatcaaatcggacaggcaaataatgcgttaatgtaccttggattaggtctaggattaattgtttccgaagtacaaagagttaataaagatattttatctcaatctagtcactcattagaaaatctagtagatgttgacaaaccggagcacccatttctaaaattgaaagtttctcacaaaaaatag

SEQ ID NO: 2691 - DNA, 246 bp, Staphylococcus epidermidis
atgagtaaactagctaaagtagttaagaatggtaatagccaagcgatcactttgaacaaaagtgttttaaatgaatcaggtctaaatattggtgatagtttgtcagtagaggttaatgacggggagattaaattcacaaaaaataataaatcaatcatagatgaaattcatgatttttatcgtaatggtggatattacgatgaagaagaaattgattttggaaaatcagtaggttgtgaattatga

SEQ ID NO: 2692 - DNA, 333 bp, Staphylococcus epidermidis
atgataaatcagtttgatgttattatgattgatttaaaccctacacgaggaaaagaaaaacaaaaatatcgaccatgtgtagtcgtaagtaatgattttgtaaatcaaaattctccatttgtatggattttacctatcactaatagatcgaaaagatttccatcagatatacctattgaaactaaaaataatagcgtgacgggtattattgattctatacaaattagatctttagatgcaaaagtaagaaatttcaaaaagattgatgagctggttgatagtcttaaaacagatgtgactaatacaattattgcacattcatgtattgtctaa

SEQ ID NO: 2693 - DNA, 147 bp, Staphylococcus epidermidis
atgaatcttttaaaagaaattgagattaaaacattcgaaaataaagaggtttcttcactaaaagtagctgaagatgaactaaaaaagtgtataaattactttctaaaaattgaacttttaaatctaaaaaaactatacaagcattaa

SEQ ID NO: 2694 - DNA, 120 bp, Staphylococcus epidermidis
ttggatagaaatattgaattaaaaagtggctatcgttcacttacagtaactaaaaaatccattgaaaattataatcatgaatatatgcataaagtcaaaattatgaagatagtaaagtaa

SEQ ID NO: 2695 - DNA, 279 bp, Staphylococcus epidermidis
ttgaatgaaaatggaatgaaaagacgaactttaaataacttacctgttatcctagatgatcaaattcaggctgaagcaaaacataaaaatctttcagtcaatgatctttatatcaatattattaaagactattattctaagaaattagagaatgaaatgagtattaatttgaactcagatttaaaagaaatattacttgaagttatgaaaaatcaaatatatatgattgagttgttagaagatcaacaaaaaatttttcaatctatagaggaggaataa

SEQ ID NO: 2696 - DNA, 384 bp, Staphylococcus epidermidis
atgagaaaaattaaaagaagtttctatgtcaatgaactctataatgataagttaaagatgattcaaagagataataatcaatcaacattatcttcaagtattggttttttaattgactactatatcaaaaatgaatacaaaaaaattgaaaataaagaggatgaagatcaacaaaaaatcatcgacgaccttagctatatcaagaaaaagttaaacggtgctgattttaatcttctagttgctttacatatgttagctgatatttcggaagaaaaagctgttacaactgctagcatgaaagatctaagaaatcatttcaatgatcactatcaatcagctgtaaagagatctcaacactatcttgcaaataaaagagaattttag

SEQ ID NO: 2697 - DNA, 774 bp, Staphylococcus epidermidis
atgagtgaacaaacgagtcctgctattaatttaatttgtgattttaaagttaggagtttaaagggagaaagttataagaaatttatcaactatattagcgcagaaaagaataaaaaaaatgttaaaaaaccagatatagaaaacaatctttttgataagtatcttgattatatgtcaatagataaattaaaaaagaaacaaggatataataaagaaaatgtaaaaaaaagaacaactatgagctttaattctgaacatgaattcatcgaagaaaaagagatgaacagattaaaagataagtttcaagaagcaaataaaaagaatcatgtcatgtatcaagatgttgtatcttttgataatcaatttcttaaagataatcatttatttaatgagtcactagataaattagacgaacctaaaataaaaaaagccactcgtcgaatggttaatcaaatgattaaagataatcaaatggataaagaccatacattttggtgtgcaaatattcattatgacactgataatattcatattcatatagctacttccgaagagaagaatacacgaaaaattataaaagaaggaaaatttaaaggacaatataaaggtaaaagaactcctacaacgcttagaaatatgaaaagtacttttgctaactcaattaaccaagatattggactaatgaaagaatttgatgaattaaaaaaagagatgaaagataatgtcaaagagaaaataaaatacagaaaatataattcttactctttaaaataa

SEQ ID NO: 2698 - DNA, 345 bp, Staphylococcus epidermidis
atgaatctagaagataatctaaacctatctaagtatgattatattatttttgatacacatccaaactttagaacagatactcgaaatactatagtagttgtagttaatgataatatcataagtcctgatgtgccgggcgctaataatgaaaaaacgaaaggcaataccttagaacgctattcacaatgtgttaaggaaattattgattcaatatcaatgcaatcatatgtaatggctgaattatacttagttggtaaccttattaagcctaatacagaaagttctagacaatttattaaagatttagaagaatttgataattacttaacttattttaaagagtaa

SEQ ID NO: 2699 - DNA, 873 bp, Staphylococcus epidermidis
atgttagaaatatcgaacctagaagttaaatataaaaatttttcagcattaaaaattaaggaaaaaataaaagttaacgaaaatgattttgttggtgttataggatcaaatggagctgggaagacaactttaataaaagcaataaccaatcaagtacattataaaggttcaatagtgaagcctaataaaatttcagttcatttgcaagaaaataattatcccactgttttaacttgtaaaacaataattgaaggtctgttaaaaactactattaagaaagataaaaaactaaaaaatctaatagattattttgatttcaacgatttattaaaacgtaaagtagggcaactttctggagggcaaaaacagaagattacgttgataatggtattgtatcaagaggcgcctttgacatgttttgatgaaatgactacaggactagattttgaagctagaaataaattaatggagaatatacaagcgtggtataaagaaaaaaaagctgcactattattaatctcacattactatgaagaattggaaaaactagcaaataaattattaataattgacaaaggtgaaataattgattttgattatatagataaactatttcttaagcatgttggttactcagcaatagtggttgaagatgaaaatttagaaatgtttaatgataaaaaaatacagagcaagaaaggaactcaggctttttcaattcgtaataaacaagaagaaactgaaatagctcaagaactaattaagagagataaaaaattttcaataagtagaaatagtattagtctaatatatttgaatgctatttataataggagaaatagcgaggagaaaaaagatgatacattatattaa

SEQ ID NO: 2700 - DNA, 750 bp, Staphylococcus epidermidis
atgatacattatattaaatttgagataaaaaatacttttagttatagtattggcatgatagttggtggattattaccccttttattagcaattggaggctatcatagtacaggaaattcagtacaaaataaagttgctgcagaaactttatttgctacgtgtttaccaatgattccattagggttagttatgttaccatttacaatctcatttgctaaagataatgaaagtggtatttctaagcgtttttctctctttggctatgggaaagtccaacaaatgattgcaaaattcatatctattatcattttggtaactattgttagtttaatttactattttgctttgatgaatatacttcccttacctagactaagtgagaaatgtataatattagcaattacaggtattcttatttttacattatcattttattttttagcgttcactatagcatggttttttagaggtttcaatgctgtacaaggaatagcgatggtagtttattttggaataggtattttaacagggactataggagggtttgagtttcatggctatatgaaaaaaatttcgaattttatccctttcaaatcatttagagaaactttggcaaaacattggactcaaaacgattttagtttagaacatgttttgtacaaactttttgtatttttcgttttctctttaatgatttttttatttttcaatttatatagttttataaaaaaaaggcaggaggagcattaa

SEQ ID NO: 2701 - DNA, 15522 bp, Staphylococcus epidermidis
atgcaatataacaatttggtggaaggatttgaacatatagtttcgagctggccaaataaagtggctattaagtttaagaataaatatttaacttataatgagttaaataataaagcgaatcaattagcttcttatttaaaaaaaagaaagattgaaaagggagtagaaatcccttttctattaaacagatctgaagatgtaatcattacaatgttagctattctaaaagtaggagcagcctttgttcctttatcaaaagaaactccgaaaagtagacaaaattatatattaaaacagatgaaatctccagtggttattactaagaaggaattattaaatagtgaaaacgaacctacttataatctcaaccaacatataaaaagcgaagatgtagcatatattatttttacttcaggaactactggtgctcccaaaggtgttatggtaagtcatggtaatattttaaactctatttatagccatgctgaggttttagatttaaataaaagtcataaaaattatttgcaatttgcagattacatatttgatgcttctattattgaaatattccctactttattgcatggacatacgttggttataacccctgaaaatgtacgtaaagatttaaatgaactttctaattttatactgaatgaaaacatagattgtgcaattattcctccggccatgttagataaagaagagcttttgtctttgaattatcttttagttgcaggagaaccttctaatacagaaatacttaatagttataaaaaacaaggaacaaaagttattaatggatacgggcctacagaattatctgtgtctgtatctctatatgaatataacatcggcgacacagctacaacaattggattcccacaaaagggtaataaattttatatattgaatgaaaataatgaattaattaagactaatgatgaaattggtgaacttatagtaagtggtaaacaattgtctcaaggttatttgaatgatttagcattaacaaaagaaaaatttgtttatttagactcaataaatgaagtagtatataaaaccggtgatttggtaaaacgaaataatgataaaagttatgaatttatggggaggaaagataaccaggttaaaattagaggatttagaatagaattacatgaaatagaatcgaacttacagaaaattgaagtaattaaacaagtagtgtgccataaaataggaggagatttggttgcattttacactagtgataatgaaattcaaacaaaatatttaagaaaatatttaagaaaaactctccccgaatatatgataccaaatttgttccgaagaataaaaaaaataccattaacatcaaatggaaaaactgacaaaaaaaaattggaaaaaatgatagaaagtagcaaaccacacagacaattagaatattcatctttgaatacaactaaagaaactattaaacgtatattgaatgtagttgaaataccagaagataaaaacttatttgaagttggtttgaattcaattactgctataaaaataggtcaaaaacttaaaataccagcttctattgtttttgagaaaaagaatattaaaggcatagagaattatctcaaaaacaaaagaagttttgagataattaaaaaaagaagtaatggtttagaattatcttatgcacaaaaaaggctcttatttttagatgaaatatacgaaggccttcctgttaataatctttcatgttcaattattttgagctcggatatagacgttgaaagaataaagaatgctataagagatgttatttcacgacatgaggttttaaggactaatataattaatggatgtccttacatagtaaacaaaaatattgatataactaattttgaagttaatgataataacttttttaaaaaagattttaatctttcttgtgagctcccaattagaataaatataaaaaatagtagactatcactttgtgttcaccatatagtattcgatgggctctcgctagaaatatttttaagagaagtaatgaaaatatataatcaaacagatttaccatctttagaaaaacaatattatgatttttctgagtggcataaaagtttaatagctaataaacattatatagagccccaattaaaattttgggaagaaattctatttgaatttgaagagctaaacctaccaattaaacgtaataataaaactaatattgaatctattttacaaaataataaagtggagattaatctatccaaggaaatgaagaaagaaataaaaagtaaggctcttaataataaaactacagaatttatagttttattaaatgcttattttctgacattatctttggttacaaatcaaaatgatataataattggaattcctttttctaatcgacattatcctgttacagaaagcttaattggaaattttgtaaatgttctacctttaagatttaagatccatccagagaaaacggttgaagataacttagaaagtttaacagaagcaatgatagaaacttctaaaaatcaagatgttccttttgaaagaatagtaaaaatgaaagaattaagccaacagtccacaaaaaaagggaacccaattttccaagcaacaatttccagtcaaaattttggacaacatgaactaatgaataataactttttcaattcaattaagatgaatattaattatcctatgacaaatttttatttatctatgtttttggaagaaaatcagattatatttagctattctgatgaggtgttagacgaaagttttgtaaagttattcgcaactaagttttttgaggtgcttagacaaactttgatgtttaatagaagaaatgcagatattatatttgataatcaaagcctcctcaataaaaacgaattaattaatactaaaaatgtacctaaagaaatatataaaagcactattcctcaagaatatgaagctcatgaaagcccttcatctgtattaggagacccaaaaagtagtattaatcacatttcatataaagaaaatattgaaaaaatagttaaacaagtattgtcaaccatcctagatattgaagaagataaagtatcaattaaagataatttcttttctttaggaggcgattccataaaagccataaaaatggcttctttgcttaaaaaaaagggattgaaaatctcgacaaggaaaattgtcgaaagtcaaacaatagaaagtttaattgaaataatacaaatggattcaaactcatatagcattgatacatctgtatcgaacggaaaagttacaccactaccaatccaaaaatggttttttaataaaaatcaccataaccctaattactttaatcagtcatatatattagaagctaataaaagttattcaaataaattagtaaacgacgtttttagagagttgataaagtatcatgatggtttaagaatcattatggattatgaaaataaaagtactgagcaattatctttttctacgtttatagagagtaaattttttctccaaacaaagaaaataaataaaaaagtattatacgaaaatgatattgctgagatttgtaataagttacaaaaagacattaatattgaaaataagtactctattatcgtaaatcagttagtatgcaaggaaaaaacttactttataatagtagttcatcatttagtgatagatgaagtttcttggtctattttaatagaagacttcttcgatttattagaactaccaactagcaaatggtccttacctgagaaaacttcttcaatcaatacttgggcaaaagaaatagaaaaggcaagtaaaattggagaatatgataatgaggtaacttattggaataatattactattgataagtatgagtttctagaattaaaaaaaacaagtaaagataattactattgtaatagtgattccataacattttcgttgactagtgaaaaaaccgaagatttatataaaaaaataagtatgtatccggaatttgatataaatagcgttttattatctgctttaagtaggtcagtaaaaagaacttataataaatgtaaaattaaagttatgatggaaggacatggtaggtataaaaatgtaagtaatttaagtatagacagaactgtagggtggtttacaactttatatccaatagaaattagttgtgagcataatttaatcgaaaaacatattaaagatataaaagtggggatggagatagtacctaacaaaggggaaaattttttatctttattaacttcaaaaaaattaaaagaggattttctgaaccaagaaatattcgaactttcttttaattatttaggtaatattaataataacgttaacaaaaagtacagcgtcttatccattccagatattaaaaatgtcggagactataatcaaaaagctgcattaatagaaattaattgttttacattaaataataaactaagtgtatctgtaaattattcgttaaatattagagataaaagcaaagttaaagaattagtcaatacttttaaatcagaaatagaacgtacatttgagtataggtctttaaaaattgatgataataggaaaaacgattttcaaaaaatagcaagtaaagtgagcaatggagaatttatttctaaattgacaccaatgcaatcgtcaatatttcaagaatatctacgaaaggccactcttacgaataattatactgtacaagtagtatttgaagttactggaaatgtatctttaaaattattaaaggaagctttcaaaaaagtagttgacaataatgaaatatttaaaatgcgttatctttataaaggtttaactgatatctatcaagttttgacaactgaatcaaaggcagatattgatgtgtaccatgaaagtgatgagaatgaaatatgggatatgctaaatgagacttccaaaaaatgttttaaacttgacgaagatgctttgataaaatttagctgttttgtaaaagaggataataaaaaaattatatcttttacttatcatcacattatcatggatgggtggagtattaatgagtttatacaagaatttttgaaagttttaagaggtggagaattaaccaaaaagaaaactgatatcacacgatatgttaataccgttcataattataatatagaacaagtgaaaaattattggaaaaattatttgtatgaatatgaaaatagagctgttattccatcttttaatataggagaaacatatcatactgattttgttaaaataaaaaggtttaaaataattaatataattcacaagatccaaaatcttaaaaaaagtaataatagtttaagcgttaatgatttcatactaggctcctggggtatcgttttacaaaaattaacagattctaaagacgtagtttttggaactattatatcaggtagaaatagtgaaattgttgattttgttaatgtgattggattattaattgaacaagtacctataagagttaaaaataaaaataatacatttttggaaattatagagagagttaaccatgacttatcaactattccgactcataataatttatcaataagtgagataatgagtttagttaattctgttgtgccacaacatagagcaatcatagataattatccagatacttttaaaaagagacagaagatagataatgaaagtaccattgaatttaaaaattattacgagcaaaatagcattgattttggaattgattttactatagaaaataaggatttaattgtagaaatcaaatataataacaaaatttatagtgattatgacatatcaaaagttcaagatatctttaagaaggttattacagagggtacagaaagtcctaatattaaagtcgataaaattagtataatcgaggaagaggaaatgaatttaattacctcttatgaaaagggaccaatctctaaaaagaaaaacaactccatgttagaacaattttctaatattgtgaaaaaaaatcttaattcagtagctgtctcaggtgagaaattttcttggacgtataaagagttagatgactattctaattgtattgctaattcactgttgaaaaagaatgctaatcctaaagatagaatcgctctgaattttaataataaagaattaattttacctagtatattaggagtatggaaaattggagctgtatttgttccgttagatccggaggaatcaaaagaaaaaaatgcttttattatttcaaattcttcgtgcaaatttgtacttacagatttaaatgagaaaaatgattttgacgtacaaagtctcaacatttgtaatttaaaggaagagcataatacatcaaacaacatcgagtattcatgtacggatattgcttatataatttacacctcaggtagtactgggaatcctaaaggagtggaagttggattcagtgctttaactaattatatagagggtatgttagaaaaatctaatccatctgaaatgaaatcatctttagttatgtctaaggttaattatgatttgagttatactgcattgtttattcccctatatattggaggaaacattacctttattgagaaagaagattatggtaattcatataagatttctagattaattgaaaaaaataaagtaacttatatcaaaactactccgtctatattttcgtgtcttgagtataaagctttttcaaattgtgaaacgttaaaattaattatactaggcggagaaacaccaaattccaaaagtatattagaatttttagattttaatcctaatgttaaatttttaaatcattacggcccaactgaagcaacaattggttgtatatctggttacataaacccagattttctaaaaaaagaaaaagaatataatgatattgggactccacatacgaatgtaaagatttatatattaaattcagataaagagagagtccctataggaactaaaggagaaatatatatttctggagcatgtttatctaatggttatttgaataatagaacattgactaatgacaactttatttatagtaaaaaagaaatgttgtataaaacaggtgatatcggtagatttacaccaaatggtaccattgaatattgtggacgcctagatacacaaattaagcacttaggatacagaattgaattaacatcaatagaaagacaaattaaaaaagtagaacacgtacaaaattcaattgttttgcagttagaggagaatctcttaggtacattaatagtactagacaataatggatcattaatcgatgttaagaaaagaatacaagattcacttcctaaaatgatgtggcctgcaatatatttagaagaaagcgaaattccaattactttaaacgggaaggtagattataataaagcgagacttttattaaataaaagaagaagccaaaccccaaaatcaaattataaatatataaattcacctgactataaattgaatgttttctgttatataaaaaatatattggaaaatcaaaatttaaggttgcaagataatttctatgaaacgggaggtaattctttaacagctattaaattattgtctaaactaaaccaaaagtatgataaagatataagactaaaaagtttaataactagtgaaaattttggcgaatttattgataatattttaaatgaagatagcgattctacagttaatgttgaaaagaggaaaagggaagagttttatccaatttcttctcaacaaaaaagaatgttatctcttaatttaataaatacagataacaaagcatataatcttcctattatattagagattgaaggtataattgatatagaaagattcaaagactcggtggcaagagtggttcagaacaatgaaattcttcgtactaaatatgtagttaaaaatagtaatgtatatcagaaagtgttaaaagattttgatataactaaaaaaattattaaaactgataatcttcctcagaaagcagaattaacggaatatattgaaaattttaatctgctcaatgaaataccgattaaatataaagttttttatagtttttcacaacataaaaccatagtgttgtttaactttcatcatatttgtatggataaagtctcgtatgatttgtttttagatcaaataaagagggcttatgaaggagtgaaattaactgattcagagtatcaatataaagactacatagattttcaagaaaagtatttcctagaacataagaacagacttgtaaattattggtataagaagttatcatccttaagcttatctgaaggaacatttagtactttaattttaaattcagataaatttaatggagaaaactacgaattttatttagatgaaaaactcaacgaagaaataaatgtattttgcaaaaaatatcattttacaaaatatgaatttttactttcggcatttgtaataagccttattcgtttacaagataaaaaagaaattggtgtaattagtaattatcttggcagaagtaaagttgacttttacaatactatgggtatgtttaataatactattcctcattttttcaaaatagataatacgaaaaaagtactcgatgcaatgagaaaaataaaacatcaatttattgaggatatcgatcatggagaaatgcaatttgagaagattgttaagatgggaaaagaatgttttaagaaagatgttaattctatatctgatatatcttttttatatgaaacagaaagaacagaattagatattggaaatatgagagccaaacttattaagccaaatttaaaaacatcaaaatttaacatgactttgtcggtattagaaagtgctatgaaactattctgcacgtttgaggtaaaaaaagatgtttattctatagaaatgcttagagaaattgaaaacaaatttaaaaaagttattaatgaaattattagttgtcagggaacagagagaaatgtagaaaggggtaaaaaagatctgtatactaacagtttattagaggattttgaaaaaaatgctagtctatatcctgataaagtttgtctaattgaagagaatgaaaatatcacatttagtaaacttaataataaagctaatggttttaagtattcttttgttaataacattgacgatgataaagttttattattattaccacccaaaaaagaagtatttgtagctattttagctatttggaaagccggaaagacttatatacctgtagatcctaaatacccggatgaatatataaagaatattctttttgatagtaaatctcattttgtaatcactgataaaagtaacaaagaaagacttgaaagattgaagtgcaaagccttattaattgattatgataatattattgaaatcccaaaaggtgaatcagtatacgattttaataaaccggcttatattacttatacgtctggaactactggaaaaccaaaaggtataatgattagtcataagtcactatctaattatatacattggagtcaagaaaactatttaaaaaatcaaataaacactatggcattttattcatcgatttcttttgacttaacagttacttctttatttatgtgtttaactaatggtaataaagttaagatttttaaagaatgtgacagttttaaattattgaaaaaggtattggaagatagagaagttaatatagtcaaactgactccagcacatttaaaaatagtagacagaaccaatattaaattaaataaaaacctccacactttaattgttggaggagaggctttttattacgatttagcaaaaaatatagaatctaagggagccaatattactatttataatgaatatggtccttctgaaactacagtaggagctattgtctacaaatttgatgctaataataaaagaattcaagtgcctatcggaaaaacaatagataatatgcaagctaaaataatggtagatggaagggaagcaaacataggagaagtcggagaaatatatcttggaggtataggcttggcaaatgggtatataagtgattccgaagacagtgatgaaaaatttgtttacattgagggccacggtgatcagaaattttacaaaacaggggatctaggtgccatattagatgatgggaatatagaatatctaggtagacaagattgtcaagtaaacattaatggatatcgagttgaattagaatctattcatcaatctcttatgagtctaccggaagtaattgaagcagtagtattaaaagaagattatcatacgaataatattatatcttatgtagtaatatcgaatgagttgagcaatatcaattcgaattatataacatcacagttaagaaaaatttctcctgaatatatgattcccaactcaatccgaattgtaaaaagtattccgttgactattaatggcaaagtcaatgaaaaaaaattaaaagagtctacacaaaaaaactttaatactcataatggttttgagaataaaacaattaatcaacgaatattattaaaaaaattagagtctattttaaaaaagtcaaacttgtctttatcagataattattttgagttgggcggggactctatacaagctattatccttagttcagaattaaaagacgaaggatttagtttggaagcgtcaaaagttctcaattcattagatttaaatgaaatgagtgaatatataaaaaaagacgaagaagttaactttaataatggagataataatgagctgtacccaattagtcctatacagaattggtttttcaatcaaaaattagaaaaccctaatcaatatgtacagtctttattattaaatatgagttataattataaatatgaagaagttatagacgcattactaaaattaattagaaagcatcctacacttagaactaattttaagcgtataaacaaccaactcgtaagacaatattctaaagatatggacgaaattgaaatatcaaaagttattgaatataaaaaaataaagagtgataaattcttagaagaaattcaacgagtaagcaatgatattatagatgaaattgaaatatttaatggaaaactatggaagatatgttttgttgaagctcatgattcaagaaaagttttatttgtttttcatcatttaataattgacattgtttcatggaaaattttaataaaagatttagaaaaagctttaatgaaaaaaactataactaaaacaacttcgtatctagagtggtcagagttaattaacaacaaaaaacaagcaaataaaaccctagcttgtgctgaaagcatagattgtaatttattaactaaagaaataaaaaatccaaacgaaatattgcattataaagtggaattagatgtaaaagaaagcgatttatcttttttgaataaacagttacatgccacaacttttgaggtaacttttactatcataatcttatctttaacgcatgttctaaaaaaagaaaatatatctgtaataattgaagataatggtagagatataggggatgaagaactaaatattgagaatactattgggtggttcacttcattttattccttagatatacgagttgataatgaaaaagatatagtagaaaatataaaaaaaataaaatatatgttgagaaattcaaagaaaaatgaggttaataaaacaaataacgttgataagcaaggacatataaaagtaaattatttcggagaaatatacaaaaatttaaattcaaatatatttgacattgaaaaaaaatatcaagaagctagttctttaaaaacaagcaaaattaattttcctttggaaataagttgttatttctcatctggcaaattaattatagactttgaacagtttagtgagttgaatgaagttttaagagaatatgagattaaatatagtatacaaaaatattttaatgaaatacttttgtttaaaaatgaacttcataaattgaaagaaattaaacactcaaacaaaggaaacgaaagtataaaattacaccctgtattacctactcaagaaggattatattatgaatggttaaaagataatagttcaagcaaatatatagaacaaaatgtttttacattaaatagagaactagatgttgaagctctaaaaagaggattaaatatacttatagaaaagtatgcagcattacgtacaaattttgattttgataaagaaagtaataagccggttcagttagttagagaaaaagggtatttagattttaatacaaaaatattgaataaaaaaaatattgaattactggtagagatagataagagtgagcctttcgatttgaagaaaggggaattgttcagaattacctacatttctggtatagattgttctgatactatcttatttacctttcatcatttaattttagacggttggagtaagattattttaattaatgagataagaaattatctatcaaatggaaatatgctatatgacagtaatggtgtacaacctggggaatatgcacgttttattgaaaaacagaaaaatgctgaaaacagtaaagttttttggacaaattaccttgcaaattgtaacgctaaaatacattggccttctgagtatcttgataaaagagattgccaaaatataaatgaatattactataaatttgataaggatattcttaagaagattaaagatatggcaattagtaatcagaccacattgagtgtgataattagtactttatggggaatatcaatgtatgattatgtaagtgaaaatgatatagtctttggttttgttacttcaggtagaaataaatatacttatcaaatgtcaaaaagtgtcggtatgtttgccaatactattccgattagaattaaatccgaaaatcatgagacaattaatgaggttattcgaaaagtaaaaactaatatcttaaagtcattagataacgactattactctttaggtgagatattatcgtatagttctattaaaaacattaatcatcttttagttattgaaaatcatgagaaaaatgacaaagagattgattttgccaaaattgaaacaaaatctaaaacggagtttgatttggaagcgttatttggtattaatgaacatcttcatattaaattgagatattatcctaataaagtgtcattatcaactctagaacatataattacaacttttattaatttaatagataagacatctttaaatggagaaattcatatgtcgcaaatagattcactaataaagcaagattataaaaaccgattgtatatgaataagataaatgacagattggattcaaaaaagcagggacagttgcaagaaaatttatcagaaattcttcaaaaaagttttcgagctttttctgaaagaacagcaatcatttctgaagatatacaatgtagctattcttatctagataaagaatctaaccgaatagtacaaatattacgagaaaaaaatattcataaaggagacgtaattggtgttttcttagataaatctattgagttagtagcttctatgattggtattattaaatttggagcagttattctacctattgatgtcaatctcccttcttctagaagagaatttatgataaatgattctaattgttctttaatattgtctaaggatatagatatgaagaatgataataattatgttgaccttaatgattataaaaacataaatgttacaaatagtgagtgggcaatacttgatgacaatgatcttcaatatattatatttacgtcagggaccacaggaaaaccgaaaggtgtaaaaatttcagtcggtaatttaaaaaactttattcatagtagccaatgttctgttgattttagtaaatcaattaatatgatttcaataacatctatttcatttgatatatctatttcagaattattaattcctttaataataggaggcaaaataacaattttaaataataaggattcaaaagatcctcgcaaaattttacaagtgttgaaaaataatgaatgtaatactttacagacgacccctacacgtttagaaagtattttagatagtgtgaaaataaaaaaagaatttgaaagtattgaatatgtatacttaatgggggagactcttaaaaaatctactgttaaaaaacttttcaatttaaaacatgtaaacttatataattgctacggacctgctgaagctactatttggatagccgcaaaaaaaataaataacgaaaaagaagatatatcagttgggaaacctataagaaatgtagaaatgtatatattagataataataataatgtaacttcagaaccttatggtcatttagctgtaagtgggaattcgttatccaaaggctatatcaataataacaaagagaataactcttcctttgtatttataaataattcaattaataaaaaagtctatttaacaggtgatttggccaaatggaatgaacaaggtgaaattgaaatattaggaagaaaagataatcaaattaaagttaatggtgtacgaattgaaacaacagaaatagaagaggttgcaaaaggctacgaaaatataaaaaattcaactgtactagttgataaaactaaacaaaatatgactttatatttgtctttaagtaacaaagatcaatattttgatatttctagttttagaaagtttttaacgaaacatttacttatacaaatgcttcctcaaaaaataaaaatagttagtgaaatacctgttaataacaatgataaagttgatttaaagaaattagaaaaactaaatagcacccaggaaacaaaatatatctttaacgatgtaattgaaaaagacttatccattatttggagtagttttttagagactgatgtattttctaccaacgctagtttttttgatttaggaggcaattcgttaaaagtttataaagttatttcagaaattaacaaatacttcaatattgatatgtcagtaattgatttttttaataatcctactattgatttattatctaaatttataaagaattttaaaaataatcatagagatcatttagaaggattgttcaaaatatatcctaaaatacctgaaaatataaagttgttaaaaactaatgattttaaatatttaatagttagctcatatatacttcttgttagttttatcgaaaagaaaagatcactttcattaaactttcagttaaacaatacagaatttactaaaaacttttctttcataaatatatcagattttgaacatctaattgagatagttaaagaaatatttcaagatgttaataataaaagagcttctgaaaataagcggactaagtggtcaataactgataacttattaaacgtaaaagaagataatgtaagcctctatattagtaataaaaatgaggttattattgtatgtcaaaaaacatcggtagaatataaatatctaaatgaaataaatatattatttgaaaaagttttaaacgaggttaacaattaa

SEQ ID NO: 2702 - DNA, 1272 bp, Staphylococcus epidermidis
atgaaaaaacaggctatagtattttctggacaaggatcgcagtatataaatatgggaaatcaattttttaaggaaagtaaaataggaaaaaaatatttaaaagaagctagttcaatactagaatatgatcttgaaaagataattagagatgatgttaataaatctcttaaatttacagaatatacacaaccagccttattaacatattcggtggcgcaattttttgatttgaaaaataattttaatataaatccaattattatggcaggacatagcctaggagaatatgcggctttaatatgttcgggatctttgtcttttaaagatggtttgaatttagtaagtaatagagggagactaatgagtcattcttctagtaaaccaggaagtatggtagccgttcgaaactttaacttggaaaatttaaagtatatagttgaagaagctagagaaaatagtaagaaagtatgtatctctaatataaataataagtctaatatagttatttctggttatacaccacatattaaagaaatagtaagggtaattgagaggcaacagggagaatgtatatacttaaatgtaagtaatgcctttcattctgatttaatggaagaagcaaataataaatttaatgaatacttaaaaagcactcaatttctttcgcctaaagttgaagtcatttcaaatattgatggcttaccatataaaaatgagagagagattcaagaaaaactatccaagcaaatggttgagtgtgtagattggcgagcaacatgtaactatattaataattctagtgctgattttataatagaatgcggagccaaaaaccaactaaaaaagttatacgaacaagaatataaagaaaaatcattacctgtttttagtatggatattggtgaagataaattagcattaaaagactacttaaatgccgaaggtgtagaaatagaggatctttctgaatattcatttgttggtagggtgttaggaataatcgctagtactaaaaataataattgggataacgaagaatttgagaaaggagtaataacaccctataaaaaactacaaaatattgcaaaaaatgaactgaaagaaaacgattatgatagtcacttaaagattttatctgaattaaaagatatattagaagttaaaaaagttccaatagaagagcaagtttcaaaaataaattttttattaaaaacgtcaaaaataaataaatatacagaagaattaatggaagatatttttaaaaaagagtga

SEQ ID NO: 2703 - DNA, 159 bp, Staphylococcus epidermidis
ttgattattattagttataaattattcaaaaataaagagcaactattttatgttgcatatgaaataaagggagagaaagtctactataaacgagatataaatcctaaagattatattaaagaacataaacatgattgtaaggatatacgtagaaaatga

SEQ ID NO: 2704 - DNA, 411 bp, Staphylococcus epidermidis
atgaataaagcaattaatataacatcattgataggaatcattttacaaagtttttctagtctattgtttttagttttcttggtattttcaattactggagcgatggatgctaattttactacaacagttaatggtgaaacaacagttcatagtgcagaagccgcacagcatgtttttagtgttggatttttggttatattcatcgttgcaattttttcaatcatttttggaattataggtatgatgaagaaaaaaactaatactatagcaagtggtgtattttatattataggtgcaatattaagtttaaatatgattacttttatatcttggctagtgtgtggaatattattaattaaaaaaagacaaaataaaagcataaaagacaataaaacacatttggtggattag

SEQ ID NO: 2705 - DNA, 126 bp, Staphylococcus epidermidis
atgaagcttatcaataacttaacaatcccttttattaaaaatcaaacgataagccataataattcattacatttattaaaacaaagagttaagtcttctaaaaattccactttaaatactttgtaa

SEQ ID NO: 2706 - DNA, 1026 bp, Staphylococcus epidermidis
atgattattgcaattatactattaatatttgtttcatttttcttttcaggtagtgagacagcattaacagccgcgaatcgcactaagtttcaaactgaagctaaaaagggagatcgtaaggcgcaaggtttaacaaagttattagataaaccaagtgaatttatcactactatattaatcggtaacaatgtagcgaatattattttacctacactcgtgacaatcttagcgattgatattggagtgaatgtgggaatagcatcagcaattgtaacaattgtgattatacttatttctgaagtgattcctaaatcaattgctgcaacatttcctgataaaatttcaaaacttgtgtatcctatcattcatatatgtgttattgtactcaagcccattacaatcttattaaacaagatgacagatggtattaatcatttactatctcgaggccaacctgttgaaaaaagattttctaaagaagaaattcgtacattattaaatattgcgggtagagaaggtgcatttaatgagatagaaaatactcgacttcaaaacgttatggactttgaacaattgaaggttaaggatgttgataccacgcctcgtattaatgttgtagctttttcaaaggaagtaacatatgacgaagcttatgatacagtgatgaataacccatatacaagatatccagtatatgatgaaaatatagatgatatcatcggcgtattccactcaaaatatttattagcttggagtaaaaataaagaggacgcaattactaattatgcatcaagccctttatttgtaaatgaacataatagggcagaatgggtattgcgtaaaatgaccgtttcacgaaaacatttagcgattgttttagatgaatttggaggtacggatgctatcgtatcgcacgaagatttaatagaagagctacttggtatggatattgaggatgaaatggatcgtgaagaagaaaataaattaaaacatcaaaaatttccgcaaagcatgatgcatcgttaa

SEQ ID NO: 2707 - DNA, 849 bp, Staphylococcus epidermidis
atgatagaaataggtcttactggctggggtgaccatgatacattatatgaggatttagagcgtaaaacagataagttaaaaacgtatgctagtcacttcccaatagtagagttggatgcttcgtattatgcgatacagccagagcgaaatataattaaatggataaatgaaacgccgaatagatttcaattcgttgttaaaattcatcaagcattaacattgcatgctgactatagagattatgcagagtcgagagatatattatttaaacagtttaaagaaatgatcaatccgttaaaagagcataataaattggcgatggtgctcgtacaatttccaccttggtttgattgtaacgtccaaaatataaattacatcttatatgtgagaaaacaattaactgatattccgatgagcattgaatttagacatcaatcatggtttgacaatcagtataaagaacaaactttatccttcttaacacaacatcaaatcattcatgcagtggtagatgaacctcaagttaaagaggggagcgttcctttagtaaataggattactagtgaaattgcttttgtacgttatcatggacgtaatcattatggttggactaaaaaagatatgactgatcaagaatggcgagatgtaagatatttatatgattatagcgatgatgagttagctgacttggctcgtaaagtcgaaatacttaatcaaaaggctaagaaagtatatgtaatttttaataataactctggcggtcatgcagctaataatgctaaaaagtatcaaaatattttagacattgattatgaaggtttagcaccgcaacaattaaaactattttaa

SEQ ID NO: 2708 - DNA, 828 bp, Staphylococcus epidermidis
atgttattaacaattattctattaatattaatagggggattatcagcgattttaggatctatcgttggtattggtggtggaatcatcatcgtccccacacttgtttatttaggcgttaaccatcatcttctacatggtattacgacgcaaattgcaataggtacttcttcagttattctgattgttactggattatcttcctcattaggatatttaaaaaccaaacaagtagatataaaaaatggttcgatatttctatttggactactacctggatctttggttggttcttttttaagtagataccttacacttgattcgtttaacttatactttggcgtgtttatgatatttgtgtcgatattactgatgattcgtcacaaaatcaaaccttttaaaatttttgacaaacctaaatatgcgcgtacatatgttgatgctgaagggaaaacataccgttatagtgtaccacccctgtttgcttttataacaacgttatttattgggctattaacaggactgtttggcataggtggaggtgcattgatgacccctcttatgctcatcgtctttagatttccaccacatgttgcagtaggcacaagtatgatgatgattttcttttcaagtgtgatgagttcaatagggcacatctttcaaggacatgtggcttggggctattctatcattctcattatttcaagtgttataggtgcacaaataggtgtgagggtcaatcgatctatgaaatccgacacagttgtaatgttattgagaacagtaatgcttatcatgggtgtatatttaatcattaaatcttttatttaa

SEQ ID NO: 2709 - DNA, 1320 bp, Staphylococcus epidermidis
atggaattaacaatatatcacacgaatgatattcatagtcatttaaatgaatatgctcgtattcaagcttatatggcaaaacatagaccgcaacttgaacatccctcactctatatagatataggtgaccatgttgatttatcagcacctgtgacagaagctacggtaggacataaaaatatagaacttttaaatgaagcacattgtgatattgcaaccattggaaataatgaaggaatgacaatttctcatgatgctttacaaaatctatataacgacgcggattttaaagtgatttgcacgaatgtcatagatgaagagggacatcttccacatcatattacctcttcgtatatcaaagaaataaaaggaacacgtattttatttgttgcagcaacggcaccgttcacacctttttatcgagcactggattggattgttactgacccattagcggcaatcaaagatgaaatcaatgcacatcaaggtgaatatgatcttttaatggttatgagccatgtcggtatcttttttgatgaaaagttatgccaagagattccggaaatagatgttatctttggtagtcatacgcatcatcattttgaacatggagaaataaacaatggtgttttgatggcagctgccggaaaatatggctattatttaggtgaagttaatattacgattgaaaatggaaaaatcgttgataaaatcgccaaaattcatcctattgaaacacttcccttagtcgagacacattttgaagaagaaggaagagcacttctaagtaaaccagtagttaatcatcatgtgaacttagtcaaaagaacagatgttgttacaagaacatcgtatttactggctgaaagtgtatatgagttttcaagggctgattgtgcaatcgtaaatgctggacttatagttaatggcattgaagctgataaagtgacggaatatgatatacatcgcatgttaccccatccaatcaatattgtaagagttcgattaaccggtaaacaattaaagcaagtgattcaaaaaagccaaaagcaagaatatatgcacgaacatgcacaaggtcttggttttagaggggatatatttggaggatatattttatataatctaggctttattgagtcagaagaccgttattttataggcgatgaagagattcaaaatgataaacaatatacgttaggtactgttgatatgtatacatttggaagatatttcccattgctaaaggggttatctacagattatattatgcctgaatttttacgtgatatttttaaagagaaattactaaaattataa

SEQ ID NO: 2710 - DNA, 915 bp, Staphylococcus epidermidis
atggcgactagaaatgaagaaattttacgtaaaccggattggttaaagattaagcttaacacaaacgataattatactggtcttaagaaaatgatgcgtgagaagaatttacacacagtgtgtgaagaagctaaatgtccaaatattcacgaatgttggggtgcgcgtcgtacagctacatttatgattttaggggcagtatgtacaagagcatgtcgattttgcgcggtaaaaactggtttacctaatgaattagatttaaatgaaccagaacgagttgcagaatcagtagaattaatgaatttaaaacatgttgtaattactgctgttgcacgtgatgatttaagagatcaaggctcaaacgtgtatgcagaaacagtacgtaaagtaagagaaagaaatccatttacaacaatagaaattttaccatctgacatgggtggcgattatgaagcccttgaaacattaatggcttctagaccagacattcttaatcacaacattgaaacggttcgtcgcttaacaccaagagttcgagctcgagcaacttacgatagaactttacaatttttacgtcgttctaaagaattacaacctgatattccaacaaaatcaagtttgatggttgggttaggtgaaacgatggaagaaatttatgaaacgatggatgatttacgcgctaatgatgttgatatcttaactataggtcaatatttacaaccgtctcgaaaacatttgaaagttgagaaatattatacgccattagaatttggtaaaatgagaaagattgcaatggaaaaaggatttaaacattgtcaagcaggacctttagtaagaagctcatatcatgctgatgagcaagtgaatgaagcagctaaagagaaacaacgccaaggtgaagaacaactcaattaa

SEQ ID NO: 2711 - DNA, 390 bp, Staphylococcus epidermidis
atgattaaagtcgaccaacaatattttgaattgatagaagaatatagagaatgttttgatgaggaaatattttcagctaggtattcggatatattagacaaatatgattatgtcgtaggtgactatggttacgatcaattacgcttaaaaggattttataaagatagtaataaaaaggcagaaataagtaaacgattttcaagtatacaagattatatactagaatattgtaattttggttgtccttattttgtagtcagacgattgtcaccaaatgaatttattgaagaaatagatgataaagaagatatcattgataaattacatgatgttaagattcaacctactattcaagacacagaaaaacatacccaagctatagatcaatag

SEQ ID NO: 2712 - DNA, 267 bp, Staphylococcus epidermidis
atgatagatatgtacttatatgatgatgaagaacaaagccaagtacagttcgtcggctttgttggtgagcatagtcgttacgacttaatgcttgtacaaacggatagacattatggtaaaactttagttttaaatatgcagacaaatcaatttggcattataggttcagatgatatagaagaagaaggttacatttctcatattttaggagtatcaaaggaagaagcggatgaaattattgaatatttaaatgaagttattcaatag

SEQ ID NO: 2713 - DNA, 435 bp, Staphylococcus epidermidis
atgtattttgtagataaagataaactaactcagaaaatcacttacttacaaaagctcactgaagattacaatgataataaaaggaacctatatgcttttgaacgaattggtcaaatgttaattgaatcttctgtagatattggcaatatgattatagatgggtttattttaagagatcctggtaattataaagatgtaatagatattttagaattggaaaatgttatttcaaaagaaacacaatcacatatcaatcgaactattgatgttagaaaacagtttgcacatcactatatcgatttaaatatgaataaaattgagccgttatttgatgatgcactaccatactataagcaatttattcaagaagtaggacaatttttagaaaatgaaaatgtaccaattaccgcatttggaaaaggagcgaataactag

SEQ ID NO: 2714 - DNA, 780 bp, Staphylococcus epidermidis
gtgaaacattatcaggcatacttaatcgatttagatgggacaatgtataaaggcacagatgaaattgacggtgccgcacaatttatagattatttaaataataatcatatcccgcatctatatgtaactaataattctacaaagacacctgttcaagttactgagaagttacgtgagatgcatattgatgctaaaccagatgaagttgtaacttcagcattggcaacagcggattatatctctgaacagcatccaaatgcaactgtatatatgattggtggtcatggactcaaaactgcactaactgatgcaggactttcaataaagaatgatgaacatgttgattatgtagttattggtttagatgaaaaggtaacatatgaaaaattatcaatcgcaacattagctgtacgtaatggagctaaatttatatctacaaatccagatgtatccatacctaaagagagaggttttttacctggtaatggtgctattacgagtgtggtcagtgtctctactggcattcagccagagtttattggtaaacctgaaccaattataatgtctaagtctttagatatacttggattagaaaaatcagaagttgcaatggttggtgatttatatgacacagacattatgtcaggtattaacgtaggtattgatacgatacatgttcaaactggtgtgagtacgtatgaagatattcaatctaaagaaataccgcctacgtattcatttaaagatttaaatgtagctattgcagaattagaaaaataa

SEQ ID NO: 2715 - DNA, 972 bp, Staphylococcus epidermidis
atgaataaaatactcgtaacacgtcaaattccacaacactacgtagagcaacttaaaaaaataggacaagttgtcatgtgggaacacgatttaacgcccatgtctagagaatcatttcttgctaacgttgaagatgcaacagcatgtgtgatcacattgagtgagcatattgatgaagaagtatttctcagggcacaacaacttaaagtgattgctaatatggcagtaggttttgacaatattgatatttcattagcaaagaaacatggtgtagttgttaccaatacacctcacgtactgacagagacaactgccgaactagggtttacattgatgcttactgtagctcgtagaatcattgaagcgacatcatatattcaagagggtaagtggaaaagttggggaccctacttattatcaggaaaagatgtatacggtgcaactgttggtatttttggaatgggtgatataggaaaagcgtttgcacgtcgcttacaagggtttgatgcacggataatatatcacaatcgcaaacgtgacttaaatgctgaaagagatttaaatgctacatatgtaacgtttaaatctttacttgaacaaagtgattttattatttgcacagcacctttaactaaggaaactgagaatcaatttgatgctcgagcttttaataaaatgaaaaatgatgctgtcttcattaatattggaagaggtgaaattgtagatgaagaagcacttttagaagcattaaaaaatcatgagatacaagcctgtggtttagatgttacgcgtcaagaacctattcaacctaatcatccaatactgaaattacctaacgctgtggtgttacctcacataggaagtgcatcccaagtcactagaaatcgaatggtacaactttgtatagataatattaaagcagtattaaataatgatgcaccaataaccccaataacctctttacacttttaa

SEQ ID NO: 2716 - DNA, 147 bp, Staphylococcus epidermidis
atgaaaggaaaagagccttctaacaaatattttgataaaatgaagccttacttaatcactttgttatatttagctatttttatagcgctatatttaatttatggtagtggtgatacacaaaacaacttcatttataatgaattctaa

SEQ ID NO: 2717 - DNA, 1458 bp, Staphylococcus epidermidis
atggcagacttaattaatattctaaaccacttcgttcaggaacaacctgaagcagttgcggttagacatacaaatgatgagctaacatataaacaacttgatgaagaatcaagtaagctagcacatctattacaagatagtaaaaagccaatgattttatatggtcacatgtcaccttacatgattgttggtatgattggagcgattaaatccggttgtggatatgttcctattgatacttctgttcccaaagaacgtgtgaatatgattattgataaagtacaaccggaaatcatttttaatacttcagatgagactttagaacagacaaatgcacaagtgcttaaggttagcgatattcaggattcacaatatccaattgtctttgatagtcaaatgaagcaaaacgatgtagtatatacaatttttacctcaggatctacaggagaacctaaaggtgtgcaaattgaatatgcaagtttaaatgaattcgcagaatggatggtatctttaaacaaaactggtactggtaaagaatggttaaatcaagcgccattttcttttgatttatcagtaatggcaatctatccttgtttaacatcaggtggtactttaaatcttgttgataaagatatgattaaaaaacctaaactattgaacgaaatgttagttcaaacaccaatgaatgtttgggtttctacaccttcttttatagaaatgtgtttattattacctaatttaaatgaacaacaatatagtagtttaaagcaattctttttctgtggggaaatcttaccacataaaacagctaaagccttagttgaaagatttccgaattcaatgatttataacacatatggaccgactgaagctactgttgcagtcacaagtatacaaatcacagaagaaattttaaatcaatataaccctttaccagttggtgtggctagacctggtacaaaattatttgctactgaagaaggagaacttgtcattgaggggcaaagcgtcagtttaggttatttaaagaatgaagaaaagacaactgcagtatttaattttgaagacggtgtcagaacatatcatactggggataaagctaaaattgaagatggattgtggtttattcaaggacgtattgattttcaaattaaattaaatggttatcgtatggaattagaggaaattgaaacacaattacgccagtcaaaacatgtaagagaggctgttgttgtgccggtttataaaaatggaaaggtcatacatttaataggagcagtagtacctactgaacctgtagaagataatttagcaatgacaactcatattaaacacgaacttaaatcacgcttaccagaatatatgattcctagaaagttcgaatggatggaacaactaccactcacatcaaatggtaaattagatcgtaagaaaattgccgaggttgtaaacggatga

SEQ ID NO: 2718 - DNA, 1215 bp, Staphylococcus epidermidis
atgataccttatggcacatttacatttttcttaattgcatttatcgttcttatacctgtgataatacttggattcttaggtaagcgaagttatatttacaatggtataagtacagcaatcatgattgtcattatattcgcatcagataaacataatctgttagggcaaaaatatctaagtgcacaacttttttgttttattatttatgtcatatggcaggttgccctcattatgtactactatcaatcacgacaaaagaagaatacttttacaaaatttgtaacaattatggtgttgtctattctccctctagcaattgttaaaatattacagagttcatggttaggtggacatcaaattcacttccatgaaagtaaattaattgaatttgtaggatttttaggtatctcatacgtcactttcaaaagtgttcaattaattatggagattcgtgatggttctattaaagaaatcaaagtagggaaattgatacaattcatttcattcttcccaaccatttcatctggacctattgatagatataaacgttttgtgaaagatgataagaaagtacctagcggtgcagagtacagagaacttgttgtcaaagcaattcatatgattatgttagggttcttatataaatatattattgcgtatttgattcagacttacgctgttaatcctttacaacttaacctgcatggatttactcatatgtggctatatatgtacgcttatagcttatatttattctttgattttgctggatacagtttattcgcgattgcagtgagttatttatatggtattaagacaccgcctaactttaaacaaccgtttaaagccaaaaatattaaagatttctggaatagatggcatatgactttatctttctggtttagagattgtatctatatgagatctttattctacatgtcacgtaagaagttattaaaaagtcaatttgcaatgtcaaatgtagcgttctttttaaactttttcataatgggagtatggcatggtcttgaagtatattacattgtatatggattataccacgcagcgttattcataggttatggttattatgagcgttggcgtaaaaagcatccaccacgttggcaaaatggtttcactacagctataagtattatcattaccttccattttgtaactttcggattcttaattttctcaggcaaatttatttaa

SEQ ID NO: 2719 - DNA, 237 bp, Staphylococcus epidermidis
atggaatttagagaacaagtattagatttattagcagaagtagctgaaaacaacattgtgaaggaaaacccagatgtagaaatctttgaagaaggtattattgattcatttcaaactgtaggtttacttttagaaattcaaaataaattggatattgaagtgtcaattatggactttgatagagatgagtgggcaactcctaataaaattgtagaagctttagaagagttacgatga

SEQ ID NO: 2720 - DNA, 1239 bp, Staphylococcus epidermidis
atgaaactgaaaccattcttacccattataatcagtggcgtcatatttattatatttttatttttaccagcaagttggtttactggtcttgtgacaaataagacgttagctgataatagaatttctttaactgatcaagttttaaaaggcacgctcattcaaaataaattattcgagtcaaataagtattacccgatttatggttcaagtgaactggaaaaggatgatccttttaatccaggtatagcgctaaataaacaaaatgctagtaaagaaacgttccttattggtgcgggaggttcgacagatttaattaatgcagttgaacttgcagcgcaatacgacaatttaaaaggaaagaaatttacatttattatttctccacagtggtttacgaatcatggattaacaaatcaaaactttgatgctcgtatgtcacaaagtcaaatcaatcagatgtttaatcaaaaagatatgccagctaatttgaagaaacggtatgcacaaagattgttacagtttccgcatgcacacaataagtcataccttagagaacaagcaaaacatcctaatgatgtctctggaaactacatttcttcatttaaagaaaatcaattaactaagattgaagctattaaatcattattctcattcactaagccacctctagcagaagtaaaacctgcaacaagagaagatgcttcatgggatgagatgaaacataaagctgccgatataggcaaagcaaatactcaatctaataaatatgatataagagatccatattggaaattgataaaacaaaacaagcgtaaaatcaaaagggattatgagttcaacattaactcacccgagttccaagatttaaaattattagtgcaaacgctacatgctgctggagctgatgtacaatatgtttgtataccttcaaatggaagatggtatgatcatataggtatcaaaaaagatagacgtgaagctgtatataaaaagattcactcaactgtagttgataatggtgggaaaatttatgatttgacaaacaaggactatgaaaagtacgtaattagtgatgctgttcatattggatggaaaggttgggtttacgtcgaccagcaaattgcaagacatatggatggtcatgcgcctaaaaatcatgaagtcgattattctaaaaataaaccaccgcacaaacatcacaacgatcgtcaagatgatcaacatcaaggcaacaaataa

SEQ ID NO: 2721 - DNA, 243 bp, Staphylococcus epidermidis
atgcctactgagaatccaacaatgtttgatcaagtagcagaagttatagaacgtttgcgtccattcttattacgagatggtggcgattgtacgcttgtagatgttgaagatggtattgttaagctacaattacatggcgcttgcggaacatgtcctagttctacaattaccttaaaagctggcatcgagcgtgcacttcatgaagaagttccaggtgtaatagaagtagaacaagtattctaa

SEQ ID NO: 2722 - DNA, 321 bp, Staphylococcus epidermidis
atgactaaaattagtgttgtcgtatatggagcagaagtcgtttgtgcgagttgtgtaaatgcacctacatctatagatacttatcaatggcttcaagcattacttttaagaaagtttcctcaacatcattttgaatttacatatattgacatacgaaatgatactgaaaatttaactgatcatgatatgcaatttatagaaagaattaatgaagatgaattgttttacccattagttacgatgaatgatgaatatgtagcagatggttacatacaatataaacaaataacccgttttattaaatcatattttactatgtaa

SEQ ID NO: 2723 - DNA, 1065 bp, Staphylococcus epidermidis
atgaaaaacttagtattactaggcgggggctatggtaatatgcgaattatgtcgcgcattttacctcattcaattcctgagggatatcacttaactttaatcgaccgcatgccattccacggtttaaaacctgaattttatgcacttgcagcaggaactaaatctgacaaagaggtgcgaatccaatttccagatagcagtcaaattaatacggtttatggggaaatcagtgatatagatttggacgaacaaatgataacagttggaaattcaaaaatagattatgacgaacttatcattggtctagggtgtgaggataaatatcataatgtccctggtgctgaagcatatacacatagcattcaaacattatctaaatcgcgtgaaacataccatagaattagcgagttacctaaaggggcacgtgtaggtatcgttggggcaggtttaagtggcattgaattagcgagcgagctacgtgaaagtcgatcagacttggaaattttgttatatgatagagggcctcgaattttaaggaattttccagagaaactgagtaaatacatatctaattggttttctaaacacaatgttactgtagtacctaattcagtcatcgacagagtagaacccggaaaaatttataataatggtaaaccagaaaatattgatttagtcgtttggacagcaggcatacaacctgttgaaattgtgcgtaatcttcctattgatatgagtaccactggacgcgtaattattaatcagtaccatcaagtcccaacctatagaaatgtttatgtcgtaggtgactgtgctaatttaccacatgcacccagtgctcaactagcagaactacaaggtgaacagattgctgaggtgttgaagaagcaatggaataacgaaccacttccagataaaatgcctgaaattaaagtacaaggctttttaggctctttaggtgacaaacaaggttttgcttatatcatggatcgaacagttaccggacgattagcctctattctaaaatcaggtgttctgtggcgctataaatatcataatggttaa

SEQ ID NO: 2724 - DNA, 213 bp, Staphylococcus epidermidis
atggccaaaggtagtgatgttgtatttgaaaaattagaaaatgatcctaacatagatgtccttgaatacggttgtctacaaaattgtggtctatgcgcaagtagcttgtatgcccttgtagatggtgatattgttgaaggtaacacaccagacgatttattaaaaaacatatatcaacatatcgaagataatgatataacgaatttgttatag

SEQ ID NO: 2725 - DNA, 360 bp, Staphylococcus epidermidis
atgccaacagtcattttaactgaagcggcagcatttgaagttagagacatgttaaaaaataacgacatgtctgatggttatttaaaaattaaagtaaatggtggaggatgcacaggattaacttatggtatgtcagccgaagcagaacctggtgaaaatgatgaaattctcgaatactatggtttgaaagttctagtagaccgaaatgatgctcctgtattaaatggaacaacaattgattttaaacagtcacttatgggtggaggatttcaaataaacaatcctaatgctattgcctcatgtggttgtggaagttcatttaaaacagctaaagtcgccggaaatccagagcaatgttaa

SEQ ID NO: 2726 - DNA, 1209 bp, Staphylococcus epidermidis
atggctcaagatcgtaagaaagtgctcgtattaggtgcaggttatgctggtttacaaactgtaactaaattacaaaaagaactttctgctgatgcagcggaaattactttaattaataagaatgaatatcattatgaatcaacttggttgcatgaagcttctgccggtacgattaattatgaagatttattgtatcctgttgagaaaactgtcaacaaaaataaagtgaattttgttgttgctgaggtaacaaaaattgatcgtaatgctaaacgtgtagaaactgataagggtgtttatgactttgatatcttagttgttgcactaggttttgttagcgaaacatttggtattgatggtatgaaagaacatgctttccaaattgagaacgttttaacttctcgtaagttgtctcgtcacattgaagataagttcgcaaattatgctgcttctaaagaaaaagatgataaagatttatctattttagttgggggagctggatttacaggaattgaatttctaggtgaattaactgatagaattcctgaattatgcagtaaatatggtgttgatcaaagtaaagtgaagttaacatgtgttgaagcagcacctaaaatgttaccgatgttctcagacgacttagttagttatgcagtaaaatatttagaagaccgtggagtagaattcaaaattgcaacacctattgtcgcttgtaatgaaaaaggtttcgttgttgaagtcaatggagaaaaacaacaattagaagccggaacttctgtatggactgctggagtgcgtggaagtcatttaatggaagaatcatttgaaggtgttaaacgtggacgtattatcaataaacaagatttaacaattgaaggtcataatgacatctttgttataggagattgttcagcgtttattccagctggtgaagagcgtccattaccaacaacagctcaaattgctatgcaacaaggtgagcatactgctagcaacattaaacgtttattaaatggtgaatcaacacaagatttccaatatgttaaccgtggaactgtatgttcattaggtgctaatgatggtgttggaattgtatatggtagagatatcgctggtaaaaaagcagcattcttgaagaaagttattgatactcgtgcgatttacaaacttggtggcataggattagcctttaaaaaaggaaaattttaa

SEQ ID NO: 2727 - DNA, 1482 bp, Staphylococcus epidermidis
atgcaattttttattaatcaagatacgccaacatcaattgaaacgattgtggtgggtgtgccagatcacctcaaccaattaggtgagataaaatatcataagacgttaattaaagaacgattagaaacattaaaacaatatcatgtcatcaatagctcaatcggcaaaatatcatcaacgcttatctacattgatgaaaagcctaaaagattattaactgtaggactaggaaacttaaaaatcttatcatatcaacgtttattaaaagtttggggtcagttgtttcaatatttaaaagacgttcatgtcacggattgtgaattattgttagatactttcaaatctaaacatggtaacattgttgaaatttgtcaaactttaggtttacaaagtgcacaatctatctttgaatttgaccattataaatcggataaaaagcctccatatcaaggtagagtctatatacaaacgacagagcataatatagaaacgaagattaacgaaggccaacaattgggtgaatctataaattatgctcgtgaactaagtcaaatgcctccgaatattttaacaccccaatattttgccgaagaaataaaaaaacatttcgaagggagttccgttagtgtagatatcaaagatcaccgacaaattatagatgaaggatttggattaatacatgcagtaggtaaaggttctaatcatggtccgagattaattacggtatcatactatggtgcagaagctgatgaaccacctatttcattagtgggtaagggtattacatatgattccggtggatatagtattaagtctaagataggtatgcaaactatgaaatatgatatgtgcggtgcggccaatgttattggtatgattgatgtgatctctaagcaaaacctacctgtaaatattgtaggaataatcgcttcagctgaaaatatgattggtgaatcttccatgaaaccagatgatgtatttactgcgcttaatggggaaacagtagaaatgttgaatagtgatgctgaaggtagaatggttttaggtgacgcagtattctatgcaacacaatttaaaccacaactaattcttgattttgctacattaacgggtgcagcgattgtagctttaggtgatgacaaggcggctgctttccaatctcatgctgaaaatgaacttaaaaacttattaacagttgcacgtcatgtagacgaaaaagtattcgaattacctattacagagactgaaagacatttaattaaacaatcagatgtagcagatttagtcaatcatacgaacggtcaaggaaaagcattgtttgcagcagcatttatttcgcattttagtggtgacatcccacacattcactttgatatcgcgggccctgcaacaactaaaagtgctacatataaagggccaaagggtccgacaagttacatgatacctacagttgtagagtggttacaacaaaaatataaataa

SEQ ID NO: 2728 - DNA, 1317 bp, Staphylococcus epidermidis
atgataaatgctgttgtaatcgcagtcatattaatgatcatactatgtttatgtcgattaaatgtggtcattagcttatttattagtgcacttgtcggtggattaatatcaggtatgaatttagaaaaagtaattaatgtttttggaaaaaatatagtagatggcgcagaagtcgcattaagttatgcgttacttggtggttttgctgccttgatttcctatagtggtataactgattatctagtcggtaaaattattgcaagtattcatgctgagaatagtagactttcccgagttaaggttaaaataattattatcattgcattgttagcaatgagtatcatgagtcaaaacttaattcctgtacatattgcctttattccaattgtaatacctccacttgtgagtttgtttaacgatttaagaattgatcgcagacttattgctttagtaataggatttggtttgtgttttccatacgtgctattaccttatggtttcggtcaaattttccatcaaatcattcaaagtggttttcaaaaagcaaaccatccaattgagatgaatatgatatggaaatcaatgttaataccttcaatgggatatgttgtgggtctcatacttggatttattgtttatagaaagccacgcgtttatgaacaacgtaatgtaaatgatcgagaaaaaattactgaactcaaaccttatgtgctaattgttactgtcattgccatactagctacgtttttagtacagacatttacagattctatgatttttggtgcgttagctggggtacttgttttctttgtttcaagagcatatcattggtatgaactcgatgaacagtttgtagatggagtcaaattaatggcttatattggtgtagtgatactaacagctaacgggtttgctggcgtgatgaatgcaacaggtgatatagatagcttggtcaagagtttaacaggattaactggaaatcataaattgattagtattatcgtcatgtacctcattggacttattgtaacattaggtattggttcctcttttgcgactatacctattatcgcttcattatttataccttttggagcatcaattggtttagacacaatggctcttattgctttaattggtacagcaagtgctttaggtgattcaggttctccagcaagtgattctacacttggaccgacagccggtttgaatattgatggacaacatgatcatattcgtgatacatgcatcccgaatttcttgttttataatgttccccttatgatttttggtacgatagcagctatggtactataa

SEQ ID NO: 2729 - DNA, 375 bp, Staphylococcus epidermidis
atgaccaatcttttagaaacatttgaaatgaagattgaacaaaaagaagatggtaaagtagtagtgtctatgcctgtgacagataaagtaaagcaaccctttggctatttacatggtggtgcaagtttagctttaggtgaaacagcatgttcgataggtgctgctcatttgattgatacgcagcaatttattccactaggtttagaaatgaatgcaaatcatattcgctcaactcgacaaggacatgtgagagcatttgcttctttaatacatcaaggaaaaacaacacaagtttggaatattgatatcaaagatgaccatgaccaattaatcagtgtcatgcgtggtacgattgctattaaacctattcaataa

SEQ ID NO: 2730 - DNA, 1155 bp, Staphylococcus epidermidis
atgcactggacaattattggtggtggcttacaaggaaccaccattgcacttaaattaaaaaatgaaggactaaaaaatgaggcgcttactatcatagatccttactcctcattatgtgagcgatttaatatttatacacaacgtattagtatgccatacttaagatcgcctttcgttcatcatattcatcctaaaccttttcatctcaaacaatatgctagatatcatcagtatacttcagcttattacggcccgtataaacgtcctcaaagagatatgtttatgcatcatgttcatgatttgatacatcaatttaaacttaatgattgtcatatacaaggtaaagtcgaagctattaataaatcaagaggtaaatggtgtataaaactatcaactggcgataaaatgattaccgattgtgttgtgatagcaaatggctatacgcaaacgccattcatacctgaaattttcagaaataaagcgaatgtaaaacacatattcgctgataattatcatgcctctttagataaagatactcaacatgttgttggttcaggtatatctgctgcccacctcactttaaaattattaaatgaacacaatcaccaacttgttcatttatggatgaataaagatattgagatacatgattttgatgctgaccctggttggttaggacctaagaaattgaactatcttgcatctatatcctcatcagatgcaagaatgaagttaattgaagacgaacgtcatagtggttcaatgcctatggaattatttttaaggttaaagaaatatgtgcaaagtggtcgactcgtcatacatacgagtcaaattgatgatgtaactgaatcctatattatctccgctggaaaatattttgaatataagcatattttgttagctactggattttataatcaattgttaacacaaccactcataaaaaatcttattcaaaacgaacaagcaccacttaatcaatcaggttatccttctttgtcaaacgaactagaatggttaaatcaattattcgtagctggtggactcgcagatttagaactaggtccttttgcaagaaatataatgggcggtaaagaaagcgctgaacgcataagtaaagcatataaacgtttaaataagaaaatctcttaa

SEQ ID NO: 2731 - DNA, 357 bp, Staphylococcus epidermidis
atgatagcaacgatcgtcactagtgtctctatcatatttgttgttcttggagctttgattagtgcctttgctgcaacgggtctcattcgattaagggatgtttactcaagagcacatgcagctggtaaagcagccacgttgggtgcgatgtttttactatttggagcatttttatactttattggcactgaaggatatgtaaatatgcaattaattatcggaattattttcgtatttattactggccctctttcaagtcatttaatcatgaaagctgcctacaacattaaaacaccatataccaaagatactaaaattgatgaaattaaagaggatatgaagcatacaaaactataa

SEQ ID NO: 2732 - DNA, 294 bp, Staphylococcus epidermidis
atgccttttaaaatatttattattacagccttaattattgttgtcttatcaatgttagcaatgttaatacgtgttattttaggaccctctctagcagaccgtgtcgtcgcacttgatgcaattggtttacagttaatggccgtgatagcgctatttagtattttactgaatattaaatacatgctcgtcgttattttaatggtcggtattcttgcttttctaggaactgcagtcttttctaaatttatggatgaaggtaaggtgatcaagcatgatagcaacgatcgtcactag

SEQ ID NO: 2733 - DNA, 480 bp, Staphylococcus epidermidis
ttggctatacagtttgtaattaatttacttgtttctgtcatatggttacttgtaacaaatagctataccttaaataactttgtattaggttttatactaggtttgtttctagtttatctcctgcaccgtgtcttgcctggtcagttttatttagtgagaatatatagaattataatgcttatcattacatttttaactgagttaataaaagcaaactttggtgtactaaaaattattctcaaaccacgaattgagaataaacccggattctttgtgtacgagacggaattagaacgtgactggcaacttgttttactttccaacttgattacgttaacacctggcacagtcgttttaggtattagtgatgaccgtaaaaagatttatatccactcaattgatttcagtacaaaggaagaagagattcaaaatatcaaatcttcattagagaaggtcgttagaaaggtaggcgagaaataa

SEQ ID NO: 2734 - DNA, 1497 bp, Staphylococcus epidermidis
atgatagagagtaacttgcttgttttaactttagtcatacctatcctaactgcaattttactcatatttattggaaagcgcccaataataaaaagatatgttgcacttgtcggtacattgctaacattggtcattgcattgattaacttaaagaatgtgctacgagatggaccaatcaaggttgaactgggctcttggaaagccccatacagcattgtatttgtagtcgatatttttagcgctctactcatcatcacaagtattattattaccatattagtcattttatactcatatcgttctatcggtttagatagagaacgtcattattattatttctctatcatgtttatgttgattggtattattggctcatttacaacaggagatattttcaacttgtttgtgttctttgaagtctttttaatgtcttcatattgtttactcgttattggtactactaaaatacaattacaagaaacaattaagtatattttagtcaatgttgtttcatcgtctttctttgtcatgggtgttgcagttttatattcagttgtaggaactttaaatctcgctcatattagtgaaagattgtcacaactttctgtacatgacagtggcttagtcaatattgtttttattttatttatctttgtctttgccactaaagcaggcgtttttcctatgtacgtatggctacctggtgcttattatgcccctccagtagcgatcatcacgttctttggtgcactattgactaaagtgggtgtatacgcaattgcgagaactctaagtttattctttaataatacagtaagcttttctcattatgtcatccttttcttagcattacttacaattatttttggatgtataggtgcgatagcttactatgatacgaagaaaatcatcctttacaatattatgattgcagtaggtgtcatattagttggtattgctatgatgaacgaatcaggcatgactggtgcaatatattacacactacatgatatgttagttaaagcttcattgttcttactcattggcgtcatgtacaaaatcactaaaacgactgacttacgtcattttggtggcttgataaaagggtatcctattctaggttggacattctttattgcagcgctaagcttagcgggtataccaccttttagtggtttctacggtaaattctatattgttcgagcgacctttgaaaaaggattttatctaagtggtatcattgtacttttatcaagtttaatcgtgttatattcagtcatacgtattttcttaaaaggatttttcggtgaagttgaaggatatactttatctaaaaaggtaaatgttaaatatctaacaactatcgctgttgcatctacagttattactgtaatctttggattatctgcagacacgttattcccaatcatcaaagatggcgctgaaacgtttgtcgatccaagtcaatatattcatagtgtgttaggaggtaaatag

SEQ ID NO: 2735 - DNA, 348 bp, Staphylococcus epidermidis
gtggaaattatcatgatctttgttagtggtattctcacatctataagtgtctatctcgttttgtctaaaagtttgatacgtatcattatggggactacactactaactcatgctgcaaatttatttttaattactatgggaggtttaaagcacggaactgttccaatatttgaaaaaggaacatcaagctatgttgaccctatcccccaagcattgattttaacagctatcgttatcgcctttgctacaacagctttctttttagttcttgcatttagaacatataaagaactaggcactgataacgttgagctaatgaaaggagcgccagaagatgatagagagtaa

SEQ ID NO: 2736 - DNA, 429 bp, Staphylococcus epidermidis
atgaatagacaacaaaataaccttatctttcaatacgctgccgtgattattttcttcatggtcattgtgtttggcttttcattatttttagctggacattatacacctggtggcggtttcgttggtggtttgcttttcgctagtgcattattagttattacaattgcatatgatgtaaaaacgatgcgaaagatttttcctttagattttaaaatcttaattggtattggtttattattttgcgtgggtacaccattaacaagttggttcatgtctaaaaacttttttacacatgtcacttttgacatccctttgcctttacttgaacctatgcacatgacgacagcgatgttttttgatttcggtgttttatgtgcagttgtaggaactattatgactataattatttcgattggagagaacgaatag

SEQ ID NO: 2737 - DNA, 2406 bp, Staphylococcus epidermidis
gtgagtttgttacatattgcggtactattaccgttaatatttgcactcattattccattcctataccggttcgttaaacgtatacatttaggatggtttgtattacctgttcctattgtcttatttatatatttcatatcattgatttcaatgacgatgtcaggtaataacgtaatgaaaaacttaaattggatgccacatattggaatgaattttaatttatatgtggatggtctcggattattattcagtttgcttatcactggaataggaagtctagtggttttatattctatcggatatttaagcaaatcagaacaactcgggaatttttactgttatttattactatttatgggtgcaatgttaggagttgtactctctgataattttattattttatatttattttgggagttaacttctttctctagctttttattaatctctttctggagagagaaaaaagcttcaatttatggtgctcaaaaatctttaatcattaccgtattaggtggcttgagcatgctaggtggtatcattttactttccctagctactgatacttttagtattcaggctatgatttcaaaagcaagtgacattcaaaatagtcctttctttatcttagtaatgatactttttatgattggtgcatttacaaaatctgcacaagtgcctttttatatttggttaccagatgctatggaggcgcctacgccagtgagtgcataccttcattctgcaacgatggtaaaagcaggactatatctaatcgcaagaatcacacctatttttgcaatatccgaaggttgggtatggacaattacacttgttggtttaatcaccctattttgggcatcactcaatgcaacaaaacaacatgacttaaaaggtattttagctttctcaactgtgtctcaactagggatgattatgtctatgcttggtattggtgctgtaagttatcattatcaaggcgctaatagtcaactttatgttgctggatttgttgctgccatatttcatttaattaatcatgccacgtttaaaggtgcactatttatgattacaggtggtattgatcattcaactggtacacgtgatgttaaaaagttgggcggtttacttacaatcatgcctatctcattcacgcttacagttattacaacattaagtatggctggtgtgccgccttttaacggctttttatcaaaagagaaattcttagagtcaatgattaatgttacacatttaaatttaatgagtttaaatactttaggtattcttttaccaatcattgccattattggtagtattttcacatttgtatattcaattaaatttatattgcatatattctttggttcttataaacctgaagctctgccaaaacaagcgcatgaatcttcaattttaatgcttatttcacctatcattttaacatcactagttatagtattcggtttattcccaagtatattaacgcaatctattatagagccggcatctgtagcagttagtcaaacatcaaatataactgctgagttccatttattccatggtataactccagcattcctatcaacaataggtatttatattattggtattttattattaatttcatttagttattgggttcgtttattacaagcacatccatatcagttaacgttgaatcattggtatgacacttcaggccaacgtattccaggatattccgaaaatataacaaatagttatgttacaggtttttctagaaataatttggtgattatcttaggtattctcattgctttaacttttgttacagtcatcagtgtacccttcagtattgactttaaaaacgtgagtcatttacgcgtatttgaaggtgcaacagtattgtttttactgattgcttcaactttcattatatttgcaaaatcacgtttgtttagcattatcatgttaagcgctgtgggttacgctatatcagtattatttattttctttaaagcgcccgacttagcattaacacaatttgtagtggaatctatttctacagcattattcttactatgcttttatcacctacctaatttaaatcgctacaatgaaaaaccaacctttaaactgacaaatgctgtgatttcaattggagtgggattatcagtgattattttaggattaattggctatggtaatagacactttgactctattactaaattctatcaagaacatgtttttgatttagcacatggtaaaaatatggtaaatgtcatcctcgtagatttccgtggtatggatactttattcgagtcatctgtactaggtattgcaggtttaggcgtatatacaatgattaaattacgattaaaacagaaaaatcaatcaagtgaggtgaatgaccatgaatag

SEQ ID NO: 2738 - DNA, 381 bp, Staphylococcus epidermidis
atgttatatcgattttctcacaagactggtgtttatggtgtaagtgtcaaagaggaaactggaaatcaaatactcgtacaaattgaacaagtaattaaacatcccaaacaaggtgatttacaccatcccaatgaaacagaaggcgtcttttttcatgaacgtaaagctttaagccattttgagaaacgttacgctacaccttctcaacttcgtgagtttaatgtcgaggccatgccttatgaagactcacttcaacatgctattacacatcttgagaatcaactaaaaaaagagaagacagagtattctcgattgtctttaaataatttaaatcgtttaaaagaagattacgctattcaatataaaagacacttcgactaa

SEQ ID NO: 2739 - DNA, 594 bp, Staphylococcus epidermidis
atgacgaactatcctcagttaaataaagagattcaagataacgaaattaaagtagttatgcatacaaataaaggtgacatgacatttaaattatttcccgacattgctccaaagacagttgaaaactttgtgacacattcaaaaaatggatactacgatggtgtaacgttccaccgtgttatcaatgattttatggtacaaggcggggacccaactgcaactggtatgggcggagaaagtatttatggtagtgcttttgaagatgaattttctctagaagcttttaacctttacggtgcattatcaatggctaatgcaggtcctaatacaaatggatctcaattctttattgtccaaatgaaggaagtgcctgaaaatatgttaagtcaattagcagatggtggatggcctcaacctattgtagaagcatatggtgaaaaaggtggtacgccttggttagatcaaaaacatacagtatttggtcaacttattgagggtgaatcaactttagaagatattgcaaatactaaagttggtgctcaagacaaacctgtttatgatgtagtcattgaatcgatagatgtagaagaataa

SEQ ID NO: 2740 - DNA, 381 bp, Staphylococcus epidermidis
ttgaatcatcactacaaagtaggtcaacatatcaaggtacgtgtgactggtattcaaccgtatggcgcatttgttgagacccctgaccatactgaagggcttatccatatctcagaaattatggatgattatgtccataatttaaagaaatttctatctgaaggacaggttgttaaagcaaaaatattatcaattgatgatgaaggtaaattaaatttgtccttaaaagataatgattactttaaaaattatgagcgtaaaaaagaaaaacagtctgtcttagatgaaattagagaaacagaaaagtatgggtttcaaacacttaaagaacgcttaccggtctggatcaaacagtcaaaacgtgcaattcacaatgactaa

SEQ ID NO: 2741 - DNA, 1128 bp, Staphylococcus epidermidis
atgaataataaatatgaacctttatttaaatctttaacactacctaatggtgttgaagtaagaaatcgttttgttttagctcctcttacacatacttcatcaaatgatgatggaacaatttcagatatagaattaccttacattgagaaacgttctaaagatgttgggattgcaattaatgcagcaagtaatgttaatgatgtaggcaaagcatttcctggtcaaccttctgttgcacatgactcagatatcgaagggttaaaagaacttgctcaagttatgaagaaaaatggtgcgaaagcaatagtccaaattcatcatggaggtgctcaagctttaccagagttaacacctgatggagatgttgttgcaccaagtgccatttctcttaaaagttttggtcagcaaaaagaacatgatgctcgtgagatgactgctgaagaaattgaacaaactattagagactttggtgaagcaactagaagagcaattgaagcaggttttgatggcgttgaaattcatggcgcaaaccattatcttattcaccaatttgtttctccttactataatagaagaaatgatgtttgggctgataactataaattccctgttgctgttatagatgaagttgttaaagctaaaaaagctcatgcatatgatgattttattattggttacagattgtcacctgaagaagcggaatcaccaggtatttcaatggagataactgaagaattaattcaccaaatcgcaaataaaccacttgattatattcatgtgtcattaatggatgttaactcagttacgcgagaaggtaaatataaaggtgaaaatcgcttggaacttattcatcaatggataaatggacgtatgccgcttattggtataggttctgtctttacagctgaagatgcactaaatgctgttgaaaacattggagttgaatttgttgcgttaggtcgtgaaattctacttgattatgattttgttgctaaaattaaagaaggtcgagaagacgaaattataaatgcttttgatcctaatcgtgaagaccaacattatctaacaccaaatctttgggaacagtttaatcaaggattctatccattacctcgaaaagacaaataa

SEQ ID NO: 2742 - DNA, 273 bp, Staphylococcus epidermidis
atgtataaagactataacatgactcaacttactctaccaatggaaacttcagttcttatccccacaaatgatatttcacgacatgtaaacgatattatagaaacaattcccgagactgaattcgatgaattcagacatcatcgaggtgcaacatcatatcatccaaaaatgatgttaaaagtagttttatatgcctacacacaatctgtgttttcaggacgtaagatagaaaaattacttaatgataatatccgaatgatgtggctatcataa

SEQ ID NO: 2743 - DNA, 285 bp, Staphylococcus epidermidis
atgaagaattatagttgggaatatttcaatgtccaaattaatcaaaagctttcagaacgaaaagcaaaaaccatctacagtcaaagaaaaattgatgtggagtctgtttttggaattatgaagcctattttgagtttcactcgaaagtccgttcgagggataaataaagacaaaagagaactaggacttgtgctaatgatacttaatataagaaaagtaccagctcaacgagctgaaaattataaaaaaatcataaaaaagacaatttttatattatttcaatag

SEQ ID NO: 2744 - DNA, 1191 bp, Staphylococcus epidermidis
atgactcaatctgaaaaaattattaacttaacaaatcactatggggcgcataactacgttccacttccaattgttatttctgaagcagagggtgtatgggtgaaagatccggaaggtaacacgtatatggatatgctttcggcctactcggcagtgaatcaaggtcatcgacacccaagaattattcaagcattgaaagatcaagcagataaagtcactttagtatcacgtgcttttcatagtgataatttgggtcaatggtatgagaaaatatgtaaactcgcaggtaaagacaaagcattgcctatgaatacgggagcagaagcggttgaaacagctttaaaagctgctcgtcgttgggcttatgatgttaagggtattgagccgaacaaagctgaaattatcgcttttaatggtaatttccatggacgtacgatggcaccagtatcattgtcttcagaagctgagtatcaacgaggctatggtccattgttagatggctttcgaaaagttgagtttggtgacgttaatcaattaaaagcagcaattaataaaaatacagcagcaattttagtagaacctatacagggagaagcagggattaacgtaccaccagaaggatatttgaaaacaattagagaattatgtgatgaacatcaaattttatttattgctgatgaaattcaagcaggattaggacgttcaggaaaattatttgcaacggattgggatcatgtaaaaccggatgtttatattttaggaaaagcgttaggtggaggggtatttcctatctcggtagttcttgcagataatgaggtattagatgtatttactcctggctcacatggttctacatttggtggaaatccactagcgagtgcagtttctattgcagctatagatgtcattattgacgaggatttacctggtcgttcattagaattaggagaatattttaagtctgaattgaaaaaaattgagcatccatctattaaagaagttaggggacgaggattatttatcggtattgaattacatgaaagtgccagaccatattgtgaagctttgaaagaacaaggattattatgtaaagaaactcacgacaccgttattagatttgcacctccattagtgataacgaaagaagagttagacatggctttagagaagattaagagtgtatttgcatag

SEQ ID NO: 2745 - DNA, 1245 bp, Staphylococcus epidermidis
atgactgagaataataatttagtaacttccactcaagggattattaaagaagcattacacaagttgggctttgatgatggtatgtatgaccttataaaagaaccaattagatttttacaagtgcgcattccagtacgaatggacgatgggacagttaaaacatttactggataccgtgcacaacataatgatgcagttggccctactaaaggtggcgttcgtttccatccagaagttgatgaagaagaagtgaaggcattatcaatgtggatgactttaaaatgtggcattgttaatttaccttatggtgggggtaaaggcggtattgtttgtgatccacgtcaaatgagtatacacgaagttgagcgtctatctcgagggtatgtaagagctatatctcaatttgttgggcctaacaaagatattccagcaccagacgtttttacaaactctcaaattatggcttggatgatggatgagtatagtgcattagataaatttaattcgccaggttttataacaggcaaacctattgtattaggtggatctcaaggacgtgatcgctctacagctttaggtgtagtcattgcaattgaacaagcggcaaaacgtcgtggcatggatattaaagatgccaaaattgtgattcaaggtttcggcaatgcaggtagtttcttagctaaattcttatacgatttaggtgctaaagtagttggtataagtgatgcatatggagccttacatgaccctaatggacttgatatagattatttattagatcgacgtgatagcttcggtacagttacaaatctattcgaagatacaatttctaacaaagaattattcgaattggattgtgacatccttgttcctgctgcaatttccaatcaaatcactgaagataatgcgcacgatattaaagcaagcattgtagttgaagctgctaatggccctacgacgcctgaagcaacacgtattttaacagaaagagatatattactagtgccggatgtacttgcaagtgcaggaggtgtgactgtatcttatttcgagtgggtacaaaataatcaaggttattattggactgaagaagaagtcaatgacaaactacgtgagaagttagtaacagcatttgatacgatttatgaattgtcacaaaatagaaaaattgatatgagattagcagcatatatagtaggtattaaacgtactgctgaagcagcaagatatagaggttgggcataa

SEQ ID NO: 2746 - DNA, 1050 bp, Staphylococcus epidermidis
atgtttaaatctaagaaaataatcatttcaactttatctaccgttacactgggtttagctagtttaagttccccttcgatagctgaaacttcgaaccactctccagcaccaaaccaatcagagaaatcgatacaacaacaaacaaatattccatctaatatgaatcaatcatcagctaaaacatttaaacgacaagctgaatcagactcagtaagtggtaaaacaaacgatactcataatcattggactaaaaatttaactggagagaaatttacaaccattgcacatcgtggcgcaagtggttacgccccagaacatacttttgaagcatatgataaaagtcataatgaattaggagcatcttacatagaaatcgatttacaacgtactaaagatggtcacttggttgctatgcatgacgaaaaggtcaatcgtacaactaatggccatggacgtgtcgaccaacttactttaaaagagttaaaacaacttgatgcaggaagctggtttaatcgaaagcaccctgaatatgccaaaaataaatataaaaatgctaaagttcctactttagacgaaattttaaatcgctatggcaaaaatgcaaactattatattgaaactaaatcgccagatgtttatcctggcatggaaaaacaattattagatacattagataaacatgacttgttaacacaaaaatcacttaaacatggacatgtgatgatccaatcattttcagggagtagtttagaaaaggtacatcacatgaacgccaatataccacttattagactaatgaataaatttgaacttaaaaaagctactaatcaagatttaaaaaatattaaatcttatgccattggagtaggtcctgaatacacagatttaaatattaagaacacaagacatttaaaaaatttaggatttttagttcatccttatacagttgatgatgaaaatcaaatgagaaacttaaatcaatatggtgttgatggtgtattcactaattttgctgatagatataaaaaagtttcagaaacacaacaataa

SEQ ID NO: 2747 - DNA, 1392 bp, Staphylococcus epidermidis
atgagcaataaagcttggggtggcagatttgaaactcaacccgaagaatgggttgatgatttcaatgcgtcaattgattttgataaaaatttaattaaacaagatgttcaaggtagtattgcacatgcaactatgctcgctaaacaacatattattacagatgatgaagctcaatccatcattaatgagcttaaaaatattcaaagtgactttgaagaaggtaaacttaaatttaaagcttctctcgaagatattcatcttaatattgagcacgagcttattcaacgtattggcgaagctggtggaaaactgcatactggtcgtagccgtaatgatcaagttgccacagatatgcatttgtatactaaagaacaagttcaatacattattgaacttatagcgtcgtttcaagaaacaattgttcaattagcagaccagcacgttgacacaattatgcctggatacacgcatttacaacgtgcacaacccatctcgttcgcacatcatattatgacttacttttggatgttagaaagagacaaaggtagattcatggatagtcttaaacgtatagatatctcaccattaggtgctgcagctttaagtggaactacacaccctatagatagacatctgactcaagaacttctaggatttgcaaatctgtatgaaaatagtttagatgctgtcagtgatcgtgactatatcgttgaaacattgcatcatatttcactcactatggtacatctatcacgttttgcagaagaaatcattttttggtcgactgatgaggcaaaatttatcactttatcagatgcgttttctactggctcatctattatgccacaaaagaaaaaccctgatatggctgaactaataagaggaaaagtcggacgtactacaggacacttgatgagtatgttagtaacacttaaaggcttacccttagcttataataaagacatgcaagaagataaagaaggtttatttgatgctgtacacacacttaaaggctctcttcgaatcttcgaaggtatggttgcatctatgaaagttaattcaaaccgtttaagtcaaacagtaaaaaatgatttttcaaatgcaacagaattagcagactatttagtcagtaaaagtgtaccttttagaaccgctcatgaaatcgttggtaaaatcgtattaaattttattcataaaggtatatacctattagacgtacctttaagcgaatatcaagaacatcatgagaatattgaggaagatatatatgattatttaacacctgaaaattgtctcaagcgtcgccaaagctatggttcaactggtcaagaatcagtaaaacatcaactaaaagtcgcaaaagcattattaaaagacaacgaatcaaaatag

SEQ ID NO: 2748 - DNA, 1206 bp, Staphylococcus epidermidis
atgaaagataaaatcgttttagcatattcaggtggtttagatacaagcgttgcagttcaatggcttattgataaaggatatgatgtagttgcttgttgtcttgacgtaggcgaaggcaaagatttagacgttgtatatcaaaaagctttagatatgggtgcagtcgaatgtcatattattgatgcaactaaagaatttagtgatgattatgtaagttatgctattaaaggaaatttaatgtatgaaaatgcatatcctctagtttcagcattatcacgtccactcatcgcgaaaaaactggttgaaattgctgaaaaaacaaattctattggtattgcgcatggatgtactggtaaaggtaatgatcaagtacgtttcgaagtggcaatcaaagctttaaatcctaagttaaaagcatttgcacctgttcgtgaatgggcttggagcagagaagaagaaattgattacgcaatcaaacataatattcctgtttcaatcaattatgactcgccatactcaattgaccaaaacttatgggggagagctaatgaatgtggtattttagaagatccgtatgccgcacctccggaagatgcatttgatttaactacacctttagaagaaactccagacaatgcagacgaaattatccttacatttaaacaaggtattccagtacaagttgatggcaaagattatcaattagatgaccttattctttacttgaatcaacttgctggcaaacacggtattggtagaatcgatcatgttgaaaacagaatggtcgggataaaatcgagagagatttatgaaacacctggtgcggaagttattttaaaagcacacaaagcactagaaacaattacattaactaaagacgtagcgcactttaagcctgtcattgaaaaacaattttcagaacaaatatacaatggtttgtggttctcgccattaacagatagtttaaaactctttatcgatagtactcaacaatatgttgagggagatgtgagaattaaattatttaaagggaacgctattgtcaatggcagacaatctccttacactttatacgatgaaaaattagctacttatacaaaagaagatgccttcaatcaagaatcagcagtaggtttcattgatatttatggtttacctacacaagttaatgcattacttcacggggggtatagtaatgagcaataa

SEQ ID NO: 2749 - DNA, 1332 bp, Staphylococcus epidermidis
atgactcacattcaattagactatggcaaaactttagaattttttgataagcatgaactagatcagcaaaaggatattgttaaaactatccatcaaactattcataaaggtacaggagcaggtaatgactttttaggttggttagatttacctgttgattatgataaagaagaattttctagaatcgtcgaagcatctaaacgtatcaaatcaaattccgatgtacttgttgttatcggtattggaggttcatacttaggtgcacgtgctgcaatcgagatgcttacatcttcatttagaacaaatacggaataccctgaaattgtatttgtaggtaatcatttatcctcaagttatacaaaagaattacttgattatttacaaggaaaagatttttcagttaacgttatttcaaaatcaggtactacgacagaaccagcagttgcatttagattatttaaacaattggttgaagaaaaatatggaaaagatgaagctaagaaacgtatttttgcaacgacagataaatctaaaggtgcacttaaacaattagcagacaatgagggttatgagacgtttgttgtacctgatgatgtgggaggtcgttattctgttcttacagctgtaggattactaccaattgcaactgcaggtatcaatattgaatcaatcatgattggtgcggctaaggcacgtgaagagttatcttctgatgatttagatcaaaatatcgcatatcaatatgcaactattcgaaatattttatacagcaaaggttatactactgaaatgttaattaattacgaaccctctatgcagtatttcaacgaatggtggaaacaattatacggtgaatcagaagggaaagatttcaaaggtatttatccatcaagtgcgaattacacaactgatttacattccttaggacaatatgttcaagagggccgtcgtttcttattcgagacagtggttaaggtcaaccatccaaaacatgatatcaaaattgaagaggatgcagatgatttagacggactgaactatcttgctggcaaatcaatcgatgaagtgaatactaaagcatttgaaggtacattacttgcacataccgatggtggcgttccaaatatcgttgtaaatattcctcagttagatgaagaaacatttggatatgttgtttatttctttgaattagcttgtgcaatgagtggatatcaattaggtgttaatccatttaatcaacctggagttgaagcctataaacaaaatatgtttgcgctattaggtaaaccaggctttgaagataagaaaaaagaattagaaaatcgtttataa

SEQ ID NO: 2750 - DNA, 576 bp, Staphylococcus epidermidis
ttgtcgctttctcagttagaagaatggtttgacgcatttcgacaattcggatatattcctgggttcattatgctttatttaagagccattgtacctgtgttgcctctcactttgtacgtcgtgctattaatacatgcgtatggattgtttccaggtataattatcagttggctaggtatcgtctcaggtacttttactgtctttcttatctgtaagaaatttgtgaatacaataagaatgaaaaaattaaaaagtagaaagtctgttcaaaggctaattagcttcatagatagacaagggcttatccctttattcgtattattatgctttccatttacacccaatacattaataaatattattgcgagcttatctcacatcaaaataaaatattatttttttgtattagttatttctaagttgatttcaattactattctaggagtaatgggaaaagaaattttcaccatatttactaatccattaagagcgcttattatgattgtgttactcgtagtattatggtttattagcaaaaaggtagaaaagcattttatgggttctaccaaggagtaa

SEQ ID NO: 2751 - DNA, 522 bp, Staphylococcus epidermidis
atgaaacatttgattaaatatttgatttccttcacttttgcaattattattgtaatattcattcaatcatttataatcgtaggcgctgtgatatcaaataatagcatgacacctaccttgcaaacgggagatagagtaatagttaataaaattaaagtcacgtttgaccttattcaacgtggtgatataatcatgtacaggcataataacaaaacctattttagcagaattataggaaagcctggggagtctgtgagtattaaatcacagcgtattaatatcgatgatagacaagtaaatgaaccatatatgaaagacaggcatattaaagacattacattaagagaaattaaaaattctgatggtgatacgattccaccgggagcattttttgttttaaatgataataataacaaacattctgattcaagaacctatggtttaatagataagaaagatatcattggagatgtcagtttaaaatattatccatttaaagaatttaactatcaatttaaataa

SEQ ID NO: 2752 - DNA, 576 bp, Staphylococcus epidermidis
ttgaaaaaagaaattttagagtggattgttgccatagccgttgccattgcacttattgccataatcactaaatttgtcggaaaatcatattctattaaaggtgattcaatggatcctacattaaaagatggggagcgtgtagtggtaaatattattggctataaattaggtggcgttgaaaaaggaaatgtcattgtatttcatgctaataaaaaagatgattatgttaaaagagttattggaactccaggagatagtgttgaatataaaaatgatacactctatgttaatggtaaaaagcaatcagaaccatacttgaactataatgaaaaacgtaagcaaactgagtatatcacaggtagtttcaaaacaaaaaatttaccaaatgctaatcctcaatctaatgttattcctaaaggtaaatatttagttttgggggataaccgtgaggtaagtaaagatagtcgttcattcggtttaattgacaaagaccaaattgttggaaaggtatcgctcagatattggcctttcagtgaatttaaatctaactttaatccaaataacactaaaaattaa

SEQ ID NO: 2753 - DNA, 3480 bp, Staphylococcus epidermidis
atggaatttaatacatatattggtcgagcaggtacaggaaagtcaacagccatgcttaatcaaataaaaaataaaatgaagcaagacccgctgggtgatcctatagtattaattgcacctactcagagtacttttcaattagagcaagcatttgtaaatgattccgaacttcatggtagtttgagaactgaagtacttcactttgaaagattgagtcatcgtgtttttcaagaagttggtggtttgacagagcaacgattatctaaggccgctttagaaatgatgattttccatattgttcaacaacatgagtctgatttgaaattgtatggttcacaagctcaatactatggtttaagcgaaaagttagctgagcaaattcaagattttaaaaaatataatgtcactcctgaacacttaaatcaattgatagaaaatcattcaatacaaacgagaacaaaacataaattagaagatatttctcttatttataaacaattagaatcacgaatgaatggtgaatttataacaacagaggatagtttgcaacaattcattgaaatactatctcaatctcagtggataaaaaaggctgaagtatttattgatggattccataatttttctacattggaatatagaattatagaagcacttgttcaacacgccaaacaggtgactgtattattaacgaccgatggcagccatcatccatttagtttatttagaaagccatctgaagttttatcacatttggaggatatcgctaatcgtttaaatataaatctaaataaaacatattttaatacattttatcgctataacaatgatgatttaaagaatcttgaaaatgggtttgatgcattacaatttacgcctaaacatcatcaaaatcatgttaaaatatttgaatcttcaagcatgagagaagaaataaatgaagtagctcgacgtattttaaaagatgtcagagaagcagattataaattcagggacattgctatattataccgtgatgaatcgtatgcatatctattcgagtcaatacttccttcatatgatataccatttaacattgatactaaaaagtctatgacacatcatcctatcatggaaatgttacgttctttattggaagttatacgttcaaattggcatattaatgcaatgttacgattatttaaaacgaatgttttaacgtctcaatttaaaagaagtagctatttaattgatttactggagaatttcgttttagaacgtggtatttatggtaaacgttggttagatgaagatatctttagtattgatcagtttagtagaatgggacgtaaatcacatcaactaactgaaggacatcaagcattatacaaagaagtaattaaacttaaaaagaatgttataaataaagtgttatatttcgagcaagctatgaatgaagcgcatactgttaaagattatgctacgtcattttatgaaagtttggagtattttgaactaccgagtcagttaatgactcaacgtgatgaattagagttagcgggtctaacagaaaaagccgaagaaattgaccaagtatggaatggtttaatacaaattttagatgatttagttactgtatttgatgatcaggaaatgacacttcaacaatttttagatgtttttgatataggtttagagcaattagagtttgttatgatacctcaaactttggatcaagttagtatcggtacaatggatttagcgaaagttgataataaaaaacatatttatatggttgggatgaatgatggtatattaccacagactgtatcttcatcaagtttgattacagatgaagagaagaaatatgttgaggacaatgcacatgttgagttaagtccaacttcagatatactgcaaatggatgaagcgtttgtatgttacatcgctatgacaaggagtcaacaaagcgttactttttcatatagtttaatggggaattctggagatgagaaggaaattagtccttttttaacgcaaattaaagaattattttatgatttagaaatcaccaatctacaagatttacataaagcgcaaccattattaatgatgcaacattcacatcaaactaaaattcagctttttgaatatttaagaggttggttagaccatgaagacatcgattatcgttggttggatgcatatttagctattcgagacgatgatcaattaaatcaaggtttagattatcttactacgtcattgacatatgataacgagactgtccaattaaatgaaattttatcacaacaactttatggtaaaactatcaacgctagtgtgtctcgttttgaaggttatcaacaatgtccttttaaacattatgcctcgcatggtttaagattaaatgaacgcactaaatatgaattacaaaattttgacttaggagatatttttcattcagttttaaaatacatttccgatcgaatttatggtgacttcaagaatttagatacaaagaatattcaatcacttactaaagaagcattagagcttattttacctaaagtacagtttaatttgttaaattcgtctgcgtattataaatatttatctaaaaagattggatcaatcgttgaaacaactttaaaggcacttaaatatcaaggggagtactctaaatttgtacctcaacgatttgaaacaggatttagaaaatcacctaaaaacaaaggtgaacttgttgcacaaccactgattaccaatcagggaattccgattaatataagaggtcaaatcgatcgtattgatacatatacaaaaggtgatcatagttatgtcaatatcattgattataaatcttcagaaagtagtgcaacactcgatttaacaaaagtttattatggtttgcaaatgcaaatgatgacctacatggatattgtattacaaaacaaggagcgtttaggtcttacagatattgtgaaaccagggggtctactttatttccatgtccatgaaccgcgtattaaatttaaaagttgggcagatatagatgaagaccaatttcaaaaagactatatcaaaaactttaaaatgagtggtttgcttaatcgtgaccaagaagtgttagacgctttagatattagacttgaaccaaagtataattcggatattgttccaatagcattaacagctaaaggcgctataaatcaacgtagtagtaaagtagctgatgaaaacatcatttatcaattaatagaacataataagaagaattttatcgagacagccagccacattatggatggacatacggaagtggcacccttgaagtacaaacaagtattaccttgtcaattttgtaattataaatcagtttgtcatgtagacggattaatagatagtaagcgttatagaacagtagatgaatcgataaaaccattagatttaattcaacaattaagaaatgaaggtggtgaaagacatgattccaactaa

SEQ ID NO: 2754 - DNA, 3657 bp, Staphylococcus epidermidis
atgattccaactaaacctcatgatgtgatttggacagatgcacaatggcaaagtatttatgcgaaaggacaggacatacttgttgctgctgcagcaggttccggtaaaacagccgttctagttgagcgtattatacaacgtatactaagagatgatgtagatgtagatcggttactagttgtaacatttacgaatttaagcgcacgtgagatgaaacatcgagttgataaacgtatacaagaagcatcttttaaggatcctaacaatgaacatttaaagaatcagcgaatcaaaattcatcaagcacagatttctactttacacagtttctgtttgaaattgattcagcagcattatgatgtattagatatcgatcctcattttagaacaagtagtgaagcggaaaatatattattattagaacaaactattgatgatgttttagaacaacactatgataaattagatcctcactttatagaattaaccgaacaactatcatcagataggaatgatgatcaatttagaagtattattaagcagttatattttttcagtattgctaatcctcaaccatttgaatggctcaatcaattagcgcaaccatacaaagaagaaaataaacagcaacaattaatgcagcttatcaatgatttagcaatgatttttatgaaagcaggatatgaggaattacaaaaaagttatgacttattctcaatgatggaaagtgttgataagcagcttgaagttattgaaaccgaacgcatgtttattactaaagctattgaaggtaaagtattaaatacagatgttatcacgcaacatgaatttatgagtcgttttccggcaataaatagcaagataaaagaagcaaatgaaggcatggaagatgctttaaatgaagcaaaacaacattatgataaatataaatctttagttatgaaagtaaagaatgattatttttctagaaatgcagaagatttgcaaagagatatgcaacaactcgcacctcgagtggcttatttagctcaaatagttcaagatgtgattcaatcatttggtgttcaaaaacgaagtcgtaatattttggatttttcagattatgaacattttgcattatgcattcttactaacgaagatggctcaccttcgcgtatcgctgaaacgtatcgtgaacattttaaagaaatcctagttgatgagtatcaagatactaatagagtgcaagaaaaaatattatcttgtattaaaactggtgaagaacacgatggtaacttgttcatggttggggatgtgaagcagtctatttataaatttagacaagctgatcctagtttatttattgaaaaatataatcgcttttctagtagtggaaatgaaagtggcttgcgcattgacttatcgcaaaactttcgttcgagacaggaagtgttatctacaaccaattacttgttcaaacatatgatggatgaacaagtaggagaaatttcatatgatgatgcagcgcaattgtattttggtgcaccatatgacgaagtttcacatcctgttcaattacgagcacttgttgaggcaagttcagaaaatagtgacttaactggaagtgaacaagaagcgaattacattgttgaacaagttaaagatattattaatcatcaaaacgtatacgatatgaaaacaggtcaatacagaaaagcaacatataaagatatcgtaattttagagcgaagttttggtcaagcgcgtaatcttcaacaagcttttaaaaataatgatatcccttttcacgtaaatagtaaggaagggtattttgagcaaactgaagtacgtcttgtgctttcatttttaagaacaatagataatccacttcaagacatttatttagtgggattgatgcgttctgtaatatatcaatttactgaagaagaattagctgaaataagagttgtaagccctcatgatgattacttttatcaatctataaaaaattatatgattgatgaaaaagctgattctagattggttgacaagttaaatcgttttattcaggatatacaaaaatatcaaaattatagtcaaagtcaaccggtttaccaattaattgataaattttataatgatcattttgtaattcagtactttagcggtcttattggaggtaaaggtagaagagcaaatctgtatgggctatttaataaagctgttgaatttgaaaattcaagtttcagaggtttattccaatttattcgttttattgatgagcttattgatcgtaaaaaagattttggtgaagaaaatgtcgtaggtcctaacgataatgtggttagaatgatgacgattcacagtagtaaaggattagaatttccatttgtaatttactcaggattatctaaaaaattcaacaaaggtgacctgaatgcaccagttattctaaatcaacaatatggtttaggtatggattattttgatgtaaataaagatatggcttttccttcacttgcctctgtggcatatagagcaataaatgaaaaagaacttatatcagaagagatgcgtttaatctatgttgcgttgacacgagcaaaagagcaacttattttagttggaagagtcaaagatgaaaagtcgttaattaaatatgaacaattagctgtttcagacacacatatagcagttaatgaacgccttactgctaccaatccatttgttctaatttatggtgttttggctaagcatcaatcgccttcattgccaaatgatcaaagatttgaaagagatattgatcaattaaattctgaagtgaagccacgtgtatcaatagtgattgatcattatgaggatgtttcaactgaagaagtagtcaatgataatgaaataagaacaatcgaagaattaaaggccataaatactggtaatgaagatgtgaaaattaaaattcatcaacagctttcttatgactatccttttaaagttaacacgatgaaaccatctaaacagtcggtatcagagttaaaacgtcaattagaaactgaagaaagtaatacaaattatgatagagtacgtcaatatcgtattggtgttgcatcatatgaaagacccaagtttcttacccaaacaaaaaaaagaaaagcaaatgaaatagggactttaatgcatacagtcatgcaacacttaccttttagagaacaacgtttaacaaaagacgaattatttcaatatatcgatcgattgattgacaaacaacttattgatgaagatgcaaaagaggatattagaatagatgagattatgcatttcattgatggccctctctatatggaaatagctcaagctgacaatgtttatactgaattaccttttgtggtaaatcaaattaaagttgatggacttacaagtgaagatgaagatgtatccattattcaaggtatgattgatttaatatatgaaagtgacggacaattttactttgttgattacaaaacagatgcttttaatagaagaaaaggtatgagtgatgaagaaatagggaatcagctcaaagaaaaatatcagatacaaatgacgtattatcgaaatactttagaaaccatacttaaacgacccgtaaagggttacttatattttttcaaatttggtacattagaaatagatgattaa

SEQ ID NO: 2755 - DNA, 906 bp, Staphylococcus epidermidis
atgaaatttctatcattcaaacataatgacagaacttcatatggtgttaaagtaaaacgtgaagatgctgtttgggatttaccaatggtttttgctgagtttggggacaaagactttaatcctaaaactttaattgcaggtttacagcaaaatcaaactttagactttcaagagcaagttcgaaaagcagttgtcgcagcagaagaaagtggaagagatgaggaatttaaacttttattcactgatattgattttctaccaccagtgacacctccaaataatgtgattgcatttggtagaaattatgaagatcatgctagtgaattaaatcatgaagttgatagtttatacgtatttactaaagcggcttcatctttaactggtgatgaagcaacaattcctaatcataaagatattacagaacaattggactatgaaggcgaacttggaattgtaattggaaaatcaggcgaaaagattcctagaggattagctttagattatatttatggatacacaattatcaatgatattacagatcgtactgcgcaaagttcacatgatcaagcattcttatcaaaaagtttaactggggcatgtccaatgggcccttatatagtaaccaaagacgaattacctgcgccagagaatgtaaatatcgtaacaaaagtgaataacgaaattcgacaagatggcaacactggtgagatgattttaaaaatagatgaactcatcgaaaagatttcaaaatatgtggctttacatccaggcgatatcattgcaactggtacacccgctggtgtgggtgctggtttacaaccaccacaatttttacaaccaggtgatgaagtcaaagtaactatagataatattggcactttaacaacatatatatctaaaaattaa

SEQ ID NO: 2756 - DNA, 402 bp, Staphylococcus epidermidis
atgttacatgtccatattttaagttgggtattagcaattattttatttatcgcaacttatttaaattattcaaaaacgcaaggtgcatcaccttattataaacctttgcatatggcattaagattattcatgctattaacattaatttctggtttttgggaattaatcgaagagtttatggctgcctctaatggtgaaggtggaaatcatatgctacttactttaaaaatgttatgtggtttagctgttatcgcttttatggaaatttccattgctaaaagaaaaaaacaacagactagccataaattcttttggattactattattttaatcataataacaatggctattggtgttattttaccttggggtccaatttccaaaatatttggaataagttaa

SEQ ID NO: 2757 - DNA, 156 bp, Staphylococcus epidermidis
atgtataaagactataacatgactcaacataccctactaatggaaacttcagttcttatccccgcgaatgatatttcacgacatgtaaatgatattgcagaaacaattcccgatactgaattcgatgaattcagacatcatcgtggcttaatataa

SEQ ID NO: 2758 - DNA, 837 bp, Staphylococcus epidermidis
atggagacggttcaattttataacggaagaacaatgccgaaaatagggctcggaacttatagagtaaaagatggcgatgaatgtagagaatctgtaaaatatgctatcgaacaaggttatagaagtatagatacggcaatgatttatggtaacgaagaaacggtaggtcaaggtattaaagaaggattagaatcgactggtttaagtcgtgaagatttatttataacttctaaattatggctaactgattttggacgtcaaaatgtggaagatgcctatcgacaatctgttgcaaaattaggactggattatttagatttatatctgatgcattggccaggtacaaatgaagcggtaatgattgatacttggagaggtatggaagacttgtataaacaaaatcaggtgaaaaatattggtgtgagcaattttactccagaacattttgaagcattgcttgcccaagtttctattaaaccggtcattaaccaagtagaatttcatccttatttaacacaaaatgaattacgaaagtatttagaagctcaaaatattatcatggaatcatggtctccattaatgaattcacaaattctccatgatgaagtcataaatgaagtagctaatgaagtaggaaaaactccagcccaagttgtaataagatggaatattcagcacgatgttgttgttatacctaaatccgtaacaccacatcgcatagaagaaaatttagacgtatggaattttgaattaagcgacaaccaaatggaaagaatcgatcaattaaatcaagataaaagaattggacctaaccctcttgaatttaacggtaagtaa

SEQ ID NO: 2759 - DNA, 909 bp, Staphylococcus epidermidis
atggatttttcttcaccgacagtaattggcttaattgttgcaatacttgtggctgttttattctttatactcttcttagtagcgaaccatagtaagaagaaagtgaagaatcaaacagaagcacattataaagaaaaagaacaacatctaaaagaatctcatgaagaagctttagaaaaagagagagttgagaataaaaaagttgttacaaaacaaaaagaagattttgacgtgacagttagtaacaaaaatcgtgaaattgatgcgttgaaactattctcaaaaaatcatagtgaatatgttacagatatgcgattaattggtattcgtgagagactggtaaatgaaaagagaatacgccctgaagatatgcatattatggcaaatattttcttgcctagtaatgagttaactaatattgaacgtgtgagtcatcttgtacttacacgaactggcttatatataattgattctcaattattaaaaggccatgtttataatggtattagtggtgcgcaatttaaagaattacctacgatgtcacaagtttttgacacgctcgacttagattcatcacagccacagacattggtcttagatcaaaatgaagatcaacattcattatcttttgttaattattcagataagattaaacatattgaaaaattagcaggagatttacaaaatgaattgaataccaaatatacgcctacatcaatactgtattttaatcctaaaaaggataatgatgttacaatttctcattatacgcagtcatcaaatgttaaagttttagttggtcctgaacaattagatgaattcttcaacaagtttgttttccatggacgcatacagtacaatgtggatgatttacaagatatcatggataaaatcgagtcattcaattaa

SEQ ID NO: 2760 - DNA, 1200 bp, Staphylococcus epidermidis
atgacatacaataaacgattatttacctcagaatcagttactgaaggccatcctgataaaattgctgaccaagtttcagatgccattcttgatgaaatattaaaggatgatcccaatgctcgtgtagcatgtgaaacaacagtaacaacaggaatggcacttatttctggagaaatctcaacaactacttatgtagatattcctaaagtggtgagagaaacgattaaagatattggttatactagagcaaaatatggttatgattcacaaacaatggcagtgttaactgcgattgatgaacagtctcctgatattgcacagggtgtagacaaagctcttgagtatcgaaatgatatttctgaagaagaaattgaagcaacaggtgcaggtgaccaaggattaatgtttggatatgcaactgatgaaactgatacgtatatgcctctacctatattcctgtcacatcaacttgctaaacgattggctgatgtacgaaaagatgaaattttagattatcttcgtccagatggaaaagtacaggtgactgttgaatatggtgaagatgacaaacctagacgtattgataccattgtagtttctacacaacatgctgaagatgtagagttagcacaaattgaaaaggacattaaaacgcatgttatttacccaactgtagataaagctttattagatgatgaaactaaattttacattaacccgactggacgtttcgttattggaggacctcaaggagatgctggtttaactggacgtaaaattatagttgatacgtatggtggttatgcccgtcatggtggaggttgttttagtggtaaagatcctactaaagtagatcgttcagcagcttatgcagcaagatatgtagctaaaaatattgttgcagctggtttagctaaacaatgtgaagtacaacttgcatatgcaattggtgtagcagaacccgtttccatttcaattaatacgtttgatactggaaaggtttcagaagcacgtttagttgaagctgtaagaaagcattttgatttaagaccagcaggtatcattaaaatgttagacttaaaacaaccgatatatagacaaacagcagcgtatggtcattttggacgtacagacgtattgttaccatgggaaaaattagataaagtcaatgttttaaaagatgctgttgaaattcaatga

SEQ ID NO: 2761 - DNA, 1593 bp, Staphylococcus epidermidis
atgtctatagatacatacacagaaacacttaagataaatcagctaatagaaaaagctacatcacattttcaactatcatcaacacaattatacaaaaaaattttaaaaaatcatgagggtgagttaactgaactgggggcaataaatgttaaaacaggtaagtacactggtcgttcacctaaagataaatttatagtcactgaaccatcgtataaggataatataaattggggagatatcaatcagcccatggatgaagaaacatttctaaaactttacaataaagtactcgattatttaaatcagaaagaggaactttacatatttagtggatatgcagggagcgataaagagtcacgtcttaaacttaaggtgataaatgaattagcttggcataatttatttgctcgtaacatgtttattcgtccagaatctatagatgaagctcaaaatataaaacccaacttcacaattgtttcagcacctcactttaaagctaatcccaaattagatgggacacatagtgaaacatttgtcattatatcttttaaacataaagtgattttaattggtggcacagaatatgctggtgaaatgaaaaaaggtattttctctgtaatgaactatttgcttccaatgcaggatatcatgagtatgcattgttcagctaatgttggagaaaaaggagatgtagcactattctttggattatcaggaactggtaagacgacgctttctgccgatccaaaacgtaagttaattggtgacgatgaacatggttggaataaaaatggcgtttttaatattgagggtgggtgttatgcaaaagcaattcatttatctaaacagaaagagcctcaaatttataatgctattaaatacggaacaatattagaaaacacagttacaaatgatgacggtacggtagattttgatgataacacctatactgaaaacactcgcgccgcctaccctattgactatatagagaatattgttacaccttcaaaggcagcacatccgaatacgattatattcttaaccgctgatgcatttggagttatccctcctatttctaagctaactaaagatcaagcaatgtatcatttcttaagtggattcacgtctaaactagctggaacagaacgtggtgttactgaacctcaaccttcgttttcaacttgctttggtgcaccattcttacctttgagtccaacaaagtacgctgatctacttggaaatttaatcgatattcatgatgtagatgtatatctagtaaatactggatggacaggtggtaaatatggtatagggcgaagaattagtctacactatactcgtgaaatggtagatcaagcaatatcaggtaaattaaaaaatactaaatatattaaagatgatacatttggcttaaatattccagttcagattgacagtgtacctacaactattctaaatcctatcaatgcttggaacaataaagataactacaaagcacaagcttacgatttgattcaacgctttaataataattttaaaaaattcggcaaggaagtcgaacatattgccaacaaaggtgcatttaatcaataa

SEQ ID NO: 2762 - DNA, 762 bp, Staphylococcus epidermidis
atgccaatcgaatatgaaactcatttttttaatgaagtaacatatcttgtagattatttaaaagtcaaggctctgatgatgattccgaaaaataaaaaagatatcaaacgtatcgttatatacttaagaggtggtaaagggcaagttggaagagtgagagctgcaagacttatgcaatttgcaaatgaatatactttagttataggtccatactatagaggaaataatggaagtgaaggaagagatgaattttactgcggtgatttaaatgatgtaacgcatttgattcgacttttaaatcaaaactatccttctgcatttatacatatggtaggattttcacgtggaggtctacaaggattacttacttttaatgatttgcctgtagatagttatatgatttggggtggcgtatctgatatacatttaatgtatgaagaacgagttgacttgagaggtatgctacgacgaatggttggacatccaaaaaaagatgcgaaagcttataaaagcagagatgcaatgcaatttataaaaaaagatagtcctcctattcttattattcatggtggcaaagatattcaagttggaatacatcaagcttatgatttagaaaaaaaattaaaatccaaaggaatttattatcaaacctattatcaattggatgaaggtcatgtaccacgacctcctgcgatgagagacgtaattcgatatatacatcaatggatgaacgacgtcgaaaataaaaatttaaatatatag

SEQ ID NO: 2763 - DNA, 477 bp, Staphylococcus epidermidis
gtgaggaacgtggagtttgaggataaagatggaaggattgtaacattgaactataaaaatgaaaatgatatgcctaatggcaatcacgttcttgcaattcctgtatacaataatcagttattatttacaaaccatcaacatcgtgggatagagtttcctggtggtaaagttgaaataagcgaacaaagtaaagaagcagtaattagagaactatacgaagagacgggtgcaatcgcaaaatttatctattattttgcacagtatagtataaaaatggggcatgatgagccgtttataaaggacgtttacttcgttgaagtaagtcatttggaatatgtagatacctattacgagactttaggcccttgtctttatcatcaaattaatgatattcctttaaataaaagaagttttttaatcaatgataaggcgattcttcattgtttggaaagggtgaaaacacttggattttattaa

SEQ ID NO: 2764 - DNA, 252 bp, Staphylococcus epidermidis
atgttgaaaaaaatattattatctctagttgtattttatcaacgttttatttcgccacttacaccaccaacatgtcgattttatccaacatgttcacaatacactagagaagccatcgaataccatggtgcactaaagggactttatctcggtgtacgacgcatacttaaatgtcatccattgcataaaggcggctttgatcctgttccattaaaaaaagataaaaattctaaaaccacacatcatcattaa

SEQ ID NO: 2765 - DNA, 1002 bp, Staphylococcus epidermidis
atgaaagttaaggcaatcaatctatatacttataaggaaccttttaaatcaccaatttcaacaccgaaagtgaagttaacgcatcgagaaagtttgtttacggaaatagtaacttatagtggagaaacttattatggagagtgtaatgcatttttaactaattggtatgataaagaaacaatactcacagtcgtaaacagattaagacagtggataccgcaagtacttcataaagatataacatcttttgattcatggttaccttacctaaatcaaatgaatgatgcgccagctgctagatcaatggttgtcatggctgtttatcaaatgtataacgacttgcatgattttgaagtacaatacggtgctacagttagtggcttaactaatagtcaaattgaaacattattagaaacaagaccgaaacgtataaaacttaaatggtcaacatcactcatcaaagatcttgaaactatacgtttattaaattttgattgtgatattgctatagatgcaaatgaatcattaacaaagccatcatttttacaattagccaacgtaaatacatcagatattatatatattgaagaaccttttaaaattctagaagatttaaatgatattgatatgtctatttttcctagaattgccatcgatgaaaaggcactttctatagaaaaaatacaatcaataattcagcaatatcccatacaagtcgtcgtgttaaaactatttagacttgggggaatagatagaatgttaaacgccatgaaaattttgaaagaaaaaaatataaggtttgtagttggtggcatgtatgagtttggtctaagtaggtattttacagcaatgttagctaaagaaggaagttatccgggtgatattacgccacacggttattattttgctaacgatatcgtagagacaagtggcatattaaaagggggaatgatttatttcactccccctaaagtcaaacgttctttacttaacaaagtttaa

SEQ ID NO: 2766 - DNA, 1425 bp, Staphylococcus epidermidis
gtgaatttttggttacaggaacaagctcaatcaaatggaaatcgattagcgattgttacaaatcagttatctttaacgtacgaagaattatatcatcgtgcaaaaacaatcgcggaatatttaacttctttaaatcagaaaaggattggtttatatataagcaatgatattgattcagttgttttgattcatgcttgttggttagctcatattgaaatagctatgataaatacacgtttaacgcgacatgagatgataaatcaaatgaattcagtcgacatagcaacgattgtacacacgttgcctttagaattagaagggtttaatttatatcattttaatgatttaacacaattagataaatatgatgtttcaagttacaaatttaatttagaatcgattgcatcaattatgtttacgtctggaacgacgggacctcaaaaagctgtgcctcaaacctttaataatcatttagccagtgctaaaggctgtaaacatagtttaggattcgaacaaaatactgtatggctttcggtcttacctatatatcatatttctgggctcagtgttattttgcgcgcagtgatagaaggattcactgtcagacttgttaaaaagtttcaaactgatgatatgttaacacaaataaagacttatccaatcacccatatgtcccttgttccacaaacgttaaagtggttaatggatgcaggattgactcaaccattttctttagaaaaaattctgctaggtggtgctaaattatcaccacaattaattgagcaagcatttgcttatcgtttacctgtatataattcttttggtatgacagaaacttgctctcagtttctaacagcctcacctcaaatgctcaaagaacgtttcgatactgttggaaaaccaagtgaaaatgtcgaagtgaaaataaaaaatcccaacgcatatggacatggagagttattaattaaaggtgaaaatgtgatgaatggttatttatatcccaaatatttaaaagacacatttgataatgatgggtattttcaaactggagatatagctgaaatagatgatgaaggttacgtcataatatatgatcggcgcaaagatttgattataagtggtggagagaatatttatccttatcaaattgaaacaatcgcaaaagactttgaaggcattgaagatgccgtatgtgtaggaatatcagatgatacttggggtcaagtaccaatattatattatgtgacaaatcaagatattaatcaaactgaattaatagaacattttgagaatcatttagctagatataaaattcctaaaaaatattatcaggtcaaatctttaccttatacatcgacaggtaaattacaacgtaaaaaggtcaaaagtgaagacttgaatgagggaaagaataatgaaagttaa

SEQ ID NO: 2767 - DNA, 147 bp, Staphylococcus epidermidis
atgtactatgtgaaaagtaatttaactaacgcactaatccctttaaatcaaattgaaaaagcaatcaacgctcacgattgcaaaacacttcaagacttgagtaattactttaacttacctactacacatttatttcaaacaatgtga

SEQ ID NO: 2768 - DNA, 666 bp, Staphylococcus epidermidis
atgcaacaagaaacgacatcatggtacaaacaagagtggtttatagttttatcacttttattcatttttccactaggtttatttctcatgtggaaatttagcaagtggccatctattgcaagaacaatcattactgttgcaatttcagttatcgtattagcaagcattacctattatggtaatctacaaatgattgtaccagcaacatcaaattcaaataacgaaactaaagaaactacagagaataatgtaaatgataaagacgagcgaaatcataaagctgcagtagaagaaacaaaaactaatgatgactccaccaaagaaaatactaaagaacctggaaaagaaaataaatctgcaacacgattggagaactctgcgcttgaaaaggcaaagtcatattctgatgattttcacatgtctaaactaggaatttatgatattttaacatctgaatatggagaaaaatttgataaagaagatgcacaatatgctatagatcatctagaggctgattatgaaaaaaatgcacttgaaaaagcaaaatcatatgccaaagatatgcatatgtctaatgactcaatttacgatcttttggtgtctaactacggtgaaaaatttacagaatcagaagcaaaatatgctattgagcatttggataattaa

SEQ ID NO: 2769 - DNA, 288 bp, Staphylococcus epidermidis
atgcaacttaaatacaatgaaataaataagaatcaactcatttcgtctgaaacaccgtttctagaaaactttcaagattgtataaaattaataaaaagaacaaaatattcacaatcaactttaaactgttattataatgcattaaatatctttgatgaaaagtttggcaatacagctattaaaaatttttcacaactcaaatatagcgaaatgttaaaagagtatgcagaaggtcacattattggtggacataaaaaagacatacgaaagcaagtgttcaaaaattaa

SEQ ID NO: 2770 - DNA, 156 bp, Staphylococcus epidermidis
atgacaaaatcagctaataaaatcatttcaattgctataaaagatatgaaacatatacaaaatgttttaaacagactattacagatttctgccaaaataaaaaacatcccttttagtaaaatggttaaaattttgatatcgacatctacgaaatga

SEQ ID NO: 2771 - DNA, 735 bp, Staphylococcus epidermidis
atgagaaaattatttctatcaattttatctattataataatttcaagtttttgtgttgcaacagggtttcaaaacgttaatgctgcaaataatgaggtgagcaaacctcaaagtaatgtggatagtaaaactaaacaaaatattattaaaaaaataaaaaaatctaatgcttataaaaagcacgctaattcaacttctattgactcaataaaagatgacgatattattgttcatttggataaaggtaaaaacaccaatgtatattctattaactatgtatttggtaaaaaattagctaaaatgaatgataaccttgcaatgattgaattaaaatataacgaagcaaacaatgaagttttctacaatcatatgatgtattcaaaatttgttaaatataataataaagaatatattaatatgaaaggcattttaaatggcaaaccttattatgaatttaatatagatcagaaaggtcattactacgataaaaactttaaacatacctctaaagatgaaatcgaaaaagattctgctaaaaacttaccacctaaagagcgtggttggtgtgaatgggcagtaggagctttatgtggtaccggtggagctgcaggttgttgggcaactgctacagctttaggtattactactggttggggaggcttttcattagctacaatttgtggtctgataagctctctaggctgtactggtgcaaccaactatatttgtaaataa

SEQ ID NO: 2772 - DNA, 327 bp, Staphylococcus epidermidis
atggactatataactaagaacatcaacagttttactaagagacttgcagaggctatcaatggtagacaaataaacgcaccaaaaagcaacccatctagcaaaaagataacttggaactggggaggtactttctaccctaacgcacctaaaagtggtattagagttagaaggtcgctaggtatcaatggcgctattgttgaaagtggctcgtggttatacagaaagacagattgggttaaattcgaccaagttattaaaaaagatggatattggtggcaccactttaaatatcaagcaccaggttcaagtaataaacatttctattga

SEQ ID NO: 2773 - DNA, 495 bp, Staphylococcus epidermidis
atgagcatagaaaattttgtaaatttaaagaagtatgtatctgatccccctattcaatcatatgtatttgtttatattttaatcgtcactggaggtcgctttggagaagttcaaaaactaagtagaagtgatttagattataaaaataatacaatacacttaccaggaacgaaaacagaaacttcagatagaactgtagatatacctgctgcagatatgaatatgttaagaaaaacattatctaaaatgccagtgagtttatcaaatcaattattcagtacaggtgtaggattgattacacacaatgctgtatctaaagtgttacaaaaattttgtttagaaaataaaataggtaaatatactttgcatagtataagacacacgcattgttcttatttactacacaacgacgtatctatctattacacttcaaagagattaggttacaaaaatattaaaactactatggatgcatatttcgcatctattagatga

SEQ ID NO: 2774 - DNA, 555 bp, Staphylococcus epidermidis
atgacagacattataattgtacactcaaaacatggtaattctaaaaatcattggtatgaatggttaaggcataatttaactttggaagggtatgatgtttctttattcaatcttgaagcaaatgatcatgctcaaattgatgagtgggttaatgaaatgaaacaacaactacatatccgtaaaaaagatacatattttgtgacccacggatttggctcaatcgctgctttaaaatttcttgaagaaacgcatcatcacattgaaggtttctttagtatcgcaggatttaaagaagatgcacaagatatagacgaagatgtagatttaaaaggggtaaccatcgattacgataaaataaaagagcaagtagataaattttatggactcacgtctaaagatgatcaatatgtttcatacaaggaaacacaaaggctgatgaattcacttaatggacatacacgtgtagtagaagatgggggacactttttagaagaggaaggttttgtaacatttacttctttaattaacagaatgcaaggatatatgactaggtag

SEQ ID NO: 2775 - DNA, 1398 bp, Staphylococcus epidermidis
gtgagtaagaaagtggcaattattggagcgggaatcactggtttatctagcgcatatttcattaaaaaacaagacccttctattgaagtaactatcttcgaagcctcaaatagagtaggtggaaagattcaaacatatagatcagatggttacacaattgagttaggccctgagtcttatttaggtcgtaagacaattatgactgatgtggcaaaagatattggattagaaaatgaccttataacaaatactactggccaatcttatatttttgctaaaaataaattatatcctattcctggtggctcaattatgggaattcctacagatattaaaccatttattaaaacaagactcatttcacctattggtaaattaagagcggggcttgatttgtttaaaaaaccgatagaaattgaagatgatatttctgttggtagtttctttagacaacgattaggtaatgaagtattagagaacttaattgaaccactaatgggtggtatttatggcactgatattgatcaattgagcttaatgagtacatttcctaactttaaggaaaaagaggaacaatttggtagtttgattaaaggaatgaaagacgaaaaagaacaacgtattaagaaacgtcaattatatccaggtgctcctaaaggacaattcaaacagtttagacacggattgagttcttttatagaggctcttgttaaagatattgaaagtaaaggtgtccacatacgatataacacgccagtcaaagatatattgatttcgcaaaaagattatgaaattttattagaagatgacagtaaagagaaatttaatggcttacttgtaacaacaccacatcaagtatttctgaactggtttagtcacgatccagcatttgattactttaaaaacatggattctactactgtcgcaacagttgttttggcctttgatgagaaaaatattaccaatacgtacgatggaactggctttgttattgcaagaacaagtcaaacggatattactgcatgtacttggacatcaaagaaatggccatttactactccagaaggtaaagttttaattcgagcatatataggaaaaccaggtgatactgtagtagatgatcacaccgatgaagaaatagtatcaattgttagaaaagacttaagccaaatgatgaccatctcagggaatcctgattttacaattgtaaatcggttacctaagagtatgccccaataccacgtgggtcatattaaaatgattaaagaaattcaacaacatattaaaacaacttatcctagattacgtgttacaggggcaccgtttgaagctgtcggtttaccagactgcatacaacaaggtaagaatgcagttgatgaaatattagaagagttataa

SEQ ID NO: 2776 - DNA, 924 bp, Staphylococcus epidermidis
atgactaaaacaataggcttattagtaatggcgtatggtacaccatataaagaaagtgatatagagccttattacactgatattagacgtggaaaaaaaccaactgaagaagaactgcaagatttaaaggatagatatgaatttattggtgggctttctcctttggcaggaacaaccgatcgtcaagccgaagcattactcgaagcattaaataaagaacaagatgatgtgaattttaaactttatctcggattaaaacatatatctccatatattgaagaagcagtagagcaaatgcataatgatggaattaaagaagcagtaacagttgttcttgcgcctcattattctagtttttctgttggctcttatgatcaacgtgctcaagaaaaagcagatgaatatggcatccagttaacacatattaaacactattatcagcagccaaaatttattaaatattggacggaaaaaattaatgaaacattagaacaaatacctaatcaagaacatgatgaaactgtattagtagtttctgcacatagtttaccaaaagggttaattgaaagaaataatgatccatatcctcatgaattgcatgaaacagcggaaattcttaaacaggaatctaacatcatccatgttgctgaagggtggcaatcagaggggaatactggaacaccttggttaggcccagatgtccaagatttaactcgtgatttatataaggaacaccagtttaagcactttatctatacgccagtaggttttgtttgtgaacatttagaggtgctttatgataatgattatgaatgtaaagtggtttgtgacgatattggggtaaattactatcgtccagaaatgcctaacacacatccattatttatcggtgctattgttgacgaaattcaatcacatatataa

SEQ ID NO: 2777 - DNA, 1035 bp, Staphylococcus epidermidis
gtgcgcagcaaaaacgatacaattttaaaagctataaaaggagaaagtacgtcacatacacctgtttggtttatgagacaggctggacgttctcaacctgagtatcgaaaattaaaagaaaaatattctctatttgaaatcacacatcaaccggaattgtgtgcatatgtgacacatttaccagtagataattatcaaaccgatgcggctgtattgtacaaagatattatgacaccactcaaaccaattggtgtagatgtcgaaattaaatcaggaataggacctgtaatttccaatcctattcaaactgttaaagatgtagaaaggctatcccaaatagatcctaaaagagatgtcccatatgtattagatacaattaagttactcactgaagaaaaacttaatgtacctttaataggttttacaggagcgccatttactttagcatcttatatgattgagggagggccttcaaaaaattataattttactaaagcgatgatgtatagagatgaggaaacatggtttgctttaatgaaccatctcgtcgacatttctattgattatgttgtagcacaagtggaagcaggagcggaaatcattcagatttttgattcctgggttggtgcactcaatgtgaaggattatcgctattatattaagccagccatgaataaattgatttctggcattaaagcttattatgatgtacctatcattctttttggtgtcggtgcaagtcatttaattaatgaatggaatgatttaccgatagatgtactaggccttgattggagaactacaataaagcaagctgacaaaatgggagtcaataaagcaattcaaggtaatttagacccatctgtactgttagcgccatgggatgtcatagaatcacgactcaaagacatattaaatcaaggtttaaatcgtggaaagcatattttcaatttaggtcacggtgtatttccagaagttaaaccagaaactttgcgaaaagtgactgaatttgttcataattatacagcgaaatag

SEQ ID NO: 2778 - DNA, 504 bp, Staphylococcus epidermidis
atgtatttatatacatcttatgggacttaccaatttttaaatcaaattaaacttaatcatcaagaacgtaatttatttcaattttccactaatgattcctcaataatcttagaagagtctgagggaaaatcaatcttaaaacatcctagtgcatatcaagtgattgatagcacaggtgaatttagcgaacatcatttttatagtgctatttttgtccctacatctgaagatcaccgtcaacagctagagaaaaaattattacacgtagacgtacctttaagtaattttggtggttttaaaagctatcgtttattaaaacccactgaggggtctacctataaaatttactttggttttgcaaatcgaacagcatatgaagatttcaaagcttctgatatatttaatgaaaacttttcaaaagatgcattgagccaatactttggtgctagtggtcaacattccagctattttgaaagatatttatatccaatagaagatcattaa

SEQ ID NO: 2779 - DNA, 624 bp, Staphylococcus epidermidis
atgtttgaaacgataacgacagccgccatcctgtatattgctacagcggttgatttattagttatattattaatattttttgcaagagctaacaattatcaacagtataaagatatttatattggacaatatctagggtcattaactttaatttttgtaagtttgttttttgcttatgtacttaactatgtaccagataaatggattttaggattgcttggtcttataccaatttatttaggaattaaggttgctatattcgatgattgtgaaggggaaagaagagctaaagatgaactaaataaaaaaggattatctgagttatcaaaatctgtagcagtagtcacattagcaagttgtggtgcagataatataggattatttgtaccatatttcactaccataaataattatgaattagttatcactttaatcacatttgtaatcttaatttttattcttgtctttaccgctcaaaaattggctaatatacctggcctaggtgaagtcattgaaagatttagtaggtggataatgtcaatagtctatattggtttaggactattcattatcattgaaaacggaacagttcaaaaactctttcattttgtttttttagtgtaa

SEQ ID NO: 2780 - DNA, 1224 bp, Staphylococcus epidermidis
atgaataacgaggcgttaactttgtttagaaaacgacaacaagctatacgtaaggagaaaaactattataataaatttatatttaatggtcactttacagtttttctacttatactattaggagcatttatatttggatatggcgaatggttaagtcacattcctccccaaatagactatgcactatttgctagtatagcattagctgttgtttcattattcccaattcgtacactcttaaaagaagcggaccaaatcttcttactaccttttgaaagacacatgaaaaattatattaatgcaagtctgttttatagttatatttcaagaatcagtttaccgttcattttgctaatcgtattctttccattgttttataaattaagtcacaatcattatggattttatatcgcattttctataagtacattgctatatccatatttggtattactcatcaaatggcaatgggttaaattaaataaaaatgtgttcattatcaacatattattatttatacctttagcagtaacgcattacatgattttaagatttcataactatttagcttttttaataatgattatattatttgtaatttatttagtcctaaagactaaagcagatcactatttacttccttgggaaaaagtgattgcaattgaacaacaacatcacacaaattattataaattcgttaatatgtttacagacgtaaaacacctaagagaatcagcagtacgtcgtagttatcttgatttcttactacccgttcctaaaggtgccaaatttaatgagaatcggatgtatttatatttatttataagaagttttgtcagaggacgcgatgctttttctattattttaagattagttattatcgctattatattaatggtatggttatcacaaccggttgtttcattaattatcggtagtttgtttatgtatattattttattacaaatgtctcaattttatacgcaacaagcatacggtttatggcctcaagtttggcctgtatctgatacaaaagttattgcgggatatcagcaatttttaaatcgcttgatgattataatcgctattacatttacgattgtttatgtaatcaaacaccatgacttattcttttttgctgtattattctttatagtaggctggctaaccattcgaaatgcagttaaaaaattaaaatatcaagaaacattattacgtgactaa

SEQ ID NO: 2781 - DNA, 741 bp, Staphylococcus epidermidis
atgacagtaaaagttgaacatcttacagggggatatggaaaaaaacctgtaattaaagatttgaattttgaattagaaaaaggtgaaattgtaggtttaataggtctaaatggtgctgggaaaagtactacaattaaacatatgctaggattgattaatccaatggaaggcaaattatcaatttcaaatattaaaattaatgaagatattgaaaattatagaagaaagttatcttatatacctgaatcaccagtcatctatgatgaactaactttagaggagcacattgaaatgacggcgatggcttatcaattaagtagagaagaggctatgcgtagagctaaaccattacttaaagtttttagattagaaaatgaacttaaagtatttccaagtcatttttctaaagggatgaaacaaaaagtgatgattatttgtgcatttatagttgatccagaattatatattattgacgaacctttcctcggtttagatcctttggggatacagtctatgttagatttaatggtagaaaaaagaaatgaaaatcgaacagtattaatgagtacacatattttggctacagccgaaaggtattgtgatagatttattattttagataaaggtgaaattgttgcatttggtaatcttgatgagttacgggaacaaacaggattaaaagataaaactttagatgatatttacatccatgtcacacaaggtagtagtgcttatgaataa

SEQ ID NO: 2782 - DNA, 426 bp, Staphylococcus epidermidis
atgtcagaaacgatattcagtaaaattatttcaggtgagattcctagttttaagatatatgaaaatgattatgtttatgcattccttgatatatctcaagtttcaaaaggacatacgctattagtacctaaaaaaccttcagcaaatatatttgaaactgatgaagaaacaatgaaacatataggggttgctttacctaaagtagcaaatgcaattaaaaacgcatttcaccctgacggcttaaacattattcaaaataatggtgaatatgccgatcaatcagtatttcacattcatttccatttaataccgagatatgaaaatgatatagacggatttggctataaatgggaaacacatgaagatgtaatcgatgatgaaactaaacaaaaaatagcaacacaaattcaagcacaaatatcttaa

SEQ ID NO: 2783 - DNA, 372 bp, Staphylococcus epidermidis
atgaaagtctcaagaatattatttggtttaggtgtaggtgctgttgcaggatttgcagttgctttaagacatcgtgataaccaaagcgtaaaaaatcatacgattgatgctagtcaacccactggagctcaatcagaattacaacgtgaaatagagaatatgaaacaatccttcaatgatattcttaattacggttcacaaatcaagaatgaaagtattgaatttggaagttcaattggcgaagagtttaaaggattgattggtaattttaaatctgatattaatccaaacatcgaaaaattacaaagccacattgaaaatttacaaaatcgtggcgaagatattagtaataacctttcaaacgataagtag

SEQ ID NO: 2784 - DNA, 561 bp, Staphylococcus epidermidis
atgtttttatgtactcggcaaatcgatatacatgcacggttcggtattcaaagaattgcatttttaagtttagttgcgacaatatttacatttttagttagttatgaagtgatgtattattttttagatacaccactctcagatagacatttttttgtacttatagtgtttatattgctcatgtaccctattcataaaatagtacatcttttattctttttgccttattataaatcttttaaaatccataaattatctagtaagaaatgggtaccatattttaatacttatgttaatacgcctgttcacaaaatttatttttgtattaatctcattctacccatctttttcctatctggtatatttataatgctaagtatatatttacctcaatatggacattattttatgtttttattatcacttaacataggctgttcaatgatggatattttatatttaaagatacttctattttcaaatgatggacattatgtcgaagaacatcaatcaggtcttcatattttaaacaaggtagacaatccttatatacaacactga

SEQ ID NO: 2785 - DNA, 978 bp, Staphylococcus epidermidis
atgaaattaatgaataaaattatcgtacctgtaacagcaagtgcacttttgttaggtgcctgtggttcaaatgcaactgaatcgaaggataacacacttatttcttctaaagctggtgatgttaaagttgctgacgtaatgaaaaaaatgggcaaagaacaaattgctaacacatcttttagcattgtattaaacaaagttttagcagataaatataaagataaagtagatacaaaagatattgataaagatattaaaaaagaagagaaacaatacggcggtaaagatcaatttgaaagcatgttaaaacaacaaggtatgtcacttgatgattataaagaacagaagaaattatcagcttatcagaaacaattgttactagataaagttaatgtatcagataaagaaatcaaagaaaactctaaaaaaacatcacacattttaattaaagttaaatctaaatctagcgataaagaaggtttatcagataaaaaagcgaaagaaaaagctgaaaaaattcaaaaagaagtggaaaagaatccaaataagtttggagaaatagcaaaaaaagaatcaatggacagttcttcagctaagaaagatggttcattaggttatgtgattaaaggtcaaatggtagatagcttcgaaaaagcactatttaaattaaaagaaggagaagtttctaaagtcgtaaaaacagactatggctatcacattataaaagcagataaagaaactgattttaatagtgaaaaatcaaatatcaaacaaaaattaatcgaagaaaaggtacagaagaaacctaaattattaactgatgcatacaaagaattattaaaagagtataaagtagactacaaagatagagatattaaaaaagcaattgaggattctattcttgatccagataaattaaaacaacaacagcaacaacaatcacaaggtggttctggattaactaattcaggttcgtaa

SEQ ID NO: 2786 - DNA, 942 bp, Staphylococcus epidermidis
atgagaaatgtagaaaaattaaatcccggcgactcagtggatcattttttcttgatccatcgtgcaactcaaggtgttacagctcagggtaaagattacatgacactatttctgcaagataaaagtggtgatattgaagctaaattatggactgctacgaaagatgatatgcaaactttaaaaccagaaacaatagttcatgtcaaaggtgatatcatcaattatcgtggacgcaaacagatgaaaatacatcaaatacgtcttgcacaagctgaagacaaagtgtcaactaaagactttgttgacggtgcgccaatgtcacctacagaaatacaagaggaattatcgcattttatgttagatattgaaaatgctaacttacaacgcattactagacatttaattaaaaagtatcaagatcgttttttcacttatccagcagctagttctcatcatcataatttcgcgagtggattgagttatcatgttttaacaatgttgcgtatagcaaaatctgtatgtgatatttatcctctgttgaatagaagtctattatatagtgctatcattttgcatgatttaggtaaagtaagagaattgagtggtccagtggcgacgacctatactgttgaaggaaatttacttggtcatatctctatagcaagtgatgaagttgctgaaacagccaaagagttaggcattgatggagaagaggttatgttacttagacatatgattttagcgcatcatggtaaaatggagtttggatcgcctaaattgcctcatttaaaggaagctgaaatactttactttatagataatattgatgctaaaatgaacatgtttgataaagctttcaaaaaaacagaaaaaggtcaatttacagaaagaatttttggtttagaaaatagacaattttataatccaacaacacttgattaa

SEQ ID NO: 2787 - DNA, 2940 bp, Staphylococcus epidermidis
atgataattaaatcattagaaatatacggatatggccaatttgttcaacgtaaaattgaatttaatcgtcaatttactgagatatttggtgagaatgaagctggtaaatctactattcaagcatttattcactctattttgttcggatttcctactaaaaagtccaaagaaccacgtttagaaccaagattaggtaatcaatatggtgggaaattatcactcattttcgacgatggcattgaagcagaggttgagagaatcaagggaagtgctcatggagatgtcaaaatttatcttaaagatggtactattcgagatgaagtttggctaaataaaaaacttaattacatttcaaagaaaacatatcaaggtatattctcttttgatgttttaggtcttcaagatattcataaaaatctagatgaagagcaactacaagattatttattagaagcaggtgcacttggatcaactgaatttacaagtatgagagatagaattggacaaaagaaagaagaattatataaaaaatctggaaaaaatccaattattaatcaacaaattgagcaacttaaacaattagaaaatcaaattcgaaatgaagaaagtaaacttgatacatatcatcgacttgtagacgataaagataaatcatcaagaagactagaaaatttgaagcaaaatttaaatcaattatcaaaaatgcatgagcaaaaacaaaaagaggttgctctacacgatcaaacacaagaatggaaaaggttagaacagtcgcttaatatagagcctataaattttcctgaaaaagggatagatagatacgaaactgctaaatctcacaaacaatcacttgaacgagataaaagtttgcgagaagaaagattaagcatattaaataaagaggcggagtccatcaatccagtagaccaaaagtatattgattcgtttaatagcctttatcaacaagagactgaaattaaacaaaaagaatttgagttacattcaattgagaaagatattgctgataagcaacgtgaactagaagctcttcaatctaatataggttggcaagaagtgttttacgacacagacagtactgaagcgatgaaaagtcatatgagtgatttagtattaggcaagcaagaacaaattgcttatatcaatcagttagaacgtggacttgaagaaaataaaattgaaagaaactctaattctaatgagattaatcaagttgagaatgagcttgttcctgacgaaacctttgaaaagaaaaaggaatatacacaacaagttttagaattacatgaaaaagagaacttgtatgaaaagttaaaagaaacttttgaagaagaacaaacacaaaaaaataaaagacaaaagtttttgagaataggatttattgttttgactattctatcagcagcactttctattttttcttttttcactgcaaatcttatttttggtataatatttgctctattaactgtgatttttgtagtaggtatcattttttctagatctaaagcagtagattatagtacagcaataagtcaggaaattaatgatttagaaaaccaactcacgcaacttgaaaaagaatataatcttgacttcgatttagaatatcaacaacaagttcgtgaacaatggcgccatgctaagaaaaataaaaaaatacttgaagaaaaacatcaatatatcaatcaatcattaacgactgcaaatgagcgattagatagtttaaaacatagcattattgaaataaaaaaagagttacgtttatcagaaaagctttctgatgaattagtggttgaaagtatttcaaccattggtcaaattaaagcgcatgataaatacattactgatttaaatcaacaacgcaataacctgctaaaagatatcaatcgcttttatgaacgtgcacaatctgttactgaaccacatttaaaactatttaaccagatgtctttcttccatgatgtgaaacagtggttaaaaaatgcagaagaacaaaatgaggcttggaataaaaatcaaactgaaacgcaactactcaataatgaattaaagcaattgaagtcacgcttaagtgaaacgaatcaaatgattaaggaattatttgattatattgatgtagataatgaagaagattattatacacatcatcatcattttgaaacatatcaaagtgatttaaatcgatttaatgatttaaatcaatatttagaaaatcaaaattacacttatgaaatgagttcgcaattaagtgagaaaactactgctcaactagaagaagaagatcatagattggctaaacaagttgacgattacaatgatcaatttttagaaatgcaagcagaagttagtgatttaaatgctcagattaatcatatggaaacagatagaactttagcacaattaagacatgaatattatagcttaaaaaatagacttaacgatattgctaaggattgggcaagcttaagttatatgcaagctttagtggaagaacatatcaagcaaataaaagataagcgtctaccacaagtgattaatgaagctgtatctatttttaaaaatttaacaaatggtacttacaatatgattcattatactgaaaatcataaaatacatgtaaagcattctaacggacaagtatttgagccagttgagttgagtcaatctacaaaagaattattatatgtggctttacgtattagtcttattaaagtattaaaaccgtattatccattcccagtgattgtagatgatgcatttgttcattttgataaatatcgtaaagaacgtatgttgaaatatttgagagaactatcagaacattatcaaatactttattttacttgtacaaaagatcatgtcataccggctaaagaagtattaactttaaataaattacaggaaggcgggaaaaaatga

SEQ ID NO: 2788 - DNA, 1197 bp, Staphylococcus epidermidis
atggttaaatttatacactgtgctgatttgcatttggacagtcctttcaaatctaaaagttatcttagtccaaatatttttgaagatgtccaaaagagtgcatatgaaagttttaaaaacatagtcgacttagctttaaaacaggaagtcgattttattattatagcaggtgatttatttgatagtgagaatcgtacattgcgtgctgaagtctttttaaatgaacaatttgaaagattaagaaaagaacaaatatttgtttatatttgccatggcaaccacgatcctcttacttctaaaataacaagtcagtggcctaataacgtatccgtattttcaaatcaagtagagacatatcaagctatcactaaatcaggagaaacaatttatattcatggattcagctatcaaaatgatgcgagttatgaaaataaaatagacgcatacccatcaagtcaaggtcagaagggcatacatattggtgtattacatggaacttatagtaaatcttcggtgaaagaccgttatactgaatttaggttagaagacttaaatcaacgtttataccactactgggcattaggacatatacaccaacgtgaacagttaagtgatatgccagtcattaactatccaggtaatatccaaggaagacatttcaatgaattaggagaaaaaggttgtctattgatcgaaggtgatcatcttaaactcactacacaattttatcctactcaatttattaaatttgaagaagctacaattgaaactgatcatacatctaaacaaggactttatgatgttattcaatcttttaaagataaagtaagaactgaagggaaatcattttatagattgaacgtacgcattaatagtgaagacatgattgcaccacaagatttaattcaattaaaagaaatgattactgagttcgaagaaaacgaaaatcaatttgtttttattgaagatttaaatcttcaatatgttcaaaatgacgaaatgccaatagttaaagagttttcaccagaattacttgatgatgcgtcactttttgattcggcaatgactgatttatatcttaatccaagggcttctaagtttttagatgactataatgaatttgataaagttgagttagtcaatcatgcagaaagacttttaaaggatgaaatgagaggtgaacaaaatgataattaa

SEQ ID NO: 2789 - DNA, 345 bp, Staphylococcus epidermidis
atggcagtaaatttatatgattatgcaaatcaattagaacaagctttaagagatagtgatgaatataaagctattaaagatgcatttgctaaagtaaaagaaaacgaagaatcaaaaaaattatttgatgaattccgtgaaactcaaatgagcttccaacaaaaacaaatgcaaggggaagaaattcctgaagaagatttacaaaaagctcaagaacaagctcaagctatagaaaaagatgaaaatatttctgaattaatgaatgctgagcaaaaaatgagccaagtattccaagaaattaatcaaatcatcgtaaaacctttagatgaaatttacgctgactaa

SEQ ID NO: 2790 - DNA, 1134 bp, Staphylococcus epidermidis
atgatgcataccatattattagtagtttttatgataattttaggagcaataattggtggagtaactaatatgattgcaattaaaatgttatttcatccatttaaaccgtattatatttttaggtttcgtattccatttacaccaggtttgatcccaaaacgtcgtgaggaaatcgccagaaaaattggacaagttattgaggaacatcttattactgaagaactaattcgacagaagttaaatcaaccgcaatcgagaaatatgatacagcaattaatccataaacaaataagtaaattaaaaaatgatgatgtgacaataaaaaaaataactggatttttagggatagatgttaatgagttggtagattataaattgactactaaatttctaaataaactaaacttttggtatgagtcaaataaatatagaaagttaagtgaaatattacctcagtctttcttagatcaatgtaaaggtcaaatagaatatattactgacttcctatgtgaaagggctagaaattatttaagttctgaaaaaggtgaacgtgatatttatgaaatgttagacacatttttcaatgaaaaggggcgcatcattggtttactacaaatgtttatgacaaaagaaagcattgctgacagaattcaacatgagttgattagactaactcaacatcctcaatctcaaaaaataattactaaagtattaaatgatgagtatgaaacatttaaagataagaacttagatgagatcattaaagaacaacaatttaaaaattatagtcaattagtacttaatgaattaaaaacttatttaaatataaaagataaaacagagagaccactcaaacaagttgttccgcagtttattcaattcctagaagatgatacatcaaaacgtatgactgattttattattaaaggtacttcaaaacatttaacaaacattatgaaaaagattaatttacgtcaattagttgaagaacagattaatacatttgacttaaagtatattgaaaatctaattattgatattgccaacaaagaattaaaattaatcatgacattagggtttatattaggaggtatcattggatttttccaaggagtgattgcaatctttgtctaa

SEQ ID NO: 2791 - DNA, 465 bp, Staphylococcus epidermidis
atggatagacagagtttcacagatttaattcaaacaaaatttaagatggtccgtatagaagcaggctatactcaagatacaatggcacaaaccattggactttccaaaaaaacattggttcaaattgaaaaagaaagagttctaccaaactggactacatgcgtatcaatttgtgctttattcagagattcagatgtattaaatagtacattcggttgtgatccgctcgaaattgtacaaacaatttctagaaaccattgtgcttatccaaatcactcaacaacaagtgatatttactggaatactattgatacacgtaatggtttcattttacaaagtaataaagtaagtaacatttatcgtgttctcaataatgaaaaacagccaatctttggtacttcaaaaatgagggaagctgaaacttacttcaatagaaatgctaaagaagaattaatacacgtataa

SEQ ID NO: 2792 - DNA, 624 bp, Staphylococcus epidermidis
atgcataaagtcattctcgtcgatgatcactatattgtaaggcaaggtttagagtttttattatcaactgtagatgatttatcagttttaaagggttttaaagatggcgcaacatttttatcttatttaaaaaacaatgaaagaccggacatcgtgcttttagacttagtaatgccagagatgaatggtatagaaattactgaaatactcaaacaacaatatcctgaaatcaaagtattagtacttacgagctatgtagatgatgaacatgttatttcagctattgataaaggagctgatgggtatgaaatgaaagatgttgaacctcaaaagttaattgagacaattcataaagttttgcaaggtgaacgtatcatacatcctcaagctaaaagcgtgattaaggccgtatcaaaaaaaccgcattatacgaataagttatctaaacgtgaaaaagaagtgcttaaggaaatggttaaaggtaaaacaaataaagaaattgcaagagcattgtttgtatcagaaaagacagtaaaaacacatgtgagtcatatttttagcaaactagaagtctccgatagaactcaagccgctatttatgcaatggaaaataaattgatttaa

SEQ ID NO: 2793 - DNA, 1134 bp, Staphylococcus epidermidis
atggagaaaccaactagacttgcattacttaaggaaatagccgaatttctaaatgaagaaactgaaatatatagcatgatgcaaggagctttgcgtttacttataaatgggagcgacttttcaactggttggattttctatattgatgaagaggggcaccatgatttagtttcctctgtagatttacctgaagctttatctaaaaaccattgttactatttgacaaatggttcttgttggtgtgtgcaagcatatcaaaatcataaattaactaaagcttctaatataataaattgttctagaatcaatttagctaatcatgcttatgataaagaaacgaatcatattactcatcatgctactgttccattgcagtctgggagcgaaagattcggtttgcttaacgtagcatctcctaacaaagaacattatagtgaagaagacttagaactattagaatctgtagcatttcaaattggttcagctataaagagaattcagctaactaataaagaaaaagaaaatgccaaaattaatgaacgtaatcgactagctagagacttacatgattcagtaaatcaaatgttattttctttaaaattaacggctcacgctgcaaaagggataactactgacgagcaagcgcaaagagcttttaagactattgaggaaacaagtcaaaatgcagtaaatgaaatgagagcactgatttggcaactaaaaccagttggattagaacaaggcttaattcatgcattacactattatagtaaaatgttaggattagatttgaaagttactattaatggactaatagatttatctaatgatatcgaagaaaatgtatacagaattattcaggaagcaatgaataatgttattaagcacgctaaaactaacaaagtttatcttgatttatcacaaaatgttgattatcttgaggtagatattagagataacggtcaaggttttgacacgcaatcaattaatacgtttttatttaatggtttaaaaaacataaagcaacgtacacagtatttgaacggtaaagttactatagaatcaaaaataaatcagggcactcggatttatattaaaattccattgaagttaaaggagcatccttatgcataa

SEQ ID NO: 2794 - DNA, 825 bp, Staphylococcus epidermidis
atgaaatttacaatacctaaacaatttaacgattatacattgagagagattttccaatatttaaaattacctaaaaaagacttacatcaactgaatatgtctaaagaaattttaattaataaagagtacggtacattattaaataatgttaaaactggtgatcatgttgagataccaacccctaatgaagtaagtaattatttaccaagttatcgatatgctcaaatttattacgaggatgatgacttggccattgtcatgaaaccaaaaggtgttaaaacgcatcccaatgatttaaaagagagcaacacacttatgaaccatgtgatttacactgttgatagtgaatatgttgagcccatacatcgactagatcaagaaacagtaggtttattgatagttgctaaaaatccgcttatgaaaaaaatcttagaccgaatgttagaatataatgaaattacgcgtatatataaagcaaatgtcaaagcgttgttacctattaagccacaaacgatagatatgcctattggtaaagataaatttcattcaaacaaacgaagaatttccaacacaggtcaacgtgcaatcactcacattattaactctaaaatgattaaagaaggtgtatgtcaactcgacattaaactagatacaggtcgaacacaccaaattcgtgtgcaccttgctgagattggccatccagttattggggatccactttatggaacttcaacattacgacaattagagctaaatagtcatcaaattgaatttactcatccactgactcaagaaattatttctgtaagtctagatgataaatag

SEQ ID NO: 2795 - DNA, 1386 bp, Staphylococcus epidermidis
atgtcagtcagaattgaacatgatacatttggagaaattgaagtaccagaagacaaatattggggtgcacagactgaaagaagtaaacgaaattttccagtcggcaaagagcatatgcctatacaagtcatttacggatttgctcaactaaaaagaggtgcagccttagcaaatcatgaattaggaaaattgagtgatgaaaaaaagaacgccatcgtttatgcttgtgatcgtattttaaatggagaactagataatcattttccacttgtgatttggcaaacaggtagtggtactcaaagcaatatgaatgtaaatgaagtcgtaagctatgtagctaatgaataccttaagaaacatggaagtaaggaaactatccatccaaatgatgatgtaaataaatctcaaagttcaaatgatacatttcctacagctatgcatgtcgcattgttccatgaagttgaaactaagttagagccagcacttaaccatttacgtcaaacttttaaagaaaaagaagaccaatatcaatcaatcattaaaattggacgcacacatttgcaagatgcaacgcctattaaactaggtcaagagataagtggttggcgctatatgttagaaaaatgtgagcaattactatcagaatcaaaaaagcatattttaaatttagcaattggtggaactgcagtaggaacgggaattaatgctcatccagaatttggtcataaagtagccaaatatatttcccaaaacacagggtatgctttcgtatcatctgaaaacaaatttcatgctttaacttctcatgatgaaattgtacaattacatggaacattaaaagcgctagcgacagatttaatgaaaattgcaaatgatattagatggctagcctctggaccgcgtgcaggtcttgctgagatttcaattccagaaaatgaacctggatcttctattatgccaggaaaagtaaatccaacacaatgtgaaatgttaactatggtagcagtacaagtcatggggaatgatacgacggtaggtatcgcaagttctcaaggtaattttgaactaaatgtatttaaaccggtaattatgcataacactttacaatctatttacttattagcagatggaatgaatacctttaataaaaactgtgcaattggtattcaaccgatagaagaaaatattaataattatttaaatcaatcattaatgctagttacggcactgaaccctcatattggatatgagaaagcagctcaaatagctaaaaaggcacacaaagaaggacttactttaaaagaatctgcaatagaaagtggatatgtaactgaatcacaatttgaagagtggataaaaccagaagatatggtagacccacattga

SEQ ID NO: 2796 - DNA, 405 bp, Staphylococcus epidermidis
atgttaagaaaatactggattcactttgtcatagttactgttatagtgagtttgatatctataaaaggttttccacttgctttaggcgctttatacttgccactactgttcaaaattgtacaacttcagcttaatttatcaaaaggtcttattgataatgtcaatgtacatacatttataaaaagtaatcagtctggtgtggtgatcagtgtgatttgttgtctattaataacgggagttttgacatacaccttggatgatttttataatgaattaccaggatttttaggtgttttagtaagtataagtcctgttactctcactataggcgtgatactatttgttttaactgcaattgctattgttcaggctactaaagcaaaatatcaacaatctaagaattaa

SEQ ID NO: 2797 - DNA, 180 bp, Staphylococcus epidermidis
atggcgaacaaaaaagattccaaattaaattatcatgaagaagaaaatgctatggttaccgacttagatgatttaaaagaattaggaaaagaaatggaacagatttcacaggaaaatgatgaagaaaaattaaatcaatctcatgataacgaagttcgttcagatttaaaaaaacagtaa

SEQ ID NO: 2798 - DNA, 600 bp, Staphylococcus epidermidis
atggcaatgaattttaaagtatttgataatagtgaaaaagtagcagaatatactgcagatattctacgtaagcaatttaataataatccaactactattgcaggatttcatttgagcaaagaacatgcaccagtgtttgatgaacttaagaaaaatgtagaaaatcatacagttgatttcagtcaaataaatattttagattatgatgataatcattcttattatgaggctttgggtgtgccaacaggccaaatttattccatttcttacgaaaatgatgcaattgactttatctcagataagattaagactaaagaaaataaaggcaaactgacaatgcaagtccttacgattgatgaaaatggtaaacttgacattagcgttcgtcaaggtttgatggaagctagagaaattttcttagttattactggtgctaataaacgcgatatggtagaaaaactttaccgtgaaaatggtaagactagttttgaaccatcggatttaaaagcacaccgtatggtcaatgttatcttagataaagaagcggctgcaggcttacctgaagacgtaaaagagtacttcactgcacgttttgcataa

SEQ ID NO: 2799 - DNA, 471 bp, Staphylococcus epidermidis
atgacaaatcatattgtactatatcaaccagaaataccagcaaatacaggaaatattgcacgtacttgtgcgggtactttaacccatcttcatctaattaaaccactcggctttagtacggaagacaaaatgttaaaacgtgcaggacttgattattgggagcatgttaatattacatatcacgatagtattgaggaattttttgctaatacagaaggtcattactatttattaacaaaatttggtaaacagacctacagcgattttaatttttctaatactaatgaggattattattttatctttggtaaagaaactactggtcttcctgaatgggttaaggagaaatatgcaaaaacagctttaagaattccaatgagtgacaatatacgctctcttaatctttctaatactgctgctttactgatttacgaagctttgagacaacaagattatcctaacctttcataa

SEQ ID NO: 2800 - DNA, 1131 bp, Staphylococcus epidermidis
atgaacaataaactaaaaaaagaaattatagactttgctcattctataggcattgatagtattggatttactactgcagatccttttgatgaattgaaacaaaaattagaggaataccatgcaaaagggtatgcatcgggttttgaggaatcaaatatatcattacgtacagaacctaaactaagcttacctagcgcacgttctattattgcaatagctgtgggttatcctaataaacttaaaggtgcaccaaaaagtgttaaaggtgatcgtagaggcatgtttgcaagagcatcatggggccaagattatcatagcattatgcgtaagagacttgataaattagctgatttcatcaaagaaaaagtacctgatgtcgaaatccaatcgatggttgataccggtgtattgtcagatagagcagtagcagaaagagctggattaggattcacgggtaggaatggatttgtgatttctcctgaattagggacttggtcttaccttggtgaaatgttagtaagtataccgtttgaacctgatgatcctttattagatagttgtggtgactgcacaatttgtgttgatcgctgtccaacaggtgcacttgttggaaatggtcagttaaatagccaaaaatgtattagttttttaactcaaactaaaggttatcttcaagatgaatatcgatataaaattggaaatagattatatgggtgtgatacatgtcaacaagtttgtcctaaaaatcgtggtattaatactcagcatgatgatattgtcttggaacctgaaattttgaaaccacgtcttgtacctttacttcaaatgagcaacaagaaatttaaaagtacatatgggcatttggcaggtgcttggagaggtaaaaaaccaatacaaagaaatgctattatagctttggcacattttaaagaagaaagtgctataccagaactaaaagaagttgcattaaatgatccaagacctatgattagaggtactgcatattgggcaattggacaaattttagaggatgatgctatatcttttattgatgagcattatgaaaatgagattgaagaagtgcagctcgaaatgaaaaaaggtttgcaaatgaggagagaacaaaaatga

SEQ ID NO: 2801 - DNA, 156 bp, Staphylococcus epidermidis
atgtataaagactataacatgactcaacatactctactaatggaaacttcagctcttatccccgcgaatgatatttcacgacatgtaaatgatattgcagaaacaattcccgatactgaattcgatgaattcagacattatcgttgcttaatataa

SEQ ID NO: 2802 - DNA, 723 bp, Staphylococcus epidermidis
gtgattaatattaaaaatttaaataaaaaatttggagcaaatgaagtattgagagatattaatcttactgttgaaaagggtgaagtggttgcaataattggaccatctggaagtggtaaaagcactttactccgttgtatgaatttgttagatgtaccttcaaaaggtaaagttatatttgaagataatgaattaactcaacataatgttcatttagataatttacgacaaaaaatgggtatggtatttcaaaattttaatttatttcctcataaaaaggtcattgaaaatgtaatgttggcaccacttttattacataaagatagtaaagatcaattaaaagagaaagctttatatttacttgaaaaagtggggcttaaagacaaagcagattcatatcctaatcaactgtctggaggtcaaaaacaaagagttgctattgcaagagctttggcaatggaacctgatgttatgttatttgatgaaccaacatctgcacttgatcctgaagtagtaggggatgttttaaaagtaatgagacaattagcgaatgaaggtatgacaatggtgattgtcacgcatgagatgaactttgctaaagaaataagtgataaagtagtatttatggccgatggtgttgtggttgaatctggtacaccacaaaacatatttgaaaatcctcagcacagtcgaactgaaaattttttatcacgagtgttataa

SEQ ID NO: 2803 - DNA, 1458 bp, Staphylococcus epidermidis
atgaagtgtttgttcaaaatgctatcaatcataataataatgttaagtactttcaccttattcatcagtccgagtacatatgcaaatgaagatgaaaattggactaaaataaaaaatcgaggagaactaagagttggattgtcagctgattatgcacctttagaatttgaaaagacgatacatggtaaaactgaatatgcgggtgtagatatagaattagctaaaaagattgcgaaagataatcatctaaagctaaaaattgtaaacatgcaatttgatagcttattaggtgcacttaagaccggtaaaatcgatattattatctccggtatgacaacaactcccgaacgaaaaaaagaagtggattttacaaaaccttacatgattacaaataatgtgatgatgattaaaaaagatgatgcaaaacgttatcaaaacatcaaagattttgaaggcaaaacaattgctgcgcaaaaagggacagatcaagaaaaaattgcacaaactgagattgaagatagtaaaatttcttcactcaatagattacctgaagctatattatctttaaaaagtggaaaagtagcaggtgtagttgttgaaaaaccagtaggtgaggcatatttaaaacaaaattcagaactaacattttcaaagattaaatttaatgaagaaaagaaacaaacatgtatagctgttcctaagaactctcctgtacttttagataagctaaatcaaacgattgataatgtaaaagaaaaaaatttaattgatcgatacatgacaaaagcagccgaagatatgcaagatgatggaaattttatttttaaatatggcagttttttcattaaaggaattaaaaatactattttgatttcattagtaggtgtggtattggggtctattttaggctcttttatagctttattaaaaataagtaaaattagaccattacaatggatagcaagtatatacatagaatttttaagaggtactcctatgcttgtgcaagtgtttattgtattttttgggactactgcagctttggggttagatatttcagctttaatttgtggtactattgcgcttgttataaattcttcagcctacattgccgagattattagagctggtattaatgctgtagataaaggacaaactgaagctgctagaagtttaggattgaattatagacagactatgcaatcagtagttatgccacaggcaattaagaaaattttacctgcattaggtaatgaatttgtaaccttgattaaagaatcgtctatagtttccacaattggagtgagtgaaatcatgtttaatgcacaagttgtacaagggatatcttttgatcctttcacaccattgttagttgcagcattactatatttcttacttacatttgcacttacacgtgttatgaattttattgaagggagaatgagtgccagtgattaa

SEQ ID NO: 2804 - DNA, 1059 bp, Staphylococcus epidermidis
atgagtcattcgcaaataaatggaaagcgattttttaacaacattttgaatgcagtaggagcaggggtagttattgcactgttacctaatgccttattaggtgaattattaaaattcttcaaagaaggtaatcatgtactagaaacgatttttcagctagtaacaatcatacaatcttttatggcttttattataggggttcttgctgcgcaccaatttaaatttaaaggtacaggtgctgcaattattggtatttcagcaatgctaggttctggagctgtacactataatggacaaacaattgaattaaaaggaattggagatattataaatgtaattttagtagttatattagcgtgtttcatttatatgtttttagaggggaaattaggttccttagaaatgattattttacccgttttagttcctgtaattagtggattaatagggttattaacattaccttacgttcaagttattacgcagtcactaggaaaattagtaaacaggtttacagaattaaatccattattaatgtctatattaatttgtgtaacattttctttattaatggtaactccaatctcgttagttgctatagcaacagcaattaaccttactggtttaggaagtggtgctgcaaatatgggaatagttgcagcttgtgtaacctttttatttggatctttaagagttaattctcttggagttaacgtggtattactcataggtgctgctaaaatgatgattcctgtgtacttaaagcatttaattatagccataccattgacaattaatggagtcatatgtggtataattgcttatattttaaaaattaaagggactgcactatctgctggctttggttatactggattggttggtcccatcaatgcattaaaccgtatgtcgggaaatccatctatgaatattattttattaattattggatatttcgtgataccatttgcaggtgcctttattgtacacaaaatttgtaaaaaagtattaagtacatacagtgatgaaatatataaatttgaaatctcaaaagattaa

SEQ ID NO: 2805 - DNA, 849 bp, Staphylococcus epidermidis
atgaaaaagagatttttatctatatgtacaatgacaattgcagcgttagcaactactacaatggtaaatacttcttatgcaaaaaccgatacagaaagccataatcattcctcacttggcacagaaaacaaaaatgttttagatattaatagttcgagtcataatatcaaaccaagtcaaaataaaagttacccaagtgtaatattacctaataataatagacatcaaatttttaatactacacaaggtcattatgatgctgttagttttatttatataccaatagatggtggatatatgagtggttcaggtgttgttgtaggtgaaaatgaaatattaactaataaacacgttgttaatggagctaagggtaatccaagaaatattagtgtccatccttcagctaaaaatgaaaatgattatcctaatggcaaatttgtgggtcaagaaatcataccgtatcctggtaatagtgatttagcaatcttaagagtgtcaccaaacgaacataatcaacatattggtcaagtagttaaacctgcaactataagtagcaatacagacactagaattaatgaaaacatcactgttactggttaccctggtgacaaaccattagccacaatgtgggaaagtgtaggtaaagttgtctatattggtggcgaggaattaagatatgacctaagtactgtaggtggaaactctggatctccagtatttaatggtaaaaatcaagttattggaatacattatggtggcgtagataataaatacaatagcagtgtttatattaatgatttcgttcaacaattcctaagaaacaatatacctgatataaatattcagtaa

SEQ ID NO: 2806 - DNA, 477 bp, Staphylococcus epidermidis
atggaaaaccaaaaacaatatcctatgactcaagaaggttatgagaaacttgaacaagaattagaagaattaaaaacggttaaaagacctgaggtagttgaaaaaataaaagtagctcgttcatttggagacctatctgagaactctgaatatgatgctgctaaagatgaacaaggctttattgaacaagatatacaacgtattgaacatatgattagaaatgcgttaatcattgaagataacggtgataacaatgtagttcaaattggtaaaacagttacttttattgaattacctggagatgaagaagaaagttatcaaatcgttggttctgctgaagctgacgcatttaaaggaaaaatttctaacgaatctccaatggcaaaagcactaatcggtaaaggattaaatgatcaagtacgtgttccacttcctaacggtggcgaaatgaatgttaaaatcgttgaaattaaataa

SEQ ID NO: 2807 - DNA, 624 bp, Staphylococcus epidermidis
atgaatcagacaacgattattggcattgcagggggttcaggctctgggaaaaccacagttactaatgcaatcatgaagaatttagaaggtcatagtgtcgcactcttagcacaagattattactataaagatcaatcacatttaacttttgaagaacggcttgaaacaaattatgaccacccatttgcatttgataatgatttacttattcataatttaaaagatttaagaaatggaaaaccagtagaggtacctacgtacgattattctcaacatacacgtagtaaagaaacaattgcatttgatccaaaagatgttattatcgtagaaggtatctttgctttagaaaacaacacattacgagacatgatggatgtgaaaatttatgtcgatactgatgctgatttacgaattttacgtaggcttacaagagatactaaagagcgtggtcgtacaatggaatcagtaattaatcaatatcttaatgtagtaagacctatgcatgagcaatttattgaacctacaaaaaagcatgctgacatcataattccagaaggaggcagcaataaagttgccatagatattatgactactaaaatccagtcactcgtaagcaaaaaatag

SEQ ID NO: 2808 - DNA, 1269 bp, Staphylococcus epidermidis
atgaaaactttagaagaagttaaatccaaaacccaaaagataatgaaaaagcctgaactacttgcaccagctggtaacttagagaaacttaagattgctgttcattatggtgcagatgcagtgtttttaggtggccaagaatatggattacgttctaatgctgataattttactatggaagaaattgctgaaggtgtagactttgctaatcgttatggcgctaaaatttatgttacaacgaatattattgcacatgatgaaaatatggagggactagaagagtacttacaaaaccttgaatctacaggtgctactggtatcatagtagcggatcctcttatcatagaaacttgtaaaaaagttgcgcccagattagaaattcatttatcaacacaacaatcactttcaaattataaagctgttgaattttggaaacaagaaggattagaccgtgttgtacttgcacgtgaaactggtgcaatggaaatgagtgaaatgaaagaaaaagttgatattgaaatagaagcgtttatacatggcgcaatgtgtatcgcatattctggtcgttgtactttaagtaatcatatgacagctcgagattctaatcgaggtggttgttgtcagagttgtcgttgggactatgatttacttgaagttgatagtgatggagaattagatttatattacgacaatagtgatgttactccttttgcaatgagtcctaaagatttaaaattaatagaatctatacctcaaatgatggaattaggcatcgattcgttaaaaattgagggacgaatgaaatctatacattatattgccacagttgtttctgtatatcgtaaagtcattgatgcatatgccgaggaccccgaaaactttaaaataaaaacggaatggttaatggaattaaataaatgtgccaatcgtgacacagcaccagctttctttcaaggtacacctggttatgaagagcaaatgtttggtgaagaacagtctaaaaaatcatcttatgatttttgtggcctcgtgctagattatgaccatgaaacacaattagcaacaatacagcagagaaatcattttaaaccaggacaagaaattgagttctttggtccagaaattgatagttttaaacaagttgttgaagcgatttacgacgaagaaggtaattctttagatgcagcacgtcatccattacaaattgtacaaattaaagtagataagcctatttattctaacaacatgatgagaaaggaaattggctaa

SEQ ID NO: 2809 - DNA, 924 bp, Staphylococcus epidermidis
atggttgaattattagttactcctaagtcaataactcatatggaaacactaatagataaaggtgcagacgcatttgttattggtgaacaaaaatttggtttaagactgccgggagaatttaatcgtgatgctatgcaagaagctgtagcattagcccataaaaataacaaaaaagtatacgctgctgtgaatggtattttccataattaccacttagatgccttggaagactatattaactttttacatgatattcaagtagatcgcattatatttggtgatccagctgtcgttatgtatgttaaacaacacgagcatccaattccattaaattgggatgctgaaactcttgtaacgaattattttcagtgtaattactgggggaaaaaaggtgcaaatagagcagttttagctcgagaacttagtttagatgaaataattcatattaaagagcatgctgatgtagagatagaagttcaagttcatggtatgacttgtatgtttcaatccaaaagaatgctattaggaaattattatactttccaagagcgacaaatgaagatagaacgccaacatgatcatggagacttattattatatgatgaagaaagagataataaatatccagtttttgaagattataatggtactcacatcatgtctccaaatgatatctgtttaatagaagaattagagcctttttttgaggcaggaatagatgcgtttaagatagatggtattttacaaagtgaagaatatataaatgtagtcacagagcaatatcgagaagctatagatttatttaatgaagatccggatgcatatgaagatgaaaaattcatgctcgttgatcctatagaagaaatacaacctgaacatcgtccattcgacgaaggtttcttgtataaacaaacagtatattaa

SEQ ID NO: 2810 - DNA, 636 bp, Staphylococcus epidermidis
atggattcaaatcaaaaatatttagcacaattacatcaatcaattgatactgaaatcgaagaacttagagtttatgctgaagaaaatcaagttcctattgtagataaattaacacttgatttgataagacaactcattcgaatgaatagaactaaaaatattttagaaattggtacagccattggttatagttcaatgcaattcgctaatatttcgaaagatataaatgtaacaacaattgaacgaaatgaagacatgattcatcttgcaaaaaagttcataaaaaagtatcgataccagaatcaaatccgtttaattgaatacgatgctttgaatgcatttgaacaagtcaatgacaaacaatatgatatgatatttatcgacgcagctaaagcacaatcaatgaaatttttccaactatatacaccgttattaaaaaaaggtggaattgtggttactgataatgttttatatcatggatttgtttcaaatatagacgttgttcgttcgagaaatgtgaaacaaatggttaagaaagtgcaacagtacaatgaatggttgatggagcaatctcaatttacaacaaactttataaatatggatgatggattagcaatatctataaaaggagaatga

SEQ ID NO: 2811 - DNA, 309 bp, Staphylococcus epidermidis
atgacagaacataatcacgatgctgagttaacaataaataatgaagaggaattacttacgttatatgatgaaaacggaaatgaagttttataccgtaaaatgttagaattttatcatccagaattcaaaaaagaatatgtcgttcttgcagaagaaggtgcacaatcagatgacgaagatatgattgaacttgtaccaatgataaatgaacctgatgagtctggtgatggtgggaaattagtccctattgaaacagatgaagaatgggatatgattgaagaagttgtaaatactgagattaacgaataa

SEQ ID NO: 2812 - DNA, 429 bp, Staphylococcus epidermidis
atgctaaagcataaaattttaggactagatgttggaagtaaaactgttggcattgctataagtgaccttatgggttggactgctcaagggttagacacactccgtatcaacgaagaacaagatgatttaggaattgatcaactcgtgaagattattaaagataatcaagttggaactgttgttattggcttgcccaagaatatgaacaattcaataggttttcggggagaggcttcaataaaatataaagaaaagttacaagagtctatcccttctattgatattgttatgtgggacgaacgtttaagtacaatggctgctgaaagatctttacttgaagcagatgtttcaagacaaaaaagaaaaaaagtaatagataaaatggcagctgtatttattttacaaggctatttagattctattcaataa

SEQ ID NO: 2813 - DNA, 261 bp, Staphylococcus epidermidis
atggaaaattttgataaaacaatgaaatttagttatgaagaaattccaaaggaagatgtcaaatcagttcttcagaatgtccatcgtacattagaagaacgtggatataatgcagttaatcaaatagtgggttacttattatctggagatcctgcatatattccacgtcaaaatgaagcaagaaaccaaatacgtcatatagaccgtgatgtaattatggaagaactcgtttcaaactatttaaaagagtctaagaattaa

SEQ ID NO: 2814 - DNA, 2631 bp, Staphylococcus epidermidis
atgaaaaaaatgaaagctagtgaaattaggcaaaaatatttggatttctttgtagaaaaaggacatatgattgaaccgtctgcaccacttgtacctatcgatgatgattcattattgtggatcaattctggtgtagctaccttgaaaaaatactttgacggacgcgaaactcctaaaaaaccaagaattgtcaattctcaaaaagctatacgaacaaacgatatagaaaacgtcggttttactgctcgccatcatactttttttgagatgctaggtaatttttcaatcggtgactactttaaacatgaagcgattgaatttgcttgggaatttctaacaagtgataaatggatgggcatggaacctgagaagctatatgtgactattcatcctgaagatactgaagcttttagaatttggcatgaagacattggtttagaggaaagtcgcatcattcgaatagaaggcaatttttgggatatcggggaaggaccatctggaccaaatacagaaattttctatgatcgtggatcggcttatggaaaagatgatcctgctgaagaaatgtatcctggtggtgaaaatgaaagatatttagaagtttggaatctagtgtttagtgagtttaatcacaataaagacaatacttacacaccactaccaaataaaaatattgatactggcatgggattagaacgtatgacgtctatctcacaaaatgtaagaacaaattatgaaacagacttatttatgcctataattaaggaagtagaacatgtttcaggaaaaaaatatttaattgatgatgcacaagatgttgcatttaaagttatcgcagaccacattagaacgatttctttcgcaattgctgatggcgcattaccagctaatgagggtagaggatatgtattaagaagattattacgcagagcagttcgctttagccaatcattaggaattaatgaaccatttatgtataaacttgttgatatagtcgctgatatcatggaaccatattatccaaatgtcaaagacaaatccaactttattaaacgtgtcattaaatcagaggaagaacgcttccatgaaacgcttgaggaaggtcttacgattttaaatgaactgataaaagaagcgaagaatagtgatcaggttattaaaggtcatgatgcttttaagttatatgatacttatggattcccaatagaattaactgaagaattagcaactcaagaaaatttgtctgttgatatgcctacttttgaacaggaaatgcaacaacagagagatcgagctagacaagctcgacagaattctcaatcaatgcaagttcaaagtgaagtactaaaaaatattcaagatgaaagtcaatttgttggctatgaaactacggactatcaatcattaataactcatatcatatacaatggtgaagaagttaaacatgttgaagcaggagaaacaatttactttattttaagagaaacgcctttctatgcagtaagtggtggacaggtcgcagataagggaacagttggtaatgagagctttgaaataaatgtaactgacgtaactaaagcgcctaatggccaaaacttacacaaaggtattgtgcaatttggtgaagcaacacagaacgcgaaagtagaagcacgtgttaacaaagaggatagacgacttattcaaaaaaatcatagtgctacacatttattacatgctgcattaaaagaagtattaggagatcatgttaatcaggctggttcgttagtagaacctgaaagactacgttttgatttctcacattttggtcctatgacacaagaagaaattaatttagtagaacgtagagtaaatgaagaaatttggagagctatcgacgtccgtattcaagaaatgagtattgaagaagccaaatcaataggcgctatggctttatttggtgaaaaatatggagatattgttcgcgttgtcaatatggcaccattttcaatagaattgtgcggtggaatacatgtgaataatactgcggaaattggtctctttaagattgtgagtgaatctggaacaggtgccggtgttagaagaattgaagctttaacaggtaaaggtgcattcttacatcttgaagaaattgaaacacagtttaataatattaaaaatcatttaaaagttaaatccgataaccaagtagttgaaaaagttaaacaacttcaagaagaagaaaaaggactgcttaaacaattagaacaacgcaacaaagaaataacatcactaaagatggggaacattgaagaacaggttgagttgattaataatttgaaagttttagcaacagaagtagaaattccaaatccaaaagcgatacgttcaactatggatgactttaaatctaaacttcaagatactattatagtgttagtcggacaagttgatggaaaggtttctgtaattgctacagtaccaaaatcacttacaaatcaagtaaaagctggagatcttatcaaaaacatgacaccaattattggtggaaaaggtggaggtcgtcctgatatggctcaaggtggcggaactcaacctgaaaaaataacagaagcattacgctttattaaagattacattaaaaatctataa

SEQ ID NO: 2815 - DNA, 2433 bp, Staphylococcus epidermidis
atgtctgaccctacactttttgattattcaatgatcaaaggtacagttgatgctattttatttcaaaatacggataatttttatactgttctaaaagtagatactatagaatcaaatgaaaaatttgatagtatgccaactgtggtagggtttcttcccaatgtagttgaaggcgatgtttatacttttaaagggcaagtcgtacaacatccacgttatggtaagcaattaaaggctgaaacatttgaaaaagaattacctcaaactaaagaagccattattagttacttatcaagtgatttatttaaaggcatcggtaaaaaaacggctcaaaacattgtaaatacactaggtgaaaatgctataaatgatattttaactcgtccagaaatcttagaaagtgtacctagtttaccaaagaagaaacaaaagcaaattgctgatcagattaatgcaaaccaagaatctgagaaaattatgatacgtttacacgacctagggtttggtccgaaattatcaatggctatatatcagttctatatgggtgatactttaaatgtcttagataaaaatccttaccaattagtatatgacattaaaggtattggttttaataaggctgaccaacttgctcgaaatgtcggtattgagccacattcacctgaaagattaaaagcagcattattatttacgttagaagaagaatgtatcaaacaaggacatacatatctacctcgtacaattgttatagaaacaacacaaaatttactcaatgaagatattgagaaaccaattgaaacagagcaattactagaaatcattgacgttttatcagaagagaaaaaattaatatctgaagctgatcaggtatcaattccaagtttatactattcagaattgaaaagtgtgcaaaacttataccgaattaaaacaaacacatctaaattaaaagaaatagaacagtctgatttacaaatacatattggtgatattgagtcacaaaatgaggttaattactctgcctctcaaaaagaagcgcttgaaacagcaataaattctaaaattatgcttttaactggtggtccgggtaccggtaaaaccacagtcattaaaggtatagttgaattatatgcagaaatacatgggctctcgctcgattatgatgattacaatgaagatgattatccagtagtgttagctgcacccactggtcgtgcttctaagcgccttcacgaatcgacaggtttagaagcaatgacaattcatcgtttaatcggttggaaccaagatacacaaccacaggatattttagaaaatgagatcaatgcaagactcattatcatcgatgaaatgtcaatggtagatacttggttgttccatcaatttttaagcgctgtgcctttagaagcacaaattgtatttgtcggagatgaagatcagttaccatcagtaggtccaggacaggtatttaaagaccttattgattctgaaataataccgcgtgttaatcttaccgaagtatatcgtcagcaagatggttccagtattattgacttagctcaccgtatgaaattaaatgaacctatcgatattactaaacgttatcatgatcgtagttttattcgttgtggtacgaatcaaattccagacgttgttgataaagtagttaaaagcgctgtagctaaaggctatgatatgagtgatatacaagttttggctcctatgtataaaggtaacgctggtattaagagacttaaccaagttctacaatctattcttaatccgaagcaacaagatgatcgtgaaatagaatttggtgaagctgtgtttagaaaaggggataaagtacttcagttagttaatcgacctaatgataatatatttaatggggatataggtataatagtaggtatattttgggccaaagaaaatgctctaaataaggatgtgttagttgtagattttgaaggtaatgaaattacatttactaaacaagatttaatggaactaacacatgcatattgtacatctatccataaatcacaaggttcagaatttcctattgtaattatgcctattgttagacaatattataggatgttacaacgtcccattctttatacaggattaactagagctaaacaatcacttgttttgcttggtgaacaagaagcatttgatataggtttaaaaacaaatggacaaatacgattaacgcaattaaatgatttgttaaaatcgtattttggacaaaacaaaaataatttaactacaaataaacaaacgattaacgaacaaaaagaaaataacaatcatctggatttgaaaaatgaaaaagaaaatgatatccaattaaacgagtcgacaattttccaaatcgatccaatgattaatatgggggaaatgacgccatatgacttcgttgaacgttga

SEQ ID NO: 2816 - DNA, 669 bp, Staphylococcus epidermidis
atgcacgaacaaagtaagatataccaaaatattaaagatggtaaattagataccgctttgaaagacttgtttgaaaatatagaagaaaatccggccattgttgaaaattatattaacgcaggtattgtattatcagatgttggagaaattgaaaaagcagaacgttttttccaaaaggcattaactattgaacctgaaaatggtgctgtttattataacttggcaaatatttattataatgaagaacgttataacgaagcgataaagctatatcaaactgcactacaatatgaagtagcgaaaaaagattgtaattatatgattggtatgtcgtttaatcaactaggtgcttttaaagaagctttaccatttttaatgactgcagctgaaatggacgatgatagagatttagaagtacagtttcaatatgggttagtactatgccaactcgaaatgtttgatgaagctattaaacaattaaataaggttctttctatcgattcacagcacgtagatggtatatataatcttggtttagcaacatatatgaaaaatgaaaatttagatgaagcaattgcatattttgaacaagcaatatcaattgatgaaaaacatttacttagtcaacatgcattaaagacattcaaaacaatgaaagaggaggaataa

SEQ ID NO: 2817 - DNA, 1119 bp, Staphylococcus epidermidis
gtgtctaacaaagatatacgcgtagttgtgggcatgtctggtggagtggatagctctgttactgcatacttgttaaaagaacaaggttatgatgtaataggtatatttatgaaaaattgggacgatactgatgaaaatggggtgtgtacagccactgaggattataatgacgtgattgcagtatgtaatcaaattggcatcccatactacgctgttaattttgaagaacagtattgggataaagtatttacttattttcttgatgaatataaaaaaggtcgtacacctaaccctgatgtgatgtgtaataaagaaattaaatttaaagcatttttagaacatgctttaaaattaggcgctgattatgtcgctacaggtcattatgctcgtatacgtcgtcatgatgatgggcatgttgaaatgctaagaggtgttgacaataataaagaccaaacctactttttaaatcaattatcccaagaacaactatccaaagtcatgttcccaattggagatattgaaaaaagtgaagtaagacgtattgcagaagagcaaaatttagctactgccaagaaaaaagactcaacaggtatttgttttattggtgaaagaaactttaaagaatttttatcacattacctaccagctcaatctggtgaaatgttgacattaaatggaaaaaaaatgggacagcatagtggattgatgtattatacaattggtcaacgtcacggcttaggcatcggtggagatggagatccatggtttgttgtaggtaaaaatttaaatgataacgtattatatgttgaacagggatttcaccatgatgcactttatagtgattatctcatagcttctgattattcatttgttaatccaagtgaaattgatttggaaaaaggttttgaatgtacagctaaattccgttatcgccaaaaagatactaaagtttatgttcaacgcgaaaacgagaattctattagagtaacttttgctgaaccagttagagcgattacacctggtcaagcagttgtcttctataatcaagaagtatgtttaggtggcgctacaattgatgatgtttataaaaacgaaggtcaattaagttacgttgtataa

SEQ ID NO: 2818 - DNA, 1143 bp, Staphylococcus epidermidis
atggaagtatacgcagattatgctgcgactacgccagtaaaaccagaagtaatagatgctatgatggaaatatatcaatctcattttggtaatccatcgtcaatacattctattggtagagatgcacgcaaatatcttgatcagtcacgtcgtacagttgcacaattgttgggagcgaatccgaatgaagtaatatttacaagtggtgcaacagaatcgaataacactgctattaaaggattagtgaaagcgaatgaacaattaggtaatcatattattactaccaaaattgaacaccattcagtattacacgtatatgagcaacttgaaaaagaaggttatgatgttacgtatctagatgtagatgatactggtgcagttgatttagaccaattaaaagaaacaattaatgatagaacaattttagtatcaattatgtttgtaaataatgagattggaacagtacaaaatatttatgatattgaagatattattggagacactcatgcgttattccatgttgatgctgttcaagcaattggacatttagatttagattttcataattttaaaattgatacaatgagtatttcagcacacaaatttggtggtcctaaaggtgttggtctactattagtaaaagagcatacaccaatagcatataatcaacttggtggtgaacaagaaaccaaacgtcgagcaggtacagaaaatttacctcaaattgttggattaacaaaggcacttgaattagctataaccaatcaagatgtaaataatgttcatttaatgaatttaaaagaattatttttagttcagttacaggaaagggcaattccatttgaattaaacggttcaatgacagattcaacgggtcatattttaaatatttattttccatttatagatgttgaaacaatgttaacattattggatttagcccatgtatatgtatcttcaggttctgcttgtacagcaggttcaacgactccatctcatgtacttgcagctatgtttgaagatgaagaacgagcaaaacattcagtacgttttagctttaatgaacaaacaacaacgcaagaaattaaatatattgtagctgaaattcataaaatctatcataaatttaaggaggaatcatag

SEQ ID NO: 2819 - DNA, 996 bp, Staphylococcus epidermidis
atgaaaaatataaaattatctgcgttaaacttagtacctatacgtgaaggtcaagaagataaagatgcaattaacgatatggttacactcgctcaagcattagatgatttagattatgagcgctactggattgcagagcatcataatgctccaaatttagttagttcagctacttctctattaattcaacatacattagaacatactcattctatcaaagtaggttctggaggcataatgttaccgaatcatgcaccactagtcgtagcagaacaatttgggacattggaaacattattccctcaacgtgtggacttaggattaggacgtgctcctggtacagatatgatgacagcgagcgcattaagaagagatcagcataatggtgtttatcaattccctgaagaagttgaacaactgcaacaatattttggaccgagtcatcaacaagcatatgtacgtgcttatcctgcggtagataaaaatgtcccaatgtatattctaggttcatctacagattctgcacatttagctgcacgtaaagggttaccatatgtttttgcaggacattttgctccacaacaaatgaaggaagcactacaaatttatagagaattatttgaaccttcagaagtacttgataaaccttatgtaattgtttgtttaaatacaattgtgtcagattctgatgaacaagcagaatatttagcaactacgatgtctcaaataatggtaagtataacacgaggaaaaatgcaacctgtccaaccaccaacagatgatttaaaggccctattaacaccacgcgaatatgaattagcacaacaacgtttaaaagggtcacttataggatctgaagatacagttaaacaaaaacttgaatcgttcataaaagagtacggggatatcgatgaacttatggcaattagttatatctatgatcaagacaaacaaatagaatcatatcgaagattagaacgtgcaattaaatcatag

SEQ ID NO: 2820 - DNA, 144 bp, Staphylococcus epidermidis
atgagttttatggataaagctaaagaagctgctgaaaaatttaaagatagtgataacgaacaagttaacaaagtaaaagataaaataaatgaatatacaggtggcgaagacaacaaagataaaaaggacaaaaaggataaataa

SEQ ID NO: 2821 - DNA, 423 bp, Staphylococcus epidermidis
atgaaaatatcaacaaaagggagatacggattaacattgatgatatctcttgctaaaagagagggtcaaggttgtgtatcactaaaaacaattgctgaagaaaataaactaagtgatttatatcttgaacaattagtaggccctttaagaaatgctggattaattcgaagcgttcgaggtgctaaaggtggttatcaacttagagttccatcagaagaaattactgcaggagatattatccgattactagaaggaccgattacgtttgtagaaagtattgattcagaaccgcctgcacaaaagcaactatggattagaatgagagatgctgtaagagatgttttagatcatactacattaaaatatcttgcagattacaaagatacgaatgaagacttagagggttatatgttctatatttaa

SEQ ID NO: 2822 - DNA, 1272 bp, Staphylococcus epidermidis
gtgagtacagaaccattagcctctcgaatgagaccgaaaaatatagatgaaattatatctcaacaacacctggttggtccgaaaggtataataagaaggatggtagatactaaacgtctttcttctatgattttttatggtccacctggaattggtaaaacaagtattgcaaaagcaatttcaggcagtacacaatttaaattcagacaattaaatgccgtaacaaatacaaagaaagatatgcagctaattgtcgaagaagctaagatgtcaggacaagttatcttactattagatgaaattcatcgtttagacaaagctaaacaagattttttattaccacatcttgaaaatggcaaaattgtattaataggtgcaacaacttcaaatccttatcatgcgataaatccagcgatacgatctagagcacaaatatttgagctttacccattagatcaagatgatataagattggcattagatagagctataaatgataaggaaagaggtttaagtacttatcatcctattgtagatgaagatgctatcgaatatttttcaacgcaaagccaaggcgacgttaggagtgcattaaacgctttggaattagctgtactaagtgctcatattggtgaagaaaacgaaagacatattacattagatgacgcaaaagattgcttacaaaaaggtgcttttgtaagtgataaagatggagacatgcattatgacgtcatgagcgcttttcaaaaatcaattagaggtagtgatgtcaatgcagcactccactacttagcacgtctaattgaagctggtgacttacctacaatcgtacgtcgattacttgtaattagttatgaagatgttgggttagcatcacctaatgctggtcagaggactttagcagcaatacaatcagctgaacgtctaggttttccagaagcacgaattccccttagtcaagctgtaatagaattatgcttatcacctaaatcaaattctggtatcacagcaatagataaagctcttggcgatataagaaatggacatataggtcaaataccggattatctgaaagacggtcattattcaggtgctaaaaagttaggacgggctataggttacaaatatcctcataactatgaaaatggtcatgttgtacaacagtacttaccagaaaaattaaaaaacagagtgtattatgaaccaaaaaccacatcaaaaagtgaacaacaatttaaaacaatttacgataacttacgaaataaaacataa

SEQ ID NO: 2823 - DNA, 777 bp, Staphylococcus epidermidis
atgaaacatcaattttcaaggaatgaattagcaataggacaagaagggctgaacttactaaaaaataagactgttgcagttttaggtgttggtggcgtcgggtcatttgcagctgaggcattggctcggactaatatagggcacatcatacttatagataaagatgatgtcgatattacaaatgtgaacaggcaaattcatgcactgacttcaactattggtcaaagtaaagtcacgctaatggaagaaagaatcaaattaataaatcccgattgtaaagtaacttctttgcatatgttttataccgaggaaacatacaaagatatcttcaataattatgatattgattattttattgatgcaagcgatacaatcatttataaagttcatctcatgaaagagtgtttagaaagaggaattgagttaatttcaagtatgggtgcagcaaataagactgacccgacacgttttgaaattgcagatatttcaaaaacacatactgatcctatggctaaagtaattagaaatcgtttaaaacgccttggtattcgtaaaggtgttaaagtagtattttctgatgaaagtcctattgttattcgcgaggacgtaaaagaaacagtaggagataaaaatgcaatcaatagaaaagggcaaatgcctccatcttctaatgcatttgttccaagtgtagtaggccttatttgtgcaagctacgttgtcaacgatattttaaaagatatacctgtaaggcgaattaaagataaaggacaaaattaa

SEQ ID NO: 2824 - DNA, 1767 bp, Staphylococcus epidermidis
atgaataaaagaacaacgtattgtggtttagtcacagaagaatttttaaacgaaaaagtaacattaaaaggttgggttcataacagacgagatttaggtggattaatttttgttgatttaagagatcgtgaaggtattgtccaaatagtttttaatcctgacttttccgaagaagcattgcaagttgctgaaacagtacgctcagaatatgtagtcgaagttgaaggtgtagtaacaaaacgtgatgctgaaactattaacccaaaaatcaaaacaggtcaagttgaggttcaagtttcaaatattgagattattaacaaatcagaaacacctccattttcaattaatgaagaaaatgtaaacgttgatgaaaatattcgattaaaatatagatatttagatttacgtagacaagaattagcgcaaacttttaaaatgagacatcaaactacgcgttctatccgtcaatacttagataataatggcttcttcgatattgaaacaccagtattaacaaaatcaacacctgagggtgcgcgagattatctagtaccttcccgtgtacacgagggtgaattttacgcgttgccacaatcaccacaattatttaaacaactattaatgataagtggttttgataaatattatcaaattgttaaatgtttccgtgatgaagacttacgtgcagatcgtcaaccagaattcactcaagttgatattgaaatgagttttgtcgatcaagaagatatcatagccatgggtgaagatatgttacgtaaggttgtaaaagatgtaaaaggaatagacgttagtggcccattcccacgtatgacatatgcagaggctatggaccgttttggttcagataaacctgacactcgtttcggtatggaacttatcaatgtgtcacagcttggtaaagaaatgaattttaaagtttttaaagatacggtagataacaacggcgaaattaaagcaattgtcgcaaaagacgctgcaaataaatatacacgtaaagacatggatgcattaacagagtttgtaaatatatatggtgcaaaaggattagcttgggttaaagttgttgatgatggtttaagtggcccaattgctagatttttcgaagatgttaatgttgaaacacttaaacagttaacagaagctaaacctggagatttagtaatgtttgtagctgataaacctaatgttgttgctcaaagtttaggggctttaagaattaaattagcaaaagaattaggtttaattgatgaatcaaaattaaatttcttatgggtaactgattggccgttattagagtatgatgaagatgcaaaacgttatgtagcagcacatcatccatttacttcacctaaaagagaagatatcgaaaagctagacactgaacctgaaaatgtacaagccaacgcttatgatattgttctaaatggttatgaacttggtggtggttctataagaatacacgatggtgaattgcaacaaaaaatgtttgaagtattaggatttactaatgaacaagctcaagaacaatttggtttcttattagatgcttttaaatacggtgctccacctcatggtggcatcgcgttaggtttagatagacttgtgatgttattaacaaatagaacaaacttgagagatacaattgcattccctaaaacagcatcagctacatgtcttttaactgacgctccaggagaagtatctgataaacaactccaagaactctcactaagaatcagacactag

SEQ ID NO: 2825 - DNA, 1275 bp, Staphylococcus epidermidis
atgattaagatgccaagaggtacccaagatatcttgccgcaagattctgctaaatggcgttacattgaaaatcgattacacacattaatggaattgtataattataaagaaataagaacgccaatttttgaaagtactgaactttttgcaagaggcgtgggggattctactgacgttgttcaaaaggaaatgtatacatttaaagataaaggggatcgtagtttaacattacgtcctgaaggaactgcagccgttgtacgttcatatattgaacacaaaatgcaaggtgaacccaatcaacctatcaaactttactacaatggtcctatgtttagatacgaacgtaaacaaaaaggaagatatcgccaatttaaccaatttggtgtcgaagcaataggagcggaaaatcctagtattgatgctgaaatactcgctatggttatgcatatatatgagtctttcggattaaagcatttaaagttagttatcaatagtattggtgatagtgaatcacgtaaagaatataacgaagcattagtaaaacattttgaacctgtgattgatacattttgttcagattgtcaatcaagattacacactaatcctatgagaattttagattgtaaaatcgatagagataaagaagcagtaaaaaatgcaccccgtatcacagattatctcaataatgattctaaatcttattatgaacaagttaaattacatcttgataatttgaacatatcttatgttgaagatcctaacttagttcgtgggttagattattatactcatactgcctttgaattaatgattgataatccagagtatgatggagctatcactacattatgtggtggtggtcgatataatgggttgttacaattattagatggtccagatgaaacaggtattgggtttgcactaagtattgaaagattattgatggcacttgatgaagaaggtatttcattagatgtaagtgaagattttgatttatttgttgtgacaatgggagaagatgccgatcgttatgctgttaagttaatcaatgatttaagaagaaatggaataaaagtagataaggattatctaaacagaaaaattaaaggacaaatgaaacaagctgaccgtcttaatgctaaatatacagtagtaattggagatcaagagcttgaaaataatgaaattggtgtgaaaaacatgatttcaggcgaatcagaaaatgtacaattagacgaattggttaattattttaaaagtagaaaggaagtctaa

SEQ ID NO: 2826 - DNA, 876 bp, Staphylococcus epidermidis
atgaagaaaatagattcatggctaactaaacatggtctaaaaaatcgacttacgctcgtagtaattgtaatttttattatatttttaattttactttttatgtttgttaatttaagtgatgaagatacaggtcaaattactataactgagaatgctgagttaagaacaggacctaatgccgcctatcctgttatttataaaatagaaaaaggcaaaagttttaagaaaatagatcgaaaagggaaatggattgaagttcaaaatcacgctggcactgagaaaggctgggttgctggttggcacacaaatttgaacattccagctgatcaatcactttcgtcaaaccctctaaaaggaaaaacaattgtacttgaccctggtcatggtggaagtgatcagggcgcctcaagtagtacaccatctaaaagtctcgaaaaaaattacacacttaaaactgctaaagaattaaaaaagttattaaataaggaaggtgctcatgtaaaaatgactcgttccaatgataaatatgtgtccctagatgatagaaatataaagggtgacgcatttattagtatacataatgatgcgcttgattcttcaaatgccaatggagtgactgtttattggtttaaagacaagcaagaatcacttgcacaaactttaaattctgcaattcaaaagaaggcattattgacaaatcgaggttctagacaacaaaattatcaagtgttgagacagacagatataccagcagtactgttagagttaggctatataagtaatcctactgatgaatcaatgattaatgatcaattacatagacaagtggttgaacaagctattgttgatggtttaaaacaatatttctcgtcctag

SEQ ID NO: 2827 - DNA, 453 bp, Staphylococcus epidermidis
atgaagataattgtacaaagagttaaaaatgctagagttacgaatgatacaattgataaccaaattaataaaggctattgtttacttgtaggagtaggtcaaaattctactgaagaggatgtaaaagtcatcgcaagaaagattgctcatgcacgtctctttgaagatgaaaatgacaaattgaatttaaatattcaacaagttgaaggagaaattctttcagtttcccaatttactatatacgctgatgttaaaaaggggaatagacctggattctcaaattctaaagctccagaacaagctaaagacttatatcaaaaatttaataaagaattagaaggttatggcttaattgtcaaaacaggtgagtttggaacacatatgaatgttgaaattaataacgatggacctgtcacattgatttatgaatcgcaggatgggaaaataatatga

SEQ ID NO: 2828 - DNA, 2190 bp, Staphylococcus epidermidis
gtgaataacgagtatccatatagcgcggatgaggtgctttataaagctaaatcatatttatcaacaagtgaatatgaatatgttctcaaaagttatcatatagcttatgaggcacataagggtcaatttagaaaaaatggcttaccttatattatgcatcctattcaagttgcagggattttaacagagatgcgtttagacggacccactattgtcgctggatttctacatgatgtgattgaagatacttcttatacatttgaagatgttaaagatatgtttaatgaagaaattgcacgaatagtagacggagtaactaaacttaaaaaggttaagtatcgctctaaggaagaacaacaagcagaaaatcatcgtaaactatttattgctattgctaaagatgtacgcgtaattttagtgaagttagcagatcggcttcataatatgagaactttaaaggcaatgccaagagagaagcaggtaagaatctctaaggaaaccttagaaatctatgctcctttagcacatcgtctcggaatcaacacgataaagtgggaacttgaagatacagcgctgagatatattgacagtgtgcaatatttccgcatcgttaatcttatgaagaaaaaacgtagtgaacgcgaagcttacattacaaatgcaatcaataaaattaaaaacgaaatgactaaaatgaatctttcgggcgaaattaacggtagaccaaaacatatttacagtatataccgcaaaatgataaaacaaaaaaagcaattcgatcaaatatttgatttgcttgctatacgtattatagttaattcgataaatgattgttatgcgacacttggtttagttcatacattatggaaaccgatgcctggacgttttaaagattatatagctatgcctaagcaaaatatgtatcaatcactacataccactgtagttggacccaatggcgatcctttagaaatacaaattagaacgcacgaaatgcatgaaatcgctgaacatggtgttgctgcacattgggcttataaagaaggtaagacagttaatcaaaaaacacaggattttcaaaataagcttaattggttaaaagaacttgctgaaaccgaccatacttctgcagatgcgcaagaatttatggaatccttaaaatatgatttacagagcgataaggtatatgcatttactccagctagtgatgttatagagttaccttatggtgcagtaccaattgattttgcttatgcaatacacagtgaagtaggaaataaaatgattggtgctaaggttaatggtaaaatcgtacctatagattatgttctacaaactggtgatattatagagattcgtacaagtaaacattcttacggtccaagtagagactggttgaaaattgtaaaatcttctagtgccaaaagtaaaatcaaaagtttctttaaaaaacaagatcgttcttctaatattgaaaaaggtaaatttatggtagaagcggagattaaagaacaaggattccgtgttgaagatattctaactgagaaaaatttagaagtcgttaatgaaaaatatcattttgctaatgatgaagatttgtacgcagctgttggattcggtggtgttacatcaatacaaatcgtcaataaattaactgaacgacaaagaatattagataaacaaaaggcattaaatgaggcgcaggaagttacaaaatctgtacctataaaaaaagatattaccacagacagtggtgtatatgttgagggattagaaaacgtcttaatcaagttatcaaaatgttgtaatcctataccaggtgatgatattgttggttatatcactaaaggacacgggattaaagttcatcgtacagattgtccaaatataaaaaatgagacagatcgattgatttcggtagagtgggtaaaatctaaagattcaacacaacaatatcaagttgatttagaagttactgcatatgatagaaatggcttgcttaatgaagtattacaagctgtaaattctactgctggaagcttgattaaagtatctgggcgttcagacattgataaaaatgcagtaattaatattagtgtgatggtaaaaaatgtcaatgatgtgtaccgtgtcgttgaaaaaattaaacaactaggtgacgtttatacagtatctagagtttggaactag

SEQ ID NO: 2829 - DNA, 519 bp, Staphylococcus epidermidis
atggatttaaaacaatatgtttcagaagtaaaagattggccttcagcaggtgtaagctttaaggatataacaactataatggataatggtgaagcatatggatatgctacggatcaaattgttgaatacgcaaaggaaaaaaatatagatatagtagttggtcctgaagccagaggattcataatagggtgtccagttgcttactcaatgggtattggatttgctccagtacgtaaagaaggaaaactacctcgagaagttattcgttatgaatataatttagaatatggaactaacgtattaactatgcataaagatgcgattaaaccaggacaacgagttttaattactgatgatttactagctacaggtggaacaattgaagcagcaataaaacttgttgaacaattaggtggtatagtagtaggtattgcgtttattattgaacttaaatatttgaatggtattgataaaataaaagattatgatgtgatgagtttgatttcatatgatgaataa

SEQ ID NO: 2830 - DNA, 2274 bp, Staphylococcus epidermidis
atgattaaatcaaaatataattgggatataactcaaccgaatacctttataagtgagagtagcagtgatcaatttaaactttcacctatagtaaaaaaggtattagagagtaaaaatattgtggataatcaggagattcaaaatctatttgaaggcactaacattagtcatgattatatgttattaagtgatatgcaaaaagccattgatcgtattaaattagctatcgatcaaaatgaacgaatactagtatatggtgactatgatgcagatggtgttacatctactacaattctagtgtctactttacgtctacttggcgctcaggtggggtggtatattcccaatagatttacagaaggatatggacctaatgaattagcatttaaaaatgcttatgacgaagggatttccttaataataactgtagataatgggatacagggacatcatgaaataagtaccatacaagaattaggtgtagatgttatagtgacagatcatcatgaaataggagaaactttacctgatgcttttgcaattgtacatccgatgcatcctaattttgaatatccttttaaatatttatgtggtgcgggtgttgcttataaattggcccaaggattgatagagcatccacctcaacatttcatagcattagctgccataggtacaattgcagatttagtatcattgacagatgagaatagatatattgtaaagcaaggattaaagatattaaacaatcatacaccatcgtccataaaggctatcttaaatcaagcgggttttaatgatgaaataacagaagaaacaattggttttattattggacctcgattaaatgcggttggtagactagaagatgcatcattagctgctgaacttttattgtccgatgaatttgaagaggcggaatttttagctgaacaagttgaacattttaatcatgaacgtaaagatatagtatctaaaattactgatgaagcattgttattagcagaggaacaaatcaagcaaggccatttgtttcttttacttgccaaagaggggtggcatgagggtgtattaggtattgttgcatctaaaattgtagaaacatatgcactacctacattaattttaaatattgatgaaaatcaaaatcatgccaagggttctgcgaggtcaattgaacaagtttccatgtttgatattttaaatgaccatcaacagttaattgataagtttggtggtcatcacatggctgcaggaatgacaatgtctatcgataatattgaacatttacataaagagctagatatgtggatgaaagaactaactgttaccacttcattagagccttcaataaaggtggatgcacaacttgaagaaaaagaaattaacattaaaaatattaaagatatatttcaattaaggccttttggtacggactttaatagtcctctttttatggttagagatctaattgtcaagtcaacaaagggaattggacaggataataagcatcttaagttaacgcttggtcattcaggtttaactgctttattttggaatcatggacatttggcaagtgaacttgaaccaggtcaaccgattcatataataggaacattgcaaattaatgaatggaatggtaatcaaacacctcaatttatcatcaaagacattgctatagaccaattacaaattttagattatcgtagtaaacgtaaaaatatacaatttaaagaatctgaatcaaatgttgcctatgtcattcatccgaaacttaaaaaaagcaattcacattactatcattatggtgaggctattgatagaccttatgataaaatagtgtttagagatttacctaatactatggttgaaattgaacaaaccttagaacattcacaaatttctcaactatatttagttctgcagcatgaaaagtcaatatattttgaaggtatccctagcaagtcgctttttaaaaagtgttacaaagctttaataaacaaaaaagaaactgacttaattaaagaaggtatgctgctttgtgagtacttaaatattaagccagaaatattaacattcatgcttaaagtctttaaagaattggagtttatttacgacgaaaagggattgattaagataaatccagcgccaaataaacaagatatagaaaatagtcgtatttaccaaatgagacgagcacgtatggaagtagaagaacgtcttctctatgatgattttttaaatataaaagaatggataatatcaaagttaacatag

SEQ ID NO: 2831 - DNA, 117 bp, Staphylococcus epidermidis
atggaaatttcagttcttatccccacacatgatatttcacgacatgtaaatgatattgtagaaataattccagatacagaattcgatgaattcagacatcatcgtggcttaatataa

SEQ ID NO: 2832 - DNA, 2226 bp, Staphylococcus epidermidis
atgacgtataagaatgtagttaaaaatgttaatttaggtctagatttgcaaggtggttttgaagtcctcttccaagtagatcctttaaataaaggagataaaattgataaaaaagcacttcaagctacatctcaaacattagaaaatcgtgtaaatgttctaggtgtatcagaaccgaaaatacaaatcgaagatccaaatcgaattcgtgtacaattagcaggtatcaaggatcaagcacaagcgcgtaaattattatcgacacaagctaatttaacaattagagatgctgaagatcatgttttaatgtctggttcagacattaaacaaggctctgctaaacaagaatttaaacaagaaactaatcaaccaacagttacatttaaagtaaaaagtaaagataaatttaagaaagtaactgaaaagatttctaaaaaacgtgacaatgtcatggtagtttggttagatttcgaaaaaggcgatagttacaagaaagaagctaaaaagcaacaagaaggtaaaaagcctaaatttatatctgcagcgagtgtagaccaacctattaattctagtagtgttgaaatttcaggtggcttcaatgggaaaaaaggtgttgaagaagcgaaacaaatagctgagttattaaatgccggctcattaccagttgatttaaaagaaatttactctaactctgttggtgcacaatttggtcaagatgctcttgataagaccatgtttgcatcaattgtaggtatagcattaatttatttatttatgcttggtttctatcgtttgcctggtttagttgcaatcattgccttaaccacttatatttatttaactttagtcgcattcaatttcatatcaggtgtattaactctacctggattggcggcattagttttaggtgtaggtatggctgtcgatgccaatatcataatgtatgaacgtattaaagatgaactaagaattggacgcacgcttaaacaagcgtattcaaaagcaaataaaagttcattcttaactatatttgattccaacttaacaactgtcatcgctgcagctgtgcttttcttctttggagaaagttcagtcaaaggcttcgcaaccatgttactcttaggtattttaatgatatttgtaaccgcagtattcttatcaagagggttgttatcattactggtatcttcaaacttctttaaaaaacaatactggttatttggtgttaagaagaaggatagacatgatattaatgaaggtaaagatgtacatgatttaaaaacatcatatgaaaggttaaactttgttaaattagctaagccacttatttcacttagtattttaattgtaattattggtttgattatcatttcaatatttaaattaaacttaggtattgatttctcatccggaacaagagcagatattcaatctaaaaatgctataacacaagcacaggttgagaaaactgtaaaatcagttggattggaaccagatcaaatacagattaatggtagtggaaataaaaatgccacagttcagtttaaaaaagatttatcacgtgaggaagacaataaattaagtgctaaggtgaaatctgaatttggagataatccacaaattaataccgtttcacctctcataggccaagagctagctaaaaatgctgtaactgcattaatacttgcttctataggcattattatctatgtttcactaagatttgaatggcgtatgggtctatcttctgtacttgcattattacatgacgtatttatcatcattgcaatctttagtttgtttagattagaagtagatttaacatttattgcagcagtattaactatcgttggttattcaatcaatgatacaatcgtaactttcgaccgtgttcgagaaaatctgcataaagttaaagtaattacgcatactgatcaaattgatgatatagtcaaccgctctattagacaaactatgacacgttctattaatacagtgttgactgtagttgtagttgtagttgcaatattaatattaggtgcaccaacaatatttaatttctctttagcattactaattggattattatctggtgtattctcgtcaattttcattgctgtaccattatggggcatgcttaagaaacgacagtttaaaaagacaaaaaataataaattagtagtacacaaagagaagaaatctaacgatgaaaaaatcttagtttaa

SEQ ID NO: 2833 - DNA, 261 bp, Staphylococcus epidermidis
atggaattaacttcattgattataccaattttattattggtcgtaatgtatttcttattaataagaccacaacaaaaacgtgcaaaagaacatcgtgcaatgattaaccgtgttgaagcgggtcaaaagattactacaatcggtggtattaaaggaactataaaagctgtagatgaaacttctgtaatcattacagtaaatagtaatggaacagaaatgacttttgaaaaaccagctataaaacaagtagatccttcataa

SEQ ID NO: 2834 - DNA, 1140 bp, Staphylococcus epidermidis
atgcctgcagtgacatatgagcatataaaaacatgtaaacaatccggtgccagattaggaattgtacatacaccgcatggatcttttgaaacaccaatgtttatgccggttgggacaaaagcaacagttaaaacaatgagcccggaagaattaagaaacatagaagcaaagattatattaggaaacacatatcatttgtggttacaacctggaaatgatattatcaagcacgctgggggattacacaaattcatgaattgggacggtccaattttaacagattctggtggtttccaagtatttagtttaagtaatttgcgtaaaatttctgaagaaggtgtagaatttagacatcataccaatggctcaaaactatttttgagtcccgagaagtctatgcaaatacaaaatgatttaggttctgatattatgatggcatttgatgaatgtccaccaatgccagctgaatatgattacgtcaaagattcaatcgaacgtacaactcgatgggcagccagatgtttaaaagcacatcaacgccctggagatcaagcactgttcggtattattcaaggtggagaatacaaagacttaagagaacaaagtgctaaagagctagtcagtcttgattttccagggtatgcaataggagggctgtctgtaggtgagccaaaacctgttatgtatgacatggttgaacatacagaacaatttatgccgaaagataaacctagatatttaatgggagtaggttctcctgatgctttgattgaatgtagcattaggggcatggatatgtttgattgtgtattacctactagaattgctagaaatggtacttgtatgacatcaaatggtcgattagttgttaaaaatgctaaatatgcagatgatttaagaccacttgatgaacaatgtgactgttatacatgtcaacattacacaagagcttatattagacatctagttaaagcggaagagacttttggtatccgtcttactactattcataatttacattttctgctaaaattaatggaagatattagacaagccattcgagaagaccgtcttttagattttaaagatgaattctttgaacaatatggattaaatgtagaaaaccctaaaaacttttaa

SEQ ID NO: 2835 - DNA, 1026 bp, Staphylococcus epidermidis
ttgaatatcgaagatttcgattatcatttgccagagtctctcattgcacaaacaccactaaaaaacagagaccaaagtagattgttagttcttagcaaagatactggtgagctgacacacttacattttagagatgtcatccattattttgagcctggtgatacattggttcttaatgatacacgtgttatgcctgctagattatttggcctaaaagaagaaactggtgctaaagttgaaatgctaatgctcacccaaattgaaggtaatgattgggaagttttacttaaacctgcaaagagaattaaaaaaggtcatcgtctaaattttggagatggtaaaatcgttgctgagtgtattgaggaacttgaacagggcgggcgtattatgcgtctacattatgagggtatactccaagaacgcttagatgaattaggcgagatgccattacctccatatattaaagaaagattagatgatcctgataggtatcaaacggtttatgctaaagagagtggatcagcagctgcaccaacagcgggtttacattttactgatgatttgctaaataaaattaaacaaaaaggggtacatatcgcttttattacattgcatgttggattaggaacctttagacccgtaagtgttgaaaatatcgatgatcacgaaatgcatagtgagtattatcaaatgacacaagaaacggctgatttattaaataaaacaaaagaaagtgggaagcgtgtgatatcagttggaacaacatcaacgcgtacattagaaacgatacgtcgtgatcatcctcaatttgttgccacaagtggatggactgatatctttatttatcctggctttgagtttaaagcgatagatgggttaattactaatttccacttacctaaatcaacgttagtcatgctagtatcagcatttagcaataaaaaatatattttaaacgcttatcataaagctgttgaaatggagtatcgattctttagttttggagatgcaatgttaattatataa

SEQ ID NO: 2836 - DNA, 1005 bp, Staphylococcus epidermidis
atggataaaagaatggtcgatcaagaatttcataatgaagatactgacttggaattatcactaagaccaacacaattaaagcagtatataggtcaatcctctataaaaagtaatttagaagtctttatcaaggctgccaaacttagacaagagccactcgatcatgtcttgttatttggtcctccaggactaggtaaaacgacgctatcaaatatcattgctaatgagatggaggtaaatattcgtaccatctcaggaccatctttagaaagaccaggtgacttagcagcgatattatctgggttacagccaggtgatgtgttatttatcgatgaaattcatagattaagtagtgttgttgaagaagttctgtatcctgctatggaagattttttcttagacatcatcatcggtaaaggcgatgaagcaagaagtattcgaatagatttgccgccatttacattagttggagcaacgacaagagccggtagtttaacggggccattaagagatcgttttggtgtgcatcttagattagagtattataatgaaaatgatttaaaggaaataatcacgcgaactgcagaggtcttaggaacggacatcgataaggaaagcgccttagaattagctcgtcgttctagaggtacacctaggatagcgaataggttactaaaacgtgtaagagacttccaacaagtaaatgaagacgatcagatatatattgaaacgactaaacgagcattacaattactgcaggtcgaccaacacggtttagattacattgaccataaaatgatgaattgtattattaatcagtacaatggtggtcctgttggattagatacaattgcagtttcaataggtgaagaacgagtgactatagaagatgtatatgaacctttcttaatccaaagaggtttcttggaaaggactccacgtgggagaaaagcaactgctttagcctatgaacactttaatactactaacgaaaagagggaataa

SEQ ID NO: 2837 - DNA, 603 bp, Staphylococcus epidermidis
atgtatgcatatattaaaggaacattatctcagttgttccctacacatgtagtggttgagacatgtggcataggttatgagatacaaacgcctaattcctatcgttttcaaaaatatcttgaaaaagaagtccaaatttatacttcactaattgtacgagaagatgctcaactactatatggctttattaatgaagaggaaaaagaaatgtttcttagcttaataaaagtgactgggataggacctaaatcagctttagcgatacttgcttcaagtacaccacatgaagttaaattggctatcgaaaatgaaaatgatgcttatttaacacaatttcctgggataggaaagaaaactgcaagacaaattgtgttagatttaaaagggaaggttacaattactgaagaaaatagtgacgatttattacaaactcaagttaatggtaatgaacaaaaccaaataatatctgaagcactattagctttacaagcactgggctattctaaacgagaattaaccaaagtagaaaaatccttaaacaaacataatgtgaatagtgtggatgaagccgttaaaataggactacaaacactagtttcttaa

SEQ ID NO: 2838 - DNA, 456 bp, Staphylococcus epidermidis
ttggacaataaagacaatcgaaaattttatttaattagagaagatgtactaccagaatctgtcatcaaaactttaaaagttaaggatgctttaaaaaataattcgaatttgtccatttatgatgctgtaaaacagttcaatctctctagaagtgcattttacaaatatagagagacaatatttccagtagatgaaaaaatattagatcaaagagaatttactttgattttatatgtaaatgatattgttggaatgttagcccaagttcttaatgcaatctctcaacttcaattatcagtgttgacaattcatcaaagtgttccaattgaagataaagcgacaatcacactatctttaaatgcgagaaattctaatttatccattgatgaggtcattgaatcattaagagagataaatcatgtaactaaagtagacttaataagtatgactatgtaa

SEQ ID NO: 2839 - DNA, 1293 bp, Staphylococcus epidermidis
atgttcgtcgatcaagtgaaaatatctctaaaagctggtgatggaggtaatggcatcactgcttacagaagagaaaaatatgtaccttttggtggtccagctggtggcgacggtggtaaaggtgcttctgtggtatttgaagtggatgaaggattgagaactttattagatttcagatatcaaagacattttaaagctaaaaaaggcgaaaatggtcaaagtagcaacatgcatggtagaaatgcggaagacttagtgttaaaagtaccaccaggtacaattattaaaagtgttgaaagtgaagaagtgcttgcagatttggttgaagatggccaacgtgctattgtagctagaggaggacgcggcgggcgtggtaactcaagatttgctacccctagaaatcctgcgccagattttagtgaaaatggtgagccaggcgaagaattagaagtgactttagagttgaaattgttagcagatgttggattagttggttttcctagtgtgggtaaatctacattgctttcaatagtttctaaagcgaaacctaagataggtgcttatcactttacgacaataaagcctaatctaggtgttgtttcaactcctgatcatagaagttttgttatggcagatttaccaggattaattgagggcgcttctgatggtgtcggccttggacatcaattcttaagacatgttgaacgaactaaagtgattgttcatatgattgatatgagtgggtcagaaggtcgaaacccattagacgattataaaattattaatcaagaattaatcaattataaacaacgcttagaagatcgtccacaaattatagtcgcaaataaaatggatttacctgattcacaagggaatttatcgcattttaaggaacaattagataacgatgtgacagttgttcctgtttcaactattacgagagacaatattgatcaattattatatcaaattgccgataagctcgaggaagttaaagatgttgacttctcagttgaagaagatgagaatttaggtgttaatcgtgtattatataaacacacaccatcagcagataaatttactatttctagagatgatgacggcgcatatgtagtgagtggcaatgctattgaaagaatgtttaaaatgactgattttaatagtgatccagctgtaagaagattcgcaagacaaatgcggtcaatgggtattgatgatgctttaagagagagaggttgtagcaatggtgatattgttagaatcttaggcggagaatttgaatttgtcgaatag

SEQ ID NO: 2840 - DNA, 285 bp, Staphylococcus epidermidis
atgttaaaattaaacttacaattcttcgcatctaaaaaaggggtaagttctacaaaaaacggacgtgactctgagtctaaacgtttaggtgcaaaacgtgctgatggtcaatatgtatcaggtggttctatcctttatcgccaacgtggtactaaaatctaccctggtgaaaatgtaggtcgtggtggcgatgatacattattcgctaaaatcgacggcgttgttaagtttgaacgcaaaggtcgcgacaaaaagcaagtttctgtatacgcagttgctgaataa

SEQ ID NO: 2841 - DNA, 321 bp, Staphylococcus epidermidis
atgattactgttgatattacggttaatgacgaaggtaaggtcacagatgtagtcatggatggtcatgctaatcatggtgaatatggtcatgatattgtctgtgcaggagcatcagcagtcttatttggaagtgttaatgctataatgggattaacatcagagaagccagatatcaactacgaagatgacggcggatattttcatataagaagtgttgatacgaataacaaagaagctcaattaattcttcaagcaatgttagtttctttacaaactatagaagaagaatataatgaaaatatcaaattaaattataagtga

SEQ ID NO: 2842 - DNA, 309 bp, Staphylococcus epidermidis
atgtttgctataattgaaacaggtggaaaacaaatcaaagtagaagaaggtcaagaaatctacgttgaaaaattaaatgctaacgaaggtgactcattcacttttgataaagttttatttgtaggtggcgactcagttaaagttggtgctccaacagttgaaggtgcatcagtaactgcgacagttaataaacaaggacgcggtaaaaaaattactgtcttcacttacaaacgtcgcaaagactctaaacgtaaaaaaggccatcgtcaaccatatactaaattaacaatcgataaaatcaacgcataa

SEQ ID NO: 2843 - DNA, 522 bp, Staphylococcus epidermidis
atgcgtactttttattactttctaataggtatacttctattttatattgataccattatagggcttaccatccccatgcatttcgggaaaattgatattatttttgtaccacatttaactatcatgtacattcttatcatgacggtttaccgaggttttggcgttgctatgtctttagcattctttttcggaatagtaactgatttatattttggaagtatatatggtttatatatgtttggttatatcattttagttgttatagttgataaattttttaaaatcttttatcgagattattctgtattattttttatcattttattatccacaatgtttttagaagtatatgtggctatgatctatggagtaataggtttcattaaatttaatttaatagaatttgtattattaagacttattccaactctcatcattaattttttattactgattatgttatttcctattattattaaatttactaaaaaagtaaaaaacacaattgacagtaaggcatag

SEQ ID NO: 2844 - DNA, 840 bp, Staphylococcus epidermidis
gtgcttaagttttttagaaataacaagctcattgtcgttttatgtgcaatgattatttttattgcattaatagggttatcgatacgttctcagacccaatctccagctgaacaatacgtaggagactctgtatcatttggacaaagagtaatcagttatccaattcaatttgttactggatctattggtgatttatttgaaaaaggaagctcaaaaaaggataaaaataaaatcaaacaacttgaagctaaaaatgaagagttagaatcagaaaataagaaatataaaaaagaacttgatatcaaagatttatcaaaatatgaacctatttctacttcagttattgcgagaaacccagatcaatggatgaatacgatattaatagataagggctccaaagcaggtataaaaaataatatggccgtcatgacaacagaaggattagttggaagagtaaccaaagttaatcagttttcatcacaagtagaccttatttccactcatactcgagcaggaaaattatctgttaatattcatcacggtactaagaatatttttggtttaatcgatcgatacgacaataaaaacgaagaattgatcataagtgatattaataacaaagatagcgttaaaaaaggcgataaagtagtaacaagtggattagcagatcaattaccgagtgggttatatattggtgaagtaacaaaagtcgaaaatgatcaatatgggcttgctaaacaagtacgggtcaaaactggagctgatatgacagatttaactcatgtgtatgttgctaaacgtgatgtcagtactatacctgatgaaggtagtgataattaa

SEQ ID NO: 2845 - DNA, 141 bp, Staphylococcus epidermidis
atggctgaacaatcaaaagaaaaacaagctaatgaacaagcaaaagcgcaaaatctttttgctcgctggagaaaagaagaaacactttatagtgaagatgaaaagaaagataagtcttcaaagaagaaagataaagaataa

SEQ ID NO: 2846 - DNA, 486 bp, Staphylococcus epidermidis
atgagatatatctttagtgttattaaaaatattattgcagtattagcgataatattgattatatatatagctcttcaacatgcaccatttctcaaaaatcaagaatggaacccacttaatgatatgaacaatcatcatcaaaatatcacacagaaagtgagtcaaaaaaataatacactctattcacaacctagtaacgataaaagttacattttaaaagaaaatgatatcatcaataatgttccagcaggtcaaattaagacagtttttaatatgattgataaggcagaatttatgtctgtttcaggtttagaacgtatgggattcaatgacgaatatcttgctggccaacaaggtgacgaatttattatttataaattcggtgatgattatatccgagtttataatactgaattcgaaatgaacgaagacctaaatcaattaaaacaacctattaatttgaagccaattgaagcctatcaataa

SEQ ID NO: 2847 - DNA, 180 bp, Staphylococcus epidermidis
atgagcattttaacgattattttaattgttttgctagtcatcctcttatttaaagttggattatctatattacgctttttgatttcagtaggcattgttttgttatgtatctatttaggttatcaaggtgtattatggttatttgaacattttcaaaacttttcaggttttattcaataa

SEQ ID NO: 2848 - DNA, 681 bp, Staphylococcus epidermidis
ttgagaataaatgaaatggcactgcatgaaaaacctagagaacgtttaattacatatggcgctaaaagtctatccaatgttgaacttttagcaattctcttaaacactggtagaaaaggattttctagtattgacattgcaaacgaattactgaagcaacaatccactattagagatttaaaaaaattgtctataaatgatctactgaaaataaagggcattggactttataaagctgtaatattacaggctgcatttgaactaggtgaacgtattaattctacaagcacttttgacaaagtacagattacacatcctagtgatgttgctagtctgatgatgtcgacaatgaaagatttagagcaagaacattttgttgtacttttacttaactcaaaaaatatagtcacaaaacaagcttgggtatataaaggcacattgaatagttcgattattcatccaagagaagtatttaatattgcaataagagagtcttctaattcaataatagttgtacataatcatccttcaggtgatgtaacaccttcgaaagaggatattactacaacgtatagacttaaagagtgcggagatatattaggtataaatttacttgatcatattattattggtgataataaatttacgagtttagttgaagcggggtattttgataaataa

SEQ ID NO: 2849 - DNA, 711 bp, Staphylococcus epidermidis
atgctattacttgcctatacttgtagcattatatttagttttctttatcaattttgcaatcaaaatatattaaaacttcaatatctttattctaggtctcactgtgatttttgtcatactatcataaaacccttagatttactgcctattataagttttttaaaacttcgtggacaatctcgttgttgtaatcaaccattacaacgtttatatttaatcggagaactcgtttcgtttggtgctattttcctctattatcctactcattttaatatacacttcacattatttttaataactttcctgtttctactgacgatgtgtctttacgatattcactcaatgcatattgatatgagactcttatttgtatacacagtcgtatctgtttttacaacccaaacctattttggtaattttataatgatatttttgatttcacatgttatttatctattcgcatctaaatttatagggtatggagacatattgctttttaatatattgggacttatatttccgttaaattttttcttttttattgttgtatttacgtttatcattggggggatttttgccataattttaaaaattttttcttttaaagatattaaatatttacctttaataccatttatattcttatcattcgtagtaacttcatcagtttatcaccaacttttatttcttttagggggagaattttattga

SEQ ID NO: 2850 - DNA, 1266 bp, Staphylococcus epidermidis
atgaattacctagacagcttgtattggatacacgaaagatctaaatttggtatcaaacctggcgtcaaacgtatggaatggatgctagaacaattaaataatccccaacataaaattagaggtattcatgtgggtggaacaaatggtaaaggttcaactgttgcatacttgagaaccgcattaattgagaacgattactcagttggaacatttacctcaccatttattgaaagtttcaatgaacgtattagtttaaacggtgtaccaattatgaacgatgaaattgttcaattagttgaacgagttaaacctgttagtgaagccttagagatagaaacagatttaggtggggctactgaatttgagattataacaacaatgatgttcctttattttggtgagataaatcctgttgattttgtgataattgaagcaggtttaggaattaaaaatgattcgacgaatgtttttaaacctgtgctatccatactcacaagtataggacttgaccatacagatatcttaggaacaacttatttagatattgcaaaagataaggcagctataattaaaccacatataccgattgtttatgctgtaaaaaatgacgatgctttaaagtatgtgagagattatgcgcttgaacagaacgcaaaaccaattgaattggatcgggagattaccgttgtctcccaagatgatgagttcacatatcggtataaagattatgaattagaaactatcattcttaatatgttaggggaacatcaaaaggaaaatgcagcacttgctattactgctctcattgaattaaatgaaagacaaatcatagaattagattttaataaaatgatagacggtatagaatctgtgaattggacaggtagaatagaacaagtaaaagaacaaccattaatggttattgatggtgctcataataatgaaagtattgatgcgttagtagacacaataagacattattatggaagagataaaattgatattttattttctgcaattaaaggaaagccaattcatagtatgattaacaaattaaatgatattgcatcaaaattctatatagcagattttgagtttccaaaagcattagctaaagaagaaattgccgaagaattgaaattagataatttacatttaattgatgattatgttgattttattgaaaattacgaaggtgatgggctgattattactggaagtttatacttcatcagcgaggtaaaagcaaaaattaattttaattaa

SEQ ID NO: 2851 - DNA, 2631 bp, Staphylococcus epidermidis
atggaaatgaaaccaaaatatgatccaagagaagttgaaaagggtcgttatgaggaatgggtaagtaatggttactttaaaccatctgaagataaatctaaagaggcatatacaattgtaattccgccccctaatgtaacaggtaaattacatttaggtcatgcatgggatactactttacaagatataataactagaatgaaaagaatgcaaggatacgatactttatatctgcctggtatggatcatgctggtatagcaactcaagcaaaggttgaagcaaaacttaatgaacaaggtatatctagacacgacttaggaagagaaaaatttttacagcaagcatgggattggaaagaagagtatgcaacatttattagacaacaatgggctaaacttggcttagggttagattatagtagagaacgctttacgttagatgatggtttaagtaaagctgtaagaaaagtatttgttgatttatataataaaggtattatttatcgtggtgaaagaattattaactgggaccctaaagctagaacagctttatcagatattgaagtcattcatgaagatgtccaaggtgctttttatcattttaaatatccttatgctgatgggaatggatatatagaaatagctactacacgtcctgagactatgttaggtgacactgctattgttgtaaatccaaatgacgaaaggtataaagatgtgattggtaaaacagttatattacctattgtaggaagagagttacctattttagctgatgaatacgttgatattgaatttggttcaggagcaatgaaagttactccggcacatgatcctaatgactttgaaattggtcaaagacatcaattagaaaatattatagtcatggatgaatatggtaagatgaacgataaagctgataaatacaaagggatggatagatttgattgtagaaatcagcttgttaaagacttaaaagaacaagatcttgttataaaaattgaagaacatacacattcagtaggacattctgaacgttctggtgcaatagtagaaccttatttgtctacacaatggtttgtaaaaatgaaacctttggcacaaagagctttggataatcaaaatacaaaagatagaattgactttttcccaggtagatttgaaaatacattcaatcgctggatggaagaaattagagattggacgatttcgcgtcaactatggtggggccaccaaatacctgcttggtatcataaagatacaggtgaagtctttgttggtgaagaagcacctgaagacatcgagaattggatacaagatgaggatgtattagatacatggttctcaagtgcactttggccgttttcaacattaggatggcctgatacaaatgctgatgattttaaacgttattatccgacaaatgcattagttactggttatgatatcattttcttctgggtagcccgtatgattttccaaggattagaatttactgatagaagaccatttaatgatgtattactccacggtttagtcagagctgaagatgggcgtaaaatgagtaaatcattaggtaatggcgttgatcctatggatgttattgacgagtatggcgctgatagtctacgttactttttagcaacaggatcttcaccaggtcatgacttgagatattctactgaaaaagttgaatcagtttggaattttattaataaaatatggaatgctgcccgctttagtttaatgaatattggtgaagattttaaagtcgaagatatagacctaagtggtaatttgtcattagcagatcaatggatattgactagattaaatgaaacgatatctacagtaaccgaattaagtgataaatacgaatttggtgaagtaggtcgtgcgctttataatttcatttgggatgagttctgcgattggtatattgaaatgagcaagatacctatgaatggcgaggacgaatctcaaaagcaaacgacgcgatcagtacttagttatgttttagataaaataatgaaaatgttacatccatttatgccttttgtgacagaaacaatttggcaaagtcttccacatcatggagaaacaattgtaaaagctaactggccaactgttgatcaagcattaatctttaatgaaagtaaacaaacaatggaacaattagttgaaattattaaatctgtccgtcaatcaagagttgaagttaacacaccgttatctaaagcaataccgattttaattcaaactaaagatgaaaagattaaacatacacttatggataacataagttacctacacaaattctgtaatccaagtcaattgactattgatactgagattgaaattccagaaaaagctatgacaactgtagtagttgctggtaaggtagttttgccattagaaggtcttattgatatggacaaagaaattgctcgacttgaaaaagaattagataaattacaaagcgagttagatagagtagataaaaagttatccaacgagaattttgtaaataaagcaccagaaaaaataattaatgaagaaaaagaaaaacaacaacattatcaagaaaaatataatggtgttaaatctagaattgaacaattaaaggcatag

SEQ ID NO: 2852 - DNA, 561 bp, Staphylococcus epidermidis
atgaatgaatgtgcttttaacacaactgatcctatctatatagagtatcatgattattattggggacaaccaatctatgatagcaaagaattatttaagctaatggctcttgaatcacaacatgcaggattatcatggttgacaatattaaagaaaaaagaatcgtatgaacaggcattttacaactttgaacctcaatttatcgcacatatgactgaacaggatattgattatttaatgaaattcccaaacattattcataatcgtaaaaagttagaagcaattgtgagccaagcgaagggatatttaaaaattgaaaaagactatggtagttttagtaaatttttatggtcttatgtaaatcatcaacccataaatatgggttataaaaaacctagagatcgtaaaaaagttgatcaaagagctactcaattatcaaaagatttaaaagcatatggttttaaatttttaggtccagtaaccgtgttctcattcttagaagctgctggattgtatgactcacatcttgaaggatgtcctttcaaaccaaatcatgagtga

SEQ ID NO: 2853 - DNA, 1020 bp, Staphylococcus epidermidis
ttgaagcggaattttattaataatttaatcatattattaattgctattatgttaagtctgttattaaaaatgttacatgtgattttgccatttatgtttggaccaatattagcggcgttattatgtgtaaaagtattaaaattaaaaatacgatggccattttggttgagtcaaattggtttaatactacttggagttcaaattggcactatcgtttttgtcactatcctactaattttattagctttgataattgcattcttttttaagaaaattgcacaagtaaatttagaaactgcaattttaagtgttataccaggtgcgctaagccaaatgttagtgatggcagaagaaaataagaaagcaaatatattagttgtgagtttaacacagacatcacgtgtaatatttgttgttattttagtaccacttatttcgtatttttttcaggataaccatcatgaaatgaatcatactacaatggaagtacccacactttctcagactttaaatatatggcaaataatcatcttattctcaatggtgggaatcatctatataggaatgtcaaaaattaacttccccactaaacaattattagcacctataatagttttaattatatggaatatgacaacacatttaacattttcactagatcattggttgttagccacagcgcaacttatttatatgatacgtattggattacagattgccaacttaatgagtgatttaaagggaagaattgcaatagcaatagcctttcaaaatataatgctcatagtcacaacgtttataatgataataggaatacatttgattactaatgaatccatcaatgaattgtttttaggagcagcaccaggaggtatgagtcaaatagttttagtggctatggctactggagctgatgtagcgatgatttcaagctatcacatttttagaatattttttatattatttgtcattgcgccactaattggttattttattaatgttaaattaaataataaatga

SEQ ID NO: 2854 - DNA, 156 bp, Staphylococcus epidermidis
atgtataaagaatataacatgactcaacatactctaccaatagaaagttcagttcttatccccacaaataatatttcacgacatgtaaatgatattgtagaaacaattcccgatactaaattcgatgaattcagacatcatcgtggcttaatataa

SEQ ID NO: 2855 - DNA, 177 bp, Staphylococcus epidermidis
atgctgagattatttttgattttcatcgcattcatcattaacacgacgataacttatttatggactatcgagggaacatggcccaacttgctatttaaatcattatcattgagcatgataattgtttttatgttctattacattcgttttgttattgaaaataaaaaagaagactga

SEQ ID NO: 2856 - DNA, 495 bp, Staphylococcus epidermidis
atgattagatttgcgcgactagaagatcttcaaggtattttgacaatttataatgatgccatccttaatacaacagctgtttatacgtataagccacaacaattagatgaacgtcttcaatggtatcaatctaaagcaaaaataaacgaacctatatgggtttatgaaaaagaagggaaagtagttggttttgccacttatggttcctttagacaatggccggcctatttatatactattgaacattctatatatgttcatcaacagtacagaggactaggtatcgcttctcaattattagagaatttaattcgttacgctaaagaacaaggttatcgcactattgttgctgggattgatgcatcgaacatggatagtatcgcattgcataagaagtttgacttctcacatgcaggtacaattaaaaatgtaggttataaatttgatcgatggctcgatttatcattttatcaatatgatttatctgattcataa

SEQ ID NO: 2857 - DNA, 612 bp, Staphylococcus epidermidis
atgaagcagtggatgaatagattaatcaccttaataggcgtattgttaatcattttagctatttatttattctcaaagccatatatcgataattatctacatgaaaaagataacgattataaaattgaaaattatgataaaaaggaaaaagaacagacaaagacatctaaatcgacgccaaagataccttccgataaatctaaaatggctggttatatagaagttccagatgcacaaataaaagaaccagtataccctggtccagcaacaccagaacaactcaatagaggtgttagttttgcagaaggtgacgaatctcttaatcaacagaatatttcaattgctggtcatacgtttacagatcgttcgcactatcaatttacaaatttaaaatcagccaaaatcggtagtaaagtgtattttaaaactggaaatcaaactagaaagtataaaataactaaaatacgtgatgttaagcctacagaggttaaggtattagacgaacatcctaataagaaaaatcaattaacattaattacttgcgatgactataacgaagaaacgggtgtttgggaaacaaggaaaatattcatagctacacaaattaactaa

SEQ ID NO: 2858 - DNA, 810 bp, Staphylococcus epidermidis
atgattaaagccattgcggtagatatggatggaacatttcttgacacaaataaacagtttgatcgaaatcgttttgaaactatttttaaagaattaatagataaaaatattaagtttatagctgcgagtgggaatcaatttgcaaagctaaaatcaatttttggagatagggaaatgttctttatatctgaaaatggagcagtcatctataaaggtaatcaactttacaattatcgaagttttgatcagtatatttttcaaaaagttgtaaattatttaaatttgaatcaaaagataaacaatttgattatttgtggtgtaaaaagtgcatatattttaaaagaaacaagcgaagcatttaagcaagatgcacgtacatattatcaccaactaatagaggttgactccttacaaacattacctgatgatgattatgtgaaaattgctttcaatataaatcgtcagactcatccagacttagatgagaaattagctcttaagtttaaagacgatattaaactagtatcaagtgggagagatagtatagatgttattatgccaaatatgactaagggtcaagctttgtctagattattaaaagaatggcaaatgcctgcttcacatttaatggcatttggagatgcaaataacgataaagatatgttggagcttgccgaacatagttatgttatggctaatagtgaagatcaatcattatttgatatagcgagtcatgtggcaccttccaatgatgaacaaggcgtactatcaacaatcgaaaatgttgttctcggttattccaataaataa

SEQ ID NO: 2859 - DNA, 993 bp, Staphylococcus epidermidis
atgacaaaaattatgtttttcggcacaagagcatatgagaaggacatggcattacgttggggaaagaaaaataatatcgatgtcactacatcaacagaacttttaagtgtagatactgtcgatcaattaaaagattatgacggtgttacaacaatgcagttcggtaaattagaacctgaagtttaccctaaattagagtcctatggtattaaacaaattgcacaacgtacggctggatttgatatgtatgacttagaacttgcaaaaaaacatgaaattattatctcgaatatacctagttattcacctgaaacaattgctgaatattcggtatctatcgctctgcaactcgtacgaaaattcccaacaattgaaaaacgtgtgcaagcacataatttcacatgggcgtcccctattatgtctcgtccagtaaaaaatatgactgtagcaatcatcggtacagggcgtattggtgctgcaactggtaaaatctatgctggttttggtgcgagagtagttggttatgatgcatatcctaatcattctttatctttcttagaatataaagaaacagtagaggatgcaattaaagatgctgatattatctcattacatgtacccgctaataaagatagtttccatttatttgataacaatatgtttaaaaatgttaaaaaaggtgccgttttagtcaatgccgcaagaggagctgtgataaacacgcctgatttaattgaagcagtaaataatggtacattatcaggtgctgccattgacacatatgaaaatgaagctaattatttcacatttgattgttcaaatcaaacgattgacgacccaatattattagacctaattagaaatgaaaatattttagttacacctcatattgcctttttctccgatgaagcagtacaaaatttagtagagggtggtttgaatgcagcattatcagtaattaatactggcacatgtgatacgcgattaaactaa

SEQ ID NO: 2860 - DNA, 663 bp, Staphylococcus epidermidis
atgaatcagatgaatcaaacgattattgatgcattccattttagacatgcgacaaaagaatttgaccctacgaaaaaaattagtgatgaagattttaatacgattttagaaacaggtagattatctccaagttcactaggtttagaaccttggcactttgtagtggttcaaaataaagaattgagagaaaaattgaaagcctatagttggggagcacaaaagcaacttgatacagcaagtcactttgtattaatttttgctcgtaagaatgtgacggctcatacagattacgtgcaacatttacttcgtggcgtcaaaaaatatgaagaaagtacaattccagcagttgaaaataaatttgatgatttccaagaaagtttccatattgccgataatgaacgaacattatatgattgggcgagtaaacaaacatatattgcattagcaaacatgatgacaagtgctgcattactaggtatcaactcatgtccaattgaaggatttgatttagataaagtgactgaaattctttcagatgagggtgttttagatacggaacaatttggtatttcagttatggtaggctttggttacagagcacaagaacctaaacacggcaaagttagacaaaacgaagacgacatcattagttggattgaataa

SEQ ID NO: 2861 - DNA, 132 bp, Staphylococcus epidermidis
atgatgatgcaaacagataattttgcattatttacaaaagaggttaaaataggtattacattaagtaaacgcttacattttattagggataagcgattacttcaaatatcactaaaaaaggatgggttttaa

SEQ ID NO: 2862 - DNA, 1494 bp, Staphylococcus epidermidis
atgacaaatattaacgtaagaaattatatagatgaaagttacggcttgtttattaacaatgaattccaagctagtgatagtggggaaacattaactgtttctaatccagctaatggtgaagatttagctaaagttgcacgcgctggtaaaaaagatgtagataaagctgttcaagcagctcatgatgcatttgatagttggagtaagatttctaaagaagaacgtgcagattatttattagaaattagtcgacgtattcatgagaaaactgaacatttagcgacggttgaatcactgcaaaatggtaaaccctatcgtgaaacatcaacaattgatgtaccacaagcagccaatcaatttaaatattttgctagcgttttaacaactgacgaaggttcagttaatgaaattgatcaaaacacaatgagtttagttgttaatgaacctgttggagttgttggtgcagtagtagcatggaacttcccaattttattagcatcatggaaattaggaccagctttagcagcaggtaatacagtagtaattcaaccatcatcttcaacgcctttatcattaattgaacttgctaaaattttccaagaagttcttcctaaaggagtagttaatgtcttaactggtaaagggtctgaatcaggagacgctattttccatcatgaaggtgtagataagttatcatttacaggttctactgacgtgggttacggtgtagcacaagcaggtgctgaacgtatcgttcctacaacattagaactaggtggtaaaagtgctaatattatctttgatgatgctaatttagagcaagtgattgaaggtgttcaacttggtatattatttaaccaaggtgaagtatgtagtgcaggttcaagattattagtacaatcatctatttacgatgaattgttgccaaaattgaaagaagcatttgaaaatattaaagttggcgatccatttgatgaagatactaaaatgagtgcgcaaactggaccagaacaattagataaaattgaaagttatataaaaattgctgaagaagatgacaaagcgaacatcttaactggtggtcatcgaatcacagataacggcttagacaaaggttacttctttgagcctacaattattgagattaacgataacaaacatcaacttgctcaagaagaaatcttcggtccagttgtagtagttgaaaaattcgatgatgagcaagaagctatcgaaattgcaaatgattctgagtatggtttagctggaggtatctttactacagatattcatcgtgcattaaatgtagctaaagctatgagaacaggtcgtatttggattaatacttataatcaaattcctgctggtgcgccattcggaggatataaaaaatcaggtattgggcgcgaagtatataaagatgctatcaaaaactatcaacaagttaaaaatatctttattgatacaagcaaccaaactaaaggtttatattaa

SEQ ID NO: 2863 - DNA, 798 bp, Staphylococcus epidermidis
atgacaaattttcattctatagatgctacacaagtaacaaacgtcactttaaatgttaaagatttaaataaattaactgatttctattctaatgtattaggtttttctattgaaaaacaaacgaatcaacaaaccgtattcaacatcggaaatcttggttatactttaactttaaatgaacttaacaacggtcgacaaccggaatttagagaagcagggttattccatgttgcttatcttttaccgactcgtagcgatttagcagacttcctttatcatgctaacaatctcaacatcgcaatgggtggtggagatcaccttgtcagtgaagcgctatatttcactgatcctgaaggcaatggtattgaagtctattatgatcgcccttcagaagactggttgtggcgagacggttttgtcaaaatggatacattggaagttgatgtcaatgatttaatgactcaacggtcaaatgaaggttggcaaagttggccggaagaaggaaaaatcgggcatttacatctcaaaacacacaatttagaatctgcttatgaattttatgttgaaaagttagggttcgaacatatatctaatttcccacaagcactatttatgtccactcaaaagtatcatcatcatatagctacaaatacttggcagtcaaataagattagaactcaaaatgaacaaacttatggtttatgtcactttgacatatatcaacctaatgcaaatactactcatgttacttcacctgaaggctttgacattacaattcatggtaacgaaataaaataa

SEQ ID NO: 2864 - DNA, 282 bp, Staphylococcus epidermidis
atggctgcagaaattaaacaaggcgatcataaattctatgtaggtaatgacgaaaataacccaaaagctgttattacatttaaagaggttgataacaatgaaatagacattgatcatactggagtttctgatgaactcggtggacaaggtctaggtaaaaaattagttaatcgtgttgttgaacatgcacgagaaaacaatctaaaaattatcgcttcttgtccattcgcaaaaaacgtattagaaaaagatgatcatgcacaagatgtttatctaggatag

SEQ ID NO: 2865 - DNA, 930 bp, Staphylococcus epidermidis
ttgaagaaattaattatagtgtcaatcatcattttaatgttaagcggatgcagtagctttgatcatcgtaaacgcgaaagtattaatgacaagaataaaatgaaagtatacacgactgtatacgcatttcaaagtttgacacaacagattggtggaaaatatgttgacacgcaatcaatctatcctgctggtgctgatttacactcatatgaaccaacacaaaaagatatgattgatattgccaaaagtgatctgtttgtctattcaagtcatcaattagatcctgtcgctgcaaagattacgaattcgatgaccaataatagcatgaaattagcacttgccgaaggactcaaacaaagtgattttattcactctaaagaccatgatgaagatcatgagcatcattcacatcatgaagaatcgaatcaagatcctcatgtttggttagatcctgttctaaatcaaaaattcgctttcatgattaaagagaaattaatagagaaagaccctaaacaaaattataaaatagtaaataaagatattgtgcatattgatcaacagctacaatcaataacgaagcattctaaaagagataaagttgtgatatcacacgattcgctaggatatttagcgcatcgttatggttttaaacaacaaggtgttaaaggtatgaatgatgaagaacctagtcaaaaagagattttgaatattgttaaagatatacagcattcgcacgcgccttatgttttatatgaacaaaatattacctccaaaattacagatgttattaagaaagaaacagatacgaaaccattaagttttcataatttagctgtattgactaaagaggagcaaaatgatgattcaatttcataccaatcattaatgaaaaagaacatttacgtattaaatcgcgcactcaataattaa

SEQ ID NO: 2866 - DNA, 1425 bp, Staphylococcus epidermidis
atgacaaaccaattatttattaacaatgaatttatagaaagtcagtctaaagaaacaatggatgtcattaatccagctactggcgaggcatttgatactatcactcttgcaactgaagaggaagtaaacgacgcaattgaaaaatctcaacaagcacaacttgaatgggagcgcgtgcctcaacctacacgtgcagaacatgttaaattacttatacctttattagaaaaaaatcgcgatgaaatagctcaattatacgtaaaagaacaaggtaaaactttatcgcaagcttatggagaaattgacaaatcaatctcatttatcgattatatgacaagtctgagtatgtcagataaaggacgtgttctacaaaatagtattgcaaatgaaacgattcaaattatcaacaaacctatcggagttactgctggtattgtgccatggaacgcaccgatacttgtccttatgcgaaaagtcattccagctattgtaactggttgttcagtagtgattaaacctagtgaagagacaacgttactcactcttcgattagctgaattattcagagcatcaactataccagcaggtttgattcaaattgttcctggcactggagaaacagtaggtacacaattagcttcgcataaagacattcaacttatttctttaactggaagtatgagagctggtaaatctgtttacgaaaatgctgctcaaactgtaaagaaagtaaatttagaattaggtggaaatgctccagtcattgtcacatcaaatgccgatttagataaagcagttgactatattgtgacagcccgtataaataatgcaggtcaagtttgtacgtgccctgaacgtatctttgtgcatgaagatgttcacgatgactttttaaataaagtaacttccaaaatgaaaagcttaactgttggagatccatttgatgaaaacaccgattacggcgcaattattaaccaaaagcaacttgatagtattcatgaaaaggttcaagatgctattaaaaatggtgcaacattgatgactggtggacatcaattaaaacgccatggtttcttctacgcaccaacggtattagataacgttagaaaagacgatagtgtctttaaagatgaaatttttggtcctgttcttgcgataacaacataccgtaattttgaacaagtgattgaagacgctaatgatacaaacgctggcttatcttcttatatcttctctgaaaatttaacagaagtaatgacagcaaccgaacgtctaaaatttggtgaagtatatgcaaattgtgaggctgaagaagtcgttaatggctatcacgcaggttggcgtgaatcaggcttgggtggcgctgacggtattcacggttttgaagaatactataataccacagtaagttatatcagatactaa

SEQ ID NO: 2867 - DNA, 1050 bp, Staphylococcus epidermidis
atgagcaatgttaaagaatccatcattgttgccttcgcctttgtaggcgttgtagttggagcaggatttgcgacaggtcaggaaatttttcaattcttcactagtcatggtatttacagtattggcggtatttttattactggacttatcataactcttggaggaatattcgtattaaatactggctttcgtcttagatctcaaaaccactccgaatctattcgctattatctacatccaacaatagctaaattatttgatattatacttacagtatttttattttctctagcaattattatgacagccggcggagcatcaactataaatgaaagttttggtttgcctttttggttaagttctctcattttagtaatacttattttgttaacattatttctaaagttcgatcgcctcatcgctgttttaggaggggtaacaccatttcttgtggcagtcgtagtaatgattgcagtgtattactttattactggtgatttaaattttagtgacgccagtcaatattcaaatcaaaataagtcgatttctcctggttggtggtttgacgcaattaattatgctagcttacaaattgctgctgcatttagctttttaactgtaatgggcggtaagctacgatatcaatcgtccacaatttatggtggacttatcggtggtattattgtgactttactattacttttaattaattttggtcttgttacagaatttaatcaaattaaagaggtagcattaccatcattgctacttgctaagcagatttctccatccattggtattatcatgtctgtcattatggttttagtcatatacaatacagtagtaggtttaatgtacgcctttgcatcacgctttagtcgaccgtttacgaaacgctattatattcttatagttatgatggcgataataacatttgcttgtacttttgtgggattcatttctctcattggtaaagtattccctatcatgggactttttggttttatcttattaattcctgtgatatacaaaggaattttacgaaaataa

SEQ ID NO: 2868 - DNA, 1788 bp, Staphylococcus epidermidis
atgtcattggacttgcccgtgatgctaacgattgtgttgttcttagcactaggcatttttagtcaatggttagcgagtagaataaaatggccgtcgattgttgtcatggccatcgtaggtttactcgtaggacctatttttggattagcaaatccaaaagaggcacttggacctgaggcatttagttcaattgtatctcttgctgtagcaattattttatttgaaggtagtagtaatctagattttagagaattaaaaggcatttctaaagctgttataagaattataactataggtgcagggattgcgtggattttaggagcgattgctttacatgtcactatgaatttccctctgtctatttcatttgttatcggaggactattcctaatcactggtccaactgtgattcaacctttattaaagcaagcgaaagtaaaaagaaatgtcgattcagtattaagatgggaaagtattatcttagatcctattggacctattattgcactcactgcattttatgtattccagatttttgaggaagggataggctttgtcgttattattctctttatcttgaaactcttagctgcaattttaataggttttggtgcagcctttctatttaattggcttataggtcaagataaaattcctcaaagtttaatgccacccattcagtttgtatttattcttttaacatttagtatctgcgatgagatattatcagaatcaggcttactagctgtaacaatttttggcttaatgatggcgcgtaaaaaacgtcacgatctcatctttaaggaatcagaccactttatagataatgcatcatctatacttgtgagtactgtatttattttaattacgtcttctctaactaaagatgtattgctcaatgtgttatcttggcagctcatactatttagtttggtaatgattgtattagtaagaccaatttcagtgcttctttcaacattaggtactgaaataactaaaaaggaacgtgcagtagtagcactaatggctcccagaggtattgtggttttaacagtggcacaattcttctcaagtttatttatggacgataaaattcctatggctcaatatattacaccagtaacctttggtcttgtatttatcactgtagtcatttatggatttggttttacacctttaagtaaactgttcggtgtagcaagtacggagccaccaggcgtaattatcgtcggagaaagtgaattttcattccatctcggcattaatctaagggatcatggtatacccgtcatgatgttcaacttatttgaaaacacatcagaaaaagcccacgaagcggggttcgaagtatttaaaggtaatcttttatctagcaatgatagaatttattctgatttattacgctataataaatgtattttgatgacacaatcgtttatctttaacagtttagcatttaatgaattggtacctgaatttggcttgaataatgtagatatgatgccagtatcttttaatgatgagcaagcacgaaacaatttaaatggtccaatcagaaatcatatattatttgatgaaaatcataccccacgttggtttaatcaatttattacacaacataatattattgaagtaccagcagaagattatgaaaaaattacagaaaatgatatgttaatctatcatatcaatgaagataaagaagtgacgtttaaacgaagtaatagagatatacctgaacatgaaacaggtgtttatggtattttaaaaaatgcttatttaacataa

SEQ ID NO: 2869 - DNA, 1965 bp, Staphylococcus epidermidis
atgacccatattacagaaagtgaaatgaaagaaaaatatctagatttactctcacaaaaatttgacagtgcagaaaaacttgctactgaaattattaacttagagtcaatcttagaattacctaaaggaactgaacattttgtcagtgaccttcatggtgaatacgaatctttccaacatgttttaagaaacggatctggaaatgtgcgtgctaaaattaatgatatcttcaaagataaattatccaagcaagaaatcaacgacttagcagcattagtatactatccggaagaaaaactaaaattagttaaaaataatttcgattcaatcggaacattaaatatttggtatattacaaccattcaacaattaattgatttaattacatattgctcatcaaaatatacacgttcaaaattacgcaaagcattacctgaacaatatgtttatatcattgaagagttactttataagagcaatgaatttcataataaaaagccttattatgaaacactagttaaccaaattattgaattagaacaatcagatgatttaatcattggcctttcctatactgtacaacgtcttgtcgtagaccatcttcatgtcgtgggcgatatctatgatcgtggtcctaaacctgataaaattatggatacattaataaattatcattctgtagatatccaatggggaaatcatgatgtattatggattggcgcctatgctggttcaaaagtatgtcttgctaaccttctacgaatctgtgcacgttatgataatttagatattatcgaagatgcatatggaatcaatctacgtcctttacttacgcttgctgaaaagtattacgatgctgaaaacccagcttttaaacctaagaaacgaccagataaagacgtcagtcttacaaagcgcgaagaaagtcaaatcacaaaaattcatcaagcgattgcgatgattcaatttaaacttgaaatgcctattattaagcgtcgtccttcttttgaaatggaagaacgcttagttttagaaaaaatagattatgataataatgaaatcactatatacaataaaacttatccgcttaaagatacttgtttccaaactgtagatcctaataatcccgctgagttactagcagaggaaaaagaagtcatggataagctattactttcattccaacaatctgaaaaattaagacgtcatatgtctttccttatgcgaaaaggaaaattatatcttccatataatggcaaccttttaattcacggttgtattcccgtcgatgaaaatggagaaatggaatcatttgaaattgaaggtgaacgtttaagtggtcgtgaactactcgatgtttttgaatatcatgtaagaaaagctttcgaccataaaacatctaccgaagacatatctacagatttagtatggtatctttggacaggtaaatattcatctttatttggtaaacgtgccatgacaacgtttgaacgttattttatagaagataaagcatctcataaagaagagaaaaatccttattattatttacgtgaagatgttgatatgatacgtaaaatgttaaaggattttggtcttaatccagatgaaggacgtatcataaatggtcacacgcctgttaaagaaattgatggtgaagatccaattaaagctgatggtaaaatgttagtcatagatggaggattttcaaaagcttatcaatcaacaactggtattgccggatatacacttttatataattcatttggtatgcaattagtcgcacataaagagtttaatagaaaagaaaaagtgttatcaatgggggcagatgaattgtcagtgaaacgcgttgtagatgaagaattgcaacgtaaaaaaattagagataccaatatcggtaaacaactgcaagatcaaattgatatcctcaaaattttaatgcacgaccgatatttaaaataa

SEQ ID NO: 2870 - DNA, 615 bp, Staphylococcus epidermidis
atggaacaaattatcaccgattttattagtaagtggggttatacagcgatatttattttaatcttattagagaacgtattacctgttgttccgtctgagattattttaacttttgcaggcttattatctgtgaaatcacacttgtctatatggacattattaatcatagcaacaattgcttcattcattggtttactcattttgtattatatttgtagacttatctcagaagagaaattatatcgtttcgttgatcgacatggtaagtggatgaagttaaaaagtaaagatttgaaacgggcaaatgattggtttaaaaagtatggtgcatgggctgtatttttatgtcgttttgtcccggtacttcgagtattaattacaatacctgctggcgttaatcgaatgaacgttatacagtttacaactttatctttaataggtactacaatttggaattttgctttaatactgctcggtcgtttgctcagtgacagttttgacgctttgatgaatggtattcatacatattcacgtattatgtatatcattattattattgcagtcatatattttgtcatacgttatttaatgaaacgtcgtcgcagtgttaaataa

SEQ ID NO: 2871 - DNA, 999 bp, Staphylococcus epidermidis
atgtcgcgttatgaacgtcaaacacgctttgcaccatttggagaagagggacagcaaaagctatctacctctcaaatacttatttttggtgctggtgctttaggaagccatattgtagatcaactcgcacgcatgggggctcatcatattgcaattgtcgatatggatattgttgaaatttcaaatttacatcgacaaacactcttcgatgaagaagacgcacatactttaatatccaaagtagaagcaatcaagcataagattaatcaaattaatacaaatgtcaatctaacaacttatgatttagaagttacttcatcaaatatcgaaaatttgataaaaaatgtcgaaccagacatcatcattgatggcatggataacttcaaaatacgatacctgattaatgaggtttgtcacaagcatcaaatcccatgggtttatggtgcagctgttggtagtaaaggatcagtatatggaatagattaccaaggaccatgtctaaaatgtttattgcaaacaattcctgacacaggggaaagttgcgctattaatggcgtacttcctcctattatatcaatgattgcaagctatgaagtagcagaggccgtacgttatctttcaggaaaaggattttctaagcaattaatcactatcgatgcatttaatattaattataagtcaatgaatgtagatgcactcaaaaataaagattgcccagtgtgtgaaaaacatgaatatacgttactagaaagccaacaagaacgtaccattgaggacttgtgtgggaatgcttatttatttagatttccacctaaagcttttaaacacgctgcccatttccctggaaatatggtgaaatctacttcctttgccaaattaattcaatatcaaacttatgaattcaccttgtttaaagatggtcgtatgaatgcatatggtatacacaatgatgaagaagcacatcacctatacaatacgttgttaaaatccatacgctaa

SEQ ID NO: 2872 - DNA, 768 bp, Staphylococcus epidermidis
atgtttaaaataggaaatttagaattacaatctcgtttacttttaggtactggaaaatttgaaaatgaagaggttcaatcaaaagcaattgaggcatctgaaacaaatgtacttacatttgcagtaagacggatgaatttatatgatcgtaacctacctaacccacttgcaaacgttaatttaaaagattttatcacttttccaaatactgcaggtgccaaaacagctcaagaagctatcagaattgctgaaattgctagtcacgcaggtgtatgtgacatgattaaagtcgaagtcattggcgatgacgaaacattattacctgacccattcgaaacatacgaagcatgcaaagtattgttagaaaagggctacattgtttgtccttacatctctaatgatttagttttagctcaacgtttggaaaaattgggtgtacacgcagtcatgccacttgcatctcctattggcacaggtagaggtattaataacccattaaatttaagttatattatcgaaaatgctagtgtccctgtcatcgtagatgctggtattggttcccctaaagatgcttgtcatgccatggagcttggcgcagatggtattttactcaacacagccatttcagcagcaaaagatcctgtgaaaatggctgaagcaatgaaattaggtataaatgccggcagactttcatatgaagctggacgcattcctgttaagtatactgcacaagcatctagtccatcagaaggtttagggttcttgtaa

SEQ ID NO: 2873 - DNA, 201 bp, Staphylococcus epidermidis
atgaagtgtatcattaatggcgacctcttcactttcgatcaggatcaatcgatacaagaggttttacattcacttgagttagacccaaaacgagtgattgttgaactaaacaaagaacttatcaagcaagacaaatatgaagaatatactgtaagagaagacgacagattagaattactagaaattgttggaggcggttaa

SEQ ID NO: 2874 - DNA, 1119 bp, Staphylococcus epidermidis
atgcatgatgtactaatcattggttcaggagttattggtatgtcaattgcaagacacctcagtgcaacacacttagatgttgcagtcatagatagagatgtacctggaaagcatgcgtcatataaagctggaggtatgcttggcgcacaaaatgaatttacaaaggatagtgacttgtttcaattagccatcgaatctcgtgctatgtttccacaattaagtaaatcattattagatgaaacaggcatagacattcaatttaaaaattcaggacttatcaaaattgctaatgaacacgatgatatctcatctataagacgacaatatcaatttctgaatagtcaagaccgtagtgtcaaacaattatcagatgatgacttgctacaacttacacatggtgaagttaaaccttcatacgcggccattcatataccgcatgatggtcaaattaatgcacatcattacacactggcattattagaatcattgaagttaagagagattaagcgttatgcgtctacagaggtcacttcaatagaacggcataatggctattattcagtgaaaaccaatcaatcttcaacaattgaagcgcacaaagttatcgttgcaggtggcgcatggtcttcacaattattaacacaatatcatttacaacgacaagtgattggcgttaaaggagaagtcatcttattagaaaataacgatcttgcacttactgaaacattatttatgactaatggttgttacatcgttccaaaacaacccaatcgttttttaattggtgcgacgagtgaatttaataattattctgtcggtactacagatgaaggtatggattggcttcttcaccatgcatatcatcgtgtacctcaactaaaagacagtcatatgctgaagaaatggtcaggagtaagaccatacacagaaaaagaaatgccagtcatggatcaaattgatgatggcttatacgtgataagtggtcattatcgaaacggaatattattgtcacctattatcggtcgtgacattgccaattggctactttctggtattaaaccatcacgttattcaagttttacagttacaaggaggaataatcatgaagtgtatcattaa

SEQ ID NO: 2875 - DNA, 483 bp, Staphylococcus epidermidis
atgaataacgaagaaaacaaggacatgattcaatctttacttcaattgggttttagtaaagataaaataattattcacagtgatacgacactattagaggaattaaatcttaaacgtattcattttaagagtaatgatacaactgctttcgcatataaagcagcacatcctgatatttatgtaagtatgtctatacatgacgttgaaacagtaaaacgatgttatgaaaataatttagattatgtctttttggggcacatttttccgaccgcttcacatccagatacgccaccacgttctaaaaagaccattcaacaagcattagatgttcctatccctatttatgctattggcggtatcaatgaacattcgattcaaaagatgccacctggatttaaaggtatatgtgccatatcatattttaacaatgcttcactagaagaaattaaacaattaagaaaggagtggtctactcatgcatga

SEQ ID NO: 2876 - DNA, 1275 bp, Staphylococcus epidermidis
atgaaagaaaaacgtagtaatgttcgttggtattttgcaatagggttcttctttattggggttattgcttacatggatcgatctaacatatcttatattgcagtaccgatgatgaaagatttggggttaactaagacacaatttggtttattagcatcatttttctccctaggatatgcattaatgcaagtaccttcgggaatgttagcagagaagtttggaccacgtaaaatgattactgtcgctttagtttggtggagtgcatttactatcttaacagggatgattaaacaccatggtttactttactttattagattcttatttggtgttggtgaagcgccaatgtatccatccaatgctgtttttaactctttttggttcgctaaaaatgaaaaaggtcgtgcatctagtgcgttgttagcaggttcttattttggtccagttttagcacctatcatcacgatagccattgtcaacgcttttaactggcaagccgttttctacattttcggggttgtaggaattttaatggcagttctttgggcaattattgctaaagacttaccagaacaacataaaatggtaaacgatgccgagaaaagatttattactcaaaatcgtgatattgtcgcgactgagaaatctttaccaccgtggaaacgttttttaagtcatttcagtttttacgcaatcgcattgcaatactttgtagttcagtttgttatcgcgttgttcctaatatggttaccaacatatttaactgaacaatatcatgtgaatttcaaagaaatgactatcagtgcattaccttggttatttatgttcttcttaattttatttgctggagctatttcagacaagattttgaatacaggtcaatcacgttttgttgcacgtggcgtaattgcgattgcgggatttgtggtattctcaatttcaattttcttagcagtacatacagacaacttatatgtaaccattttctggttatcactttgtttaggtggcgtaggtatttctatgggaatgagttgggctgcagccactgacttaggtcgtaatttctctggaactgtgtcaggttggatgaacttatggggaaatgttggcgcacttattagtcctttacttgcaggaattgttgtagatcatttaggatggtcaatgacattacaactcttaatcgttccggctattatagcagcaattttatggttcttcgttaaaccagataaacctcttgttgttagtgaagaacatgttaataaataa

SEQ ID NO: 2877 - DNA, 291 bp, Staphylococcus epidermidis
atgattattattaacgcaaaattaaaaatcgatggtaacaaacgcgaagattatctaaaacttatgaaggaattagtcataaattctagaaaagaagaaggtaatttattctatcatcattacgaagatgtaactgagaaaaatgtctttgtcgtagttgaaaactataaagacgaacaagcggttcaagcacacaatcaatcagatcactttaaagtttttagtgataatattagtcaatatttaattgaagaacctcaaattgatgtaagtcaacctattcaattataa

SEQ ID NO: 2878 - DNA, 1914 bp, Staphylococcus epidermidis
atgcaacaaatcattaactctttgatacacttcgaccgttcaaagattgatatagctaaaggaatacgacaaggatttttaatgatactaccagcattgataggttacttattaggattccctatgtttggtattttaatatcaacaggtacgctagcacatgtctacgtttttagtggatcaccgcaatctatgttaaaaacagtcatcacatgttcactatcatttactatttgcatgattcttggcaccttaacagtatctcagcctattttatttggattactattactgattgttgttacaatcccatattatacgtttaatgcgctaaaaatcgctggtccatcatcgacattctttttagtaacgttttgcttatctataaacttaccgatagccccagaagaagcgcttttacgtggatctgcaattctcattggtggtatgttggcaaccataacagtaattttaacaatcatatttgctaaagagaaagcagaagacagagcaattcatgcggattttaaaacattacataacttgctacatcattttgatgagccagaggatttcaaagcatatgctcgaaatgctgttacagaatttagaaattctgaaaaacttttaattacttcaacatcaggtggtaatggaaaattaagtaaaaggtttcagaaattaattttattacacacatcagcacaagggatatattcagaattactagaactcaatgaaaatcatattcgtccattaccaaatgacttagttgaaatgatggatcatattattaaaagtgttcaacaacctaaacaatatcgaccgtggtcaaaagttgttgatgtagcaccagaatttcaaaatttaatggatcatattttgaaaatagatgaaatgattcacgcaaacgataatcaaattaaatatgaagcagatattcgtaagcctttatatagcaagcgaatatatcaaaatctaactttcgactcaattgtatttagaaatgctttgcaatatacagttattatggcagtggctatatttattgctctagcatttaacattcaaaaagcgtattgggtgccattgtcagcgcataccatcatgttaggtaatgtgacaacgattcgtacgttagacaggtcaattgctagaggtattggaacaataatagggactattgttttgtcgggaatcttggcatttcatatcgatcctattttcgctattatcattatgggattttcagccatgatgacggaagcgtttgtggcatctaactatgcatttgcagttatttttattacgacacaggtcattatgctcaatggtctagcctctcaaaatttaaatattgagatagcatacactcgaattattgacgttctaataggtatagctattgcagttattggtatattcatactcgcgcgtaaaactgcatcctcaatgttatctgatgctattgccgaattggtacgtaaagaaggtattttatttcattatttattttcaaaaaataaacaggaaacgaatgaacgtgatagggtagaaagtttaaatttaaacgtcaaaatcagtaatgtgacacagatttacaattcagcgaatggtgaattgtttagtaataaagaagcggtaaggtattactatccaagtatatttgctctagaggaaataagttttatgctagagcgtgccatgaataataaacaccgacaaacaataaatgatgatttaatgggtgaatatttagttgtatttgaaaatatagctaagcatttccaatttcaagcagatttaaatcttagagacatgcaagcattacctcaatacaattacatccgtgcttcccttatgaatatacaacgtaattgtgctgaacaacgtcaggccatcacaaaagattaa

SEQ ID NO: 2879 - DNA, 414 bp, Staphylococcus epidermidis
atgccttggacgatgcaagattatcctcaaagttggaaaaactttgaagaactcgaacggaaaaaagcgattgatattggtaatgcgatgctcaaagatggctataaagaatctgatgtgatacccattgctacaaatcaagctgaaaaatggtatcaacatgcttcaaaagaagaattagagacgttaaaaaacaaacatatcacgcaacatcaagaagatgaatcagctaatcctaaacttaacgaagaaaatgttcatgtatattatgaagatcagctatggaaagtaaaatctacagaggctaaacgagcttcagatacatttgatacaaaatctgaagcagttaaccgtgcacaacatatcgcagagaataaaggtaccaaagtgattgagcatcgaaaagatgagtga

SEQ ID NO: 2880 - DNA, 702 bp, Staphylococcus epidermidis
atgtatgtagagagaaagcctgcactttatatcgaagatttacgagacgaattcaaaaatagcttaaaacattttaaagatgatgatgaagcatttaatacattagttggatttgtggaactggaccacctatattcttcagcacttaaagaaataagtacaaaattaagtattttagatgataactttaactatcaatataaacataatccaattcatcatatggaacgacgagtaaaagagatgcacagtttagttaaaaagttgaatcgtaaaggatttgaagtaagtgcacaaagtgctaaagataacattatggatattgctggtatacgtgtcgtatgtaactatttagacgatgtttatgtcattgaaaaaatgttattaagacaagaagatgttaaattattaaaacgtaaagattatatcacacatcctaaagaaaacggctatcgaagtttacatatcgtcgtatctattccagtatttttagcagattcagtagaagtaacaccagtagaaatacaaattcgtacaatcggcatggatatgtgggcaagtttagaacacaaaattcgttataaaaatgatacagacactgaaaaatataaaggactattagagcaatgtgcatcagaaattacaaatgtagaaagtaaaatgcaacaaatacattcagaaatttcaaatcgagagaagtaa

SEQ ID NO: 2881 - DNA, 918 bp, Staphylococcus epidermidis
atggttatttcaaagaaattagcatttacaactttaggtatcttaatatgtattcttttaagttcacctcttatcgatcaacagatttcaaatcatttcatgaatcaagattccgtttttggcacactattccaaaactacggtttatttccacctacgcttgtactaattatttcaactgtaattttaaattattatattttcactacatttcaaaataaattagctaaaatattaacattgcttatatctttcatattcaccctaattaaaaccaatgaattcgtgtcagaaactgctcaatatatgttatctacatcagaaaacatcaaaaatcataagccaatgggtatggcaaataatgaaggaaacgccggaaatgctttatctttaggaatgagtttctttatttctttgattatcattataattatcacttttatttgttatcagttttggttaaaacatacaaataaccaagaacttgatcatttattcaaagtttcacttattagctttatgattttatttattggattagaacttgttgatagcttgaaacatttgtggggacgttttagaccatatgaaatcactgacaaagctggacatttcactcactggctcacaattaatggaaacactggacatagttccttcccttcaggacatactggaaatggtgcatttctaatgtttatcgcattttactttaaaaaattacgcactcaaaaaatagtgtttagtatcggattatgttatagcattttaatggcattgagcagaattcgtattggtgcacatttcactagtgatgtaacaatgagcttgcttattatgttttcactcatggttattgcagattttatcattaatcaagtcatatctagacataaaaacaaactaagtaaagactag

SEQ ID NO: 2882 - DNA, 876 bp, Staphylococcus epidermidis
atgattaagcaaaattttacaactaaagtttatccacttaaacaatttgagggggaatatagtgaagttgcctacgcaggagatagccaagctgatgatgtgattgtatttattcatggtgcactcttaacatataaaattatgacgatgttcgagccttacttcagagattacaaattaatatttattaattgtccaagtcgtggtaaaagttcagatttagatcgtgacacacatacattagatgattacgctgcacgtatatatgatgtattaacgcaaattgttaaggagcaacagataaaagaactgagtattgttggttattcaatgggaggaatgattgcgacacgattacttaagtataatacattaccagtatctcatcttatttatttacatagcgcagcgaaaattactccagatgcgagtatgttagcacgattattcactagtgagagtaagcgagcagtgttaaaagatgaaattaaggcagtaaaaaatcttcctcaatatatacttgataaaacgatttatgcacaaaaggaaaacgcacttgatttggtacaatttattgcacctattaaaactataattacggatatgatttacacgattaatacagattatttaccagatatcgatgagattaaacaatttccgaaaatattatttatgtctggaaaagaagatcaaattattccttatacggattctcaagctacgttagaaaaatttaaggcgttaggtggagaaactaaagaagttatttatccaggaattggtcatatagatttcccgagtgttttagaaacccaatcggatggacaaactggcgtggtagatgaaattaaagcgtggatttccaaaaaataa

SEQ ID NO: 2883 - DNA, 723 bp, Staphylococcus epidermidis
atgtctatgtcgatttatacttcaggagatatagctcataaatgccatgtgtcaacacgcactattcagtactacgataaacaaggaatcttatcgccaaattatacttctgaaactaacagacgcttttacactgataaggaagtggagaaacttgaactgattttatttcttaaggaaataggttgcacaattaaagaaattaaagtgttattacaagaagactcatcaatgaagacgctttacactcttcttcaaatcaaaaagcatgagatacaacagtcaataacagttaaagaaaacaaggtacgtaaaatagagcaaattcagcgctatgttcatcaaaattcaatatctccaatttattatttacaagatatagctacttatatggaagaatctcatagacgcaaatatgttagaaagaaattatggttaagtatagctctgattggttcattacaatatggtggtttgatcacttcaattgtaactaaaaggaaaaagcctttcttgtcgatgatgcctgcggtagctatgtattcactttggttaacaaaaaagtataaaaagaatgtttcatatgtctgtcctaattgccaccatgtgtttaatcctagtgtcattaattttgtaacagcatcacatacacctaaaactagaaagcttcaatgtcctgattgtcacgaaatacattattgtgtagaaattgctaagcaatga

SEQ ID NO: 2884 - DNA, 1359 bp, Staphylococcus epidermidis
atgtttaatttcttaaaaccagctagacatatcaaatcattgccatcagaaaaagtagatgatacgtataaaagactacgctttcaagtctttttaggaatatttatcggttatgctggttactatttattaagaaagaacttctctttagcaatgccttcattaattgagcaaggctttagtaaaggggaattaggtattgcgttatctgcagtatctatcgcatatggctttagtaaatttgtaatgggaactgtcagcgatcgaagtaatgctcgaatgttcttaactttaggtttagtattgacagcaattattaacttattattaggatttattccattctttacttcaagcataactataatgtttatcatgctgtttttagttggttggttccaaggaatgggttggccaccatctggacgtgtgttagttcattggtttagtgttagcgaacgcggaagcaaaacgtcaatatggaatgtagcacataatgtaggcggaggtttaatggcacctattgctacgtggggtatttccatgactgcattatacaacttcggttatttaaaagggtttgaaggcgtctttatataccctgcactattggctatcattatcgctatcttttcttacatacttattagagatacaccacaatctcaggggttaccaccaattgagcagtataaaaatgattatgccacttcaactaaacaaacaattgaaacagaactaactacgaaagaaatattgtttaaatatgtacttaataacaaatgggtatgggcgattgcttttacaaacattttcgtttattttgtgcgttatggtgttttggactgggcaccgacatatttaagtgagaaaaagcattttgatttaagtgcttcaggttgggcttacttcttatacgaatgggcaggaattccgggcacactactttgtggttatctatctgacaaactatttaaaggtcgtcgtggtccagcaggcttcttctttatgttaggcgtaacaatctttatccttatatattggttaaatccaccaggtcacgcatggttagataatctttcattaattggtattggtttcttaatttatggtccagtcatgttaattggtttacaagcgttagattatgttcctaaaaaagcagctggcactgcggctggtctaactggtctatttggatacttgttcggtgcagttatggctaatattgtattagggtttgtagttcaacattttggatggcatattggctttgtgttattaacagtcatcagcatactcgctatgttatgtttcattttaacttggaataaacgtggtcaagaacaaatcgactaa

SEQ ID NO: 2885 - DNA, 681 bp, Staphylococcus epidermidis
gtgacgtatggttatccgaaaaagtggaaggaaaacatgacttcaggacaagtaatagctgctgagttacgtttaggaatagtgaatggcgaaattgaatcccatatacaactaagtgaaaatcaagttgcacaacaatttaatgtgagtcgttcaccagtcagagatgcatttaagttacttcaaacagatcaactgattcaattagaacgtatgggcgcacagatacttccttttggtgatcaagagaaaaaggaaatgtatgatttgcgtttgatgctcgaatcattcgccttttcaaaattaagtggaacagatacacaacatattgttaaggaaatgaaaaagcaattagaaatgatgaaggttgcagtccaatttgaggatgctgaagcatttacacaacatgattttgagtttcacgaggtgatgattcaagcaacaaaccatcagtatcttaaagtgttttggaatcaccttaaacctgttatggaatcactcatactcatttcaatgagacaaagaatggcaaatgaccctaaagatttcgatagaattcatagtaatcatcaagtttttatagatgctgttgagaacgatgatgcctccatattgagaaaagcattccatttaaattttgatgatgtaggagaaaatattgaagcattctggttacgttaa

SEQ ID NO: 2886 - DNA, 1542 bp, Staphylococcus epidermidis
atgaaatatatgattggtgtagatatggggacaacgagtacgaaagctgtgctatatgatgaaaaaggcaagtttataatgaaacataatattggctatgacttacatacaccaaacgtagatgtgtcggaagaaaatccggatgaaatatttgatgctgtgcttatgacggttaaatatattgtaagagaatctggcatcgtaaaagaagatattaagtttatttccttgagtgcgcaaatgcatagtttgattgctatgaacgcggataatcaacgtttaactgaaaatatcacatgggctgacaatcgagcgaatgattatgctgatttaatagaaaaatcatatgacggttttgaattgtatcaacgaacgggtacaccgattcatcctatgtcaccattatctaaaatcttttggatgagacatgaggaaccggaaatatttaaacaaacagctatgtttgcagatttaaaaacatacgtactgtttcaattatatgagcgattcgtcattgattattctttaggatcagctacaggtatgatgaacttagaacaattagattgggatcataaggctttagaattgttaggtattgaaagaaatcaattacctcaacttgttccaaccacacatgttttaactggaatgaaaaaacgctatgcaacgttgatggggattgatgaacaaacgcctgtaattgtcggagcgagcgatggcgtattatctaacttaggtgtaaatagctatcaaaaaggtgaagttgctgtaactattggcacatcgggcgcaattcgtacggtaataaatcagccaaaaacagacgagaaggggcgtattttctgttatattctcgataaagatcaatatgtgattggcggtcccgtcaataatggtggtgtcgttttgagatggttacgagatgaaattttagcgagtgaagttgaaacggctaaaaggttgggggtcgatccttatgatgtgttaactcagattgcgagcagagtaaaaccaggtgctgaaggattgatttttcatccctatttagctggagagcgcgcaccattgtggaatgctgacgcaaggggttcattcttcggattgacattatctcacaagaaagagcatatgattcgtgcagctttggaaggtgtactgtataacttatatacggtttatctggcattaattgaagtgatgaatgaaacaccgacaacaattaaagcgacgggtggttttgctaaaagtgaaatttggcgacaaatgatggcagatatttttgatacagacttaatcgtacctgaaagctacgaaagttcatgtctaggtgcatgtgtacttggaatgaaagctctaggagaaatagatgatttttcagtcattaaagatatggttggtacaacacatgcccatgaacctaaccaagaaacagttgccatctaccaacaacttgtcaccatttttattaacattagtcgttctatgactgagaactacagtgatattgcgaatttccaacgagaacatttaagtgattaa

SEQ ID NO: 2887 - DNA, 1359 bp, Staphylococcus epidermidis
atgtttggagagatttggccactcatcagtgttgtattaggaattattatcttattaacattaattattggattgaaacttaatacatttatttcattaatcattacctcaataataacagcgttattattaggtatgccacttaacaaaattatggaaaccattgaaaatggtatgggtagtacgctaggtcacattgctttaatctttggcttaggtgcgatattaggtaaattattagccgatggtggtggggcaacgcgtattgctgatacacttattgcaaagtttggtcagaaacatgttcaatgggctatgttgatagcagcatttatcgttggtattgcgctattttttgaagtaggtcttgtactattaatcccactcgtatttacagtagctaaacgcgcaaatgtatcaattttaaaattaggactaccaatggtcacagcgttatccgttacacacggattcttaccaccgcaccctggacccgttgtcatcgctaaagagcttaaagcgaacattggtgaagttttgttatatggtatgattattgctatccctgtaacacttatttcaggtccactctttaatcgatttgcacaaaagatggttccaacagcgtatacgagagaaggggatatttcttctttaggtactcaaaaggaatttaaagaagaagagatgccaagtttcggaataagtttattgactgctattttacctgttattcttatgttgatttctacaattgtgcaactgattacaggacacgaagaagcaacaaatgtattcgaacaaattgtttacttcataggaactgctggtactgcaatgcttatcgcagtgatatttgcaatctttacgatgggaatgaagcaacaccgaaaaatggaagacattatgtattcagttacgcatgctatttatccaatcggtatgatgttactcatcatcggtggtggtggtacatttaaacaagtgctcatcgatggtggcgtaggtgatacaatcgctaagatgtttgaaggaacaagcatgtcacccattttattagcatggattgtagctgcagtcttaagggtttcattaggatcagctacagttgctgccgtatcaacaacaggcattgtgttaccacttttagaacattcagatgttaatgttgctttggtcgttcttgcaataggcgcaggtagcgtaattctctctcacgtcaatgatgcaggattctggatgtttaaagaatatttcgggctgacagttaaagaaacatttttaacatggtcgttattagagacaattatttcagtatcaggtattttatttattttgtttattagtttatttgtatag

SEQ ID NO: 2888 - DNA, 867 bp, Staphylococcus epidermidis
ttgaaaaacataaaaaaagcaatcataccagctgctggattaggtacacgttttttaccagcaactaaggcgatgccaaaagaaatgttaccaatattagataaaccaacaattcaatatattgtagaagaagcttttaatgcaggaatagaagatattattatagtgactggcaagcataaacgtgcaattgaggatcactttgacaatcaaaaagaattagagatagtattagaaagtaaaggaaaagcagacctgcttgaaaaagtacaatattcaacagatttagctaatattttttacgtacgacaaaaagaacaaaaggggctaggacatgcaattcatactgcaaaacagtttatcggtaacgaaccatttgcagtgttattaggagatgacattgtagagtctgatacaccagctattaaacaattaatggacgtttatgaagaaacaggccattcagtaataggtgttcaagaagtgccagaatctgatacacatcgttatggtgtcattgatccttctgctaaagagggaagtcgatatgaagtacgtcaatttgtagaaaagccgaaacaaggtactgccccgtctaatctagcaatcatgggtcgttatgtattaacaccagaaatttttgattatcttgaaacacaacaagaaggtgctggaaatgaaattcaattaactgatgcgattgaacgaatgaatagcaaacaacaagtgtatgcatatgattttgagggtaatcgttatgatgttggagaaaaattaggatttgttaaaacaacgattgaatatgctttaaaagatccagaaatgagtcaagacttaaaagcattcattaagcaattagatatttaa

SEQ ID NO: 2889 - DNA, 1641 bp, Staphylococcus epidermidis
atgatagataattggatagatgtattagatgaaagtttagtcaaagatttttataataatcaaactcccgaagagcaacaagaaggactcaatactacactgtcttttggcacggctggtattagaggaaaattcggtttaggtgaaggccgattaaataagttcacagtatctaaagtagcgttaggctttgcccattatttaacatcaagtatcgcatatcctgtggtcgtcatacattatgacacaaggcacttatcacctgaatttgctcaaattatcgctaatattctagcaagtcatgatattaaagtttatcttgctgatacatacagaacaacacctgatttgtcatttgcagtcagatacttacaggctaatgcgggtgttatgattacagctagccataatcctaaagattacaacggaatcaaagtgtatggagaagatggtgcacaattaccaaccgacgcttccgcacaattaagcacatatatcgataaattaggtcatccgcttcatattaatttacctagtttaactactgaacaacaatcattaattcattcagtcccgagcgaagtcagagaagattatttcaaaaacgtacaagacttagttggaacgattccacagtctgatttaaaagttgtctttacaagcttgcatggtacgagtgtgccagttgtacctgacattttatcttctcttaactttaatcaatttgggttagttgcatcacaatgtgaacctgattcagatttcagctcagtagccagtgcaaatccagaggatcataaagcgtttgatcaatcgatagaacttgctaatcatattgatgctgatttacttattggcacagatcccgatgcagaccgcttaggaatagttgaacgtgatgctgaaggtaacatctactattacaatggaaatcagattggtgcacttttgttaaattatcgcatcaaacaaacagaaggattgcctaatagaatcatgttccaatcaattgtaagtggtggattagctaaatctcttgctcaatatcataatgttaatttcaaagaagttttgacaggttttaaatatatcgcagctgaaataagacatctgtctcctgaacaaaactttatttttggctacgaggaaagctatggctttttagctcgtcctttcgtaagagataaagatgcgattcaaaccgtgccattaatgattaagtatgcagctgaattaaaaaatgaaggacgcatgcttaaagatgaattagaagacattactcgaaatatcggtaactttaatgacaagctcttctcacatacatttgaaggtactcaaggcaaggcaaaaattgaaaatattatgactcaattcagaagtgaaataccttcggaaatgtgtggtcttaaagtcattgcaatcgaagattttgaaacaggtaaaaagactgacttacaaaatgatgaagtcagtgatataactttacctaaagcgaatgtaataaagatatactttaatgaaggatttattgctttgcgtccttctggtacagaacctaaaattaaactttatgtatcactttcttgtgaccattttgacgtagttgcacaaaaaatgaacgatgctatatttaactcttaa

SEQ ID NO: 2890 - DNA, 1821 bp, Staphylococcus epidermidis
gtgcaatcattaatcgatttagatatcgacaaaaatcaaatagaagctatttttatcgatgatttatcttctgataattcattcagaataatcgaaaattacgctcaaaagtatgaatttataaaatgtatacaacttagtcaaaattctggagatccttcaacacctagaaatattggtattcaaaatgctaaaggtgaatttattactttactagacgcagatgattggcttgatcctataggattaccaaagcttgttaaacaaatgattcaacataattcagatatcggatttggtcagtgttttaaacacacagataataatattaaaaaaatcgcaacttttgcttcttatcaaattgcaaatggtcttattccatatgaaatacccaaaatatttagagcagtaggaccaccaggaaaagttttcaaaaaatctacagtagttgataataatatacaattcaaaaaaatgaaatttggagaggacaaattattttttgcagaactaattagtaaaagtaaaagtgcatcaatgtcttcgcatgctacatatcatgtgaatcgttactctgaaaatgtatcattagtaaaatcaactactgtaatcgaaaaatctgaaattaatttaaaggtattagaatgtgttcttcaattgaatataacggatttagcaaaaaagcacgtgttaagtcgtattattgaaatggattttatgagtcgtttcttagttacaaaaacatttttaaagtctgataacaaagaatatttttataatcaattttcaaaaatggaaaatattatatccgaagcgggctatgacgttaaatcattgcttactatagataaatataaaaatttatatcaattatttcactccaatagaacattggtaaaagaatatgtgcactaccttttatttgatttaaataaaaataaattcataaaaaataatgttgtgcattatgaaacgaaagaaaactttattgatctaattcctttgtactcaatttgtacacctgtttatagtggtacaaaaatgattgataatcatttatatgaaagtattaaattatttaaaaatcctaaaataaaaattaatgacgttaagttagttgaaattaataacgctacacagtcaactcatattgattataaaattttggatgattatatttatatcaaaaccagtgatttaacttttggtgaaaaagattttaatattgaagttcagtttaatgattataactcagaactggtcttcgctacttatcctaatcataattctatagttgaattaaaaaggcaaaattttaaattagaatttaataatcctaaaaataaaaatttcgagtcaaattctactaaaacaaagtatatatcaaaaaatccaaaacaagtattaattaaaaagaatataaaaaaatactctgatacagactttaaaatagcacaaagttctattaaaaagggaaccctgatcaacattattggtatagatcattcaacaaaggggactcctagattgattactgatgatcaatattttatcacagcaaacacagattttgtttctccttctattaatataaataaagaagggtatatttgtgagactccaaaaaaaatcaaagtattaaaaaaatgtaaattgtaccatgacgtttcatttaaaaatgatcatttaggtactttaaaaccgggtgatgaaattaatataatagatattgcttttacaaaaaatctaacaccacgtttaaaaacacaagatggttattttataactgctaataaaaaattcattgaagttttaagttaa

SEQ ID NO: 2891 - DNA, 750 bp, Staphylococcus epidermidis
atgaacacaaaaaatgtgcttgtatttcataatagccacatcgatggagatcatattaaatcttcatacaaaattgcactggaaaattctgataaagtagctcaatacctcttgctcacacatatgcaaaaagacgatattcaacatgcatatggtatcagcgatgaaaaaatatcgattgtacctcactttattaaaagctatggacaacaagatactcaagacaaagaggatagatttgtatttattggtagactaggcaaacaaaaacaagtggaccatttaatcaaatcttataatcaattcttaaaatatggacatcaaacgaaattagcgatttatggtgcagatgaacaaaatcaaaaacaagtcatactagatttagttaaagaatatcaaattgaagataaagttgatttaaatgattttaccaagcatccacttgaagaattcaaaaaatctaaagcctcactattaaccagtgaatatgaaggttttggtttaaccgttatggaaagtattgaagtaggttgcccagtcattgcttatgacgtaagatacggtcctggtgaaatcatagagcacggtgaaaatggttatcttgttgagccagataacattgaagcattcgcagcctatatggataaaataattaaaaatccactaacaaaagttgaaacaaaaaatgcactcaagtatgaacaagcaaagaataactatcagaagttgtttgagaaaatcaaaaaataa

SEQ ID NO: 2892 - DNA, 1068 bp, Staphylococcus epidermidis
ttgagagtttatacatcaatcattttttggatgagagcaatcgcttgtttaagtgtagtgatgattcatacaataacaacaactttctataagttcgatatgcctaactatgggtatatactgagaatatttcaattgttgttactttatgcgacacccatgtttgttttcatttcagaatttttattagctaaacaatataaaacgaaagttaaagatggattttttaagcagaaattactaactttaggaattccatatattatcatcaatttaggtcttgcttatgtatatgggcatccgaagaattttcacaattatttatcatcagttaattcaatgatgtttcacggtggtacgttaacttattttatcgtgattattttccagttttatttattacatgtcctatttgccaagtatctcgtgaaacttaatccgataaagataattatctattcattagtcattacatcactattttgggctatgcgaaatttcgtagaagcacctgaaacgatttatttaaattggatttggcaaagagaaggttggatgatcttcattggatggttaagttactttctacttggcttttatatgggatattattatgaaacaatgatgaatcgaattcaaaattatacatggcacattgtcatcggagcaactgtagttacgatatgcgtggtcttcaattatttatctggtattatgacacttgtagactctaaacgctttgatacaccgatttatgtgacaatgatcattttattgtttttcttaattgcgtcttatattaaatatgttccaagatttatcatttttattagtaattattcattttcaatatatttaattcattacttctttgtgcatagattaggttctttacataaccatcctttatttaatattctttttacctttacgttaacggtgactttctctgtttgtattggttaccttatgaatttaagccattacggtaagtatattgttggtggtatagggaaaatgaaatttgaaaagtattataaaagttatcaacaaaatttagtagattaa

SEQ ID NO: 2893 - DNA, 378 bp, Staphylococcus epidermidis
atgaacttcaattcaaaaataaataaaaaaataatgaaaaattataattgggaatattttaaagtccaaattaataaaaagctttcagaaccaaaaacaaaaagtatctacagtcaaagaaaaatagatgtggagcctgtttttggatttatgaaggctattttgggttatactcgaatgtccgttcgaggcataaacaaagtcaaaagagaactaggatttgtgctgatggcacttaatataagaaaagtaacagctcaactagctgaaaataatcaaaaaaattataaaaaagacaatttctatattatttcaatagaaattgtctttttttacttattctgggactttatgttccagactcattcctacgattag

SEQ ID NO: 2894 - DNA, 459 bp, Staphylococcus epidermidis
atgtcgtattggtttgaagagccttatcaatcattaagcgaattagaaaatttatatacaaagcatattttagatgaaacagagcgacgtttcattgttgaagagggatcaacatctgtaggcgtggtagagttattagaaattaactttatacatagaacttgtgaagtgttaattattatcgatccgcagtatgcaaataatgggtacgcgaaaaaagcctttaaaatggctattgactatgcttttttagtattaaatatgaataaagtatacttatatgtggatattaagaatgagaaagcagtacatatctatcaaagtaataatttcgaaatagaaggaacgttaaaggaacacttctatacaaggggagaatatagagattgctatgtaatgggcttgttaaaaaggaattgggttaataagaatgatgatgatttgtctcatataagatga

SEQ ID NO: 2895 - DNA, 1338 bp, Staphylococcus epidermidis
atgaaaagaccaataattcaaaaattaaatcacttgatagagaaaaaagctatctctatgcatgttcctggacataaaaacatgacaatcggctacttaaataggcttgatttagcaatggatatgacagaaattactggattagatgatatgcattatcctgaaggaattattttagaaagcatggagaattttaggaaacataaaaactatgatgctttcttattagttaacggaacgacttcaggtatattatcggttatccaagcgttttcgacaagaaaaggtaaatatttaattagtagaaatgttcataaatcagtatttcacggtttagacataacacaacaacaagcgacaataactaagacagatgtcagtaagaaaacgaatcaatatgtaaatccaaagataaatcaagataaaaatcaatattataaacttgccatctgtacataccctaattattacggtgaaacttttgatatttctcaatatatcaaacaattacatcacagagggataccgatattagtagatgaagcgcatggtgcacattttggtttagatggatttccagaatcctcaatgaattttaatgctgattacgttgtgcagtcatatcacaaaacactccctgcactaacaatgggatcagttatatatatacataaagatgcaccattaagacaacaagtcatagattatttaacttatttccaaacgtcaagtccttcgtacctcattatgtctagtttagaattagcgaataaattttataaagaatatgattctacattatttgaccaacgaagaaagatgttgattgatttattagtaaatatgggatttacagttatagaaccagaggatcctttaaaattggttgtgagttttgagggtgttgaaggttatgatgtgcaaaaatggtttgaggataaagaaatttatgtagaattagctgatatgtatcaagtgttactcgttctccccctatggcatgaaggagataaatttccttttaagttgttgattgaaaaaattagagaaattaacgtgccaaaaaaatgtacgcgcgacataaaacctcttaattttatgacgggttttagcgaatacaaaactgttcattttcaaaatacgaaagaagtgtctattaaaagggcagaaggtaaagttttagcacaacatatcgttccataccctccaggtataccggtgatgtttaaaggagaagtcgtgacgtctcatatgatagacttattaaataaatatgataaacaaaatattaaagttgaaggtttaaatcataaaaaaatattagttaaggatgaataa

SEQ ID NO: 2896 - DNA, 612 bp, Staphylococcus epidermidis
atgtctacatttataacgtttgaaggtccagaaggagcaggaaagacctcagtaattaaaaaagtaagcgaaagattagctaaagaatatgatattattacaacacgtgaacctggtggagtattaactagtgaagaaatacgtcgtattgtacttgatggagatagtatagacattcgaactgaagctatgctgttcgctgcatctagacgtgaacaccttgttgaaaagattatcccatctttacaggcaggtaaaattgtcctttgtgatagatatattgatagttcattggcttatcaaggttatgcaaggggtataggaattaaagaagtaaaattattaaatgaatttgcaattaatggtttgtatccagacttaacgatttatttagatgttgatgcggaaattggtcgtcaaagaattctaaaaaataacagagaacaaaacagattagataaagaggaaaaagcttttcatgaaaaagtgatcgaaggatatcaaaaagtgattagtgataatcctcatcggtttattaaagtcaatgctaaccatagtttggataaagttgttgaagaaacataccaatctatcatcaaatatttaaaataa

SEQ ID NO: 2897 - DNA, 330 bp, Staphylococcus epidermidis
atgaagatgattatagcgatcgttcaagatcaagatagtcaagagctttcagaccaactcgtaaaaaacaatttcagagctacaaagttagcaactactggtggatttttaagagcaggcaatacaactttcttatgtggggttaaggatgaccgtgtcgacgaggttctatctgtcattgataacacttgtggtaatagagaccaacttgtttcaccaataacaccaatgggtggtagtgcagattcatatattccttatccagttgaagttgaagtaggtggcgcgacagtatttgtaatgccgattgaagcatttcatcaattctag

SEQ ID NO: 2898 - DNA, 927 bp, Staphylococcus epidermidis
atggatgaacaacaacagttagctaacgcatatcattctaacaaattgtcacatgcatatttgtttgagggtgatgatgcacaaacgatgaaacgtgtcgcaatccattttactaaattaattctttgtaataatagtaatcaatgcgaactgaaagttgatacttttaatcatcctgacttttcatatgtgtcttctgatgaaaatacaattaaaaaagaacaaattgaacaacttgttcatcatatgaaccaactacctattgagggtcaatataaagtatatattattgaggattttgaaaaattaactgttcaaggggaaaatagtatactaaaatttttagaagagccccctgataatacaattgcgatacttttatcaacgaaaccggaacaaatattagacactatacattcaagatgtcagcatgtatattttaagcctattgataagcggcagtttatagagcgtttagtagagatgtcaatagcaagaccggtagcagaaatgctaagtacctatacaactcaaatagaagcagcatcgtcgttaaatgaggaatttgatttagttactttaagaaaatcaatcatcagatggtgtcaattaatattatctaataaagctatggctcttataggtgtcattgagttattaaaacaagctaagaatcgtaaattacaattacttactttatcagccgtcaatggctttttcgaagatataatgcatgcaaagatagaaatggataattattatacatttagtgatttaactgaagaaattgaaaattatgcaaatcaattaacttttaatcaattaatcctcatgtatgatcagattactgaagcgcataaaaagttaaatcaaaatgttaatccaacacttgtttttgaacaaatagtaataaaaggtgtgatttaa

SEQ ID NO: 2899 - DNA, 804 bp, Staphylococcus epidermidis
atgcccaatgttgtaggtgttcagtttcaaaaagcagggaaattagaatactacgcgccgaatcaattagatgtagaggttggtgactgggttgttgtccaatctaaaagaggtatagaaattggccacgtaaagtttccattacgtgaagttgatgtagaagatgtcacattaccgctaaaaaatatcattcgtaaaatgaatgaagatgatcaagaaacatattatcgtaatgaacgcgatgccaatgatgcgttagaattatgtaaaaaagtagttaaagatcagcaattagatatgcgattagttaattgtgaatatacattagataaatctaaagtgatttttaattttaccgcagatgatcgcattgattttcgcaaacttgttaaagttttagctcaaaatctaaagactagaatagaattacgtcaaattggggtaagagatgaagcgaaattattgggtggtatcggtccttgtggacgttctttatgttgttctacatttttaggagatttcgaacctgtatccattaaaatggcgaaagatcagaacctatcattaaatccaactaagatttcaggagcttgtggtagattgatgtgttgtcttaaatatgaaaatgactactatgaagaggctcgaactcaattacctgatgttggagatatgattcaaacaccagatggtcacggaaaagtgataggattaaatattttagatatttctatgcaagttaaaatagagggtctagaacaacctttagaatataaaatggaagagatagaagtattgaattaa

SEQ ID NO: 2900 - DNA, 348 bp, Staphylococcus epidermidis
ttgaatcgaaacgaattattcgaaagacttatgaaattagaacatcacgttgaacaacttacaaccgacatgtcagaacttaaagatttaacagtcgaacttgttgaggagaatgttgctttgcaagttgaaaatgaaaatttaaaacgattgatgaacaaaactgaagaatcggttgaaactcacttagataaagataattataagcatgtaaaaacaccatctccaagtaaagataatttagcaatgttatatcgtgaaggttttcatatttgtaagggtgaattattcgggaaacatcgtcatggtgaagattgcttattatgccttaatgtgttgagtgattaa

SEQ ID NO: 2901 - DNA, 726 bp, Staphylococcus epidermidis
atgttagaagataatgaacgcgttgaccatttaataaaagaaggatatgagattatacaaaatgatgaagtattctctttttctactgatgccctattgttagggtatttaaccgaagttcgcaaaaatgataaagttatggatttatgctccggcaatggtgttattccattattattagctgctaaatcaactcaacctattgaaggaatagaaatacaagagcaactagtgagtatggcacgtcgcagttttaaattgaatgatttgaacgatagactaactatgcaccatatggatttaaaagatgtatatcaaacatttcaacctgctcaatatacattagtgacttgtaatcctccttattttaaaatgaatcaaaatcatcaacatcaaaaagaagcacataaaatagcacgtcacgaaataatgtgtaatcttaaagattgtattgaagctgcaagacatttacttaaagagggtggtcgttttattatggttcatcgagcggaaaggctaatggatgtcttaaccgaattaagacatggtaaaattgagcctaaagcactgacgttagtgtatagtaaacatgataagcctgcacaaacaattgttgtggaaggaagaaaaggtggtaaccaaggtttagatatacgtaatccattatacatatataatgaggatggatcatatagcgatgagatgaaaggtgtttattatggataa

SEQ ID NO: 2902 - DNA, 249 bp, Staphylococcus epidermidis
atggataaacattttgtttatattgttaaatgtaatgacggaagtttatatacaggctatgctaaagatgtaaatgcacgcgtaataaagcataataacggtaagggtgctaaatatacaaaaataagacggccggtagagttagtttatcaagaaacatatacaacgaaatcggaagcattgaaacgtgaatatgaaattaaaacatatactagacaacaaaagttaaaaatgatacaggagggataa

SEQ ID NO: 2903 - DNA, 840 bp, Staphylococcus epidermidis
atgacaactttatatttagtaggaacaccaattggaaatcttggtgatattacatttcgagctatagaaacattaaaaaaagttgatgtgattgcatgtgaagatacacgtgtaacacggaaattgtgtaatcattatgaaatacaaacacctctaaagtcgtatcatgaacataataaagaacaacaaactgactatttaatcaagcagttacaaactggcttaaatatagcgttagtatcagatgctgggttgccattaattagtgatccaggatatgaattggttgtcgaagcacgtaaaaataatataaatatagaaacagtaccaggtcctaatgctgggttgactgcacttatgtcaagtggattaccatctttcacatacacatttttaggttttttgccaagaaaagaaaaagaaaaaattgaagtgcttgaggatagaatgtttcaaaatagtactttaatactttatgaatcgccttatagggttactgatactttgaaagcaatagctaaaatagattcacaaagatggattactgttggtagagagctaacgaagaaatttgaacaagttcttacacttacagttgatgatatgttgaaattgattaatcatgacaaattacctcttaaaggtgagtttgtgatactgattgaaggtgcattacctaagagtggtgaatcatggtttgaaagctatacggttaaagaacatgttgattattatattgaaaccaaacatgttaaacctaaaaaagcaattaaatttgtcgctacagatcgacatatgaagacgggtgacatatataatatttatcataatattgattaa

SEQ ID NO: 2904 - DNA, 1971 bp, Staphylococcus epidermidis
atggctaaagatacattttatataacaaccccaatatactatccgagcgggaacctacacatcggtcatgcatactctacagtcgcaggcgacgtgatagctcgctataaaagaatgcaaggctatgatgttcgttatttaactggcactgatgagcacggtcaaaaaatccaagaaaaagctcaaaaagctggcaaaacagaactagaatacttagatgaaatgatttcaggtattaaaaacttatggagtaaacttgagatttctaatgatgattttattcgaactacagaaaagcgtcataagcaagtcgttgagaaagtgtttgagcgattattaaaacaaggtgacatttatttaggtgaatacgaaggttggtattctgttcctgatgaaacatattatacagagtcacaacttgttgaccctgtttatgaaaacggcaaaattgtaggtggtaaaagtcctgattctggtcacgaagtcgaacttgtaaaagaagaaagctatttcttcaacattaataaatatacagaccgcttattagaattttacgatgaaaatccagactttatacaaccaccatctagaaaaaatgaaatgattaataactttatcaaaccaggtttagaagatttagcagtatcacgtacatcattcgattggggtgtacgtgtaccatctaatcctaaacatgttgtatacgtgtggattgatgcacttgttaattatatttcttcattaggttatctatctgatgatgaaacattatttaataaatattggccagcagacatacacttgatggctaaagaaattgtacgtttccactctattatatggccaatattgttaatggcgttggatttaccacttcctaaaaaagtttttgcacacggttggattttaatgaaagatggtaaaatgagtaaatctaaaggtaatgtcgtagatcctaatgtattaattgatcgttatggtcttgatgcgacacgttattacttaatgcgtgaattaccgtttggttctgatggcgtatttacaccggaagcctttgttgaaagaacaaattacgatcttgcgaatgatttaggtaatctagtgaatcgtactatctctatgataaacaaatatttccacggcgaattacctgcataccaaggtccaaaacatgaattggatgaaaaaatggaagcgatggcgcttgaaactgttaaatcattcaatgataatatggaaagtttacaattttctgttgctttatcaacagtatggaaatttattagtcgtacaaacaaatatattgatgaaactcaaccttgggttcttgcaaaagatgaaaatcaacgtgagatgcttggtaatgtaatggcacatcttgtcgagaacattcgtttcgctacaatcttattacaaccattcttgacgcatgcacctagagagatatttaagcaacttaatattaacaatccggatttacatcaattagatagtctgcaacaatatggtatgttgtcagaggcaattactgtaactgaaaagccaacaccaattttcccaagattagacactgaagcagaaattgcttatatcaaagaatcaatgcaaccacctaaatcaataaaacagtctgatgaacccggtaaagagcaaattgatatcaaagattttgataaagttgaaatcaaagcagcaaccattattgatgcggaaaatgtaaaaaaatcggagaaactattaaaaataaaagttgaattagataatgaacaacgtcaaatagtatctggtatagctaagttttatcgtccggaagacattattggtaaaaaagttgcagttgttactaatttaaaaccagctaaattgatgggacaaaaatccgaaggtatgattttgtcagctgaaaaagatggcgtacttaccttgataagcttgcctagcgcaattccaaatggtgcagtaattaaatag

SEQ ID NO: 2905 - DNA, 774 bp, Staphylococcus epidermidis
atgatgttaatcgatacgcatgtacatttaaatgatgaacaatatgatgaggatttaaatgaagtgatatctcgtgcgagagaagcaggcgtagatagaatgtgtgtagtaggttttgatacacctactattgaacgtactatggagctaatagataagtatgactttatctatggtattatcggttggcatcctgttgatgcaatagattgtactgatgaaagattggaatggatagaaagtctttctaaacatcctaaaattattggtattggtgagatggggttagattatcattgggataaatcaccttctgatgtacaaaaagaggtatttaaaaagcaaattgcattagctaaacgtgttcaattacctattattattcataatcgtgaagcgactcaagattgcatagatattttgattgaagaacatgcagaagaagtgggcggaataatgcatagttttagtgcttcacctgaaattgctgatgtcgtgattaataaattgaacttctatgtttcgcttggaggacccgtcactttcaaaaatgcaaaacaaccaaaagaagttgctaaacacgtaccaatggatcgtttgttatgcgagacagatgccccgtatctatccccgcacccttatagaggtaaacgtaatgaaccagaacgtgttactttagtagcacaacaaattgcagatttgcgtggtatgacttatgaagaggtctgtcgccaaacaaccgaaaatgctgaacgtttattcaatttgaattaa

SEQ ID NO: 2906 - DNA, 546 bp, Staphylococcus epidermidis
atgaaaataaacgaatttattgttgttgaaggtaaagatgatactgaacgagtaaaaagtgctgtagattgtgatactattgaaacaaacggtagtgcaattgatacatatactttagaagtgatacaacacgcgcagcaaactagaggtgtgattgtactgacagatccagatttcccaggtgataaaattagaaatactatacgggaacatgtttctggtgttaaacacgcatatgtagatagagaaaaggccaaaagtaaaagaggtaaaataggaatagaacatgcaaacattaaagatattcaagaagcattaatgcatgtaagttcaccacttgaagaagctaaagaaactattgataaaagtgtactcattgatttgggattaattatcggtaaagatgcaagataccgtagaaatatcttaggtcgaaaattacacatcggtcactctaatggaaagcaattattaaagaaacttaatgcttttggctatactgaagacgatgtcagaaaagcgctatttgaagaagaggagaattaa

SEQ ID NO: 2907 - DNA, 891 bp, Staphylococcus epidermidis
atggaatataaagatatagcaacaccatctcgaacacgtgctttgcttgatcaatatgggtttaattttaagaaaagtttaggacaaaattttctaatagatgtaaatatcattaataaaattatcgaagcgagtcatatagattgtacaacgggtgtaattgaagttggaccaggtatgggatcattgactgaacaacttgcaaagaatgctaagaaggtgatggcttttgaaattgatcaaagattaatacctgtgcttaaagatacactttcaccatacgataatgtaacaattatcaatgaagatatacttaaagctgatattgctaaagctgtagatacacatctacaagattgtgacaagattatggttgttgctaatttaccgtattatattaccacacctattttacttaatttgatgcaacaggatgtacctattgatggttttgtcgtaatgatgcaaaaagaggtaggagaacgtttgaacgctcaagtaggtaccaaagcatacggttcgttatcgattgttgctcaatactatacggagacaagtaaagttttaacagttcctaaaactgtatttatgcctcctccaaacgttgattctatcgttgtaaaattgatgcaacgccaagaaccacttgtacaggttgatgatgaggaaggcttttttaagttagcaaaggccgcttttgcacaacgacgtaaaacaattaataataactaccaaaacttctttaaagatggtaagaagaataaagaaactatacgacagtggctagaaagcgctggtattgatcctaaaagacgtggagaaacactcacgattcaagatttcgccacattatatgaacaaaagaaaaaattctccgaattaacaaattaa

SEQ ID NO: 2908 - DNA, 264 bp, Staphylococcus epidermidis
atgccaaaatcaattttggacatcaaaaattctattgattgtcatttaggaaatcgtattgtacttaaagccaatggtggacgtaaaaagacaattgaacgatcaggggttttaaaagaaacatatccatctgtttttattgtcgaattagatcaagataaacacaactttgaacgcgtatcttatacatacactgatgtgcttacagaaaatgtacaagtttcatttgaagaagataatcatcaagaagcagttgcacactaa

SEQ ID NO: 2909 - DNA, 849 bp, Staphylococcus epidermidis
atgatatatgaaactgcgccagctaagataaattttacgctcgacaccctttttaaaagagatgatggttatcatgaaattgaaatggtgatgacaacagttgatttaaatgatcgattatcttttgaaaagcgaactgataataaaattgttgtcgatattgagcataattatgttcctaacgataataaaaaccttgcgtataaagcagctgatttaatgtttgagagatttaatattaatgaaggtgtgacaatttcaatcgataaagatataccagtttcagctggacttgcaggtggttctgcggatgctgccgctacaatgagaggattgaatcgattgtttggtttaggtcaatctttagacgctttagctgcattaggcatacaaataggcacagacatacctttttgtatttataaccaaactgctgtgtgtacggggcgtggcgagcaagtaactttcctaaaaagaccaccttctgcatgggttgttttagctaagcctaacatcggaatttcatcacctgatgtatttaaagcactagatttaactgaagaacatatagttcataatgaaaagtgtaagcaagctttagagaacaatgattatcatttattatgcaatagtctttctaaccggttagagcctgtttctatggctatgcatcctgacattaaaaagattaaagataacatgctacaatgtggtgctgatggtgctttgatgagtggaagcggtcctactgtttacgggctagctcaaaaagaaagacaagctaaaaatatttataatgcagtgaatggttgttgtaatgaagtttacttagtaagattattaggatag

SEQ ID NO: 2910 - DNA, 825 bp, Staphylococcus epidermidis
atgagatataaaagaagcgaacgtattgtatttatgacacaatacctcatgaaccacccaaataagttgatacccctcacttattttgtaaagaaatttaaacaagcaaaatcgtcaattagtgaagacgttcaaatcattaaaaatacgtttcaaaatgaaaaattaggaactattattactacagcaggtgctagcggtggagtaacctataagcctatgatgagtaaatcagaggccacagaggttgttgatgaggtgatagagcaattacaagagaaagaccgtttgctacctggaggatatttatttttatccgatttagttggtaatccttctctattaaataaagtaggtaagttaattgctagtatatatatgaacgaagaacttgatgctgttgttaccatagcgactaaagggatatcacttgcgaatgcagtcgcaaacgtattaaatttacctgtagtggttataagaaaggacaataaagttacagaaggttctacggtttcaatcaattatgtttcaggatcatctagaaaaatagaaacaatggtgttatcgaaacgaactttagctgagaattctaatgttctcgtagtagacgattttatgagggctggtggctcaattaatggagtaatgaatttaatgaatgagtttaaagcccatgtaaaaggggtatcagtacttgtagaatcaaaagaagtaaaacaaagattaattgaagattatacttccttagtcagattgtcagatgtcgacgagtacaaccaagaatttaaagtggaaccaggtaacagtttgtctaaattttcttaa

SEQ ID NO: 2911 - DNA, 381 bp, Staphylococcus epidermidis
atgaaaataatcaactcagataaggtacccgaagcactaggcccatattcgcatgcaactgttataaacggttttgtctttacatcaggtcaaattccactcacacttgatggaacaattgttagcgatgatgttcaagaacaaactaagcaagttttagaaaatttaactgtggtattaaaagaagcaggttctgatttgaattctgttgttaaagcgacaatctatatttctgatatgaatgattttcaacaaattaatcaaatctatggaaactatttcgtcgaacaccaaccagctcgtagttgtgttgaagtgtcacggttgcctaaagacgtaaaggtagaaattgaattgataggtaaagtgaaggaattataa

SEQ ID NO: 2912 - DNA, 309 bp, Staphylococcus epidermidis
atgaaagtgacagatgtaagacttagaaaaatacaaacagacggcagaatgaaagcactcgtttccattacgctagatgaagcttttgtaattcatgatttacgtgtaattgaaggaaactcaggtcttttcgtcgcaatgccaagtaaacgtacaccagatggtgaattccgtgacatcgcgcatcctatcaattctgatatgagacaagaaatccaagatgcagtgatgaaagtatatgatgaaactgatgaagttattccagacaaaaatgctacttcagataacgaagaatcagacgaagcttaa

SEQ ID NO: 2913 - DNA, 1356 bp, Staphylococcus epidermidis
atgcaaagacatgcgattattctggcagcaggtaagggcacaagaatgaaatcaaagaaatataaagtgctccatgaggttgctggcaaaccaatggttgaacatgtgcttaacaacgtaaaacaagctggcgttgatcaaattgtaactattattggtcatggcgctgagagtgtgaaagatacattgggtaatcaatcattatatagttttcaggataaacaacttggaacagctcatgctgtgaaaatggcacatgaacatttagcagataaagaaggaactactctagtagtatgtggagatacaccacttattacataccaaactttacaatcacttattgaacatcatgaaagtacacaatcacatgttactgtattatctgcttctactatcaatccttatggttatggacgaattattagaaatcataatggaatattagagcgtattgttgaagagaaagacgcaaatgactcagaacgtgcgattaaagaaattagttcaggtatttttgcctttaataatcgagtactatttgagaagttagaacaagttaaaaatgataatgctcaaggagaatattatttacctgatgttttgtctttaattttaaaagacggaggtaaagctgaagtttattgtaccgaagattttgatgaaatcattggtgttaatgatcgtttgatgttaagtgaagctgaaaaggctttgcaacaacgtatcaatcgctatcatatggaaaatggtgtgacaatcattgatcctagttcaacatttattggaacagatgtgaaaattggaatagatacaactattgaaccgggcgtgcgcatcggaggtcatacaacgattgaagaagatgtgtggataggccaatactctgaaattaataatagcacaattcattcgaatgctaacataaaacaatcggttatcaatgactctattgttggagagaacacaacagttggacctttcgctcaactacgcccaggatctaatttaggttctgaagttaaagtaggaaactttgttgaagtgaagaaagcagatattaaagatggtgctaaagtatcacacttgagctacattggagatgctgaaataggtgagcgtacaaatatcggatgtggttctatcactgtaaactatgacggcgctaacaaatttaaaacaatagtaggtaaagatgcttttataggatgtaatacgaaccttatagcacctgtaacagtaggtaatcatactcttattgcagctggatccacaattacagataatatccctgaagatagtttagcattagcgcgtgcaagacaagtaaataaagagggctacctaaaaaaatag

SEQ ID NO: 2914 - DNA, 966 bp, Staphylococcus epidermidis
atgttaaataatgaatataagaattcatcaatgaagatcttttcgcttaaaggaaatgaacctttggcacaagaagtagcagatcatgtagggattgaattaggtaaatgttctgtaaaacgttttagtgatggagaaattcaaataaatattgaagaaagcattcgtggttgtgatgtttttattgttcaaccaacttcatacccagtcaatcttcatttaatggagttacttattatgattgatgcgtgtaaacgcgcgtcagcagcaaatattaacatcgtagtaccatactatggttacgctcgacaagatagaaaagcccgtagtcgtgaacctattactgctaaattagtagctaatttaatcgaaacagcaggtgccaatcgtatgatcgcattagacttacatgcacctcagatccaaggattcttcgatattcctattgatcatttaatgggtgttcctatccttgcacaacactttgagaatgatcctgatattaatccagaagaatgtgtagttgtgtcccctgaccatggtggggtaacacgagctcgtaaattagccgacattttaaaaactccaattgcaattatcgacaaaagacgtccaaaaccgaatgtggcagaagttatgaacattgtgggtgatattgaaggacgtactgcaattattatagatgacattattgatactgcaggaacaattactttagctgctcaagctttaaaagataaaggtgctaaagaagtctatgcttgctgtacacatccagtgctttctgggccagcgaaagaacgaattgaaaactctgcaatcaagcaacttatagtaacaaactcaattcaattagaagagaatagaaaacctaataatacaaaagaactttctgtagctggtttaattgcgaaagcaattattcgtgtatacgaaagagaatcagtaagtgtattatttgactaa

SEQ ID NO: 2915 - DNA, 660 bp, Staphylococcus epidermidis
atggcttcattaaagtcaatcattcgtcaaggtaaacaaacacgttctgacctaaaacaattaagaaactcaggtaaagtacctgcagttgtatatggttacggtacaaaaaatacttcagttaaagttgatgaagttgaatttatcaaagtaatccgtgaagtaggacgtaatggtgttattgatttaggcgtaggttctaaaacaattaaagtaatggtttcagattatcaatttgatccattaaaaaaccaaatcactcatattgactttttagcaatcaacatgagtgaagaacgtactgttgaagtacaagttcaattagttggtgaagctgtaggtgctaaagaaggcggcgtagttgaacaaccattattcaacttagaagttacagctacacctgaaaatattcctgaaactatcgaagtagatatcagtgaattacaagttaatgacagcttagcagtttctgatattaaaatctctggtgatttcacaatcgaaaataatccagaagattctatcgtaacagtagttcctccaacagatgaaccttctgaagaagaagttgaagctatggaaggcgaatcagcaactgaagaaccagaagttgttggtgaagacaaagaagacgatgaagaagaaaataaagaagactaa

SEQ ID NO: 2916 - DNA, 573 bp, Staphylococcus epidermidis
atgaaatgcattgtcggtcttggcaacattggtaaacgttttgaattaacaagacataatattggtttcgaagttgtcgatgatattctagaacgccaccaatttactttagacaaacaaaaatttaaaggtgcatatactattgaacgtttaaacggcgaaaaagtattatttattgagccaatgaccatgatgaacttatctggtcaagctgtagcccctttaatggattattataatgtcgatgttgaagatttgatcgttttatatgatgatttagatttagaacaaggacaagtgcgtctgcgccaaaaggggagtgcaggcggtcataatggtatgaaatcgataattaaaatgcttggtacagatcaatttaaacgtattcgaattggtgttggccgtccaacaaatgggatgtctgttccggactatgttttacaaaaattttcaaaagaagaaatgatcattatggaaaaggtaattgaacattctgcaagagctgtagaatcttttattgaaagttctcgttttgatcatgttatgaatgaatttaatggtgaagtcaagtga

SEQ ID NO: 2917 - DNA, 3501 bp, Staphylococcus epidermidis
atgattgcaaattacattagcgaagataatcgttttcaagaattagatgaagtcttcggccaagagaatattttagttacgggattatccccgtcagcgaaggcaacaattattgctgaaaaatatttaaaagatcataaacaaatgctactcgtaactaataatttataccaagcagataaaatcgaaactgacattttacaatatgtagatgactcagaagtttataaatatcctgttcaagatataatgactgaagagttttctactcaaagtccacaattgatgagtgagcgtgttagaacgttgactgcgttagcccaaggcgaaaaagggttatttattgtgcctttaaacggctttaaaaaatggctaacaccggttgatttatggaaagatcatcaaatgacgcttaaagtaggtcaggatattgatgttgatgcgttcttaaataaattagttaatatgggttatcgtcgagaaagtgtagtgtcacatattggtgagttttcattgcgtggtggaatcatagatatatatccgttgataggaacacctgtgagaatagagctatttgatactgaagttgattccatcagagactttgatgtagaaacacaacgttctaacgataatataaatcaagttgaaatcacaacagctagtgactacattattactgatgaagtgatacaacacttacaaaatgaacttaaaaaagcatatgaatatacacgccctaaaattgaaaagtccgtacgtaatgatttaaaagagacatatgaaagttttaagttgtttgaatctacctttttcgatcatcaattgttacgacgtcttgtttcatttatgtatgaaaaaccatcaacccttattgactattttcaaaaaaacgcgattattgtagttgatgagtttaatcgtattaaggaaacagaagaaacacttacaacagaagttgaagattttatgagtaacttaattgagagtggaaatggatttatcggacaaggatttatgaagtatgaaagttttgacgcattattagagcaacatgccgttgcatatttcacattatttacatcttcgatgcaagtaccattacaacatattattaagttctcttgtaaaccagttcaacaattttatggtcaatatgacattatgcgctcggaatttcaaagatacgtgcatcaagattacactgtcgtagttcttgttgaaactgaaacaaaagttgaacgtattcaatcaatgcttaatgaaatgcatattccaacagtatcaaatattcacgaagatattgatggtggtcaagttgtagtgacggaaggtagtctttctgaaggctttgaattaccttatatgcagttggtagtcatcacagaaagagaattatttaaaacaagacaaaagaaacaacgtaaacgaacaaaaacgatttctaatgctgaaaaaataaaatcatatcaagacctaaatgtgggcgattatatagtgcatgtgcatcatggtgtcggacgatacttaggtgtcgaaacactagaagttggagatacacatcgcgactatattaaattgcaatataaaggaactgatcaattattcgttccagttgatcaaatggatcaagttcaaaagtatgtggcttctgaagataagtcgcctagattaaataaattaggcgggacagaatggaaaaaaacaaaggcgaaagttcaacaaagtgttgaagatatagctgatgaattaattgatttgtataaagaacgtgaaatgtctgtaggttatcaatacggccaagatactgcagagcaatcagcatttgagcatgattttccatatgaattaacacccgatcaaagtaagtcgatcgatgaaattaaaggtgacatggaaagagcaagacctatggaccgtcttctttgtggtgatgtgggatatggtaaaactgaagtggctgtccgcgcagcgtttaaagctgtcatggatggtaagcaagttgcgtttttagtaccaacaacgattcttgcacaacaacactacgaaacactacttgaacgtatgcaagattttccggtcgaaattcaattggtaagtcgattccgcacagctaaagaaataagggaaactaaagaagggctcaaatcaggatatgttgacattgtcgtaggtacacataaattattaggtaaagatattcaatataaagatttgggattgcttattgttgatgaagaacaacgttttggagtgcgacataaagaacgcattaaaactttgaaaaaaaacgttgatgtactgacgcttactgcaacaccaataccaagaacattgcatatgagtatgttaggtgtacgtgacttatcagtgattgaaacaccacctgaaaatcgttttcctgtacaaacttatgtcttagaacagaatacgaactttattaaagaggcattagagcgtgaattatctcgcgatggacaagtattttatttgtataacaaagtgcagtccatttatgaaaaaagagaacaacttcaaatgttaatgcctgacgctaacattgctgtagcacatggccaaatgactgaacgtgatttagaggaaacaatgttaagctttattaatcacgagtacgatattttagtaacgactacaattattgaaacaggtgtagatgtaccaaatgctaatactttaatcatagaagaggctgatcgttttggtttaagccagctataccaattaagaggacgtgtaggacgttcaagtagaattggttacgcttatttcttacatccagctaacaaagtgttaaatgagactgctgaagagcgattgcaagctattaaggagtttaccgaactaggttcaggttttaaaatcgctatgcgagatttaaatattcgtggtgcaggcaatttactcggtaagcaacaacatggctttattgattcggttggtttcgatttatactctcaaatgttagaagaagcagtaaacgaaaaacgtggcattaaagaagaatcgccggatgcaccagatattgaagtagaattgcacttagatgcttatttaccagctgaatatatacaaagtgaacaggctaaaattgagatttataaaaaacttcgaaaagtagaaactgaagaacaacttttcgatgtcaaagatgaattaatagatcgttttaatgattatccaattgaagtcgaacgattattagacattgttgaaatcaaagtccacgctctacatgcgggtgtcgaattgataaaagacaaaggcaaatctatacaaatcattttatcacctaaagcgactgaagatattaatggagaagaattgtttaaacagacgcaacctcttggtagagcaatgaaagttggcgtgcaaaataatgcaatgaatgtaacgctaacaaaatcaaaacaatggttagatagtttgaaattcttagttagatgtattgaagaaagtatggcgattaaagatgaagactaa

SEQ ID NO: 2918 - DNA, 1542 bp, Staphylococcus epidermidis
atgaagactaagagtgagacggcgtttaacggcgtcgttatacttaccttagcattaattattgtgaagatactaagtgccatttatcgcattccgtatcaaaatgttttaggtgatgacggtttatatgcttatcaacaaatatatcctgtcgtagcactaggggttattttatctatgaatgccattccaagtgctgtgactcaagtgataggtgttaatcgatccgatgaagtctatacaagggttatgtttcgattacaatgcataggttttatcgtctttattttgctttttatgtttgcgaatatgattacccgatggatgggcgattctaatttagcacccatgttaaagatggccagttttagttttattttaataggtgtcttaggagtgttaagaggattttatcaatcaaagcaagtaatgaccataccagcaatttcccaggttatagaacaggtaattagagttagtttaatcattgttgcaattattatgttttcaatgaaacattggtctatttatcaagcaggagcattagctatattggcatcttcgattggttttttaggttcaatgttatatttattacttaaaaaaccacttaaacttaagttatgctatcgctttaataatacttccattcaatggaagcagttgtttatttccatatccatatttgcattgagtcaacttatcgttattttatggcaagttgtggatagttttacaataatacgtttattacaacatagcggtattgcttttaaagaagcaattattcaaaaaggcatttatgatcgtggtgcttcatttatacaaatgggtttgattgtaactacgacttttagtttcgttcttatcccattacttactcaagcaattcgtgaacataatcaaattcatatgaatcgttatgcaaatgcatcaattaaaatcacggtagtaataagtacagcagctagtataggattaattaatctgcttccacttatgaatgttgtattctttaaaagtaatcatttaactctaactttgagtatttatatgtttacagtgatatgtgtttcgttaataatgatgaatatctcattattacaagttcaaaccagtattcgtcccattattatgggtgtgataataggaatactgtccaaaattattttaaatgttatattaatacctttttggggtatcgtgggtgcaagtgtgagtacagtcttatcactactactttttgtcataatattgcaagttgcagtcttaaagtactaccgttttaatcgtatatctttatttatcgttaaacttattttaggtatgataattatgagtatagttgttcaaactgtcatgcttgccttaccttcaaaaagtaggatgttaggattactagaacttatagttagctcaattataggcatagtgattataatgttgtatattgttatatttaatgtattaggatacaaagaaataaagcacttaccttttggagacaaattatatcaaatgaagagaggaagacggtcatga

SEQ ID NO: 2919 - DNA, 1191 bp, Staphylococcus epidermidis
atgacacatacaattacaatagttggtttaggtaattatggcattgatgagttacctttaggtatctatcgttttttagaaaaagagtctaaagtatatgctagaaccttaaatcatcctgtcatcaatacgctaaagaaagaaattgaattcgagagtttcgatagtatttatgaagcacatgaccgttttgaagatgtttatgaagcgattgtcacatcactaatagaattggcacaatctgaagatattgtttatgcagttcctggtcatcctagagttgctgaaactacgactgtaaaattattagagtatagtcattttaataaggatatctctgtgaaggtacttggaggaaaaagttttattgatgacatttttgaagcggttgatgtagaccccaatgatggttttacactgcttgatggtacgtcattaaaagaatcggccttaaatgttcgtacaaatacagtaattactcaagtttatagcgtaatgatagctgccgatttaaaacttactttaatggaaagatatcctgatgattttaatgtgaaaataattactggttctcatagtgatggagctcacgtaattgaatgcccactttatgaaattgatcgctacgacgattattttaataatcttacaagtttatttattccaaaaatcaatgaggatacattactttatcaagattttgattacgcagttcaaactattgatttactcgttgataatgaaaaagggtgtccgtgggataaagtacaaactcacgactcattaaaacggtatcttttagaagaaacgtttgaattatttgaagccattgataatgaagatgattggcatatgatagaggaattaggagatatacttttacaagtattattacattctagtataggtaaaaaagaaggatatattgatatcaaagaaattatagaaagtctcaacaccaagatgattcatagacatccacatatctttggtaatgcgcatgtaacttcgcaagaggatttaaaagacatttggtcacgtgctaaagaaaaagaaggtaaagtgcctcgtgttaaatttgagaaagtatttgcagaccacttcttgaaattgtatgataaaacaaaaaataggcaatttgacgaagatgatctcaaacaatttttacaacaaggagagaaaaattcatga

SEQ ID NO: 2920 - DNA, 264 bp, Staphylococcus epidermidis
atgagattagataaatatctaaaagtgtcacgattagttaaacgacgtacattagctaaagaaattagcgaacaaggtcgagtgactgtcaatggaaatgtggcaaaagcaggtacagatatcaaagaaaacgatgaactcattattcgttttggacaaaaattagtcacagttaaagtaacaggattaagcgaccatgctacaaaagaaaatgcaaaaggtatgtatgatttgattaaagaagaacgtattaatgaagagtga

SEQ ID NO: 2921 - DNA, 402 bp, Staphylococcus epidermidis
atgaataaaaaagtagaacatatcggtaaccaatatacgtcacaagaaaataagaaaaaacaacgacaaaaaatgaaaatgcgtgttgtacgtagacgtattgctttattcggaggtattcttttagcgattatcctcattctacttgtattgcttgtcattcaaagacataataacgatcaagatgcagttgaaaggaaagagaaagaaactgagtttcaaaaacaacaagatgaagaaattgctttaaaagagaaacttaataatttaaatgataaagactatatcgagaaaatagcgagagacgattattatttaagtaataaaggtgaagtcatttttagattacctgatgataaaaaatcctctcagtcaaagacttcaaacgaaaaaggcaattag

SEQ ID NO: 2922 - DNA, 402 bp, Staphylococcus epidermidis
atgtcaatcgaagtaggaaacaagcttaaaggtaaagttacaggtatcaaaaagtttggtgcattcgtagaattacctgaaggaaaaagtggtttagttcatatcagtgaagttgccgacaattatgttgaaaatgttgaagaccacttatcagtaggtgacgaagtagaagttaaagttttatcaatcgcggatgatggtaaaattagtttatcaataaaaaaagctaaagaccgccctcgtaagcctcgtcacagtaaagctaatcacggtaaaccagttcaaaaaactgaagactttgagaaaaaattaagtaacttcttaaaagatagtgaagataaattaacgtcaattaaacgtcaaaccgaatcacgcagaggcggtaaaggttctagacgttaa

SEQ ID NO: 2923 - DNA, 1299 bp, Staphylococcus epidermidis
atgaatatcaaaacagatggttggtctaaaaaagcacatattgttgtggctgtctcaacaggcattgatagtatgagtttattatatagcttattaaacgactatcaacatacatatcgtaaattaacatgtgttcatgttaaccacggattgcgtgaacagtcatatgaagaagaagcgtttttgagagagtattgccatcaacatcatattgacatttatataaagcgtttagacttaagtgatattgtagcagacggtaatagtattcaacaagaagcgcgtcaacgtcgttatgaatggtttggagatatcatagctcaattaagagcagatgtattgttaacagctcatcatcttgatgatcaacttgaaacgattatatatcgtttgtttacagggagatcaacacgtaattcattaggtatgacatatgagtcgtattttaatcaatacaaagtgtatcgtcctatgttaaatttaaaaaaaactgaaatattagcgtatcagtatgcgaaccaaattccatactatgaggacatgtctaatcaagatagaaaatatgttagaaatgacattagacaacgcatcatacctgcaattaacgagaacccgcatttaaacgcgcatcagctactcaaacttaaggattggcatgatattgaattgcaatcgttaaaagaacaagctgaaacgttcatcaataacgaagtttcaaaaagtaaatatttaacctattccttttctagaactgcttttaatgaattgaatgtgaatatcaaaagcgtagttatggatttgttattcgaaaaattagattgtcatttagcaatgccacaacatgcttatgacgagtggtttgaacagattagaaatgataaatctcaatttaatattcacgtaacagatgaatggataattcaaattgcatatgataaattaataataatggctaaaagtgaaatggatcaatatatattagaccgtatatgtattagaaagccaggtacatatgaatttaatgattatcaaattgatattcatcctgacttaccacaacagttatatccgcttactgtgcgtgtccgacaaaatggagatgtgtataaattaaatggtcaaaaaggtcataaaaaagtgagtcgtttatttatcgataaaaaagtgactcttgctgaacgtcagcgcatcccactcattattaatcaagaaaatgcagtgttagctattggcgatttatatgttaaagaaaattttaaagaatttattttgatttcgaataatggagatgaattataa

SEQ ID NO: 2924 - DNA, 540 bp, Staphylococcus epidermidis
atgcataaggatttaaagaatgttttgttatcggaagaagacattcaaaatatttgtaaagagatgggagctatcattactgaggattataaagatcgcccactcgtttgtgttggtattttgaagggatcagtcatgtttatggcagacttaattaaacgtattgatacacatttatcaatcgattttatggatgtttcaagttatcatggtggaacggaatcgactggggaagttcaaatattgaaagatttaggtgcttctatagaaaataaagacgtacttataattgaagatatattagaaactggtacaactttaaaatctattacagagttattgcaatcacgtaaagttaactctttagaaatagctacattattagataaacctaaccgtcgcaaagctgatatcgaagcaaaatatgttggtaaaaagattccagatgaatttgtagttggttatggtttagattatcgtgagttatatagaaatctgccatacataggcacactaaaagcagaagtttattctaaatag

SEQ ID NO: 2925 - DNA, 2103 bp, Staphylococcus epidermidis
atgcagaaagcttttcgcaatgtgctagttatcgcaattattggcgttattatatttggcctcttttcatttttaaatggaaatgggaatatgccaaaacaacttacatatactcagtttgttaataagttgaataaaggcgatttaaaaactttagaaattcaaccagagcaaaacgtatatatggtaagtggtaaaacaaaaaaagatgaagattactcatcgacaattttatataacaatgaaaaagatttacaaaaaatcacagatacagctaagaaacaagataatcttaaatttacagttaaagaagaagaaaaacaaagtgtattcgttagtattttaacgacactgattcctgtattaatcattgcattattatttattttcttccttagccaagcccaaggtggcggcggtggtggtcgtatgatgaactttggaaaatccaaagctaagatgtacgacagtaataaacgtcgagttcgtttctcagatgtagcaggagctgacgaagagaaacaagaattaatagaaattgtagatttcttaaaagataacaagaaatttaaacaaatgggttcaagaattccaaaaggtgtcttacttgttgggcctccaggtacaggtaaaacattattagcacgtgcggttgcaggtgaagctggtgcaccattcttctcaattagtggatctgacttcgttgagatgtttgttggtgttggtgcgagtcgtgttcgtgatttatttgaaaatgctaagaaaaatgccccatgtatcatttttattgatgaaattgatgctgttggacgtcaacgtggtgcaggtgtaggtggcggtcatgatgagcgtgaacaaacattaaaccaactattagttgagatggatggttttggagaaaatgaaggtattattatgattgcggctacaaaccgcccagatatcttagaccctgcattgttacgtcctggtcgttttgatagacaaattcaagttggacgaccagatgttaaaggtcgtgaagcaattcttcatgtgcatgcgaaaaataaacctcttgatgaaacagtagatttaaaagctatttctcaaagaacgccaggtttttctggtgcagacttagaaaacttgctaaatgaggcatctttaattgcagcacgtgagggtaaaaataaaattgatatgcgcgatattgaagaagcaactgaccgtgttattgcaggtccagctaaaaaatctcgtgtaatttctgaaaaagaacgtaatattgtagcgcatcacgaagcaggtcatactatcatcggtatggtgcttgatgaagctgaaattgtacacaaggtaacaattgtccctcgtggacaagcaggcggttatgcaatgatgttaccaaaacaagatcgcttcttaatgacagaaccagaattactcgacaaaatatgtggtttattaggtggacgagtatctgaggatattaactttggtgaagtatcaacaggtgcttcgaatgactttgaacgagcaacgcaaattgcaagatctatggttacagaatatggtatgagtaagaaattaggaccattacaattctcaagcaatagtggtggacaagtattccttggtaaagatatgcaaggtgagccgaattattctggtcaaattgcttatgaaattgacaaagaagttcaacgaattgttaaagagcaatatgaacgttgtaaacaaatcttgttagaacatgaagaacaacttaagttaattgctaaaacactactttcagaagaaacattagttgcagaacaaattcaatcattattctatgatggtgttttaccagaagtagattatgactctgcaaaagttgtgaaaaatgaaaatagtgattatagtgatggaaagtatggaaaatcatacaacgacattcgtaaagaacagttagaagatgacgataaagaagatgatgacaaccatgaaaaagatgaagtaaaccaagacaacacagacagagaagctgataatacttcacatacgaatgaaccaggtcatcaacaatctccgaacatcgataaaccatacaatcctaacgatccaaatcatagacaatag

SEQ ID NO: 2926 - DNA, 882 bp, Staphylococcus epidermidis
atgacacatgattatatagtgagaggtttagcatacggtggggaaataagagcatatgctgcaatcacaacagagtcagtacaagaagcacaaacacgtcattatacatggcctactgcttctgccgctatgggaagaactatgacagctactgttatgatgggtgcaatgttaaaaggaaatcaaaagttaacagttactgttgatggcaaaggtccaattggcagaattattgctgacgcagatgctcaaggaaatgttcgtgcatatgtagaccatccacaaacgcattttccactcaacgatcaaggtaaattggatgtacggcgagcagttggtactgatggttccattcaggttgttaaagatgttggaatgaaagactacttttctggtgcgagtccaatagtatcaggtgagctaggagatgatttcacatactactatgccacaagtgaacaaacaccatcatcagtaggattgggtgtattagttaatccagacaactcaatcaaagcagcgggaggatttattattcaagttatgccaggtgctactgatgaaacggtgactaaattagaagaagccattagtcaaatgcaacctgtatcgaaattaattgagcaaggacttacacctgaaggaatattaaatgaaattttgggtgaaggtaatgttcaaattttaaattcaacgtcagcgcaatttgaatgtaattgtagtcatgagaaatttttaaatgctattaaaggtttaggagaggcagaaattcatagcatgattaaagaggatcatggagctgaagctgtatgtcacttctgtggtaataaatatcagtatagtgaaagtgaattagaagatttattagaaacaatgaaatag

SEQ ID NO: 2927 - DNA, 933 bp, Staphylococcus epidermidis
atggcacaaaaacctgtagattatgttacacaaattattgggaatacacctgtagtcaaattaagaaacgttgttgatgatgatgcagctgatatttatgttaagttagaatatcaaaatccaggtggttcggtaaaagatcgtatcgctttagcgatgattgaaaaagctgagcgtgaagggaaaattaaacctggtgatacaatcgttgagcctacgagtggtaacactggtataggtctagcatttgtatgtgctgccaaggggtacaaagcagtttttacaatgcctgaaacaatgagccaagagcgccgtaacttattaaaagcttatggtgctgaactagtattaacaccaggatctgaagctatgaaaggtgcaataaaaaaagctaaagaattaaaagaagagcacggctattttgaaccacaacaattcgaaaatccagcaaatcctgaaattcatgaacttacaactggaccagaattagttgaacaatttgaaggtcgacaaattgatgcatttttagctggtgtaggaactggtggtacgttatctggtgttggtaaagtattgaagaaagaatatccaaatgtggaaatagtagctattgaacctgaagcttctccagtattaagcggtggtgaaccaggccctcataaattacaaggattgggagcaggtttcgtacctgatactttaaatacagaagtttatgacagcatcatcaaagtaggtaatgatactgctatggatatggcacgtcgtgttgctagagaagaaggtatattagcaggtatttcatctggtgctgcaatatatgctgctattcaaaaagcaaaagaattaggtaaaggtaaaacagttgtaacagtattaccaagtaatggggaacgttacttatcaacaccattatattcatttgataattaa

SEQ ID NO: 2928 - DNA, 819 bp, Staphylococcus epidermidis
atgattaaaacaaaaataatggggatattaaatgtgacacctgactcattttctgacggaggacagtaccactcagttgatcaagctgtgaagcgtgctaaagagatgatagatgaaggtgtagacatcatagacgttggaggtgtctcaacacgaccaggtcataaagaagtatcgcataaagaagtatcgcttaaagaagaaatgaatcgtgtattgcctgtggttgagtctatcgttaaatatgatgtgcaaatttcggttgatacatttcgaagtgaagttgcggaagcttgtcttaaacttggtgtttcaatgattaatgatcagtgggcaggcctatttgattcgaatatgtttaatgtggtatctcaatacggtgctgaaattgtacttatgcataatggtgacggtcatagagataaacctgttgttgaagagatgcttgtatcattacttgcgcaagcgaataaggctgaactagccggtataccacataataaaatctggttagatcctggaataggttttgctaaaacacgagaagaagaaaatgaagtaatggcaagattagatgaattagtagcgaccgaatatccagttttacttgcaacaagtcgaaaaagatacattaaagaaatgatgaatcaagattcttctccttcagatagagatgaggcaactgcagctacaacggcttatggtataatgaaaggcgttcgtggggttcgagttcataatgtattattaaatacgcgactagcccaaagtatggattttctaaaggagaatgaatatgaacgacatcatctttcttaa

SEQ ID NO: 2929 - DNA, 366 bp, Staphylococcus epidermidis
atgaacgacatcatctttcttaatggaatgcgtttttatggttatcatggagtattagctgcagaaaatgatattggacaaatttttgttgttgatattactttaaaggttgatcttagttatgcaggtcaatcagatgatgtaaaagatactgtaaattatggagaggtttataaagatgtaaagtctattgttgaagggccacgttcatgcttaattgagcatctggctgaacgtattgcaaaacatataaattcacactataatcgtgtaatggaaacgaaagttagaatcactaaagaaaacccacctattcctggtcattacgatggtgttgggattgaaatagtgagggagaatgattaa

SEQ ID NO: 2930 - DNA, 480 bp, Staphylococcus epidermidis
atggttaaagcttatttaggattagggagcaatattggaaatagagaactacaactcaatgaggctattaaaatacttcatgactatcaaggtattcaagtaactcaagtttctcatatttatgagactgaaccagtgggatatactaatcaaccgaaattcttaaacttgtgcattgagatagagactgaattgaatccacaatctttgttaaaatgttgtttaacaacggaacaacaacttcatcgtaaaagagaaatacgttgggggcctagaactttagatatagatatactactgtttggtgatcaaattattgaacaagataatttatcagtgccgcaccctagaatgaaagaacgttcgtttgttcttatcccgttaaatgatatagccaccaaacaaatagaaccgatttctaataaaagtatcggacaactagtagtacctgataatagtgtgaaaaaatataaggaataa

SEQ ID NO: 2931 - DNA, 1488 bp, Staphylococcus epidermidis
atgtcagaagaaatgaacgaccaaatgcaagttcgtcgtcaaaaattacaagaattaattgatttagggattgatccttttggtcatcgattcaatcgctcatctacttcaagtgagttaaaagaacagtgggaccaattctctaaggaagaattgcatgaaaaagaagacgaaagccacgtgtcaattgcaggtcgtcttatgactaaacgtggtaaaggtaaagcgggatttgcacatattcaagacttgaaaggtcagattcaaatttatgtaagaaaagatcaagttggagatgatcaatttaacatttggaaaatggctgacttaggtgacatcataggtgttgaaggtgtcatgtttaaaactaatacgggcgagatttctgtcaaagctaagtcatttactttactatccaaatcattacgacctttacctgataagttccatggtttacaagatatagaacaaagatatcgacaacgttatttagatttaattacaaatgaagatagtacgcaaacgtttattaatcgtagtaaaataattcaagaaatgagaaactatttaaataaacaaggattcttggaagtagaaacaccaatgatgcaccaaattgctggaggtgctgctgcacgtccgtttgttacgcatcataacgcattagatgctactctttatatgcgtatagctatagaactacatttgaaacggttaattgtcggaggtcttgaaaaagtctacgagataggcagagtttttcgtaatgaaggtgtatctacaagacataaccctgaatttacaatgattgaattgtatgaagcttatgctgattatcatgatataatggatttaactgaaaatatggtcagacacattgctcaagaagtgtttgggtcagctaaagtacaatataatgatgaagaaattgacttagaatcttcatggaaacgacttcacattgttgatgctgttaaagaagttaccggtgtagatttttataatgttaattctgatgaagaagctattagattagcaaaagaacatgatattgaaattactgaaaatatgaaatatggccatatattaaatgaattttttgaacagaaagttgaagaaacacttattcaaccaacgtttatttatggtcaccctattgaaatttcaccgttagcaaagaaaaatccaaacgatgaaagatttactgatcgttttgaattatttattgtaggaagagagcatgcaaatgccttcacggaattaaacgatccgattgatcaacgccaacgttttgaagcacagcttgttgaaaaagaacaaggaaatgatgaagctcatgatatggatgaggattacatcgaagcattagagtatggaatgcctccaactggtggtctaggtatcggtatcgacagattagtaatgctattaactgattctccgtcaattagagacgtattactattcccatacatgagacaaaaatag

SEQ ID NO: 2932 - DNA, 219 bp, Staphylococcus epidermidis
atgtataaagattataacatgactcaacttactctaccaatggaaacttcagttcttatccccacaaatgatatttcacgacatgtaaatgatattgtagaaacaattctagagactgaattcagacatcatcgtgatgcaatatcataccatccaaaaataatgttaaaagtagttttatatgcctatacccaatctgtgttttcaggacgtagatag

SEQ ID NO: 2933 - DNA, 153 bp, Staphylococcus epidermidis
atggcacttaatataagaaaagtaacagctcaacgagctgaaaataatcaaaaaaataataaaaaagacaatttctatataatttcaatagaaattgtcttttttatttatcttggaactttaagtcccacactctttatttatgtgagatag

SEQ ID NO: 2934 - DNA, 156 bp, Staphylococcus epidermidis
atgagaaaggttcaatgtattatttgcgatactaaagtttttattgatgaacatacagtcgaggctaaacgcttaaaaaataatcctatacgcactttcatgtgcgatgattgtaaaagtagactcgatacacctaaacaaagcaaacgagattaa

SEQ ID NO: 2935 - DNA, 483 bp, Staphylococcus epidermidis
atgattcaaataaaaggagcagtcaatttccctatttcattggatagtacgacttggatatttgacgatagaaaagttactattgatgatttagaacgtggggtatttgatggtactagacccatcaactttgatgataacaaggaatggaaccgtgctattttagaaggacaaacaaatccaccaacgcttgattctgaaattaaatataaaaaacgatcggttttagatgaaacatttgtgataaatatgacaccatttttcaaaaacgccgaacctatggaaaatgctagcacaataaaactttctaataaagattattccatcaatgtacccatggacttattaccttatttgttctttcaattttctagtaatggcaaacgtttatatagtgataatgctgttgatagtttcatatatattcctgaagaaggatactctcatcaatttaagtatgtcacacatatagaggtgatttaa

SEQ ID NO: 2936 - DNA, 276 bp, Staphylococcus epidermidis
atgtctaaccaatcgaagttaaatagtgcggcatatgaccaattgaataaagatgcagacagaatattacatctaattaaagttcaaatggataacttaactttaccttcttgtccactttatgaagaggttttagatactcaaatgtttggtttacaaaaggaagttgatttcgcagttcaacttggattagttgataaagaagatggtaagcaattaatgttaagacttgaaaaagaactttctaaattgcatgaagcatttacgaatgtttaa

SEQ ID NO: 2937 - DNA, 1224 bp, Staphylococcus epidermidis
atgaaaaattttaaaaatataatgcgatatattggaaagacttctaaatttatcgattatccattgttaataacttatgttgtcctctgtttgattggattagtaatggtttatagcgcaagcatggttgcagctacaaaaggtacgttaaccgggggagtaccagtttccggaacatacttctacaatcgacaacttttatacgttatcatgagctttgttatcgtattttttatggcttttattatgaatgttaaagtattaaaaaagcctaatgttcaaaaaggtatgatgattggtatttttatacttttactactaacattagtaataggaaaaaatatcaatggttctaaaagttggattaacttagggttcatgaacttacaagcttcggagttattgaagatttcaataattctatacataccatttatgattgaaaagaagatgcctgcggtgaggcataatataaaattaatattaggaccaattttgtttgttgtaacttgtttgatacttgttctttttcaaaaagatgttggtcaaacaatgctgattgtgatcatattcttctcaattattttttactcaggtatcggtgtgcagaatatgttaaaatggggcgctttggtagctattggttttatcatcgtagctacatttatgttcatgttagatatggttccaagttatttgcaagcacgttttagtacgttaaccaatccatttagtcaagaatcaggcacaggatatcatatttctaattctcttttggcaattggcaatggtgggttgttcggacgtggtctaggaaatagtattatgaagcttggttatttgccagagccacatacagactttatatttgctattatttgtgaagagatgggattaatcggtggcttaatcgttttaattttagagtactttattgtatatcgcgctttccaacttgctaataaaacgcaatcgtatttttataaattagtttgcgttgggatagctagttatatcggaagccaaacattcgtaaatatcggtggtatttctgctacaattccacttactggtgtaccgttaccatttattagttttggtggttcatcgatgattagtttaagtatagctatgggattactacttattacagcaaaacagataaaacaagatgataaacgactgaaacaacgtaaggtagatattaaacgtcgatataattaa

SEQ ID NO: 2938 - DNA, 3444 bp, Staphylococcus epidermidis
ttgaaacaaataaagaaattacttgttgctaaccgtggtgaaatcgccattagaatttttagagcggcagcagaattaaatatcagtacagtagcaatttattctaatgaagataaaagttcgttacatagatataaagcagatgaatcctatctagttggaagtgatttaggacctgctgaaagttatttgaatatcgaacgtatcatcgaagtagctcttcgcgcaggtgtcgatgcaattcatcctgggtatggttttttaagtgaaaatgaacaatttgcacgccgatgtgctgaggaaggcattaaatttataggtccgcatcttgaacatctagacatgtttggagataaggttaaggctagaacaactgctattaacgctaacttacctgtaatcccgggtacagatggtcctattgaaagttttgaagctgcagaacagtttgctaatgaagcaggttacccacttatgattaaggccacaagcggtggcggtggtaaaggtatgcgaatcgttcgtgaatcaagcgaattagaagacgctttccatcgtgcgaaatcagaagccgaaaagtcatttggtaatagcgaagtttatatcgaaagatatattgataatccaaagcatatagaggttcaagttattggtgatgaattcgggaatatcattcatttgtatgaaagagattgctccgtacaacgacgtcatcaaaaggttgttgaagttgcaccttcagtaggtctttctaacaaattaagagagcgaatttgtgatgccgcaattcaactgatggaaaatataaaatacgtcaacgctggaacagtagaatttttagtttctggggatgaatttttcttcattgaggttaatccacgtgttcaagttgagcatacaattactgaaatgattactggtatagacattgtgaaaacgcaaattttagttgctgatggagaatcgttatttggagataaaatctctatgccacagcaaaatgaaattcaaacattagggtatgcgatacaatgtcgtataacaactgaagatcctactaatgattttatgccagattctggcacaattattgcatatcgatcaagtggcggttttggtgtgagacttgatgcaggggatggattccaaggtgcagaaatttcaccttactacgattcactattagttaagctttctacacatgccgtttcatttaaacaagctgaagagaaaatggaacgttcattacgcgaaatgcgaattcgtggcgtaaagacgaatattccatttctcatcaatgttatgcgtaatgataaatttagaagtggtgattatactactaaatttattgaagaaacacctgaacttttcgatattgcaccgacattggacagaggtaccaagactttagagtatattggtaatgtgacgataaacggatttcctaatgtagaaaagcgtccaaaaccagaatatgaatctaccaaaatcccaaaaatttctcaaaagaaaatcaatcagttatttggaacaaaacaaattcttgagcaacatggaccaacaggtgttacaaattgggttagagaacaagaagatgttttaattaccgatactacatttagagatgcacaccaatctttacttgcaacacgtgtaagaacaaaagatatgatgaacattgcatctaaaactgctgaagtttttaaagatagtttttcattagaaatgtggggtggtgcaacatttgatgtcgcctataatttcttgaaagagaatccatgggaacgtttagaaagattgcgcaaagccattccgaatgtgttattccaaatgttattacgagcttcgaacgcagtaggttataaaaactatcctgataatgtaattaagaaattcgttcatgaaagtgcaaaagctggtgtagatgttttccgtatattcgactcattgaactgggttgatcaaatgaaagtagcgaatgaagctgttcaagaagctggaatggtatctgagggtacaatttgctatacaggtgatattttaaatgctgaacgttccaatatttatactttagattattacgttaaaatggctaaagaactggaaagagaaggattccatatattagcaattaaagatatggctggtttattgaaaccgaaagcagcttacgaattaattggtgaattacgtgaggcaacacatcttccaattcatttacatacacatgatactagtggaaatggattgttgacatataaacaagcaattgatgctggcgtagatattatagatactgctgttgcatctatgagtggtttaacgagtcaaccaagtgcaaattcattatattatgcactaaatggatttccacgtaatttaagaactgatattgatgggttagaagagttgagtcattactggtctgtagtcagaccttactatgcagactttgagagtgatatcaaatcaccaaatacagaaatttatcaacatgaaatgccaggtggccaatattcaaacttaagtcaacaagctaaaagtttaggattgggcgaacgttttgatgaagtcaaagagatgtatcgtcgtgtcaacttcctgtttggagatcttgtaaaagtaacaccatcttcaaaggtagttggagatatggcactatatatggtgcaaaatgatcttgatgaagatacggtcatcaatgatggttataaattagatttcccagaatctgttgtgtcattctttaaaggtgacattggacaacctgtcaacggattcaacaagaaattgcaagatgttattttaaaaggacagcaaccaattactgaaagaccaggtgaatacttggagccggtcgattttgaagcaatccgtcaagaattaagcgacatacaacaagacgaggtaacagaacaagatataattagttatgtactttatccgaaggtatataaacaatatattcaaacgaaagagcaatttggtaatgtatctttactggatacaccgacattcttatttggcatgcgtaatggtgaaacagttgaaattgaaattgatactggtaaacgtctaattattaaattagaaacaatcagtgaaccagatgagaatggtaaacgtacaatttattacgctatgaatggtcaagcaagacgtatttatattcaagatgaaaatgttaaaacgaatgctaatgttaaacctaaggcggataaatcaaatccaaatcatattggtgctcaaatgcctggttctgtaactgaagtcaaagtgtctgtaggcgatgaagttcaagctaatcagccattattaatcactgaagcaatgaagatggaaacgacgattcaggcaccatttgatggaattattaaacaaatcaatgttgctaatggagatgccattgccacaggagatttattagtggaaattgaaaagtaa

SEQ ID NO: 2939 - DNA, 909 bp, Staphylococcus epidermidis
ttgtttagaaagcaaaaccttaaatggttaggtgttttagctacgattattatgacctttgtacaattaggtggcgccctcgtaactaaaacgggatcagaagatggttgtggctcgtcttggcctttatgtaatggcgctttacttccagaaaatttaccaatacaaacaattatagaactgagtcatcgcgcagtatcagccatttcacttatagttgtattatggcttgtaattacagcttggaaaaacattggatatattaaagaaatcaaaccactctctattattagtgttggttttttattagttcaagcacttgtaggtgctgctgctgtgatatggcaacaaaatccttatgtattagcgctacattttggtatttcacttatcagtttctcttctgttttcttaatgacattaattattttctcaattgacaaaaaatatgaagctgacattttatttattcacaaacctttacgtatcttaacttggttaatggctatcatcgtatacttaactatttatacaggtgctttagttagacatactaaatcaagtcttgcttatggtgcttggcctattccatttgatgatatcgttcctcataatgcgcatgattgggtacaattttcgcacagaggtatggcgctcatcacttttatctggattatgattacatttatacacgctattaagaattattcagataatcgaactgtacgttatggttatactgcatcatttatacttgttatccttcaagttattacaggtgctttatcagtcataactaatgtcaatttaattattgcgttattccatgctttgtttatcacttacttattcggaatgattgcttattttattttactaatgttaagaacgacgagaagtcaaaaataa

SEQ ID NO: 2940 - DNA, 912 bp, Staphylococcus epidermidis
atgaacaaagatcaaactttgtcacatactacgggccgtgtatccttcaaagaattacaacaaattattaaaatgggccttgttcaaggtaatttaatacctgcttttgcaggcgcatggcttgcaatagtaatgacaaaccattccttcctatcttccattccacaaatactattgatgctagttggctctacgcttattatggggggcgcttgtgctttaaataattattatgatcaagatattgatcgcattatgcctagtaagcaaagtagaccaacagtaaatgatagaatatctgatagaaacttattaatgttaagttttgggatgatgttaataggtgaagcatgtttattcttattaaatataccttctggtgttttaggattaattggtattgttggatatgtatcttactattcaatttggtctaagcgccatacaacttggaatactgttgttggaagttttcctggagctgtaccaccattaattggttgggtagctatcgatggatcattaagtttagcagcagtagcactctttttagttgtcttttgttggcaacctatccatttctacgctctagcaattaaacgtagtgatgagtatgcgcttgcaaatattcctatgttaccatcagtgaaaggtttcaaacggacaagagtaagcatgtttatttggttagtgttattattaccattgccattcttattatctaatttaggcgtaacttttgttgttattgctacactacttaatttaggatggttagctttaggttttacaacgttcagaaaagaatctaatcaaactaaatgggcaacgcaaatgttcgtttattcattgaactacttagtagtattctttgcactcgttgtagttgtttcattaatcaagatgatataa

SEQ ID NO: 2941 - DNA, 462 bp, Staphylococcus epidermidis
atgaacgtacccattttaccaacgataagtacatcgtgtattgttattagtgcgattttagtcgctattggttgggcattgatttggaaacgtcaagttcataagcataaaaacattatgctatgggctgcctttttcgctttaacattctttattatttatgcagcaagaactatttttatcggtaatacagctttcggtggaccaagttctattaaagtttattacactattttcttagttttccatatcattcttgcaacagttggtggcgttttaggcttaattcaaatcattttagccttcaaagataaacttcatattcacagaaaaattgggccttgggcttcaataatttggttctttaccgcaattactggtgttgcagtttatgtattgttatatgtattgtatccaggtggagaaacaacatcattgcttaaagctacattaggtctataa

SEQ ID NO: 2942 - DNA, 1053 bp, Staphylococcus epidermidis
atgaagaagttaataattaaagttattggtgttatattattagtgacatttttaatttatctcttttactcaccacgtttaaagtttgatgttctagagaatccaaataaaaatagcaaaacgactaagacggagcaatttaaacaggtgaataaggatgctgagaaccctaaacctaaagaagggatagggacttggattggaaaagatattaaaacactaacgcatcattatggacaagctgatcggtcttatccatataaaaatgggttaaaaaattatgtctttaaacagaaagatgaatattatattgtaagtactaataaaggaacaatcacatcagtttatgccacaggtaaaggtgtgaaagtgagcccacttaaaataggtgaaagttcatctcatatttttgaagatactagtattaatccagaaccaactgtcaaaacgaaaggtaaaacttataaatttgaaatgtctgatgaagacttaaagacacagacgttaattaaatatggagatgtttatgctcaaatatattctgatcaacaaactaataaaattttggcagtgagatttttagatgcaaatacattggcaacactacaaccatataagttaaatagagcagaagatgagggacaaattagtgaaagttccgacgataaaattccacatgaacaaaaccctaatcaattgattacactctatgaagtaacgaataaaatgagagaaatgaaaaatttaaaatcacttaaagttaacaacgatattgctcgtattgctgctatcaatctgtatgaagcaacggataaaggatcaaacagtgtggagtttactgagaatgctttaacacaacaactggatgaacgccatgtaagttataagtcagcaagtcaaaatgtaggttatgattttgacgatgtgcctacacttattcatagttggattaattctgatattcatcgctcacgcttgttaagtaataaatatgatgaaatgggtggagaagtgatgagtgattattattcattaatatttgtagaaaagtaa

SEQ ID NO: 2943 - DNA, 435 bp, Staphylococcus epidermidis
gtgattactgaagaaacattagacattttagatgatattgaggatatctcggatatgattgtacaatctgatatttatgtctcataccgacgagctaaaatgcaattagatgctgatgatgaagcaagtctactttatcaagcttttctaaaagtgaaagataagtatgatgatgtgatgagatttggaaaatatcatcccgattacaaagatattatgttagaaactcgaaaacgaaaacgtgcttatgaaatgcttccagtagtaatggagtataaagcaaaggaagtggcattacaaaatttaattgacgaagtgatgtccaaaatcgcatttgctgtttctgagcatgtaaaaattgaaacaggtaatcctttcttccaaactggacatgatggatgtgcatctggtggcacatgtaactgttcattgtaa

SEQ ID NO: 2944 - DNA, 927 bp, Staphylococcus epidermidis
atggctcattcaaaaaaatggtttattaatggtacgttggcaacagccggtattataagcagtctattttactttttaaaaaataaaaataaatcaccgcaacaattaaaatctattccacctttcttctcaggacaagcaccttacatatttgcacatagaggtggcatggcaatgcgaccagagcaaacacagttggcatttgataatgctgttgaatatggattggatggctttgaaacagatgtacgactaactaaagatgaacaactcattgtttttcacgatgcacttgtcgaccgtacaactaatggttcaggtaaagtgagtgaacatactctagctgaactaaaacgattagatgcgggatatcattttactgacatcaataatcaaacaccttatcgcgggcacgataaagctaagattttatcattcgaggaactgcttgaattgtaccctaatatgtatatcaatgtggatttaaaagatgcgccagacacatatgaaggtcgtatcgcaccaaaagtgatttacgataatatcatcaaacatggggcgcaacatcgagtgctcgttacaagcttccataaaaaacaaattcaacgtttcactgagtataaccaagctgacattgctatcggtgctagtgaaggcgaagttgctgaaggttttattaaatttaacggcatgttaggtcacacatttaaaccacaagcagacacattccaaatgccagttgcatataaaggaatttcattaacttctaagcgtttcattcaatggcttaacttaaataatattgtacccggttactatggtgtgaatagtatagatttaatgacagatttatatcataaaggtgttcatactttagttacagatcgcccagatttaggtcaacaatttaaagaaactttaaaataa

SEQ ID NO: 2945 - DNA, 252 bp, Staphylococcus epidermidis
atgaatataattcctagaacgagtttaattatttatttaaaacatatgaaacatgagcgacaaattagaaaatatggacacatcgtgcactcaaaccgtcaacgaaaatatgttgtgatgtatataaatgaagcagatgctgacaatattgttcataaacttatgcaactcaagtacgttcacgacattcaaggttccccatataaatatttgaaaaaaacatatgaaaaagaaaaacatgaaatacaatag

SEQ ID NO: 2946 - DNA, 390 bp, Staphylococcus epidermidis
atgaaacaatcatttattaaaattggtgaaggtttaaccgatttattcgaatttacaactcttatagaatataatcataagcgaatcaatcgtattgtgtatttccatacacctcattctgagaaacaattatcgtccgttgcaataataatgaaccctactgctgaaaaacatttccaggctatgtatatcatgacaaatgccttaaaatatccctatccagagggcaacaaaaaattcaatatgattaattcagctgcagaaaattatgacataccagttgtaggtatcgacgtacaacctcctgatgtatatccagacttagaattatattttaactaccttatcagtgttttgcgtcttcaaagatggataccacctttgcaataa

SEQ ID NO: 2947 - DNA, 543 bp, Staphylococcus epidermidis
atgcgtgtaattgcgggtaagcataaaagtaaagcgctagaaagtttagaggggcgaaatactcgtccaactatggataaagttaaagaaggtatttttaatagtttatatgatgtttctggtttaggattagacttatttgccggtagtggtgcacttggcattgaagcattatcccgtggtatggataaaatgatttttgtagatcaaaattttaaagcggtcaaggttataaaagctaatcttaatcaattagatttaatgtcacaagctgaagtctataaaaataatgctgacagagcacttaaagcacttgctaaacgagaaatacaattcgatgttatctttttagacccaccttataataaagggcttataaatgaggcgatttctcgtatagcagagtttaacttattaaaagaaaatggtattatcgtttgtgagtttagtcataatgaagaaataacaattgcgccatttcaaatgattaagcgttatcattatggtttgacagatactttgttacttgaaaaaggagaataa

SEQ ID NO: 2948 - DNA, 486 bp, Staphylococcus epidermidis
atgagtaagacaagagcagttattcccggtagttttgatccaattacatatggtcacttagatatcattgaaagaagcgccgaccgctttgatgaaatccatgtttgtgtactaaaaaatagtagtaaaggtggaacgtttgactcagaagaacgcatgacgttgattgaagagtcggttaaacatttgcctaatatacaagtgcatcattttaatggattgcttgttgatttttgtgatcaagtaggtgcaaagacaattattcgaggtttaagagctgtaagtgactttgaatatgaactacgacttacttctatgaacaaaaagttaaatagtaatattgaaacaatgtacatgatgacaagtgcaaactattcatttataagttcaagtattgttaaagaagtagctgcatatcaagcggacatttcaccttttgtaccacctcatgtcgaaagagcattaaaaaagaaatttaatgtctaa

SEQ ID NO: 2949 - DNA, 1134 bp, Staphylococcus epidermidis
atgaaaagtgttggactgataactgaatataatccttttcataacgggcacttatttcacgctacattgtcaaaacaacgctctgaaactaatgtaactattgctattatgagtggcaattttgtgatgcgtggagaaccagcaatctaccataaatttaaacgcactgaaatggctttatccgctgtagatttggtcgttgagctaccattgataggtagcctatcttctagtgatacctttgcggaaatagctattaaaacagctcagtatctcgatatagatattatatcttttggcagtgaaagtgcatccttaaaagatttacaatatcttgcaacacaaatgattgactatgaaaaacatccagattttaaagagaaattaaaacaaggtaaaagctatccacgaatcttaagtgagttaacacataacgacacacttttacaatctccaaacaatattttaggaataagctaccttaaagcaatgcagcaatttgcgcctcacatgtcagcattgactattaaaagagaaggttcacttcatcatcaaaaagtaattgatcaccatcattttgcaagtggaacatctattaggcgttcgctaatgaatgataatgtagactggaaaaatgtggtcccaaatcaaatacaatctttatattgtaaacctcatactacggttgaggatacatttccttttatcaaacaccaattaattacacaaccaaaagagagccttcattctatttacacaataaatgaggggtttgaaaatcgcttgcaaacaatgattcatcgaagcgattcctttgagtctctattatcaaaccttaaaacaaaacgttatacgcagacatatattcaacgtgtattaatgaatgtgttattaaatataacaaaagatgatgttaacaaggaaattaacgctgttagagttttaggaatgagtgaaaaaggacgctcatatttaaaatatttaaaagctaattatccaaatcgtcactacattactaatgtaaatcaaaagactgcacactattttaaaaatgaaattaaagcgactcatgtatataatctattaagtaatcaatcacagacagactttaacacacctttagtacgcatttaa

SEQ ID NO: 2950 - DNA, 555 bp, Staphylococcus epidermidis
atgaaatggtcaataacacaattgagaaaatatcaaggtaagccatttgaatttaatcaaacggttaattttgagcatttaagagaatcattagatttaattgatctttcagatatcaatgttgaaggacagttgacagtcaaatcaaatgaagtgattgcagacatgcatgttactggaacttacacgatgccttgtgctcgtactttagtaccagttgatgtgcctcttgatgtatctacttcagaagtatttgatttagaaggctatgatggttataccgatagtgacgatcaagaagatgagcattatcatcttgtaactgacggtatgattaatattaaagacattgctgaagaacttgtaattattgaaaaacctatgcgtgcttattctgaacatagtgatcaaatgttaacagaaggcaatggttgggaagtcattgatgaagatcaattgactgaagttcaaaaagagcaagatagtgattctgaacaaagaaaagttgatccaaggcttcaaaaattacaacaattatacgataaagatcaatag

SEQ ID NO: 2951 - DNA, 174 bp, Staphylococcus epidermidis
atggcagtaccaaaaagaagaacgtctaaaacaagaaaaaataaacgccgtacacattttaaaatttcagtacctggtatgactgaatgccctaactgtggcgaatacaaattatctcaccgcgtatgtaaaaactgtggttcatacaatggtgaagaagtagtttctaaataa

SEQ ID NO: 2952 - DNA, 2484 bp, Staphylococcus epidermidis
atgaaaaaatctagtaaattttcaaaagattttcctactagaaaaaatcattacgcaattagaaaattcacagttggcactgcttcgattatcgtaggatcattcttatttttcggacaaacacaagctcatgctgaacaggctgaagaattcgaaagagtaacaactggtacagttgatacaggtggacagcctgctagagcagatcaaggacaagaaggaccacaagcaggcgcggatacgcacaatacagcaagtcaacctggtgttacaggtcaagatgcaccaaatgaaaatcatgctggtgaccagaatgctgcagtaacacatccggctaatcaagaaaataatgcacctcaagttggggctggtactcctggcgctgagaacacaccacaagccggtggtgaaagtcataatcaagatactgcagtaacttcagcaggtactaatggggaacaaaatggtggtaaaccagctacgtcaacaactggtcaagatgccgcgcaatccaatggacctcaaggtacttcagtagcccaacctggtaatgatgcttctagccaaggtcatgatacacctcaagctgatgctggtactcataatacagaaggccaacctgctgtaactactggtgagcaagctggtggtaagcctgctgcaacgaaacctgaaggtgccagtgcagaaactgcgccagcgcctaataatgctgatgaaaatcacgctcaaccttcaccgcaaacaggaggtactacagcaacacaagctggacaagtaaaaccatccggtgattctacgcctaccggtgagccaaacaaagcagacgatcaaggtacacaaattaaacctacaagtaaccaaggtactacagcaacaactaatgaaactggaaatcaaaaaccaagtggtcaaacaggtaatactgagaacacgcctaatgatggtactcaattaaaacctaataatgacccagctgcgactggtacgccaaatactaatggagaacaaactggacaacctaatgcaacagtaacaccaggacaaggtaatgaagagattaacggagctagtaaacctggagaagtgtctccgaaacctgaagaaaacaatccaactgccactgaacctggtacaactgcacctgggaatactaatcaagacacacaagtaaaacctaatacagatcagactgctactggtactccagctggtactgataatcaaaatacgcaacaaggcaatactgaacaaaataaccaaaatgctcaaccatcagcacctggaacaactgatcaatccggtgctacggttaaacctagtactacacctaatcaagacgctgaagttaaacctagtactacacctaatcaagacgctgaagttaaacctaatccagatcaaaataatacaccaactaatggtcaagacgggaatcaaacaggtcaaggtactcaagtaaaacctaataacgatcaaacggcaactggtactcaaggtgccactggtaatcaaaatgctgaacaaggtaatactgaacaaaataaccaaaatgctgaaccatcagcacctggtacaactgatcaagccggtgctacggttaaacctggtactacacctaaccaagacgctgaagttaaacctaatacagatcagactgctactggtactcaaggtgccactggtgatcaaaatgctgaacaaggtaatactgaacaaaataaccaaaatgctgaacaaggtaatactgggcaagagggttctaatcctaatcaaagtggtcagttaggtgctacggttaaacctggatctgctccaaatcaagatactgaggtaaaacctaatccagatcaaaataataacccaactactgggcaagacgcgaatcaaacaggtcaaggtactcaagtaaaacctaataacgatcaaacgacaactggtactccagctggtactgataatcaaaatacacaacaaggaaatactgaacaaaacaatcaaaatgctgaacaaggtaatactgggcaagagggttctaatcctaatcaaagtggtcagttaggtgctacggttaaacctggatctgctccaaatcaagatactgaagcaacccctaatccagatcaaaataatacaccaactaatggtcaagacggggatcatacaggtcaaggtactcaagtaaaacctaatccagatcagactgctactggtactcaaggtgccactggtgatcaaaatacgcaacaaggcaatactgaacaaaataaccaaaatgctgaacaaggtaatacaggcggtacagataaagatgctaaagtaaatactaatgatgatgaaacaaaaacagatgttaaaaatgatactgaattacctgaaacaggactaagtaatgaatatgattatacaactacagtatttggttctatcgctttaatatcttcacttttattactaagacgacaaagaaaagaatctaaataa

SEQ ID NO: 2953 - DNA, 741 bp, Staphylococcus epidermidis
atggaacaaattacttctgctcaaaatagtaaaataaaaaatgcgaataaattaaaaaagaaacgtgagagggataaaacgggtcttgctttagtagaggggattcatctcatagaagaagcttatcaaagtcaaattgaagtaatacaattgtttatcgttgataccgatagaatgtcatcttcaataattgattatgcgaaagaagtgtatcaaattaatctaaaagttgctgaagcactttctggaactgttacacctcaaggtttctttgccattataaaaaaaccaacctatgataagacactagccaaacaagtattattaattgaccgtattcaagatcctggtaatctaggaactttaattaggacagctgatgctgctggattagatttgatagttatggagaaggggacggctgacccttttcaagataaggtgatccgtgctagtcaaggaagcatttttcatataccagtcatttttgatgacatcaacaattatattcatcaatttaatggtccagtgtatggtacggcacttgaaaacgcagtgagcttcaatgatattgaagcacaagccaattttgcgcttatattaggtaatgaaggagaaggtgttaactcagatttactaaaagaaacaacgcaaaatctcactattcctatttatggcaaagccgaaagtttaaatgttgctattgctggaagtatcttaatgtatcagctgaaaggttga

SEQ ID NO: 2954 - DNA, 1059 bp, Staphylococcus epidermidis
atgactcaaaatgatctaatgtctgagttgaagcaacaagctttagtggatataaacgaagcaaaagatgcgcaagcgttacaagaagtaaaagtgaaatatttaggtaaaaaaggttctgttagcggcttaatgaaaaatatgaaagatttgcctaatgaagacaaacctgcgtatggtcaaaaggtaaatgaattaagacaaactattcaaagtgaattagatgaaagacaaaagctaatcaaagaagagaaattaaatcaacagctttctgaagaaacaattgatgtcacattgccaagtcgtcatattgaaattggatcaaaacatcctttaacacgtacagttgaagagattgaagacttgttcttagggttaggttatgaaattgttgatggttatgaagttgaacaagattactataattttgaagctttaaacttacctaaatcgcatccagcacgtgatatgcaagatagcttttatatcacagaagaaattttaatgcgtacacatacttcaccagtacaagcacgtactatggaaaaacgtaaaggacaaggaccagtcaaaattatttgtcccggtaaagtttatcgacgtgactcagatgatgcaacacatagccaccaatttacacaaattgaaggtttagtagttgataaagatattaaaatgagcgatttaaaagggactttagagttagttgcaaaaaaattattcggtgcagatcgtgagattcgtttacgcccaagttatttcccgtttactgaaccatcagttgaagtagatgtatcatgtttcaaatgtaaaggacagggttgtaatgtttgtaaacatacaggttggattgaaattttaggagcgggcatggttcacccgaatgtattagaaatggccggattcgattctaaggaatattctggcttcgcatttggtatgggaccagatcgaattgcaatgttaaagtatggtattgaagatattcgtcacttttataccaatgatgtccgtttcttagatcaatttaaagctgtagaagatagaggtgaacaataa

SEQ ID NO: 2955 - DNA, 2403 bp, Staphylococcus epidermidis
atgttaatttcaaatgaatggctaaaagattatgtgaatgttgaccagtcagttcaagcgttagcagagagaattacaagaactggaattgaagtcgatgatattattgactatacaaaagatattaaaaaattagtagttggacatgtcttgtcgaagacgccacatccagatgctgataaattaaatatttgtcaagtagacttaggtgaagaagaaccagttcaaattgtttgtggtgcaccaaatgtagatgaagggcaacacgtgattgttgctaaagttggtggtcgtttacctggtggaattaaaattaaacgtgccaaattacgtggcgaacgctctgaaggtatgatttgctcattacaagaaataggtatttcaagtcatgtaactcctaaaaattatgagtcaggtatatatgtatttccagaagcagttaaacctggaacagatgcgttagaagcaatatatcttaatgaccaagtgatggaatttgatttaacacctaatcgtgctgatgcattaagcatggtaggtactgcgtatgaagtcacagctttatatcaaactaaaatgaataaacctcagttaacaagcaatgaaagtcaagaatctgctaaagatgaactaacaatagaagttaaaaatgaagataaagtaccttactatagtacacgtgttgttcatgacgtgactattggtccttctccagtatggatgcagttccgattaattaaagcgggaatacgtccaattaataatgtggtagatatttcaaattatgtacttttagaatatggccaacctctacacatgtttgatcaagaacaaattggttcgcaatctatagaagttagacaagctaaaaaagatgagacaatgagaactttagatggtgaagaacgtcgattgttagatactgatattgtcattacaaatggcaaagaccctattgcattaggaggtgttatgggaggggatttctctgaagtcactgaacaaacacgacatgttgtagtagaaggggctatctttgatcctgtatctattcgacatacatcacgccgtttaaatttaagaagcgaatcatcgagtcgatttgaaaaggggattgcaactgaatttgtcgatgaagctgtagatagagcttgttatttacttgaaagatatgcttcaggaacagttttaaaagaccgagtttcgcatggagatttaggatcatttgtgaccccaatagaaatcactgctgacaaagttaaccgtacaattggttttaatttaactgatgaagaaatcattgatatttttgagcaattaggatttgacactgaaaataaaaatggtgaaattaccgtgaatgttccatcaagacgtaaagacatttctattaaagaagacttaatagaagaagtagcacgtatatatggatacgatgacataccatcaacgctacctgtatttaaagatgttacaagtggagaactaacagatcgacagtttaaaacgcgtactgttaaagaaacgcttgagggcgctgggctagaccaagctattacttattcattggtatcaaaaaatcatgctaccgattttgcactacaaaatcgtcctacaattgaattacttatgcctatgagtgaagcacattccacattacgtcaaagtttattaccgcatttaattgatgcagtatcatacaatgttgctcgtaaaaatacaaatgttaagttatatgaaatcggacgtgtcttctttggtaacggtgaaggtgagttaccagatgaagtagaatatttgagtggtatattaactggagactttgtaaataacacttggcaaagtaagaaagagtcagttgatttctatttaactaagggtgttgttgaacgtattgctgaaaagcttaatcttcaattcgattttagagctggtcaaatagatgggttacatccaggaagaacagcaattgtgtcacttaatggtaaagatattggtttcataggtgagctacaccctacgttagctgcaaacaatgatttaaagcgtacgtatgtatttgaacttaattatgatgcaatgatggaagtttctgtgggatatattaattatgagcctatacctagatttccaggtgtaacacgtgatattgcattagaagttaatcatgaagttacttcatctgaattgttatccattattcatgagaatggtgaagatattttaaatgatacactcgtatttgacgtatacgaaggtgaacatttagaaaaagggaaaaaatctattgcaattagacttagttatctagatacagaaaacacacttaccgatgaacgtgtaaatgctgtgcatgataaaattttagaagcacttaaaaagcatggtgcaattattagataa

SEQ ID NO: 2956 - DNA, 927 bp, Staphylococcus epidermidis
atgggaaatgtcgtatacaaactcacgtcaaaagaaattcaatcattgatggctcaaactacttttgagacgacgaagttacctcaaggtatgaaagctcgtacgagatatcaaaatactgttatcaacatctatagttctggcaaagtaatgtttcaaggtaagaatgctgatcaacttgcgagtcaattgctaccagataaacaatcaacaactggcaaacatacatcatcaaatacaactagtattcaatataatcgtttttattgtattggaagcgatgaagcaggcagtggcgactattttggtccattgactgtatgtgcagcttatgtgagccaatcacatatcaaaatcttaaaagaacttggtgtagatgattcaaaaaaactaaacgatactaaaatcgtcgatcttgcagaacagctcattacctttatcccgcattctttattaacattagataatgttaagtataacgaacgacaaagtataggatggtctcaagttaaaatgaaagctgtcttacataatgaagctatcaaaaatgtgcttcaaaaaattgagcaagatcaactggattatattgttattgatcaatttgcaaagcgagaagtttatcaacattatgcattatcagcattaccttttcctgacaaaacaaaatttgaaacaaaaggtgaatctaaatcactagcaatcgcggcagcaagcattatttctcgttatgcatttgttaaacacatggaccacatctctaaaaaactccatatggaaataccaaaaggagcaagtaacaaagtagatttaattgccgctaaagtcattcaaaaatatgatattcaacaacttgatactatttcaaaaaaacattttaaaaacagagataaggcaattcatctaatgaatcaaaaatacaataaataa

SEQ ID NO: 2957 - DNA, 267 bp, Staphylococcus epidermidis
atgggtgaatttaaaaatagaataaatgttacgattaatgatcaacatttcacaatcattggcgaagatagccctgaacatattcgttatgtagcacatcttgttgatgaaaaaatgcaagaattaggtcaaaaatcagcaggtttagatacaactcgaaaagcgattttaacatctgtgaatattatgcatgagaaagttatattagaagaagagaacagacgattacaacaagaaataaatcaattaaaacaaagagatgaataa

SEQ ID NO: 2958 - DNA, 522 bp, Staphylococcus epidermidis
atgctcattgatatagttgttcttcttattatttgttactttatagtgatagggtttcgtagaggtatttggttatcgatattgcactttgcttcttcaattgtatctttatatattgcgtcacaacattatcaatcgattgcgcaacgtttagttgtatttgtgccatttccgaaaacggtggcgtttgatatggtctatactataccttatgatcatttgcaatacagatttgaaaaagtgatagcatttattataatatttggtatgtgtaagcttattttgtatctagttgttgttacatttgataatataataacgtataaaaagatacatttagtaagtcggatatcgagtgtcgttttgagtatcatatcggtttttatatatttacaaattggactttatttattatcgctatatccgcattcatttatacagtaccaattatctcaatcgctagtaagtcgagttgtgattgaacaaattccttatttatcacaatttattttaaatttataa

SEQ ID NO: 2959 - DNA, 1710 bp, Staphylococcus epidermidis
atgacaaaaaaagatgtaattcaattattagaaaaaatagctatatatatggagctaaaaggagaaaatacatttaaagtttcagcgtatagaaaagccgcacaaagtttagaggttgatgagcgtacattagaagagattgatgatgtaacagaacttaaaggcattggaaaaggcgtaggagaagttattaatgaatttaaaacacaaggtcaatcatcgacccttcaaacacttcaagatgaagtacctgaagggttagtgccacttttgaaaatacagggattaggcagtaaaaaaatagcaaaactatatcatgaacttcaaattacagataaagaaacacttcaacaagcctgtgaagaaggtaaggttagtactttaaaaggttttgcaaaaaagacagagcaaaacattttagaagcagtgaagtcgataggtgctaaaaaagatcgttatcctatagagctaatgagaggactcaaccaagaaattgtaaaatttattgaacagttagaaggagttgaacaatattcaactgctggtagttttcgaagatataaggaaatgagtaaagatttagatttcattattagtacatcggagcctaaaaaagttcaacaacaattacttcgtattccaaataaagtcaaagatgttgctgttggggatactaaaatttctctggaattagcttatgatgatgagacgattggcgttgattttagattgatagaacctgctgccttttaccataccttacaacacttcaccggttcgaaggatcataatattagaataagacaattagcaaaagcacgcgacgaaaaggttagtgagtatggtatcgaacaacaagatggtaagctattacaattacaaagtgaagaagcgatctatcatcattttggtgtagattggattgcgcctgccatgcgtgaagatggtagtgagtttgataaagatctgagtcaaatcattcaattagatgatatcaatggagatttgcatatgcacacaacatatagtgatggtgccttttcgattaaagaaatgattgaggcaaatattgaaaaaggttatgaatttatggtcattacagatcactcacaaagtttaaaagtagctcatggattacaagtcgaccgtctgctaagacaaaatgaagaaataaagcaattaaatgaagaatataaagaaatagacatatattcaggaacggaaatggacattttacctgatggaacattagattacgatgatgaagttttggcacagcttgattatgttatcgcagctattcatcaaaactttaatcaatctgaagacgaaatcatgaaacgtttagaaacagcatgtagaaatccatatgtgcgtcacattgctcatccaaccggtcgtattattggacgtagaaaaggttataaagcaaatattgaaaagttaatgaatttagccgaagaaacaaatacaattttagagattaacgcaaatccgcatcgtttagatttaaatgcagaaatcgttcgtaaatatccaaaggttaagttgacaattaatacggatgctcatcatacaaatcatcttgatttcatgaaatatggtgttgctactgcacaaaaaggatttgtcaataaagagagggtcattaatacaatgacgaaggaagcctttcgctcatttgttgaaacgaataaatataagaaatag

SEQ ID NO: 2960 - DNA, 2349 bp, Staphylococcus epidermidis
atgagacaaaaaacattagatgtcttggaatttgaaaagattaaatcatttgtggctgatgaaactataagtgatttaggtcgtgaaaaagtacaagagatggctcccgctagtaatttcgatacagtagaatttcaaatgaatgaaacagatgaaatttcacaaatctataacaagcatcgattaccaagcttaagtggtctagcaaaagtgtctccacttgttcatagggctagcataggaggcgttttaaatgtgggagaattaaacagaattaaacgcctagttcaagtgcaaaatcaatttaaaacattttacaatcaaatgctagaggaagatgaagaggttaagtatcctatactgcatgataaaatgaatcatctaccgatacttacagatttatttaaagaaattaatgaaaaatgtgatgcacacgatttatttgaccatgcgagttatactttacaaagtattagaagtaaaatttcaagaacaaatcaacggattcgtcaaaatttagatagaatagtgaaaaatcaagggaatcaaaaaaaactatctgatgcaattgtaacagtaagaaatgatcgcaatgttattccggtgaaagctgaatatagacaagatttcaatggtattgttcatgaccaatcggcatcaggacaaacactatatattgaaccgaattctgttgtagagatgaataatcaaattagtcgtttgcgtaatgatgaagcagttgaacgtgaacgtatattgactgaattgacgggattagtttcggcggaatctgatgcattactcgttgctgaatcggtcatgggtcaaatcgattttttaattgctaaagctcgttatgcgcgcactataaaaggaacaaaacctacatttaaagaggagcgaacgatatatttacccaatgcatttcaccctttattagacaaagatactgttgtagcaaatacaattgaatttattgacgatgtagaaactgtcattattactggaccaaacacgggtggtaagactgtcactttaaaaacgctaggtttgataattgtcatggcacagtcaggattgttaattcctacactggatggaagccaattaagtatctttgaaaatgtgtattgtgatattggagatgaacaatctatagaacaatcattatcaacgttttcatctcacatgaaaaatatagtggaaatattacaggatgcagatcaaaatagtctgattttatttgatgaactaggcgcaggtacagatccaagtgaaggtgcggcactcgcaatgagtatcttagattatgtacgtcgtttaggatctttagttatggcgacaacacattaccctgaattaaaagcttatagttataatcgtgaaggtgtcatgaatgcaagtgttgaatttgacgttgatactctgagtccgacttataaattattaatgggtgttccagggcgatctaatgccttcgacatttcaaaaaaacttggtctaagtctcaacatcattaataaagctaagacaatgatagggacagacgagcaagaaatcaatgccatgattgaatcattagaacacaattcaaaacgtgttgaccaacaacgaatagaattagatagacttgtgagagaagcacaggaaactcacgatgccttgtctaaacaatatcaacagtatcaaaattatgagaaatctttgatggaggaagctaaagaaaaagccaatcagcgtgtgaaatctgcgactaaagaagcggacgaaattcttaaagaacttagaaatctaagagatcataagggcgctgaagtaaaggaacatgaattaattgataaaaagaaacaacttgatgatcaatatgaggcaaaatcaattaagcaacatgttcaaaagaaaaagtatgatacgattcatgctggagatgaagtgaaagttctatcttacggtcaaaaaggtgaagtgcttgaacttgtaggtaacgaagaagcagttgtacaaatgggaattattaaaatgaaattacctattgaagatttagaaaaaacgaaaaagaaaaaagaaaaacctacaaaaatggtaacaagacaaaatagacaaactattaaaacagaacttgatttaagaggatatcgttacgaagaagctttaaatgaattagatcaatatcttgatcaggcggttttaagcaattacgaacaagtttatattattcatggtaaaggtacgggagcacttcaaaaaggtgttcaacaacatttgaaaaaacataaaagcgttagacaatttagaggaggtatgcctaatgaaggtggatttggtgtcactgtggcagaactcaagtaa

SEQ ID NO: 2961 - DNA, 315 bp, Staphylococcus epidermidis
atggcaatcgtaaaagtaactgattctgattttgatagcaaaattgaatctggtgttaaattagttgatttctgggcgacttggtgtggaccttgtaaaatgattgcaccagttttagaagaactagcaggagactatgatggtaaagctgacatcttaaaattagatgttgacgaaaacccatcaactgcagcgaaatatgaagtaatgagtatcccaactttaattgtatttaaagatggcgaaccagttgataaagttgtaggtttccaacctaaagaaaacttggcagaagtattagataaacatctataa

SEQ ID NO: 2962 - DNA, 1785 bp, Staphylococcus epidermidis
ttggaggaatatcaaaagaaaattaaagaaaaattaaacgtagtccctttagagccgggttgttacttaatgaaagatagaaatgatcaggttatatatgtggggaaggcaaagcgtttaagaaatcgtctacgttcttattttacaggcgcacatgatgctaaaacaacccgtttggttggagaaatacgtaactttgaatttatcgtgacatcaagtgagacagaatcgctactgctagagcttaatcttataaaacagtatcaaccccgatataatattttattaaaagatgataaaagttacccttttattaaaattaccaaagaaaagcatccacgattacttgttactcgtactgtaaaaaagaattcaggcaaatactttggtccataccctaatgcatattctgcacaagaaacaaagaaattacttgatcgtatctatccatttagaaaatgcgataatatgccagataagctgtgtctttattaccatattggacaatgcatgggaccgtgtgtctatgatgttgatttagagaagtatgctcaaatgacaaaagaaattacggactttctaaatggggaagataaaacaattttgcatcatttagaagaccgcatgaataaagcgagtgaacagttagattttgaacaagcaaaagaatatagagatatgattcaacacattcacaatttaactaaaaaacaaaagattatgtcttcagataatacaattagagatgtttttggttatagtgtttctaaaggctggatgtgtgttcaagtcttcttcgttagacaaggtaatatgataaaacgtgatgctacaatgataccgttacaacaaacagaggaagaagaattttatatttttataggtcaattttatagtttaaatcagcatctattacctaaggaagttcatgtacctaaaaatcttgataaagacatcattcagtcagtggtagatactaagattgttcaaccagtacgaggagctaaaaaagacatgattaatttagcgaatcacaatgctgaagtacaactcgataataaatttgaattaattgctagagatgagtcaagaacaatcaaagcaattgaagaattaggagagcgtatgggtatccaaacaccaataagaattgaagcttttgataattcaaatattcaaggtgttgatccagtttcagcaatggttacatttgtagatggcaaacctcataaaaaagattatcgaaaatataagattaaaacagtggaaggacctgatgattataaatctatgagagaggtcgttcgtagacgctatacacgtgtactcaacgaggggctacctctaccagatttaataatagttgatggtgggaaaggtcatatgaatggtgtgatggatgtactcgaaaatgagcttgggctagatataccagttgctggtttacaaaaaaatgataaacaccaaacatctgaactactttatggagcaagtgctgaaatagtacctttaaaaaagaacagtcaagcattttatctattacaccgcatacaagatgaggttcatcgatttgcaattacattccaccgacaaacacgtcaaaaaacaggtctgaaatctgttctagatgacattgatggtattggaactaagagaaaaacttcattattacgtacatttggatcgattaagaaaatgaaagaagcatcctttgatgaattacgacaagcaggcttgcctgaaaaggttgctaaaaaccttcaaaacgcgttacaaaacaaataa

SEQ ID NO: 2963 - DNA, 615 bp, Staphylococcus epidermidis
ttggctcaatcaaagaatgaattttaccttagaagattacattcgttattaggggttattccgataggtgcatttttaattgtacacttaatggtaaaccatcaagcaacgcaaggtgctgaagcttttaatagagcttcaggatttatggaatctttaccattccttattgtgatggaatttatacttatttatataccattgttataccatggtttgttcggtttacacatcgcattcactgctaaggagaacatcgggcattactcattatttagaaactggatgtttttcttccaacgtgtaagtggtattttagcatttgtttttattgcaatgcacttatggcaaacacgtttgcaaaaagctttttatggtaaatctgtggactataatctaatgcatgaaacattacaacatccgttatgggcaatcttttacattatttgtgtcattgctgttgttttccattttgctaatggtttatggtcattttgtgtaacatggggctttttacaatctaaaaaatcacaacgtgtttttacttggatttcactcatagtatttttagtgatttcttatattggtgttgcagccgttattgcgtttatataa

SEQ ID NO: 2964 - DNA, 1767 bp, Staphylococcus epidermidis
atggcagagaaaaaaattattgttgtcggtggaggactagctggtctgatgtcaacaattaaagcggcagaacaaggtgcacatgtagatttattttccattgtaccggtaaagcgttcgcactctgtttgtgcacaaggtggcataaatggtgctgttaatactaaaggtgagggagattcaccgtggattcactttgatgatactgtttatggtggagacttcctggctaatcaaccaccagtcaaagcaatggctgatgctgcacctaaaatcatccatctgttagatcgtatgggggttatgtttaacagaacgaaagaaggcttattagactttagacgttttggcggtacactacatcatagaacagcttttgctggcgcaacgacaggtcaacaattgctttatgcattagatgagcaagttcgttcatttgaggtagatggtttagtaactaaatacgaaggatgggaatttctaggtattgttaaagacgaagaagatgctgcaagaggtattgtcgctcaaaatatgacaacatcagaaattcaatcattcggttcagatgctgtcatcatggcaacaggtggccctggtattatctttggtaaaacgacgaattcaatgattaatacaggttcagcggcgtcaatcgtttatcagcaaggtgcgatttatgcaaatggtgaattcatccaaatacatccgactgcgattcctggagatgacaaattacgtcttatgagtgaatcagctcgtggtgaaggtggacgtatttggacgtataaagatggtaaaccttggtacttcttagaagaaaaatatccagactatggtaacttggttccacgtgatatagcgacacgtgaaattttcgatgtttgtattaaccaaaagttaggtatcaatggagaaaacatggtataccttgatttatctcataaagatccacacgaattggatgttaaattaggtggtattattgaaatttatgaaaaattcacaggtgatgatccacgtaaagttccaatgaaaatcttcccagcagtgcattattcaatgggtggtttatacgtagactatgatcaaatgactaatatcaaagggttatttgcagctggagaatgtgatttctcacaacatggtggtaaccgtttaggtgccaattctttactttcagctatttatggaggtacagtagcaggtcctaacgctatcaaatatgttgaaaatgttgaaaaatcgtatacagatctagatgacagtattttcgaagctcgtgttaaagaagagaaagaaagatttgatcatttattaaatatgcgtggaactgaaaatgcttataaacttcaccgtgaattaggtgaaattatgacagctaacgtaactgtagttcgtgaaaatgaaaagttgcttgaaacagataaaaaaattcaagagcttatgaaacgttatgaagatatcgatatggaagatacgcaaacatggagcaaccaagcagtattcttcacacgacaattatggaatatgttggttcttgctcgtgtgattacgattggtgcatataatcgtaacgaatctagaggtgcacattacaaacctgaattcccagaacgtaatgatgaagaatggttaaaaacaaccatggctcgttataaaggtagaagtgaaaagccagaatttacttatgagccagtagatgtaagtttaattccacctcgtaagcgtgactacacaagtaagtctaaaggaggtaataagtaa

SEQ ID NO: 2965 - DNA, 843 bp, Staphylococcus epidermidis
atggctaatcaatcattaaaagaaactccaaaaactcaaagtaatccacaaactcaagtacaaggtcaaaatcaacaaccaaaacaaaaaacagtaaaattgataattaaacgtcaagataatagcgaatcaaaaccttatgaagaatcatttgaaattccttataaggaaaatttaaacgtaattgcatgtttaatggaaatcagacgaaatccagtcaactctaaaggcgaaaaaacgacaccagtcacatgggatatgaattgcctcgaagaagtatgtggcgcttgttcaatggttattaacggccgtgcaagacaatcatgttcagctattgttgatcaattagaacaaccaattcgtcttgaaccaatgagtactttccctgtcattcgagatttacaagttgatcgctcaagaatgttcgataacttaaaacgaatgaaagcatggattcctattgatggaacatatgacttaggacctggaccacgtatgccagagaaaaaacgccaaactgcatatgaattgtctaaatgtatgacttgtggtgtatgcttagaagtatgtccaaatgtcacaaaaaataataaatttgttggtgcacaagctatttctcaagtacgtttgttcgacttacatcctacaggttccatgactaaagatgagcgtttagatgcattgatgagtgcaggaggactgcaagaatgtggtaattctcaaaattgtgtgaatgcatgtcctaaaggtataccattgacaacgtcaattgccgcaatgaatagagaaacttctttccatatgtttaaatcattctttggttctgaccaccaagtagattaa

SEQ ID NO: 2966 - DNA, 804 bp, Staphylococcus epidermidis
atgaataaacctattggagtcattgattcaggtgttggtggtcttactgtagctaaagaaattatgagacagttaccaaatgaaactatttattatttaggtgatatagcacggtgtccatatggtccaagaccaggagaagaagttaaaaaattcacaacggaactagctcaaaaattgatggaatttgatataaaaatgctagttattgcttgcaatactgctacggcagttgcattaaattatttacaaaacatattacctattcctgtcattggtgttatcgaacctggagcaagaactgctataatgactacaaaaaatcaaaatgtattagttttaggaactgaaggaacaattaaatcagaagcgtatcgcacacatataaaaaagataaatcccaatgtgaatgtctatagtgttgcatgtccgggctttgttcctctagttgaacaaatgcgctataaagaccctacaattactaatattgtgattcatcaaacgttgaagcaatggagaagcagtgatgcggacacggttattttaggatgcacgcactatccgttgttatatcagcctatttatgaatattttagtggtactaaaacagttatctcatctggcttagaaacagcaagagaagtaagtgcattactcacgtttagcaatgagcatgccagttacacagaacatccccaacatagattttttgcgactggtgacaccacacatattaaaaatattattgatgaatggttaaatatgaaagttgaagttcaaagaataactgtagatgattcatag

SEQ ID NO: 2967 - DNA, 588 bp, Staphylococcus epidermidis
atggaagatattgttattgcaactaataatcaaggtaagataaacgattttaaagctatttttaaaaatcaacatgttattggaatttctgagttaattgaggattttgatgtagaagaaacaggtgccacatttgaagaaaacgctaggttaaaatccgaagcggcagcacatgcattaaataagcgtgtcattgcagatgatagtggacttgaagtgttcgcattaaatggagaaccaggcgtatattcagctcgctatgcaggattaggtaagaatgatgaagataatattgaaaagttgttaacgaacttagaagatgttcaagaccgtcgtgctcaatttgtttgtgtgattagtatgagtgcgcctaatgaaaaaacaaaaacatttaaaggaacagtttctggagtgataacaactgaacgacatggaaagaatggttttggttatgatccaatattttttgtcccagaattaaataaaacgatggcggaaattacaaatgatgaaaaggggaaaatcagtcatcgtggaaatgctattcgactgttaaaagaatatttagagggtgaacaacatgtctaa

SEQ ID NO: 2968 - DNA, 510 bp, Staphylococcus epidermidis
atgtctaagtggattattcttagtgataatcacaaagaaacaggtatcttatatcatatttatgaactacataaagatgcagataaatttttacatttaggggattctgaatttagttataatgacacagaacttagtttgtatcagcgtgtgaaaggtaattgtgatttttatccagagtttttagaagaagcaatcactgaagaaaacggaatccgtgccttttatactcatggacatctttatcaagtaaaccaaacacgaatgaaactggctgaaaaggcaaaagaattaggatgtttgtttgccttttatggacatacacatgttgcaaaatatgagcaaataggtggtatccatgtaattaatcctggtagtatttctcaatcacgtagtcaaattgaagaaacttttgccgaactcgtatacaaggaagatgaaaataccatcattttgaattttagaaatagagaaaatcagatcattgaaacagttaagattgaattttag

SEQ ID NO: 2969 - DNA, 543 bp, Staphylococcus epidermidis
gtggaatttaaatatatggcaatacccagtatagcaatgactttattattaactggttgtgttcaaaaagataatgaccatgatgaagcttctaaaaataagcaagaacaaaaaaagaaagataataagaaagagaaatcaaaagataaaactattaataacgagtctgataatagtaatgaagtttatactgaaaataaccaaaatagtaatactgaaggttttaaaaagaattctgctagtcacaaagagacacaagctgaagcaaatcaacgtatgcaagaagaaagtcgttctgaacataatggaatgagtaatgctgaatatgctacaaaaataaatgaagaagctaatagtggtaaagaataccaagagtatttaggcgcaaaagaaagccaacacgctattacacatttaacacctgaacaaaaagctaatggcgctggtggtggtggtgctggttggaattacgctgaagaagatgaaagctttagtgaatggaaagacagaagagatagagaaaaaactgaagcaggatattga

SEQ ID NO: 2970 - DNA, 132 bp, Staphylococcus epidermidis
atgaaattatttaacgcttttaaagacatcttagaagcagccatcactaacgatggcactcaattaggggcaagtattgttaacatcatagaaggtagcgttgatatggtgaatcgatttttgggaaattag

SEQ ID NO: 2971 - DNA, 135 bp, Staphylococcus epidermidis
atggaacaattatttgacgcaattagaagtgtagtagatgcaggaatcaaccaagattggtctcaattagcttcaggcatcgctggtattgttgaaaatggtgttagtattatttctaaattattaggtcaataa

SEQ ID NO: 2972 - DNA, 135 bp, Staphylococcus epidermidis
atgtcaaaattagcagaagctattgcaaatacagtaaaagcagcacaagatcaagattggactaaattaggaactagtatcgttgacatcgtagaaagtggcgttagcgtattaggtaaaatcttcggattttaa

SEQ ID NO: 2973 - DNA, 135 bp, Staphylococcus epidermidis
atgtcaaaattagcagaagctattgcaaatacagtaaaagcagcacaagaccaagattggactaaattaggaactagtatcgttgatatcgtagaaagtggcgttagcgtattaggtaaaatcttcggtttctaa

SEQ ID NO: 2974 - DNA, 687 bp, Staphylococcus epidermidis
atgaaattcaaaaatatattatttgatttcgacgatacattagtggatttttatgacgctgagaaaaaagcgttttataatttagcgcagaaatacaatcatcagccaactcaacaggatttcgaacattttaagaaagtgaaccaagcgcattgggaagcatttcaacaaaataaattgactaaagatgaagtgctgtcacaacgatttattaattattttaatgactatcaaattcatgtaaatggaaaagaagctgatgagtgctttagagctgaattagcaaaggcaccagttaaattatttgatcatacattagaagttatacaacaattaaaattaaatcattctctctatatagtaaccaatggtgtaacagaaacacagctacgacgaattgctcagacacaatttaatgaaatatttcaagatgtctttatatctgaacaagctggatttcaaaagccgatgacagagttcttcgattttgtgtttgaacatatcggagagaataacaggaatcaaactctaattgtgggagattctttaacgtctgacattttaggtggtaaaaatgctaatatatcaacatgttggtttaatattagacaaaaagaaaaccatacgtctattcaaccggattatatcattaatgatttatcagaaatgattcgcattgttgagtga

SEQ ID NO: 2975 - DNA, 441 bp, Staphylococcus epidermidis
atgggtgaagttaaacatttacaaatcaattacaaaacagatgagcttttcgctgatttcagagaatttggtaacaagaacctatatatgattgaggagttaaagggacaaatgattgatgcaagttccgattctcctttttatggaatttttgttggtaataaattagttgcgagaatggcattacttgataaaggagaagtagaagaaacctatttccctaatagcaatgactatattcttctttggaaattagaagtattagatacgtaccaaagacgtggatatgctaagcaactattaaactttgctaaagaaaataaaaaaccaattaaagctattgctagaaataactcaaaagaattctttttaaaacagggttttaaagatgtagaaaccaaaaatcctgaggggcacgacatcttaatatggaatccataa

SEQ ID NO: 2976 - DNA, 1614 bp, Staphylococcus epidermidis
atgaagtgtaatacgttaaagttaactgaacaggatcagttcattaataaaataaaaaatagtgaatctcaaattacatctttttatgaatatgatgcagcgaaaaaggaaagcttttatagaagattaaaaacacctaataatggaagggaatttcatttatcacgagtgattaaatcttacatgaatgaattaaagttaacacatcagcagctgaataacatagatgctttagctgatggtgcaaaagtagtgattggtggacaacaagctggtctttttgggggtccactgtatacgtttcataagattttctcaattataactttaagtcgtcaactttctgaggaatatgatactcctattgtacctgtgttttggattgcaggtgaggaccatgattttgaagaggtgaatcatacgtatgcattcaataataaagaaactaccttgaaaaaagtaaagtatcatacgatgacaccaccagatagtaatgtttcaagatatactcctgataagaacgaattaaaagcatcattaaatcacttttttaaagaaatgaaggaaactgtacatactcaagatgtttatcaaatgtgcgtcaatattattaatcaatttgattcatggactgatatttttaagggattgatacatgaagtgtttaaggattatgggattttacttattgatgctcaataccctgaattaagacagatggagaaaccgttgtttaaagagatattagaaaagaggaatcaagtcgatcaatcttttcgtgaaactcagatacgaacaactcaacaacaacttccatcaatgatacaaacagagacaaacacacatttatttatccatgaagacggaatgagacagcttttaaattttgatggcacttattttaaactgaataaaactgagaaacgttacacgaaacaaaatttattagatattatagaaagagagcctgaaagaatttctaataatgttgttactcgtccagttgtagaggaatggttgtttaacacagtagcatttatcggaggtccaagcgaaatcaaatattgggcagaattaaaaggtgttttcgatacgttaaatgtagaaatgcctattgttatgccaagattaagaatcacgtatttgtatgctagaactaaaaagttattaaaacaatataatttatcgatagagtctgtcattgctaatggagtagaacaggaacgtcaacgttttgttcgtgaaaaagcatcaaataattttataaatgaagtagaagaaatgaaaattcagcaacaagaactttataacaatttattcacctatgtggaaaataatcatgacaaccaacttcttttagaaaaaaataatcaaattcatctcaatcagtacgattatttaatcaaacggtacttactgaatattgaaagagaaaatgatataagtatgcgacagtttagagaaattagtgaaacactccatccaatgggtggtctacaagaaagagtttggaatccacttcaaattatgaatgattttgggatagatgtgttcagtccctccacctatccaccactttcttactcgtttgatcatttgattataaatccttga

SEQ ID NO: 2977 - DNA, 432 bp, Staphylococcus epidermidis
atgttcatgggagaattcgatcatcaattggatacaaaaggacgtatgattataccgtccaaatttcgttatgatctaaatgaacgttttattatcacaagaggccttgataaatgtttatttggttacactctagaagagtggcagcaaattgaagagaagatgaaaaccttacctatgacaaaaaaagacgcgcgtaaatttatgcgtatgttcttctcaggtgctgtagaagtagaattagataaacaagggcgtattaatattccgcaaaatttaagaaaatatgccaatttaagtaaggaatgtacagtaattggtgtctcaaatcgtattgagatttgggacagagaaacttggaatgatttctatgatgaatctgaagaaagtttcgaagacattgctgaagatttaatagattttgatttttaa

SEQ ID NO: 2978 - DNA, 936 bp, Staphylococcus epidermidis
atgtttcatcatgtgagcgtcatgttaaacgaaaccattgattatttaaatattaaagaagatggtgtgtatgttgactgtacgttgggtggagcaggacatgccctctatttacttaatcaattaaatgataaaggtagacttattgcgattgatcaagatttaacagccatagaaaatgcgaaagaagttttaaaagaacatttgcacaaagtcacttttgttcataacaactttcgagaattaacaaatattttaaatgaattagaaattgaaaaagtagatggtatttattatgacttaggtgtttcaagcccgcaattggatgtgcctgaaagaggctttagttatcacaatgatgcgaaactagatatgcgaatggatcaaacacaatcactttctgcgtatgaagtagttaatcaatggtcttatgaagcattagttaggattttctttcgttacggtgaagagaaattttctaaacagattgcacgcagaattgaagcccatcgagaacaacaacctatagaaacaactttagaactagttgatgtcattaaagaaggcataccagcgaaagcaagacgaaaagggggacatcctgcgaaacgcgtgttccaagctattcgaattgctgtgaatgatgagttatcagcttttgaagattcagttgagcaagccattgaatgtgtgaaggtcggaggtagaatttcagttattactttccactctttggaagatcgtttgtgtaaacaaattttccaagagtttgagaaaggtccagacgtaccaagaggtctacccgttattcccgaagcatatacacctaagttaaaacgagtcaatcgtaaaccgattaccgctactgatgacgatttaaacgaaaacaatcgagcacgtagcgccaagttacgcgtagcagaaatattaaaataa

SEQ ID NO: 2979 - DNA, 402 bp, Staphylococcus epidermidis
atggctgtagaaaaaatttatcaaccttatgatgaagcgacacaaaccagtatcccacaaagacaaccacaatcgagtcctgaaaaacaaaccgttaaaagaaaagttgttgttcaacttactagatttgaaaaaattttatacatagctttaataactgtaattgctctaataagtatttatatgctatctttaaaaatggatgcgtacgatacgcgaggaaaaattgcagatttagatcaaaaaatagagaaacaatctagtgagaacagcgcattaaagtctgaaattaagaaaaattcttcatatgaacgcatttacgacaaggctaagaagcagggcatgagtctagagaacgacaatgtaaaggtagtgcgtaataatggcgaagcgaaaaattaa

SEQ ID NO: 2980 - DNA, 2220 bp, Staphylococcus epidermidis
atgattactggccactctaatggtcaagatttaattatgaaagccaatgagaaatacttagtcaaaaattctcaacaaccagaacgaggtaagatttatgatcgtaatggtaaagttttagcagaagatgtagaaagatataaacttgttgcagttgtggataaaaaagcaagtaaagaaagtaaaaagccgcgacacgtggttgataaaaaaaagacagcaaaaaaattagctgaaatcatagatatggacgctgacgaaatagaaaaacgacttaataataagaaagcctttcaaatcgaatttggtcagaaaggtactaatttaacttatcaagaaaaagaaaaaatagagaaaatgaaattacctggtatagcactttacccagaaactgagcggttttatcctaatggtaattttgcctcccatttaataggcatggcacagaaagatcctgatactggtgaattaaatggtgcattaggtgttgaaaaaatattcaatagttatttaaatggatcaagaggtgcacttaaatatatacatgatatatggggctacatcgcacctaatacgaagaaagagcagcaacctaaacgtggagacgatgtacacttaacaattgattctaatatacaagtctttgtggaagaagctcttgatgacatggttgaacgctatgctccaaaagatttatttgcagtagtaatggacgcaaaaactggtgaaatacttgcatatagccaacgtccgacttttaaccctgaaacaggtaaagattttggcaaaaagtgggcaaacgatttatatcaaaatacatatgaaccgggctctacttttaaaacatacggcttagctgcagcaattcaagaaggtaaattcaaaccggatgaaaagtataaatcaggtcatagaaatattatgggctctgaaatttccgattggaataaaactggttggggacgtatacctatgtcgttaggttttacttattcatcaaatacgttgatgatgcacttacaagatttggttggtgccgataaaatgaaatcttggtatgaacgctttggatttggcaaaaaaacaggtggtatgtttgatggagaagctgcaggtaatattggttgggcaaatgaattacaacaaaaaacgtcagcatttggtcaatccacaactgttacccctgctcaaatgattcaagcacaatcggctttctttaataaagggaatatgcttaaaccatggtttgtaagtagtattgataatccaataactaaaaagaattattactctggtaaaaaagagtttgccggtaaaccagtaacggaagaaacagccaataaagttgaagaagaacttgataaagtagtaaatagtaagaagagtcatgctatgaattatcgcgtaaaaggttatgatattgaaggtaagacaggaacagcacaagtagctgattcaaatggaggcggttatgttaaaggtgaaaatccttactttgtaagcttcattggggatgcacctaagaaaaaacctaaagtcattgtctatgcaggtatgagtcttgctcaaaaaaatgatcaagaagcatatgaaatgggtgtgagcaaagcatttaaaccaattatggagaatacgctgaaatatttaaatgttggaaaatctagtgatacttcatcaaaaactgactatagtaaagtgcctaacgtgcaaggagatgaagttcaaaaagcagaggatagcgtcaatgctcaatctcttaaacctattacgattggtaatggcaaacaaattaaacaacaatcagttaagtcaggtaccaaagtcctaccacacagtaaagtaatgttaatgacagacggggaattaacaatgccggatatgaccggatggacaaaggaagatgtacttgcttttgaagatttaacgaaaattaaagtttctactaaaggtaatggatttgtcacgaatcaaagtatctcaaaagctcaaatcattaaaaataaagataagatagaagtgtcattatctgctgaagatacggatgatgaccaagagaaaactgatgaggactcttcggataacaaatcaaagaaagataaagctgatgaggatcattcaaatacatcttcgtcaactaagaatgataagtcaaacgccgactcgaaaaatgattctgatgacagcacaaatgaaacatcaggttctgagagaaataattaa

SEQ ID NO: 2981 - DNA, 966 bp, Staphylococcus epidermidis
atgatctttatatacgcaatcatcgcattactgataacatttattttagtccctatacttattccaacattgaaacgtatgaagtttggacaaagtatccgtgaggaagggcctcaaagccatatgaaaaaaacaggtactcctactatgggtgggcttacatttttaattagtattataatttcctctatcattgcaattatctttgtagaccattcaaatccaattattttgttactatttgtaacaatcggttttggtcttattggatttattgatgactatattattgtagttaaaaagaataaccaaggattaactagtaaacaaaagtttctagcacaaataattattgcagttatattctttgtgctaagtgatgtatttcaccttgtgcattttacgacagatttgcatattccatttgtgaattttgatattccgttgtcatttgcttatgtgatatttatcgtcttttggcaagttggtttctcaaatgctgtaaacttaactgatggtttagatggattggcaaccggtttgtcaataataggttttgcaatgtatgctgtaatgagttacatgttagattcaccggctattggcatattttgtattataatgattttcgctttactaggtttcttaccttacaatttaaatccagcgaaagttttcatgggagacacaggaagtcttgctctaggtggtatttttgcaacgatttcaatcatgttgaatcaagaattatcattaatattaattggttttgtgtttgtagttgagacattatctgtaatgttacaagtagcctcatataaattaacgaagaaacgtattttcaagatgagtcctatacatcaccacttcgaattaagtggttggggtgaatggaaggtagtaacagtattttggacggtaggtttaattacaggattaataggtttatggattggagtgcattaa

SEQ ID NO: 2982 - DNA, 1350 bp, Staphylococcus epidermidis
ttgctaaattacactgaattagaaaataaaaatgttttagtagtaggcttagcaaaaagtggatatgaagcggcgaaacttctccttaaattaggggctaacgttaaagtcaatgatggaaaggatctttcacaggatgcacatgctaaagatttagaatctatgggcattgaggtaattagcggtagtcatcctttttctttattagatgatgatcctatcattgtgaaaaacccaggtattccatatactgtatcaattattaaagaagcaacaaatagagggcttaaaatcttaacagaggttgaacttagctatttaatttctgaggcaccaatcatagcagttactggaactaacggtaaaactactgtcacttcactaatcggtgatatgttccaaaaaagcgtgttgactggacgactttctgggaatattggttatgtagcctcaaaagttgcacaagaagttaaatcagatgagtatttaataacagaattatcatcttttcaattattaggcattgaggaatataaaccacatatcgctatcattactaatatttattctgcacatttggattaccatgaaacgttagagaactatcaaaatgctaaaaagcaaatatataaaaatcaaactaaagatgattatctcatttgtaattatcatcaaaggcacctaattgaatcagaaaatctagaagcgaaaacattttatttttcaacacagcaagaagttgatgggatatacattaaagatggtttcattgtttttaacggcattcgcattattaacactaaagacttagtgctaccgggagaacataacctggaaaatattttagcagctgttctagcatcaatcattgctggagtgccagtcaaagctattgtagatagtcttgttactttttccggtattgatcatagacttcagtatattggtacaaatcgcacaaataaatattataatgattcaaaagcaactaatactttagctactcaatttgcgcttaactcttttgatcaaccaattatttggttgtgtggtggattagatcgtggtaatgaattcgatgaacttattccttatatggaaaatgtacgtgtgatggttgtttttggagaaacacaagataaatttgctaaattgggaaatagtcaaggtaagtatgtgattaaagcaacagatgtagaggatgctgttgataaaattcaagatatagtcgagcccaatgatgttgttctattatcaccagcttgtgcaagttgggatcagtatcatacatttgaagaacgtggtgagaagtttatcgatagattccgagcgcacttgccatcatactaa

SEQ ID NO: 2983 - DNA, 1392 bp, Staphylococcus epidermidis
atggaagagaataaaaatcaacctaataaggagaatatgtcgaataaagacgataatgcaactcatttgaatgacagtcacagaaatgaagatttagagctttttagacggaataaaaacgctcgccaacgcagaagacgtcgtatagataaccaaagtaaagaaaaggatgctacgtctacacaatcacagttagaaactaaaccaatggataaatttttagataatcacaagtcgcataatcaaaacaaagaaataaaaagtgacttaattgaagaaaatgttaatgatgaaaacgacaatcaaaaaaatattaatgataaattaaatgaccgtattgtccaagaaacaaatgaaagtcgtcaaagtactgaagacgatgaggaatttctacttgatcatcggagtgaacaacaacctaaagcctctcgtcattctaaaaagcataaattactaagtaaatttacttctaaaaaagaaaaggaaacatctacatcgttcaatagtaatgagaaggtaactcaaattaaaccgcttagtttagaagaaaaaagagccataagacgtaaaaagcaaaaaagaatccaatataccattatcacactactcattcttatcattgttctcattttactctatatgtttacaccactgagtaaaatatcaaatgtaaatgttaaaggtaataacaacgtaagtacgagtaaaataaagaaagaacttaacgttacttcgcgatcacgaatgtatacttttagtaaaaataaagcgattaggaacttaaaacagaatcctttaatcaaagaagttgatattcataaacaattaccaaacacgttaactgtcaacgtgactgagtaccaaattgtcggtttagaaaaaaataaagataaatatgtgccaattatagaagatggtaaagaattaacagaatacaaagatgaagtgtcacatgatgggcctatcattgatggtttcaaaggagacaaaaaaacacgaattataaaagctttatcagaaatgtcacctaaagtgagaaacttaattgcagaggtgagttacgcaccaactaaaaataaacaaagtcgcataaaaatcttcaccaaagataatatgcaagttattggtgacattacaacgattgcagacaaaatgcaatattatcctcaaatgtcacaatcattaagcagagatgactctggcgaacttaagacaaatggctatattgatttatcggttggagcgtcatttattccttatcaaggttcatcaactgttcaatcgggtacagaacaaaatgtaaccaagtcaacacaagaagaaaatgatgcaaaagaagaacttcaaaatgtgttgaataaaataaataaacaatctaaagaaaataattaa

SEQ ID NO: 2984 - DNA, 1395 bp, Staphylococcus epidermidis
atggaggaacattactatgtgagcatagatataggttcatcaagcgtaaaaacaatagtaggcgaaaaatttcacaacggaattaatgtgataggtacagggcaaacctacacaagtggtatcaagaatggtttaattgatgattttgatattgcaagacaagcaattaaagatacaattaagaaggcttcaattgcctctggtgtagatataaaagatgtatttttaaaactacctatcatcggtaccgaagtatatgatgaatcaaatgaaattgaattttatgaggatactgaaattgatggcacgcatattgaatcagttttagaaggtatccgggataaaaatgatgtgcctgaaactgaagtgataaatgtattcccaattcgttttgtagttgacaaagacaatgaagtttcagatcctaaagaattaattgcaagacattcattaaaagtagatgcaggtgtcatcgcaatccaaaaatctattttaatcaatatgattaaatgtgttgaggcatgtggtgttgacgtgttagatgtttattctgatgcgtacaattatggttttattctcacaccaacggagaaggaattaggcgcttgtgttattgatatcggtgaagacttaacgcaagttgctttctatgaacgaggagaacttgtagatgctgaatctatagaaatggccggtcgagacattacggatgatattgctcaaggactaaatactacatatgacacagctgaaaaggtaaaacatcaatatggtcatgcattttatgactctgcttcagatcaagatgtcttttcagtagatcaagttgattcagatgaacatgttcaatatactcaaaaagatttaagtgactttattgaacaaagagtcgaggatatattctttgaagtctttgacgttttacaagagctaggacttacaaaagtaaacggaggatttgtagttactggtggatctgcaaatttactaggtgtaaaagaattactacaagatatggttagtgaaaaagtgagaattcatacaccgtcacaaatgggtatcagaaaaccagaattttcttcggctatttctacaatttctagtagtatcgcttttgacgagttattagattatgttacaattagttatcaagataatgaagaatttgaagaagaagttatcgaaactgataaagatactgaaacaaaatcaagcggttttgattggtttaagcgtaaatcaaacaaaaaagaaaatgacgaggtagcaccagaagcgcctcgtgaagagtcttatgaagaccgtgaaaatcatctagaagatgaacaacaaacagaaggcaaagccaaagaagaaagtaagtttaaaaaattaatgaaatctctatttgaatga

SEQ ID NO: 2985 - DNA, 1185 bp, Staphylococcus epidermidis
atgttagaatttgaacaaggatttaatcatttagccacattgaaagtcatcggtgtaggtggtggcggaaataacgccgttaaccgtatgattgaccatggtatgaataatgtagaatttattgccatcaacactgatggacaagctttaaacttatcaaaagctgaatcaaaaattcaaattggtgagaaattaacacgtggattaggtgctggtgctaatcctgaaattgggaagaaagcagcagaagaatcaagagaacaaattgaagatgctatccaaggtgctgatatggtattcgtaactgctggtatgggtggcggtactggaacaggtgctgcaccggttgttgctaaaatagcaaaagaaatgggtgctttaactgtaggtgttgttacgcgtccattcggtttcgaaggtcgtaagcgccaaacacaagcggcagctggtgtagaatctatgaaagcagcagtggatacattaattgttattccaaatgatcgcttattagatatcgttgacaaatctacgccaatgatggaagcatttaaagaagcggataatgtattacgtcaaggtgtacaaggtatttcagatttaattgcagtatcaggtgaagtgaacttggactttgcagacgttaaaacaattatgtctaatcaaggttctgcgttaatgggtatcggtgtgtcatctggtgaaaacagagcagtcgaagccgctaaaaaagcaatttcatctccattattagaaacatcaattgtaggtgctcaaggtgtacttatgaacattacaggtggagaatcactgtctttatttgaagctcaagaagcagctgatattgttcaagatgctgcagatgaagatgtgaatatgatttttggtacagttattaacccagagcttcaagatgaaattgtagttactgttatcgcaactggttttgaagataaaccttcttcacaaggtcgtaaagctacaagtactggttttggttcaagtgtaaatagtagttctaatcatcaatctggtgctagtgctaaagaagattcattctctgcacacacttctcattcacaatcaagtgaaagtgtaaatgaaagaagccacactactaaagatgatgatattcctagctttattagaaatagagaagaaagacgttctagaagaactagacgctaa

SEQ ID NO: 2986 - DNA, 792 bp, Staphylococcus epidermidis
ttgaaagagagatttattaagaaaactcattatttagactatcaatttgatgagcctactgatattaagttaggtttcactactcgagaaaatgggttaagtccttatcctaatcatagttttaatatggcgagatatatcagtgacagtgcacatcatattacacatcatcaagatatcttagcgaatcttattggttatccaagagatgaatgggtttttcctatacaaacacatgatagtcgtatcgttgaagttacaagtgaacataaaggaacaaatattgatgaactaactgatgatttacatggcatagatggaatgtatacttttgattctcacattcttcttactatgtgttatgcggattgcgtacctgtatatttttatagtgaaccacatggatatataggattagcacatgcaggttggcgaggaacatatggtcaaatagtaaaagaaatgctaaaaaaagtggattttgattatgaagacttaaagattgtaattggtccagcaacttcaaattcttatgaaatcaatgatgatataaaaaataagtttgaggaattaaccattgattcaactttatatattgagaccagaggtaaaaatcaacatggtattgatttgaaaaaggctaacgcacttcttctagaagaagctggagttccatcaaaaaacatatacgttacggaatatgcaacttcagaaaacttagatttattcttttcatatcgtgttgaaaaaggacagacgggacgtatgttagcatttattggacggaagtaa

SEQ ID NO: 2987 - DNA, 669 bp, Staphylococcus epidermidis
atggatgttaaagagaatcttgctaagattgaaaaggaaattgatgcaagcattaaaaaaagtgcgcattcagcacaacctcacgtgattgcagtaacaaaatatgttacaatagagcgagctagagaagcgtataaagtagggataagacatttcggtgaaaatcgattagatggattcaaagagaagaaagaatctctaccaagcgatgttaaattacatttcattggttctttacaatcaaggaaagtaaaagatattataaatgaagtcgattattttcatgctttagatcgtttaagtctagctaaggagattaataaaagagcaaatcatgttataaaatgtttcttacaagtaaatgtttctggagaagaatctaaacatggcatagctcttgaagaagtgaatcaatttataaatcaaattaaagaatatgaaaatatccaaattattggattaatgacgatggcaccattgactgatgatttatcgtacataagaaatttatttaaagaattaagacataaaagaaatgaaattcaacaattcaatttagcacatgcaccttgtacagaattatctatgggaatgagtaatgattatcaaatggcagttgaagaaggtgcaacctttgtcagaattgggactaaacttgtaggagaatag

SEQ ID NO: 2988 - DNA, 594 bp, Staphylococcus epidermidis
ttggctttaaaggatttatttaataatttttttgtagttgaagaagaagaggaagttgaaggacctgaagaacgtgaatcttctagatcacgtgaacgtgttcaagaacgcgaagattacaatcgtaatgagaatcaagcgacaccacaaacttttaacaataagcaacaagcgattaagtctgtacctcaaaagaacactttgagatcgaatacaacttctgaagaaaggaattatcgtatgaataataattcaaaaaataattctagaaacgttgtaacaatgaaccaagcatcacaatcatatgccgctcaggaaagttcaaaaatgtgtctgtttgaaccacgtgtcttttcagatactcaagatattgccgacgaattaaaaaacagacgtgcaactttagtaaatttacaacgcattgatcaagtatcagcaaagcgtattattgattttttaagtggtacggtatacgcaattggtggagatattcaacgcgtgggtactgatattttcttatgcacacctgataatgttgaagtagccggtagtataactgatcacatcgagaatatggagcaacactacgaataa

SEQ ID NO: 2989 - DNA, 291 bp, Staphylococcus epidermidis
atggatattggtttgctaagtacaattttccgatttattatatttttagttcaaatatattattttggaatgattatatatttctttacttcttgggttccgagtataagagagtctaagtttggagaatttttaggaaagttatatgaacctttcttagaacctttccgtaaaattattcctcctattggctttatagacatttcttctatcgcggcaatcttcgttctagttttattccaaagtggtttagtaaaaatatttaatttaattcttgcatatttatcttaa

SEQ ID NO: 2990 - DNA, 663 bp, Staphylococcus epidermidis
ttggatccgagaggtcaatatatacttgaagtcattacgcgtagttatcaagatttacatgttacattttttggtggaccacatgcagaaagaaaacgtgcaatcatcgcaccattatattttaagccacagcctgaggactttgaattaactttatttgaacttcaatatcctaagaaatttgtaacaatacaacatcaacacgttcttggaacactcatgtcactgggaatacaaagagatcaactcggtgatattatagttggagaagatatacagtttgttttgacaaaacaattagaatcatatattatatctgaattaacgcgtattaagggagcctcagttaaacttaattctattcctactgaagatatgatacaatcagaagagaattggaaagttcatagtacaactgtgagcgctttgagattagatgtagttttaaaagagatgattcataagtctcgaaatattgcacaacaattaattataaaaaaaagagtcaaagttaaccatacaataatagattctacagattttcaattagagcagaatgatttattgtcaatccaaggttatggtagagctcaaattgttgaaataggtggaaaaacaaaaaagaacaagttacacattcattatcaaacactatttaaatag

SEQ ID NO: 2991 - DNA, 657 bp, Staphylococcus epidermidis
atgccttttacaccaagtgagattaagaataaagaatttacacgagtaaaaaatggtttagaacctacagaagttgcaaattacttagagcaactaagtaatgaaatcgaacgtttaaaagaagataaaaagcaacttgaaaaagtcattgaagatagagattctaatattaaatcatataaagatgttcaccaatcagtaagcgatgcacttattcaagcacaaaaagtaggagaagagacaaaacaagcagcaactaaagaagctgaagccgttttatcaaaagcacaagtacaagctgacagtattgtgaatgatgcaattgaaaaagcgcgtcgtctagctttccaaactgaagacatgaaacgacaatctaaagttttccgctctcgtttccgtatgcttgttgaagcacaacttgacttactcaaaagtgaagattgggattacttactcaattatgatttagacgccgagcaagtgacattagaagatattcatcatcttcatgataatgatttgacacctgaagaacgtgcaatgaaacaaaagcaaaatcaagaaatatcggctaatcagccttctacatcaagttcagaatctgtgagtcaatcaaatgcaaataacgaatcatcacaatcaacatcaaataattaa

SEQ ID NO: 2992 - DNA, 2751 bp, Staphylococcus epidermidis
atgaattacaaagataccctattaatgccgaaaactgattttcctatgagaggtggcttaccgaataaagaaccacaaattcaagaaatgtgggataatgatgagcaatatcgcaaagcgttagaaaaaaataaaaataatccatcattcattttgcatgacggaccaccatatgctaatggtaatttacatatgggacatgcattaaataaaatcataaaggattttattgttcgttataaaacaatgcaaggcttttatgcaccgtatgtgccaggttgggatactcatggtttaccaattgaacaggctttaactaaaaaaggcgttgatcgcaaaaaaatgtcagttgcagaatttagagagaaatgtaaagaatttgcattaaaacaaattgacattcaaaagaaagattttaagcgccttggtgtacgtggtgattttaataatccttacattacattaacacctgaatatgaagccgcacaaataagattatttggagaaatggcagacaaaggtttgatttataaagggaaaaaacctgtgtattggtcaccttcaagtgaatcatcacttgcagaagctgagatagaatatcatgacaaacgttctgcatcaatttacgttgcttttgacgtcaaagacagtaaaggtaaagttgattctgatgcccaatttattatttggacaactacaccatggacaattccatcaaatgtggcaattacagttcatccagagctaaactacggtcagtataatgttaatggacataaatacattgttgcccaagcattatcagaagcagtagcagaagcattaggttgggataaagattctatacaattagagaaagaattcacaggtaaagaactggaatttgtagaggcacaacatccattcctagatcgtgtatcattagtaattaacggtgaacatgttacgacagacgctggtacgggatgtgttcatacagctcccggtcacggggaagatgactatattgtaggtcaaaaatatgatttaccagtaattagtcctttaaatgataaaggtgtattcactgaagaaggtggaccatttgaaggaatgttctacgacaaagcaaacaaagctgtgactgatcttttaaaagaaaaagacgcactacttaaacttgactttattacacatagttatcctcatgattggcgtacgaaaaaacctgttatctttagagctacaccacaatggtttgcttccattaataaagtaagacaggatattcttgatgcaattgaagacacgaactttaaagtagactggggtaaaacacgaatttacaatatgattcgcgatcgtggcgaatgggtaatttctcgtcaacgtgtatggggcgttcctttaccggtattttatgctgaaaatggcgacatcattatgactaaagagacagtaaatcacgttgcagatttatttgaaaaatacggttcaaatatttggtttgaaaaagaagctaaagaattacttcctgaaggatttagtcatcctggaagccctaacggtgaatttactaaagaaactgatattatggacgtttggtttgattctggttcatcacaccgtggtgtattagaaacgagacctgaactttcattcccagcagacctctattttgagggtagtgatcagtatcgcggttggttcaactcttcaattacaactgctgtagccactcgtggtcaagcgccgtataaattcttgttatcacatggctttgtcatggacggtgaaggtaagaagatgagtaagtcattaggtaatgttatagttcctgatcaagttgttaaacaaaaaggcgcagatattgcacgtttatgggtaagtagtactgattacctttctgatgtgcgtatttccgatgaaattcttaaacaaacgtctgatgtatatcgaaaaattcgaaatactttaagatttatgttaggtaatattaacgatttcaaccctgaaacggatagtattgctgaaacaaatttacttgaagtagatcgctatttgttaaatcgtttacgtgaattcacagcgagtacgattaataactatgaaaattttgattatttgaatatttatcaagaagttcaaaactttatcaatgttgaactaagtaacttctatttagattacggtaaagatatactttatattgagaaaaaagattctcataaacgtcgtagcatgcaaaccgttttatatcaaatacttattgacatgacaaaattactagcaccaattttagtgcatacagctgaagaagtttggtctcatacgcctcatgtaaaagaagaaagtgtacacctttcagatatgcctaaagttgttgatgtagatgaagaattgttagaaaaatggaatacatttatgaatttacgtgatgatgttaaccgtgcattagaacaagcacgtaatgaaaaagtaattggtaagtcattagaagctaaagtggttattggaaacaatgaaacatttaatacagcggaattcttacaacaatttaatgacttacaacaattattcatcgtttcacaagttgaagttaaagataaagtaaatgatggtgtatcctatcaatatggagatatccatattaaacatgctgaaggtgaaaaatgtgaaagatgctggaactatacagaagaattaggttcagtaggtgaacttgaacatttatgcccacgatgtcaagaagtagtaaaaactttagtataa

SEQ ID NO: 2993 - DNA, 798 bp, Staphylococcus epidermidis
atgtttcataacaaaaatgcaaattttgtaaatggtgtaactatcaatattaaagataaagaaacaattaaaacattttatgagaatgttttaggatttaatcttatcaatgaatctgaaactgctgtacaatttgaagttggcgattcaaatcaatttattacttttattgaaatacagaatggacgagaaccgttaatgtctgaagcaggtcttttccatattggtatattgttgcctactttgactacattagctgatttactcgtacatttaagtgattttgaagtaccagtgaacggtggacaacaaagtgttgcaacatgtttatttattgaggatccagagggcaatgctataaagttttatgtcgatcgtgagacagaatcatggattgatgagaaagaaggcagaattagaatggatattgctccaattaatgtacctcgattactgcaaaacgtctctcatactcaatggcagggcataccagatgaaactaaattaggttcattacatattaagtccattcgaatttctgatgttaaatcatattatttaaattattttggactagaagaatcagcatatatggacgattattctctatttttatcttcaaacgagtattataatcatttggctgttaatcagtggttatctgcgacaaaacgagtagataatgaacatacctatggtttagctatgatagattttcactatccaaaaacaacacataaaaatcttaaaggacctgatggtatttattttagatttaatagaataaaagaagtgtga

SEQ ID NO: 2994 - DNA, 471 bp, Staphylococcus epidermidis
atgaaaaaagcaatcatagtcatgtttgttgttactgttatcttgacaatagcagcactcattgacgagtttatgattcaagatgcgaaacatggtcaaagtcgttttacgtcacatcatcctatgaaaatcaatacatataaaaaggggcagtgtacatattacgtctttgaacgtgttaaaaatgatggaaataagataaacaatacttggagcgacgccaagcattgggataaaaaagcaattgatgatggatacattgttgaccgtaaccctaaaaaaggatcaatattacaatcttctaaagggaaatacggtcatgttgcatatatagaaacaataaatgaagatggttctatgcaagtttcagaaatgaactatacacaaccttatgaaatcacaaaacgcacaattcatacctatgatattaaaaattattattatattcatccgcaaaagataaaaacataa

SEQ ID NO: 2995 - DNA, 534 bp, Staphylococcus epidermidis
atgttaagtgttgctttagatgacattaaaaagaatggaggcacttctttgaaaaagaaatactatattagcatctctttacttatgacaatcattgtattagttttcgatcaagtttctaaatggcttattacaatctcaatgaaggttggagattcatatgaaattatccctaactttttaaatattacatcccatagaaacaacggtgcagcatgggggattttgagtggtaaaatgctatttttctatattattactatcattattttaatcgttttagttattttttatattaaagaagcacaatttaatttgtttatgcaagttgcaataagcctattatttgctggagctttaggaaattttattgatcgcgtattacatggcgaagttgtggattttattgatacaaatatattcggatacgattttcctatctttaatattgcggattcaagcttaacaattggagttatattcgtaatcatcgcactcattaaagatgcaatcataaataagaaggaggtctag

SEQ ID NO: 2996 - DNA, 918 bp, Staphylococcus epidermidis
ttggaaaattataattttaatattatcgaacaatcacaagttggacaacgtatagataaacttgtttcagatttaaataaagattggtcacgtagtcaacttcaagattggattaaagaaggtttagtcaaggtaaatggtaaagtaattaaatcgaactataaggtcaagttaaatgacaaaattgttgtaaccgagaaagaagtcgtagaggcagatataaaacctgaaaacttaaatttagatatttattatgaagacgaagacgttgctgttgtatataaaccaaaaggtatggttgtacatccatctccaggccattatagtggaacattagtaaatggattaatgtatcaaattaaagatttatcaggaatcaatggcgaaatacgtcccggcatagttcatagaatagataaagatacgtctggtttattaatggttgctaaaaatgatgttgctcatcgtcatttagttgaacaacttatgtctaaaactgttaaacgaaaatacacggcgttagttcatggtaatatccctcatgattatggcactattgacgcaccaattggtcgaaataaaaacgatagacaatcgatggctgtggttgatgacggtaaagaagctgtgacacactttaatgtattagagcattttaaagattatacattgatagaatgtcaattagaaacagggcgtacacatcaaattcgtgtacatatgaaatatattggttatcctcttgtaggggatccgaagtatggacctaaaaaaacgttagatatcgatggacaagctttacatgctggtataattggtttcgaacatcctgtaacacatgaatacattgagaagcatgcaacattacctaacgattttgaaaagttactagatgatataagacgtagagatgcataa

SEQ ID NO: 2997 - DNA, 528 bp, Staphylococcus epidermidis
atgtctgaacgaattattttagatgaggcagcgatacaacgtacaatcacacgaattgctcatgaaattctagaatataacaagggaactaaagatttagttctattaggcattaaaacaagaggtgcttttttagcacatcgtatacaagataaaataaattcaattgaacaacaattagtaccaacaggtactatcgatatcacgcattttcgagatgacgttgataaggtagtgcaacaagctgatcaatacgcttttgatattaatgtagatattaataacaaagtggttgttatcattgacgatgttttgtataccggacgtacagtaagagcctcattagatgcgattttattacatacaagacctattaaaatagggcttgcagcacttgtggatcgtggtcatcgtgaactccctatacgcgcagattttgtaggaaaaaatatacctacagcacgagatgaatctgtttcagtttatttagaagaaattgacgatagaaatgcagtcgtcattgaataa

SEQ ID NO: 2998 - DNA, 1308 bp, Staphylococcus epidermidis
atggaaaatgagcaaatgtttgagcgtaccgttcagccagttcttgatgtaaaagataaaccaaaaccagcacaatgggcatttctgagtcttcaacatttatttgcaatgtttggatcaactgtacttgtaccatttttaacacatctgcctatatcagcagctttgttggcatcaggtattggtacacttttatacatattaatcacaaaagcgaaaattcctgcctacttaggatcgagttttgcctttattacacctatcattacagggttaagtacacatagtcttggagatatgctggttgcattatttatgagtggattaatgtacgtgattataggtattttcattaaattgagtggaacacattggttaatgcacttgttaccaccagtagttgtcggaccagtaataatggtcattgggttaagtttagctcctacagcagtaaacatggccatgttcgaaaattctgctgaaatgaaagggtataacttaagttacttaattgttgctttgattacattagcagtaaccatcatcgtccaaggattcttcaaaggatttttatcactaatacctgtacttataggtattatagtgggatatattgtatccattttcatgggcatagttaaatttgctccaatagcacaagcgaaatggatagattttcctcatatttatctaccatttaaagattacacaccatcttttcatttaggactcattctcgtgatgatacccgtggtgtttgtgacggtaagtgaacatattggtcatcaaatggtaattaataaaatagtaggacgcaatttctttgaaaatccaggtttagataaatcaatcattggtgatggtgtttcaactatgtttgcaagtatgataggaggtcctcctagtacaacttatggtgaaaatataggtgtactagcgatcaccaaaatatatagtatttacgttattggtggtgcggcagttatagctatcattcttgcatttattggtaagttcactgctttaatatcttcaatacctacgccagtgatgggtggtgtctcaattttattattcggtattatagcagctagtggtttaagaatgcttgttgaaagtcaagtagatttcgcaagcaatcgcaacttggttatagcatcagttgtgcttgttgtcgggattggtaatcttcttatcaatttaaaaggcataggtatcaatttacaaattgaaggaatggcattatcagcactttcaggaataatattaaatttaattttgccaaaagataaaaaccaaataaattaa

SEQ ID NO: 2999 - DNA, 882 bp, Staphylococcus epidermidis
atggaacacttattatcaatggagcatttatctaattcagaaatttatgatttaattactatcgcttgccaattcaaatctggtgagcgaccattacctcaatttaacggtcaatacgtatcaaacttattcttcgaaaattcaacgcgaacaaagtgtagctttgagatggcagaacaaaaattaggattaaaacttattaattttgaaacaagtacatcatctgtaaaaaagggtgagtcactttatgacacatgtaaaacacttgaaagtataggtgttgatttacttgtcatacgtcactcccaaaattcttattacgaagaactggatcaattaaatattccaattgctaatgcaggtgatggaagtggacaacatcctactcagagtttattagacataatgacaatatatgaagaatatggttcgtttgaaggtttgaatattctaatatgtggggacattaaaaattctcgtgtcgcaagaagtaattatcatagtttaacatcattaggtgccaacgtaatgttctcaagtccaaaagaatgggtagataatacattagaggcgccttatgttgaaattgatgaagtcattgataaagtagatattgttatgttgcttagagttcaacatgaaagacatggaatttcaggtgaagctaactttgctgctgaagaatatcatcaacaatttggtttaacacaggctagatatgataaattaaaagaggaagccattgtaatgcatccagctcctgtaaatagaggtgttgaaattaaaagcgagctagttgaagcacctaagtctcgaatatttaagcagatggaaaatggaatgtatttaagaatggcagtaataagtgcgcttttacaatag

SEQ ID NO: 3000 - DNA, 1278 bp, Staphylococcus epidermidis
atgaaattaattaaaaacggaaaaatcttaaaaaacggtatcctaaaagacacagaaattttaatcgacggtaaacgtattaaacaaattagtagtaaaattaatgcttcatcttcaaatattgaagttattgatgcaaaaggaaatttaattgctcccggttttgtagatgttcatgtgcacctacgtgaaccaggtggtgaacataaagaaacaattgaaagtggtacaaaagccgctgcaagaggtggttttactacagtatgtcctatgcctaatacaagacctgtaccagatacagttgaacatgttagagaattaagacaacgaatttctgaaacagcacaagttagggtgttgccttatgctgctattactaagagacaagcaggtactgaacttgttgattttgaaaaattagcactagaaggtgtgtttgcatttactgacgatggtgtgggagttcaaacagcaagtatgatgtatgctgctatgaagcaagctgcaaaagttaaaaaaccgattgtcgcacactgtgaagataatagcttaatctatggtggtgcaatgcataaaggtaaacgtagtgaagaattaggcatacctggtattccaaatattgctgaatctgtacaaattgctagagatgtattattggctgaagcaactggttgtcactatcatgtgtgtcatgtttcaactaaggaaagtgttcgagtaatcagagacgctaaaaaagctggtatccatgtaacagcagaagttacaccacatcatttattattaactgaaaatgatgttcctggcgatgattcaaactacaaaatgaatccaccattaagaagtaatgaagatagagaagcacttttagaaggcttattagatggaacaattgattgtattgcaacggatcatgcacctcacgctaaagaagaaaaagcacaacctatgacaaaagcacctttcggcatcgtaggtagtgaaacagcattcccattactttatacacactttgtaagacgaggtaattggtcactgcaacaattagttgattatttcactattaaaccagctactattttcaacttaaattatggaaaattacacaaagatagttacgctgatttaacaataattgatcttaatactgaaaaagaaatcaaaagtgaagatttcttatctaaagctgataacactccatttattggtgaaaaagtttatggaaatccaacactaacaatgcttaaaggtgaagtagtattcgaggaggaaaagtag

SEQ ID NO: 3001 - DNA, 1101 bp, Staphylococcus epidermidis
atgcttgaaaaacgttatcttgtactggaagatggctcttattacgaaggatatcgcttagggtcagatgacttatctataggcgaaattgtattcaacactgctatgacggggtaccaagaaacaatctctgacccgtcttacacaggtcaaatcataacttttacgtacccactaattggaaactatggtattaatcgcgatgattttgaatcattaacacctaaattaaatggggtagtagtaaaggaagcaagtacacaccctagtaactttagacaccaaaaaactttacacgaaacacttgctcaatatcatattcctggtatatcgggggtagatactagaagtattactcgtaaaattagaaattatggtgttttaagagctggatttacagataataaagataacattcaggaacttgttgaacagttgaaaactgctgaattacctagagatgaagttcaaacggtttctacaaaaacaccatatgtatcaacaggttccgatttaagcgtcgttttactcgactttggtaaaaagcaaaatatcgttcgtgaattaaatttacgtggttgcaacgtcacagttgtaccatatgatacgtcagctgaagagattttaggcatgtctccagatggtgtcatgctatcaaacggacctggtgatccagacgaagttgacgttgctttagatatgatcagaggcatattaggaaagataccattctttggtatctgccttggtcatcaactttttgcattatcacaaggcgcaacttcattcaaaatgaaatttggacatcgtggtgcgaaccatcccgttaaagatttaagaacaggtaaaatagatatcacgagccaaaatcacggctattctattgattgtgactcgctaaaaaatactgaccttgaagttacacacattgctttaaacgatggtactgttgaaggactaagacataaagaacttccagcgttttcagtccaatatcatcctgaagcaagaccaggtccaagtgattctaattacttatttgatgagttcatagcaatgatgaaggatttcaaagaaaaggagcgtcaaatcaatgcctaa

SEQ ID NO: 3002 - DNA, 3174 bp, Staphylococcus epidermidis
atgcctaaaagagatgatattaagacaattttagtagtcggttcaggcccaattattattggacaagctgcagaatttgactatgcaggaacacaagcttgtctagcattaaaagaagaaggctacagagttattttagttaattctaatcctgcaacaataatgacagataaagaaattgccgataaagtctacatagaaccattaacgcacgattttattgctcgtattattagaaaagaacaaccagatgcattattacctactttaggtggtcaaactgggttgaacatggcgattcaacttcatgatagtggtgtgttagaagctaataatgtaaagttgttaggcacagagctagagtctattcaacaagccgaagatcgtgaaatgtttagaacattaatgaatgatttaaatgtacctgtaccagaaagcgatattgttaatacagtagaacaagcatttgaatttaaagaacaagttggatacccgttaattgtacgtcctgcatttacgatgggaggtactggcggtggtatttgccataatgatgctgaattaaaagaagttgttagtaatggtttacactatagccctgctacacaatgtttaatagaaaaatcaatcgcaggttataaagaaatcgaatatgaagttatgcgtgataaaaatgataacgcaatcgtagtatgtaatatggagaacatagatcctgtaggcattcatactggagattcaatcgttgttgcaccgagtcaaacactgtcagatgtagaatatcaaatgctacgagacgtatctttaaaagtaattcgtgctttaggtattgaaggtggatgtaatgtgcaactcgcgcttgacccacattcattgaattattacatcattgaggtcaacccacgtgtgtctcgttcatcagcattagcttcaaaagcgacgggttatcctattgcaaaattagctgctaagattgccgtaggtttaacattagatgaaatgcttaaccctatcacaggaacttcatatgctgcatttgaaccaactttagactatgttatttctaaaattccacgtttcccatttgataaattcgaaaaaggtgaacgtgaacttggaactcaaatgaaagcgacaggcgaagtcatggcaatcggtcgtacatatgaagaatctttactgaaagccattcgttcacttgaatatggtgttcatcatttaggtttatcaaatggagaaagttatgaattagattacattaaagagcgtattggacatcaagatgatgaaagattgttctttatcggagaagcaattcgtagaggaacatctcttgaagaacttcataatatgacaaaaattgactatttcttcctaaataagttccaaaacattattgatattgagcatgaacttaaaaatcatcaaggtgatttagagtatttaaaatacgctaaagattatggttttagtgataaagtgattgctcatcgatgggataaggaagaaaaagacatatatcaactacgtatgagtcaaaatattaaaccagtttataaaatggttgatacatgtgcagctgaatttgaatccacaacgccatactattatggtacgtatgaatatgaaaatgaatctatagtaactgataaagagaaaattctagtactaggttcaggaccaattagaattggccaaggggtagaatttgattatgcaactgtacatgcagtatgggctattcaaaatgctggttacgaagctattattgtgaataataatccggagactgtatctactgacttttcaatttctgacaaattatattttgaaccactaacagaagaagatgttatgaatatcattaacttagaacaacctaaaggtgttgtagtacaatttggtggtcaaacagcaataaacttagctgataagttagcacaacatggtgttaaaattctcggaacatcattagaagatttaaatcgagctgaggatagaaaggaatttgaagcgttattacgtgaaatagctgtaccccagccacaaggtaaaactgctacatcacctaaagaagctcttgaaaatgcaagagaaataggctatccagttgtagttcgtccttcatacgtgcttggtggccgtgcaatggagattgtagataatgatcaagaacttgaaaattatatgactcaagctgttaaagcaagtccagaacatcctgtattggtagaccgctatttaacaggaaaagagatagaagtggatgctatttcagatggtgagactgtcgtgattccaggaattatggaacatatagagcgtgcaggtgttcacagtggagattctattgcagtttatccaccacaaacactgactcaagacgaaattaatacactcgaagactacacaattaaattggcaaaaggtttaaatattaaaggtcttattaacattcaatttgtcatagctcacgacggtgtttatgtgttagaagttaatccgcgttcaagccgtacggtaccattcttaagtaagattactgatattcaaatggcacaattagcgatgcgtgcaattatgggtgaaacgcttgccgaaattgggttcaaacaaggtatccaaccatactctgaaggcgtatatgttaaagcgcccgtatttagttttaataaattaaaaaatgtagatataacgcttggaccagagatgaagtctacaggtgaagttatgggtaaagacctaacacttgaaaaagcgctatacaaaggtctcactggtagcggatttgaagtgaaagatcatggtacagtattgatgactgtaagtgataaagataaagatgaaatagtcaagattgcacatcgattaaatgaaataggctacaaaatattggctactcgtggaacagcacaaaagttaaaagatcataatattccagttgaggtcgtaggtaaaatcggtggcgaggatgatttactgacacgaattcaaaatggagaagtgcaaattgtcattaatactatgacaaaaggaaaagaaatcgaacgagatggattccaaattcgacgtacaacagttgaaaatggtgtaccttgtttaacatcactggatactgccagtgctttaacaaatgtcattgaaagcatgacgtttactatgagaaatgtataa

SEQ ID NO: 3003 - DNA, 693 bp, Staphylococcus epidermidis
gtgagaaatctacccattatagcattagattttaaatcagcagacgaggttcatacatttttaaataaatttaatgaaccgttatgcgtcaaaattgggatggagttattttatcaaacagggccagctttaattaagtccattaaaaaaagaggtcatgatatctttttagatttaaaattacatgacatacctaatactgtgagtaaagcaatggaaggcttagcacgtttagatgtagatttagtcaatgttcatgctgccggtggtattaaaatgatggaagaagctaaaaaagggttaagaaaacataatgctgatattaaaatcattgcagttactcaattaacttcaactactgaaacacaattacatgaagaacaaaatattcaaacctcaatagaggaggcagttttaaattatgctcgtcttactaaaaaagctggtttagacggtgtcgtatgttctcctcttgaggctgagatgatttctaaagaactaggtactgactttttaaaagtgacaccaggtattcgcccgaaaggcgcagctcgtaatgatcaacaacgaattacaacaccagaggaagctaaaaccttggggtcaacacatatcgtagtaggtcgacctatcactcaaagtgagcatccaattgacagttatcataaaataaaagaaagttggttaagttaa

SEQ ID NO: 3004 - DNA, 612 bp, Staphylococcus epidermidis
atggctaaaaatattgctaaagcattgttagacatagaggcagtttcattatctccaaatgatttatttacttggagctctggaattaaatcgcctatatattgtgataatcgaataactttaggctaccctgaagtgcgtaatgcgattagagatgggttaattcaattaattaaagaacatttttctaacgttgaaattatctcgggtacggccactgctggtatccctcatgcagcttacatttctgaaaaattagaattacctatgaattacgttagatcaaaaagtaaaagccatggtaaacaaaaccaaatagaaggtgcaaaaagcgagaataaaaatgtcgttgtagtcgaggatttaatttctactggaggttcttcgattacagctgtcgaagcattggaagaagcgggagctaatgtgcttggggtcgttgctatattcacatatggtcttgcgaaagcagacaagacatttaataaggctcatattccgttttacactttaagtgattataatgagcttatagaagttgcgaaagatgaaggtaaaatctctttaaatgatatccaaacattagttgattggcgagataacttatcgtaa

SEQ ID NO: 3005 - DNA, 207 bp, Staphylococcus epidermidis
atggaacaaaataatgataataatcatctttacactttaataaaacattgtaatgagtttctttatagacgagatgattatagaattccatctgattctcaatcagaccattctaataatgaaaatattttaaaaacaatgaatgatgaagtatttaaacattcaattgaaatttttaaacgtgccaagaaaaatttaaatcattaa

SEQ ID NO: 3006 - DNA, 123 bp, Staphylococcus epidermidis
ttgattgatagttcgattaagattggaggcgttgttatgctcatacattatggtgtgccattattaatatttgcattagttctattaattggatggctaatgactaagatgtttatacgttaa

SEQ ID NO: 3007 - DNA, 408 bp, Staphylococcus epidermidis
atggacataccaaaaattacgacgtttttaatgtttaatgatgaagctgaagaagcaattcaattatacacaagtttatttgaagatagtgaaattattacaatggtgaagtatggcgaagaaggaccgggcacacctggatcagtacaacactccatctttacgctaaatggccaagtatttatggcaatagatgcaaatagtggagaagagttgcctatgaatccagcaatgtcactatatgtcactgttaaggatactatggagatggaacgtttatttaatggtttgaaaaatgaaggcgccattttaatgcctaaaacagaaatgccaccatttagagagtttgcatgggttcaagataaatttggcgtgagttttcaacttgctttaccagaaaacaaatag

SEQ ID NO: 3008 - DNA, 1698 bp, Staphylococcus epidermidis
atggcatatgatggcttatttactaaaaaaatgattgaatcattacaaggtttagtctcaggccgaattcataaaataaatcaaccagaaaatgacacaataattattgtaataagacaaaatcgtaaaaatcatcaactacttctatcgattcaccctagtttctctcgtttacaattaaccactaaaaaatacgacaatccatttaccccaccaatgtttgcaagagttttccgtaaacaccttgagggaggctttataaaagcaattcgacaggttggtaacgatagacgtatagagattgatatcgaaagtaaagatgaaattggtgatacaatatatagaactatcatattggaaataatgggtaaacatagtaaccttatccttgtcgatgatcaacgtaaaatcatcgaagggtttaaacatctaactcctaacacaaatcagtacagaaccgttatgcctggcttcaaatatgaagcaccaccaaatcaaaataaaatcaatccttatgaattaacaggacaagaggtattaaaatatatagactttaatgctggaaagattgccaaacaattacttaatatatgtgagggctttagtccgctaatcgctaatgaaattgtgaatcgtcgtcaatttatgactcaagaaacattacctgatgcttttgatgaagtcatggccgaaacaaaatcagcacctacccctgtctttcataaaaatcatgaaacaggtaaagaggacttctatttcatgaaacttaatcaattctatgatgatatagttgagtatcattcacttcatgaactattggatcgcttttatgatgcacgtggagagagagaaagagtcaaacaacgtgcaaatgatttagtcagatttgtacaacagcaactgcaaaaacaacaaaataaattgagtaaacttatcgatgagtatgaaagtgctaaaaacaaagaaactcagcaattatatggagagttgattacagctaatatatatcgtattcaacaaggtgacgattctgttatagcgttgaattactatactggtgaagaagtaaagattccacttaaccctacaaaatcgccatcaactaacgctcaatattattataaacaatataaccgtatgaaaacacgggagcacgaattgactcatcagattaaacttactaaagagaatattgattactttgataatattgaacaacagttaaagcacattaccgttgatgatatcgatgatattcgcgatgaacttgctgaacagggattcatgaagcaaagaaaacaaagtaaaaagaaaaaacagtctaaaattcaacttcaaacgtatcattctactgatggagatacgatattagtaggtaaaaataataaacaaaatgattatcttaccaataaaaaggcacgtaaaaatcatttatggtttcatacaaaggatattccaggatctcatgttgtcatactcaatgagagtccaagcgaaacaacgattaaagaagcggcaatgctagctgggtacttctctaaagctgggagttcagctcagattcctgtagattatacagaaattagacacgttcataaaccttctggagcaaaacctggattcgtgacatatgacaaccaaaagaccctatttgcaacacctgattatgatcatattcaacaaatgaaagaatcataa

SEQ ID NO: 3009 - DNA, 624 bp, Staphylococcus epidermidis
atggataaggaaaaaggactgttaattgttctttcaggcccttcaggtgttggaaagggaactgttagaaagaagatatttgaagacccaactacttcatataagtattctatatcaatgacgacacgtcatatgcgtgaaggtgaaattgatggtgtagattacttctttaaaacaaaggaagaatttgaggcgttaattaaagacgaccagtttattgagtatgcacaatatgtaggtaattactatggtacacctgtacaatatgtaaaggatactatggaagaaggtcatgacgtctttttagaaatcgaagttgaaggtgctaagcaagtaagaaagaaatttccagatgcgttgttcatatttttagcgcctccaagtttagatgacttgaaagaacgtcttgttggtagaggaactgaatcagatgaaaagattcaaagtcgtgtgaacgaggcacgaaaagaagtagaaatgatgaatttatacgactacgttgtagttaacgacgaggttgaactcgctaagaatcgaattcagtcaatagttgaagctgagcatttaaaaagagagcgaatcgaagctaaatatagaaaaatgttactggaggtcaaaaaataa

SEQ ID NO: 3010 - DNA, 213 bp, Staphylococcus epidermidis
atgttaaatccaccgttaaaccaacttactgcaaaagtgaattcaaaatatcttattgccactacggcggctaaaagagcacgtgaattagatgaaaaacgcgaaacagcgcttttagatcagtaccattcagctaaacctgttggaaaagctttagaagaaattgctgatggtaaaatagaacctgttgtaccgaaagagtatttaggataa

SEQ ID NO: 3011 - DNA, 1200 bp, Staphylococcus epidermidis
atgaaacatattttattagctgttacaggcggtatcgcagcatataaagcaattgatttaacaagtaaattaatacaatccggctatgatgtaagagttatgctatctgatcatgctcaagagtttgttactccgctagcttttcaagcaatcagtagaaatcctgtttacacaaatacatttaaagaagaaaatcctgaagagattcaacatgtatcattaggagactgggcagatgcgattatagtcgcgccagcaactgctaatactatcgcaaaattaagtgttggaattgctgatgatttaattacttctacattacttgctacaacaacaccaaaattcgttgcacccgcaatgaatgtaaatatgtataacaatccacgtactaaacataatatgaaagtgctaagtcaagacggatattattttattgaacctggtagtggctatttagcatgtggttatgtagcaaaagggcgaatggaagaacccatgcaaatcctatctgttattaataaattttttactcaacagaagaatgttgtcaaaagctctttttctggaaagcgcgcattagttacagctgggcctacagttgaagttattgatcctgttcgatacgtatcaaatcgttcatcaggaaaaatgggatatgctatagctgaagcattacgagataagggagcaatcgtaactttaattagtggtcccacccacttatctctacctgaagggattaatgtagtaaaagttgagagtgcagatgatatgtttcaagctgtaaccgaacgctttgcgaaacaagatatagtgattaaagcagcggcggtgtctgattatacaccaatggacatacttgaacataaattaaaaaaacaagaaggaggattatctgttcaatttaagcgtacaaaggatattttaaaatacttaggagaaaataaaacgcaccaatatcttgttggttttgctgctgaaacacaaaatattgaacagtatgctctagacaaactcaaaagaaaaaatgcagatgttatcatttcgaacaatgtaggtgatacatccataggctttagttcagatgacaatgaattaactatgcattttaaaaataatgaaaaagtaaatattaagaaaggaaaaaaatcagctttagcacatcaaattatagaaattttagaaactaggtggcagtaa

SEQ ID NO: 3012 - DNA, 2409 bp, Staphylococcus epidermidis
atgattgcaaaagtaattattgatattccgtcgaaaagtgtcgattttaaatttgattatatcgttcctaaaaatttagaacgtgtgattcaaattggcgttcgcgttgtggtaccttttggccctagaactatacaaggatacgtcatgaatattcaacaaaaaccagatggaaatatggatatatcgaaactaaaagaaataaaagaagtacgtgatattaaacctgaattaacatccgaactgattcaattaagcgaatggatgagccattatcatgtgatgaaacgtatttctgttttagaagcgatgttgccaagtgccattaaagcaaagtataagaaagctttttcaattatcgatccaaaaaatttatcttcaaaaaccaaagcgctatttaacaatgacggttattacttatataaagaagctcagcaaaataatgatttagaagaaatgttgactttgttaaatcaaggattgattgaagaggtcacgatactttctcaaaacacaaaaaagaaaactcaaaaagctgttggcgtagttaatacgttgaatggtgatgaagtacttgcaaaactcgagaaatatacaaaacaatatgatttgtatgcatttttattagaagagtctcatcgaacagtgtttttaaaagaaatcaatgatatgggcttctctcactcgagtttagattctttaatcaaaaaaggttatattgaaaaatatatcgccgaggttttcagagatccatatgcaaatcgtatatttgaacaagaacaaaagaggatattaactaaagaacagcaagatgcatttgaagctattcaacattatattcatgatgaaaaagaaagaacatttttattacacggagtcacaggttcaggtaaaaccgaagtctatcttcaaacaatagaagaagttcttaataaaggtaaagaagccatgatgttagtgccggaaatcgccttaacacctcagatggtactaagatttaaacgtcgatttggagatgatgtagcggtattacattccggactttcaaaaggtgaacgttatgatgagtggcaaaaaattagagacggtcgagctcgagtgagtgtaggtgctcgttcaagtattttcgcaccgtttaaaaatttaggcatcattataattgatgaagaacatgaatctacatataaacaagaagattatcccagatatcatgcacgtgatattgcacaatggagaagtcaatttcatcattgtcctgtagttttaggtagcgcaacaccgagtcttgagtcatatgctagagcagaaaaaaatgtttacgagttgttgtcattgccacatagagtcaatcaacaagcgttaccgcatattgatattatagatatgagagaagaattaagtgaaggtaatcgttccatgttttctatagcactaagacaagcgatacaagaacggttggataaaaaagaacaaatagtactattcttaaatagaaggggatatgcttcatttatgttatgtagagattgtggttacgttccccactgtccccattgtgatatttcgttaacatatcataaaacaaccgatcaattaaaatgtcattactgtggttatcaagaaaatccaccatctcaatgtccaaattgtgaaggtgatcatatcagacaagtcggaactggaacgcaacgtgtagaagaattattacaacaagaattccctcatgctcgtattataaggatggatgttgatacaacttcaagaaaaggtgcacatgagaaattgttaaatgactttgaagcaggaaaaggagatatcttattaggtacgcaaatgattgctaaaggtttggattatcctaacattactctagttggtgtgctcaatgctgacactatgttaaacttacctgactttcgtgccagtgaacgaacataccaacttttaactcaggtatctggacgcgcaggtcgtcatgaaaaagaaggacaagttatcatacaaacgtacaaccctgatcattattcaataaaggatgtgaaattaaacgattatctttctttttatcaaaaagaaatgaattatcgaaaattaggaaaatatccaccttactattttttgattaactttaccatttcacatactgatataaaaaaggtcatgatggcctctaagcatatacatcaaattttagtacagcacttaagtgaaaaagcattcgtgctaggcccttcaccagcagcactagcaagaattaacaatgagtatcgttttcaaatactagtaaaatataagagtgagcctcaattacatcaagcgttacaatatttagatgattattatcatgatcaatatgtaaaggataaactatcattaaaaattgatatcaatccacaaatgatgatgtga

SEQ ID NO: 3013 - DNA, 204 bp, Staphylococcus epidermidis
atggaagttaataaagtcatttatattttactagcagtctttcttggtagttttggtatccacaaattttatgctggtaaaccaattcaaggattattgcatattctattttgttggactgctatcccgcatgtgttagcaattattagtgcagttttaacattattcaaacctgccgacgcaaacgggaacgtcagaatgtaa

SEQ ID NO: 3014 - DNA, 489 bp, Staphylococcus epidermidis
atgactgtaaagaaattagtaaaatcaacacatcctattttgaataaaacaattcaacctgtaagcacgtatgatcaaaaactaaaagtgttattggaagatttggaagatacattatatcatgaggaagctgctgcaattagtgcacctcaaattggagtagatcaaagtgttgcactcatcgatatggaacaagaagggttattacaacttattaatcctgtcgttaaaagtcaatctcaagagactgtttctgacttagaaggctcaatcagtttacctcatatatatggagaagttaaacgtagcaaaatgatcactgtacaaagctatgatatcaatggaaatgcagttgaattaactgcatatgacgatattgcacgcatgattttacatatgattgatcatcttaatggaattcaatttaccaaaagagcacatcatatattaaatgaaactgaagtggaggcgtattttgacaatgagtaa

SEQ ID NO: 3015 - DNA, 939 bp, Staphylococcus epidermidis
ttgacaatgagtaaaatcatttttatgggaacacctgatttttcaacgaaaattttagagatgttaattgctgagcatgaagttatcgctgtagttacacaacctgatagaccagtgggacgtaagaaagtgatgacaccaccaccagtaaaaagagtagctacaaagcatcaaataccggtatatcaacctgaaaaacttaaagattctcaagaattagaatcgttactttctttagaatcagatttaatagtaacggctgcgttcggtcaactattaccagagtccttactcaatgcacctaaattaggagctattaatgtccatgcatcattgttacctaagtatagaggaggagcacctatacatcaggctataattgatggtgaagaagaaactggaatcacgattatgtatatggttaaaaaacttgatgcaggtaatatcatctcgcaacaatcaattcgtattgaagaagaagataatgttggcacaatgcatgataaattaagctttttaggtgccgaattattaaagaagacacttcctagtatcattgataataccaatgacagtatccctcaagatgatgcacttgcaacatttgcatctaatattcgtcgtgaagacgagagagttgattggaatatgagtgcacaagcaattcataaccatattagaggactgtctccatggccagttgcttatacaactatgaatgaaaagaatctcaaattatttagcgctttcattgtgaaagggaaaaaaggcaatccaggaacaattattgaaactactaagcatgaactcatcatagctaccggttctgatgatgccatcgcacttactgagattcaacctgcaggaaaaaaacgcatgaaagttactgattatttaagtggtgtacaagagtcgttagttgggaaagttctattatga

SEQ ID NO: 3016 - DNA, 1308 bp, Staphylococcus epidermidis
atgatgaaatcagtgcgaacatatgcattagaaacaatcaacgacgtcctaaataaaggtgcttatagtaatttgaaaattaatgaagttctatctacaaataacattaatacagtagataaaaatttgttcacagaattagtatatggaacaataaaaagaaaatacacgttagattatctactaaagccttttatcaaaactaaaatcaaatcatgggtgcgacaattactgtggatgagtttatatcaatatttatatttagataaaatacctaaccatgctattattcatgaagcggtagatatagcaaaaaaacgtggtggctatcacacagggaatatagtcaatggtgtattacgaacagtaatgcgcactgaattgccaagctttgaagatatagatgatactaaaaaaagaattgcaattcaatatagtcttcccaaatggattgttgatcattgggttacacattttggagtagaaaaaactgaaaacattgcacgatcttttttagagcctgtagctacaaccgtgcgcgccaatatatctcgtgattctattgattcaattatctctaagttagaacaggaaggttaccacgttaaaaaagatgatatgttaccattttgtcttcatatatcaggtatgcctgtggttaattcaaacgcttttaaagaaggttatatctctattcaagataaaagttcaatgatggtagcttatgtaatgaacctagggcgagatgacaaagttttagatgcgtgcagcgcacctggtggtaaagcttgtcatatggcagaaattctttcaccagaaggtcacgtcgatgcaacagatattcatgaacataaaataaatcttataaagcaaaatattaaaaaattgaaattgaataatatcaaagcttttcaacatgatgctacagaagtatacgataaaatgtatgataagattcttgttgatgcaccatgtagtggatttggtgttcttagacacaaacctgaaattaaatatagtcaatcacaaaatagcattaagtctttagtagaattacaattacaaattttagaaaatgttaaagataatattaaacctggtggtacaatagtgtattcaacatgtacaatagaacaaatggaaaacgaaaatgtcatctatacttttttaaagagacataaagattttgagtttgaaccattccaaaatccagctactggtgaacaggttaaaacgttacagatacttccacaagattttaattcggatggattctttattagcaagataaaaagaaaggaaagttag

SEQ ID NO: 3017 - DNA, 1095 bp, Staphylococcus epidermidis
atgataactgcagaaaaaaagaagaaaaacaaattcttacctaatttcgaaaaacaatcgatctactccttaagatatgacgagatgcaacaatggcttattgatcacggacaacaaaaattcagagcaaaacaaatttttgaatggttataccaaaagcgtgtgaatactattgatgaaatgactaacctgtctaaagagttacgtcaaattctcaaagatcattttgcaatgacgacattgaccactgttgttaaacaagaaagtaaagatggaacaatcaagttcttatttgaattacaagatggttatactattgaaactgttttaatgagacatgaatatggaaattctgtctgtgtaacaacacaagtaggatgtagaattggttgtacgttttgtgcttccactttgggcggattaaagcgtaatttagaggccggagagattgtctctcaagtattaactgtacaaaaggcactagacgaaacgaatgaacgtgtatcacaaattgtcattatgggcataggtgaacctttcgagaattatgatgaaatgatggatttcttaagaattgttaatgatgataacagtttaaatattggtgcacgtcatattactgtatctacttcaggaattattccaagaatttatgattttgccgaagaagatatacaaataaattttgctgtgagtcttcatggtgctaaagacgaaataagatcaagattaatgcctatcaatcgtgcttataacgttgataagttaatggaagctattcgttattatcaagaaaagacaaatcgccgtgttacttttgaatatggattgtttggtggtgttaatgaccaacttgaacatgcgagagatttggcacatttaattaagaatctcaattgccacgttaatttaataccagttaaccatgtcccagaaagaaattatgtaaagacaccaaaagatgatatttttaaattcgagaaggaattaaagagattaggaattaatgctacaattagacgtgagcaagggtcagatattgatgctgcgtgtggacaattaagagcgaaggaacgacaagtagaaacgaggtaa

SEQ ID NO: 3018 - DNA, 744 bp, Staphylococcus epidermidis
atgttaaacgcacaatttttcactgatactgggcaacatcgtgagaaaaacgaggacgctggcggtatattttacaatcaaacacagcaacaaatgctagtattatgcgatggcatgggtggacatcaagctggagaaatagctagtcagtttgtcacttatgaacttcaaaagcgttttgaagaagagaatctaattgaaataaatcgtgctgaatcgtggttgcgttcgaacattaaagaaatcaattttcagctgtacaactatgctcaagaaaatgaagattacagaggtatgggtacaacgctcgtttgtgccatcatttatgacaaacaagttgttgtagcaaatgtaggagattcgcgtgcttatgtaattaatcagagacagatggatcaaattacgagcgaccattcatttgttaatcacttagtaatgacgggacaaattactaaagatgaagcatttcatcatccacaacgtaatattattactaaagtcatgggaacagataaacgtgtttctccagatttatttatcaagagaactcatttttatgattatcttcttttgaactctgacggacttactgattatgtcagagattatgaaatccaagaactactaagttcaaataattcattagacgtccatggtaatgagttattggacttagcgcttgcccatgattcaaaagataatgtcagctttatccttttaaagttagaaggtgataaagtatga

SEQ ID NO: 3019 - DNA, 2004 bp, Staphylococcus epidermidis
atgataggtaaagtcataaatgaacgctatactattaccgataaactcggtggtggtgggatgagtattgtttacttagctgtagattcaatacttaacagaaaagttgctattaaagcgatttcgattcctccaagtgaaaaagaagagacatttaaacgttttgaaagagaagtacataattcttctcaactttctcacgagaatatagtcagtatgattgacgtagatgaggaagatgattgtttttatattgtcatggaatacatagaaggtcctactttagcggaatatatacacagtcatggtccacttagtgtagaaactgctattcagtttacagaacaaattttgagtggaatcaaacatgcgcatgacatgagaattgttcatcgcgatattaaaccacagaatatattaattgataagaataaaaaattacaaatttttgattttggtattgctaaagcattgagtgaaacatcgctgactcaaacaaatcatgttctgggaaccgttcaatatttatcacctgaacaggctaaaggcgaagctactgatgaaagtactgacatatattcaattggtattgtattatatgagatgttagttggagagccaccattcaatggagagactgcagtgagtattgctataaagcatattcaagatagcatcccaaatattacaactgataaaagagatgatgtacctcaatcattgagtaatgtcgttttacgtgctacagagaaagataaatatcatcgctatcatactgttcaagaaatgtgtgacgatttaacaagtgctttacatgagaatcgtttgaatgaagaaaaatacgaactagataaaactaaaacggtaccactcactaaagatgatttgaatcataaaatctatgatgaacaaaatcaaaatgaccttaataaaaccatgcaaatacctattgttaacgattcaataaaacaacaagaatttcaatcgtctgaaccacgttattatcaaaaaagcgacaagaaacgttctaaaatgaaaattgcaattttatcaatcatttttgtaatattattaattggtttattttcttttgtagctatggctgtttttggaaataaatatgaagaaatgcctgaccttaaagggaaaactgaaaaacaagctgaaaaggtattagatagtcatcatctaaaagtaggtgacatatcaagaaattatagtgataaatatcctgaaaaccaaattattaaaacaaatccagatagtggagaacgcgtcgaacaaggggatagagttgatatcgttctatccaaaggaccggagaaggttaagatgccaaatgttttaggtatgtcgaaaaatgatgcgctaaaaaaattaaaggctatcggatttaaagatattcacgttgagcaagcttatagtcaaacatatgaaaaaggattaatttctgaacaaagcgttgtagctaatagtgaggttgccgttaataatcatcatattacaatttatgaatcattaggtgttcgacaagtatatgtcaacaattatgaaaataagtcatatgagtcagcaaaaaaagaacttgaagataaaggatttaaagttcaagtgacaaaagaaaacaacgatgatgtcgaaaaaggtaatgtcatttctcaatctccaaaggataaaactgttgatgaaggttctactatattattagtggtttctaaaggagaaaagtctgacgaagaagatgatgaggaggacaaggatacaacgacaaaaaatgagactgttaaagtaccgtataccggtaaaaaaagtaaaagtcaaaaagtagaagtatttattcgtgatattgaaaataaaggtgattcagcagttcaaacgtttaatattaaaagtgataaaacaattaatattcctttgaaaattaaaaaaggaagtgatgctggctacaccataagagttgataataaaattgtagctgataaagatgtgagctatgatggctaa

SEQ ID NO: 3020 - DNA, 876 bp, Staphylococcus epidermidis
ttgaagactggtcgaatcgttaaactaatcagtggtgtgtatcaagtagacgtagaaggtgagagatttgataccaaaccacgtggtttattcagaaaaaagaagttttcacctgtggtgggcgatatcgtagattttgaagttcaaaatacaaaagagggctatattcatcatgtacatgaccgaaataatgaactaaaacgaccacctgtaagtaatattgacgagttagttatagtaatgagtgcagtcgagcctgaattttcaacacaattattagatcgctatttagtgattgctcattcttatcatctcaaacctagaattttaatcactaaacatgatttagcttccgaacaagaaattcttaaaatcaaagacataataaaaatatatcaaaaaataggatatgctacgcagtttattggaaaagatagtaattatactgctactgttgatgaatggtctgacggtttaatagtattaagtggccaatctggagtgggtaaatctactttcttaaatagttatcagcctcagttgaagttagaaacaaatgatatttctaagtcattgaataggggtaaacatactacaagacatgtcgaattatacgatagaaaaggtggttacatcgctgatacaccggggtttagtgcgttagattttaatcatattgaaaaagaacaactaaaagatttttttattgatattcatgaagctggagagcaatgtaagtttcgtaattgtaatcatataaaagaaccacaatgtcatgtcaaagcactcgttgaaaaaggagaaattccacaattcaggtatgatcattatcagcaattatataatgaaatttccaatagaaaggttcgatactaa

SEQ ID NO: 3021 - DNA, 645 bp, Staphylococcus epidermidis
atggttaaaattttaccatcacttttatctatagattttttaaatttaaaagaagaacttcaattgttagaaacagcaaaggtagacggattacactttgatgtaatggacggcaaatttgtccctaatatttcaatcggtattccgattttggatgctgttagacaacaatctcatttgccaatagatgttcatttaatgattgagcaacctgaaaattatattaatctttttgccgaacatggtgctgatatgatttctgttcatgttgagtcgacaacacatatacatagagcaattgaacaaattaaacaattagggaaaaaagcaggtgtcgtcatcaatcctggaacatctgtagaaacaattttacctatattgagtattgttgattatgttctagtaatgactgtaaatcctggttttggtggacaaacattcatagaacaatgcgtgactaagattgagcaattaaatcaacttaaacatgaaaatcatttaacttttgatattgaggtagatggaggcattaacgatcaaacgagtaaacgatgtgtagaacagggtgctacaatgttagtcactggttcatacttctttaaacaagaggattatgcaaaagtaacatctttattaaaggaatga

SEQ ID NO: 3022 - DNA, 636 bp, Staphylococcus epidermidis
gtgaagattaatttattatgttctcaacgtttattacctaatcatatttttgaaaaagaaaaagattctaattgggcaggtattgatagaggtgcgcttatactcgtaaaacaaggtattcaacctatattttctgtaggtgattttgactcagtgaataatgaagaacgtttgatgttgatgaaaaatcttcatatcgaaccggttgaagctgaaaaagatgatactgatttagctttaggagtagctcaagcagttgaaagaggatacacagaaattacaatttatggtgcaacaggcggtcggttagaccactttatgggtgtgcttcaaattttacaaaaacctcaatacttacatcaatctataaaaataaaagtcattgatcaacaaaatcatattcaattattaaatgaaggtaagtatgtaatcaacagagatagtacttatccatatatatcgtttatccctctaaatgataaaactatattaactttacagggtttcaaatataatttaaatcaagaacacttaaatttaggctctacactcacaatttcaaatgaagtaaaggttaatgaagcaatcattcgagttgaacaaggaacagttttaaaaatacgtagtcgtgactaa

SEQ ID NO: 3023 - DNA, 189 bp, Staphylococcus epidermidis
atgggtaaacaatgtttcgtaacaggtcgtaaagcttcgactggtaatcatcgttcacacgctttaaatgcgaataaacgcagatggaacgctaaccttcaaaaagttagaatccttgtagacggcaaaccgaagaaagtttgggtttctgcacgtgctttaaaatctggtaaagttactagagtttaa

SEQ ID NO: 3024 - DNA, 375 bp, Staphylococcus epidermidis
atgacattagaaatttcaaatgactacggtaaaattgatatttcaaatgatgtaattgcatcagtagttggtggcaaagccgttgaaagttatggaattgttggtatggcatcaagacaacaagttagagatggtatcgctgaaatccttggacacgataactatgctaaaggcattaaagttagagaagacaacggaattattgatgtagacatgtatatcatcgtgagctatggtgtgaaaatttctgaagtagcaagcaatcttcaatcaactgttaaatatactttagaaaaaacactaaatgtgaaagttaattcaataaatattttcgtacaaggtgtacgtgtaaatgagacagtgaaaaaggtttag

SEQ ID NO: 3025 - DNA, 1659 bp, Staphylococcus epidermidis
atgattagcaaaataaatggtaaattatttgccgatatgattatacaaggggcacaaaatttatcaaataatgcagacttagtggattcattaaacgtctatcctgttccagatggagatacagggacaaatatgaatttaactattacttctggtcgtgaggaagtcgaaaataatttatctcaaaatattggagagttaggtaaaacattttcaaaaggattacttatgggggctcgtggtaattcaggtgttattctttctcaattattcagaggtttttgtaagaatattgaagaagaaaaagaaataagcgtgcaacagtttgctgagagttttcaagctggagttgaaacagcttataaggcagttatgaaaccggtagagggaacgattttaacagtagccaaagatgcagcaaaagcggcaatggattacgtggatcaagctgaagattgcgttgatttaatggcacatctgattgaagctgcaagcgaatctctagataatacgcctaatttattagcagtacttaaagaagtaggcgttgttgatagtggtggtaaaggtttattatgcgtttatgaaggcttcttaaagggtcttaaaggcgaaaaaatagaagcacaagcacctaaacttgatactgaatcatttgttaatgatgatcatgattttcatggggttattaatacagaggatattgtttacggttattgtacggaaatgatggttcgatttggtaaaaataaaaaagcattcgacgagcaagaatttcgtaatgatatgagtgaattcggtgattcgttattagtaattaatgatgatgaaattgttaaagtgcacgtacatacagaacatccgggtgatgtatttaattatggtcaaaaatatggtgaactaattaaacttaaagtagaaaacatgcgtgaacaacatcgtgaagttattcgtaaggaacaagatggacttcaaaataaagaagctaatgaatccaaaacagttgaaacagctattgttacaatttctgtaggcgatgggattgctgaattatttaaatctatgggagcaacgcacattattagtggagggcaaacaatgaacccttctactgaagatatagttaaagttattgaacaatcacaatgtaaacgtgcaattatcttaccaaacaataaaaatattatgatggccagtgaacaagcagctagtattgtagaagctgaaactgtagtgattcctactaaatctattccacagggaatatcagccttattccaatatgatttagaatctagtttagaagataataaacgccatatgagtgatgctttggaaactgttcaatctggttcaattacttttgcagttagagatactaaaatagacggtattgaaatcaagaaagatgaattcatgggtctagctgaagacaaaattgtgacaagtgatgttaatcaatttcatgcagtaaaaggtctactcagcaaacttcttaatgaagatagcgaaattttaacaatgatttcaggcgaagatgctgataattcaattacaaaccaaatcattaattggattgaatcggagtaccctgatgtagaagtggaacaacatgaaggtggacaacctatttatcaatatttcttcgcagtagaataa

SEQ ID NO: 3026 - DNA, 2049 bp, Staphylococcus epidermidis
atgtcaaaagttcatcttattgagagcccatatgcattagataaaattaaaggtataggtccgaaacgtttagcgttgttagaagaattaaatattaaatcagttgaagatttagtattatatttaccaacacgttatgaagataatactgttattgacttaaatcaagcagacgatcaagcaactgtaacagtgcaaggtgaggtttattccagtccaactgttgctttttttggtcgtaataaatcgaaactaactgtccatcttatgataaatcatatcgctgttaaatgcgtattttttaatcaaccttatttaaaaaagaaacttgaactaaatagtattgtcactataaaagggaaatggaatcgtaataaacaagagattaatggtaatcgtatattttttaaagatcaaaaaaatcaagaggatactcatttagaaccaatatataggattaaagaaggaataaagcaaaagcagttacgcgataatattagacaggcgcttagtgatgttacaattcatgaatggttaactgatgacctcagagaaaagtataaattagaaactttagcttatacaatacaaacactacatcatcctattaataaacaaaatttgctaagagctagacggacttatgcatttacagagctatttatgtttgagctacgtatgcaatggttaaatcgcttagaaaagacatcagatgaggctattgaaattaattacgatataaataaagtaaaacaatttattgatagtttgccatttgagttaactgacgctcaaaaagttagtgtcaatgaaatatttcgtgatttaaaggcgcctattcgtatgcatcggttgttacaaggtgatgttggatctggcaaaactgtggtagcagcaatttgtatgtacgccttaaaaactgcaggctatcaatctgcattaatggttccaacggagattttagctgaacagcacgctgaaagtttaatacaactatttggtaatacaatgaacgtagctttattaactggttctgttaaagggaaaaaaagacgacttcttttagaacaattagaaaatggaactatcgattgtttgattggtacacacgccttgattcaagatgatgtagtcttcaataatgttggattagtcattacagatgaacagcaccgatttggtgttaaccaacgacaaattctaagagaaaaaggtgcaatgacaaatgtgttgtttatgacagctacaccaatccctagaacactcgctatttctgttttcggtgaaatggatgtatcttcaattaaacaattaccaaaggggagaaaacctataaaaacaagttgggccaaacatgaacaatatgatcaagtacttgcacaaatgtcgaatgaattaaaaaaaggtagacaagcctatgtcatctgtccattaattgagagctctgagcatttagaagatgtacaaaatgttgtggcactttatgaatccttacaaagtgattatggtaatgaaaaagttggattattacatgggaaaatgtctgcagaagataaagatcaagtcatgcaaaaattcagtgaacatgaaatagatattttagtttctactactgtagttgaggtaggtgtaaatgtacctaatgcaacgtttatgatgatttatgatgcagatcgattcggtttatctacattacatcaattacgtgggcgtgttggtcgtagtgaacatcaaagttattgtgtattaattgcatctcccaagactgaaacaggtattgaacgtatgaccattatgactcaaactactgatggattcgaattaagtgaaagagatttagaaatgagaggtccaggggatttctttggagtaaaacaaagcggtcttccagactttcttgtagcaaatgtagtagaagattatcgtatgcttgaagttgctagagatgaagcagcagaacttatacaatctggccaatttttcgaacaacaatatagtcatttaagagagtttattaaacaaaacttacgccatattcgtttcgattag

SEQ ID NO: 3027 - DNA, 612 bp, Staphylococcus epidermidis
atgatatttaaggaatatttaagacttggtactaaaatgaggggtgagcgtttgaaattaaagaaaaacgatagacgagtagccattaaagaggctatcgaattaaaccccttcatcactgattatgaattgtgtgagaagtttgatgtaagtattcaaactatacgtttagatcgcacgcatttaaatattcctgagttacgtaaaagaattaaattggtagctgaacaaaattatggacgaattaaatcaatagaagccaatgaaattataggtgatttgattcaagtgaatcctgatgttagcgcacaatctttaattgaaattacaattgattctgtttttgcaaaaagtgagattgctagagggcacgtcttatttgcacaagctaactcattatgtgtagctcttatacataaaccaatagtattgacacatgaaagtcaagttgaatttaaagaaaaagtaaaattaaatgatacagttcgagcagatgcccgtgtcatagatataacagataagcattatattattgaagtgaattcttatgtttcagatatgttagtttttaaaggtaaattcaaaatgtactatacaagtgaggatgaatga

SEQ ID NO: 3028 - DNA, 978 bp, Staphylococcus epidermidis
atggttaaaatcgcagtagatatgatgggcggggatgatgcgcctggtattgtattagatgcagttaaaaaagctgtcgaggactttaaagatttggaaattattctttttggtgacgaatcacaatacaatttaagtcatgagcgaatagagtttagacattgtactgaaaagattgaaatggaagatgaaccagtacgtgcaattaaacgtaaaaaagatagctcgatggttaagatggctgaggcggtaaaatcaggagaagctgatggttgtgtatcagctggaaatacaggagctttaatgtcggctggattatttattgttggacgtattaaaggcgtagcgagacctgcattagttgtaacattgcccactactgatggcaagggatttgtgttcttagatgttggtgccaatgctgatgctaaagcagaacatttactacaatatgcgcaattaggaaatatttacgctcaaaaaattcgtggtattcaaaatccttcggtgtcacttcttaatattggcactgaagcagctaaaggaaattctttaactaaaaaagcatatgatttatttgagaaaaatcaatcatttaactttacaggtaatattgaagcaaaaacacttatggatggaaatgttgatgtcgtagtaacagatggttatacagggaacatggttcttaaaaatcttgaaggtactgcaaaatctataggtaaaatgttgaaagaaacaataatgagtagcttcaaaaataaattagctggtgcagtattgaaaaaagatttagaaacatttgctaagaaaatggactactctgaatacggtggatcagtattattaggtttagatggtacggttgtaaaagctcatggtagttcaaacgctaaagcattttattctgcaattaaacaagcaaaaattgctggtgaagagaatatcgttcaaattatgaaagatacagtaggtgagtaa

SEQ ID NO: 3029 - DNA, 927 bp, Staphylococcus epidermidis
atgggtaaaatagcagttgtattcccaggccaaggtgcacaaaaagtagggatggctagtgacttatataatgaagaggaacgctcgactcgagtattaaatttagctcaagagacagtagactttgatttgctagaaacgatgtttactgataatgatgggaaattaggagaaacagaaaatacacaacctgcactattaacacatagtgttgcgttactagaatcattaaatcatttaaaagtagattatactatgggacatagcttaggagaatattcaagcttagttgctagtggtgtattatcttttgaagatgcggttagaattgtgcgtaaacgtggccaacttatggctcgagcgtttcctaacggtgttggaggtatggcagcagtattaggtttggattatgatgatgttgataagatatgtcaaacgttatctacaaaagaacagttaattgaacctgctaatattaactcaccaggtcaaatcgtggtgtctggacataaatctttaattgatgaattagtaaaaaagggcaaagaacttggtgctaaacgcgttcttccattagctgtttccggtccttttcattcttcaatgatgaaagttattgaagaggattttgctaatttcattaatcaatttgaatggcataatgctaattatccagttgttcagaatgttaatgcaaagggagaaaccgatgctgaagtaattaaacgcaatatggttaaacaattatattcacctgttcaatttattcaatcaacgaagtggttgattaatcaaggtgtcgatcactttattgaaattggaccgggaaaagtattatctgggcttatcaaaaaaataaatcgagatgtaaaaatcacttcaattcaaacactcgaagatgtgaaaggatggaataatcatgaataa

SEQ ID NO: 3030 - DNA, 735 bp, Staphylococcus epidermidis
atgaataaaagtgctttagttacaggtgcttctcgtggtattggtagaagcattgcattgcaattagcggaagaaggatataatgtagctgtcaattatgctggaagtaaagataaagcagaagcagttgttgaagaaattaaagctaaaggtgtagaaagctttgcaatacaagccaatgttgcaaaaggcgatgaagttaaagaaatgattaaagaagtggtaagtcagtttggttctgtagatgtattggttaacaatgcagggataactaaagacaacttacttatgcgtatgaaagaacaagaatgggatgacgtgattgatacgaacttaaaaggtgtgtttaactgtattcaaaaagtaacgccacaaatgttgcgtcaacgtagtggtgcaatcattaatctaactagtattgttggtgcaatgggtaatcctggacaagcaaactatgttgcaacaaaagcaggtgtcattggattaacaaaaactgcagcacgagaactagcatcacgaggtattacagtgaacgctgtagcacctggtttcatcgtttcagacatgacaaatgctttaagtgatgatttgaaggatcaaatgttagagcaaattcctttaaaacgttttggagaagatacagatatagctaatactgttgccttcctagcttctgataaagctaaatatattacaggccaaacaattcatgttaacggtggaatgtatatgtaa

SEQ ID NO: 3031 - DNA, 234 bp, Staphylococcus epidermidis
gtggaaaacttcgataaagtaaaagacatcatcgttgatcgtttaggcgtagatgctgataaggtaacagaagacgcatcattcaaagatgatttaggcgctgactcacttgatatcgctgaattagtaatggaattagaagacgaatttggtactgaaattcctgatgaagaagcagaaaaaatcaacactgttggtgatgctgttaaatacatcaacagccttgaaaaataa

SEQ ID NO: 3032 - DNA, 738 bp, Staphylococcus epidermidis
gtgactaaccagaaaaagaaagaaatggtacatgattttcaacaaaaatttactgataagatgaagtcgttagggttacattttaaaaatattgatttatatcaacaggcattctctcattcaagttttattaatgactttaatatgaatcgtttagaacacaacgaacgcttagaatttttaggtgatgcggtattagaattgacggtttcacgctatctttttgacagacatcctcatttaccagaaggtaatttgacaaagatgcgcgcaacaattgtttgtgaaccttcacttgtgatatttgcgaataaaattaaattaaacgaactgattttattaggtaaaggtgaagagaagacaggaggcagaacaagaccttcccttatttcagatgcatttgaagcttttgtaggtgcactatatttagatcaaggtttagattcagtatggacatttgctgaaaaagtcatctttccgtatgtagaagatgacgagcttgttggcgtcgtagactttaaaacacaattccaagaatatgtgcatagccaaaataaaggagatgtgacataccaattaattaaagaagagggtcccgcacatcatagactatttacatcggaagtgattttagaaaataaagcagttgcagagggtaaaggaaagacaaagaaagaatccgaacaaaaggcagcagaacaagcgtataaactaatgaaaaataaaaaatcattataa

SEQ ID NO: 3033 - DNA, 3570 bp, Staphylococcus epidermidis
atggtttatttaaaatcaattgatgccataggatttaaatcttttgccgaccataccaatgttcaatttgataaaggtgtgacagctattgttggtcctaatggaagtggtaaaagtaatattactgatgcaattaaatgggtactaggtgaacagtctgccaaatcactacgcggtgctaaaatggaagatatcattttttcaggtgctgaacatagaaaagctcaaaattttgctgaagtaaaacttaaattagataatcattcacaaaaactacaaattgattctgaggaattagttgtcacacgccgtctctatcgaagtggtgagagtgaatattatttaaataatgatcgtgcacggttaaaggatattatagatttatttctcgattcaggacttggaaaggaagcatttagtattatttctcaaggaagagtagatgaaatattgaatgcaaaaccaatcaatcgtcgacaaattattgaagaatctgccggagtacttaaatataaaaaacgtaaagctgaatcgattcaaaaacttgaccatactgaagataatcttaatcgagtcgaagatatcttatatgatttagagggacgagtggaaccgttaaaagaagaggcggccattgctaaagaatataagcaattatctaaagagatggagcaaagtgatgtcatcgttacagtatctgacattgatcattatactgaagataatcagcgattagatgagcgtttaaatcacctaaagagtcaacaggctgagaaagaaggtcaacaagctcaaatcaatcagttactacaaaaatataaaggtaaacgtcaacaaaacgattatgacattgaaaagttaaattatgaattagttaaagcaactgagaattatgagcaattatcaggtaagctaaatgtattagaagaaagaaagaaaaaccaatcagaaacaaatgcaagatatgaggaagaattagataatttagaatcacaaattgattctattaaaaatgaaaaagcccaaaatgaaaaattattagctgagttaaaaaataagcaaaagcaattaaacaaggaagttaaagaattagagtcacttctttatatatccgatgaacaacacgacgaaaaactagaagaaattaaaaatagttattatacattgatgtcagaacaatcagatgttaataatgatataagatttttagaacatacaatcaatgaaaatgaagcaaaaaaatcacgattagattcgcgtttagtagaggctttcaatcaacttaaagacattcaacaaaatattactcaaacacaaaaggaataccaaagttctaagaaatctatggaaaaagtagaacaaaatattcaacaattagaacaacagttgacagattctaaaagacttctatctgaatatgaaaataaactatatcaagcctatcgttataatgaaaagttaaaatcaagaattgatagtttagctactcaagaggaagattacacgtatttctttaatggtgtaaagcacattttgaaagcaaaagataaagaattaagaggaattcatggtgcggttgcagaagtgattaacgttccttcagaaatgacacaagcgattgaaaccgccttaggtgcatcgttacagcacgttattgttgataatgaaaaagacggtcgccaagcaatccagtacttgaagcaaagaggtttaggtcgtgctacttttttaccattaaacgtgattcaaccaagacatgtagctgctgacattaaagatgtagctcgtggttcacaagggttcattaatattgcatctgatgccataaatgtatctgctaaatatcaaaacatcattgaaaatttattaggtaataccatcattgtagaaaatttaaaacatgcaaatgaacttgcacgtgccattcgatatcggacaagaatagtaactttagaaggtgatgttgtaaatcctggtggttccatgacaggaggaggagcacgtaaaacaaaaagtatattgtcacaaaaagatgaattatcaacaatgcgaaatcaacttgaagattatcaacgacaaacagcagaatttgaacgtcagtttaaagaacaaaaaacacaagctgaacaattaagtgaacaatattttagtgcaagtcagcagtacaacaatttaaaagaacaagtacatcatcacgaattagaactggatagactaaaaacacaagaagcacatcttaaaaatgaacatgaagagtttgaatttgaaaaaaatgatggatatcaaagtgataaaagtaaagaaacattaaaagaaaaacaaaatcatttaattgagatacaacaacaattgaagcaactagaaagtgatattgaaagatatacacaattatcaaaagaaggaaaagcttcgacacatcaaacacaacaacaactacatcaaaaacaatctgatttagctgttgttaaagagcgaattaaatcgcaaaagcaagtttatgaacgtttagataaacaacttagcgattcagaacgtcaaaaaattgaagtaaatgaaaaaatcaaattgtttaattcagatgaaatgatgggtaaagatgcttttgaaaagttgaaagagcaaattcagcaacaagaaaatgtaagacaaaatttaaatcaacaacttagtgagattaaacagcaacgtaaagatcttaatgagaaaatcgaaataaatgaaagtcagcttcaaaaatgtcatcaagatatactttctatagaaaatcattatcaagatattaaagcaaaacaatcaaagctagatgtattaatcaaccatgcaatagatcatttaaatgacacgtatcaactcacagtagaacgtgcaagaatggaatatgattctgatgaaactattgacaatttgcgtaaaaaagtaaaattaacgaagatgacaatcgatgaattaggtcctgtaaatttaaatgcaatagaacaatttgaagagttgaatgaacgatacacatttttaaatgagcaacgaacagatttaagagaagcaaaagaaaccttagaacaaatcattcatgaaatggataaagaagttgaaggtcgttttaagacaacatttcatgcggttcaagatcattttacgacagtgtttaagcaattatttggtggtggacaagcagaacttcgtttaactgaagatgactatttgtctgctggcgttgatatcatcgtacaaccgccaggaaaaaaattacaacatctttcattattaagcggtggtgaacgtgctttaagtgctatagcattattgttcgccattctcaaagttcgatcagcaccttttgttatactagatgaagtagaagcggcattagatgaagcgaatgtgatacgatatgcccaatatttaaatgaattatctacagaaacacaattcattgtaattacacatcggaagggaacgatggagttttctgatcgtttatatggtgtaacaatgcaagagtctggtgtttctaagttagttagcgtcaacctaaatacaatagatgaggttatgaaggaggaacaagcatga

SEQ ID NO: 3034 - DNA, 1227 bp, Staphylococcus epidermidis
atgagtttttttaaacgtctgaaagataaattttctagtaaaagtgaagatgatattcaaaaagacctagatgaaactgtagattcaaatgctaatagtgactcagattcaatggacccgaatgattctgatgaacaagtcaaacccaaaaagaaacctaaaaaattaagtgaagctgattttgacgaagatggtttgatatcgattgaagattttgaagaaattgaagctcaaaaaattggagcaaaattcaaagccggtttggaaaaatcacgtcaaaacttccaagaacagttaaataatttaattgctcgatatagaaaagttgacgaagatttcttcgaagctctggaagaaatgcttattactgcggacgttggttttaataccgttatgaaattaactgatgagctacgtacagaagcacaaagacgtaatatacaagaaacagaagacttaagagaagttatagttgagaagattgtagaaatctatcatcaagaggacgatcattctgaagcaatgaatattgaagatggacgtttaaatgtcatactgatggttggtgtgaatggtgtcggcaaaacaacaacaattggtaaattagcttatcgttatcaacaagaaggtaaaaaagtaatgttagccgctggtgataccttcagagctggagcaattcaacaattaaacgtctggggagaacgtgttggtgttgaagttgtgagtcaaaacgaaggttctgaccctgcagcagtagtatatgatgcgattaatgccgcaaaaaataaaggcgtagatattttaatttgtgatactgctggacgcttgcaaaataaatctaatttaatgcaagagttagataaaatgaaacgtgtgattaatcgtgcaatacctgatgccccccatgaagctttattatgcttggatgcaacaactggtcaaaatgcactttcacaagcacgttcatttaaggaagttacaaatgtctcaggtatagttttaactaaattagacggtactgctaaagggggtattgtattagcaattcgaaatgagttacacattccagttaaatatgttggtttaggcgaaaaaatggatgacttacaaccgtttaatcctgaaagctatgtatatggattatttgctgatatgatagaacaaaatgaagatattcctgaagaaatctctagaaattcatccgttgaatctgaagaaggtaactaa

SEQ ID NO: 3035 - DNA, 333 bp, Staphylococcus epidermidis
atgggacaaaatgatttagttaaaacattgcgtatgaattatctatttgatttttatcaaagtttgcttacaaataaacagaaaaattatctcgaattattttatttacaagattattctttaagtgaaattgctgatacatttgaagtgagtagacaagcagtttatgataatataagaagaactggcgatttagtagaagattatgaatcgaaattacgactataccaaagattcgagaaacgtcgtgaattatataacttaatgaaacaatcacttaatcaacctgagttgcttaaacaatatatcactcaattagaagaattagagtag

SEQ ID NO: 3036 - DNA, 1368 bp, Staphylococcus epidermidis
atggcatttgaaggattatccgatcgcttacaagccacgatgcaaaaaatgcgtggtaaagggaaagtaacagaagcagatattaaaacgatgatgcgtgaagtgagattagcgttattggaagccgatgttaacttcaaagttgttaaggaatttgttaagactgtttcagaacgagcgctaggttctgatgtcatgcaatctttaacacctggccaacaggttattaaaatcgtacaagaagaacttactagtttaatgggtggagaaaatacttccattaagatggcaaacaaaccaccaactgttgtcatgatggtcggtttacaaggtgcaggtaaaacgacgacagcaggtaagttggcattattaatgcgtaaaaaatataacaagaaacctttacttgtggcaggagatatttatcgtccagctgctattgatcaattacaaacagtaggtaaacaaattgatatccctgtgtatagtgaaggagatcaagtatcaccacaacaaattgttgaaaatgctttaaaacatgctaaagaagaacatctagatttcgttattattgatacagctggtcgtttacacattgatgaagcacttatgaatgagcttcaagaagttaaagaaatctctaaaccagacgaaattatgcttgttgttgatgcaatgacaggtcaagatgctgtgaatgtggcacaatcatttgatgaacaattagatgtttcaggtgtaacattgactaaattagatggtgatacacgcggtggtgcagcactttcaatccgttccgttacccaaaaacctattaaatttgtaggtatgagtgagaaattggatggtttagaattattccatcctgaacgaatggcctcacgtattttaggtatgggtgatgttttaagcctcattgaaaaagcgcaacaagatgtagatcaagaaaaggctaaagatttagagaagaagatgagagagtcatcatttacattagatgatttcttagaacagttagatcaagttaagaatttaggtcctttagatgacattatgaaaatgattcctggtatgaataaaatgaaaggtttagataagcttaatatgagtgataaacaaattgatcatattaaagcgattatacaatctatgacacctaaagaacgttcaaaccctgaaacattaaatgtatcacgtaaaaaacgtattgcaaaaggatccggccgatctttacaagaagttaatcgattaatgaaacaatttaatgatatgaagaaaatgatgaaacaatttactggtggcggtaaaggtaaaaaagctaaacgaaaccaaatgcaaaatatgttaaagggtatgaacttaccattttaa

SEQ ID NO: 3037 - DNA, 276 bp, Staphylococcus epidermidis
atggcagttaaaattcgtttaactcgtttaggttctaaaagaaacccattctatcgtatcgtagttgcagatgcacgttcaccacgtgatggtcgtatcattgagcaattaggtacttacaatccagcacacgttaatgcaccagaagttaaaatcgacgaagaattagctttaaaatggttacacgacggtgctaaaccaactgatacagttcacaatatcttatctagagaaggtattttgaaaaaatttgatgaacaaaagaatgctaaataa

SEQ ID NO: 3038 - DNA, 504 bp, Staphylococcus epidermidis
atggaggtagaggttggacaaatagtcaatacccatggtattaaaggggaagtaaaggtgaaatccaattctgattttactgaaacacgatttcaacctggtgaacaattacttgtaaaacataataatactgaaattgtttatacggtcgcttcttatcgtatacataaaggatttcacatgttaaggtttgaaggaatcaacaatataaatgaaattgaacatttgaaaggtgattatatttatcaagaacgtgatcaccaagatatagaattaggagaacatgaatactattattcggatattattggttgtacagtatttaaagatgatgatacgccaattggtcgggtgattaatatttttgaaacaggtgctaatgacgtttgggttgttaaaggtgaaaaagagtatctcattccttatattgaagatgttgtgaaagatattgatatagaaactaaaacgattaaaattacaccgatggaaggattgttagattaa

SEQ ID NO: 3039 - DNA, 738 bp, Staphylococcus epidermidis
atgaagatagattatttaacgctatttcctgaaatgtttgaaggtgttttaaaccattcaatattaaaacgtgcgcaagataagggaatcattaatgttaatactatcaatttccgagattattctattaataagcataatcaagttgatgattacccatttggtggtggccaaggtatggtattaaagcctgaacctgtttttaatgctatggaagacataaatcataatgaacatactcgagtgatacttatgtgtccacaaggtcgtccctttactcaagagattgcacaagaattaagtgaagcaaaacatatagtctttatttgtggacactatgaaggatatgatgagcgcatacgtaagcatcttgtaactgatgaaatatcaatgggggattatgtcctaactggtggagagttaccagcaatgacgatgaccgatgcaatagtgaggcttattccaggcgtcttaggtaatcaagcatcacatcaagatgattcattttcagatggattgttagaatttcctcagtatacacgtcctcgtgaatataaaaatatgagtgttcctgaagtattattatctggcaatcatgcgcacattgatcagtggagacatgaacaaaaactcattcgtacttatgaaaagcgaccagatttattagaacaatatccattaactgaaaaagatagagaaattttagaaacctataaaaagaaattgaaaaatgattaa

SEQ ID NO: 3040 - DNA, 351 bp, Staphylococcus epidermidis
atgagtaatcataagttaatcgaagcagtaactaaatcacaattacgtactgatttacctactttccgttcaggagacactttacgtgtacacgtaagaatcgttgaaggttctcgcgaacgtatccaagttttcgaaggtgttgtaattaaacgccgtggtggaggaatttcagaaactttcacagttcgtaaaatttcttctggtgtaggtgtggaaagaactttcccattacacacgcctaaaatcgaaaaaattgaagttaaacgtcgtggtaaagtacgtcgtgctaaattatattacttacgtagtttacgtggtaaagctgctagaattcaagaaattcgctaa

SEQ ID NO: 3041 - DNA, 2604 bp, Staphylococcus epidermidis
atgattaaaaatatatggaataaacctattaaacgttttacactaatcgttttagttagttgtatattgtcatttattctatatggcccttttctctatcaatttataactaaaggtatagtatttagtggtagtggagatggcttcagacaaatgatgccttttcaaatgtacctttatgaacacttcacatcattaaaaggattttatgatgcttcatttggattgggaggcgactatgttaaatcactggcatattattattcactatctccattgatgtggatcaacttctctatgatatggatattagaacaaactatcaatgtgaatcctcatgacatcagcttttggacaataaaccaattaatcatggcatatgtgcgcactgtaatcacatttattttttcattttatttatttagttatttgcgacttaaacccgcaccaatgtttatcgcaactattttatatggtatgtctactgttgttacatattataattttacttggtctttttacggtaatcttttaattatgttacctatgtcactttgggctatagaaagattctttaaagaacgtaaaataggttggtttattttcgcgattgcttatacattattctcaaacttttattttagttactatgaagcaattgtcataggtttctattttatttatcgattcgctattcctcatgagaaagatattgtgaatcgttggcagaaattatacatactcgtatgtgccactttgttaagtgtattagtaagtatttatggactatatactggtgtatcttcttttttagataatgaccgaacacaaaatcctaatttcaaaattacttttttcacaaatttatttgaaaccaattataatatttttgctgatggtttttacattacaatttcttttattgctatcattgcattattttgttttaaattatatcaacactattattataaattgttcgcaattgcaacttggattttacttatcggttccttttctcaatggtttgacagtgcatttaatggcttttcattaccccaaagacgttgggtttactttttagcattatcaacaagtgtattaattgcattgttcatacaacatttaagtgaaatatcaattaaagaatacacctttgttgctataccagtattcatatacggtttcatatttatcgcactgtcggaaagatcagtaaagtggatgtttgttgcattgattttaatcatagtgttatttatatttattaaatataaatcgttgttaacacgtacctcaatgatggtattactcgttgtcttatttttagctcaacaagtcttaatgactaatgattccagaaaaattactatcgaaccttatcaaacgactatcaaaacaattaatgattcgagctatagaagccctgtcctaaataaaaaaattaagtatatgcatcaaagctctacagatccattaaaaagactagattatttttcatactatgcattaaactcacctttgatatatcactacaacggcacatcattgtattccagtattttcgatggagatatattgaaatactatgaccagacgttacaaattaatatgcctgtagataaaaatagtacttatcgatatttaaataatcgtgcaaacttaatgtctctttgggatgttcaagatcgattacgacatcctgatgatttaaatatgccttatggttttaaaaagaaagaacttataactgataaaaaagatcaatggattcactctgttaatacaataaattatcctagtgcacacattactaataaaatttatgatgcaagaaaactaaaatctccccttgatagagagcaagctatgcttaaaggtgtcgtattgaatcataaatcccaagccaatactgattttaaacctaatcctaatttactttctaatgcaaaacaaaacttaaatcatgcgaattggattgatagtaaacatttaaaagttaaacagcacaatggtggcgtcaccctcaatttacctcgcaatatagttaaaaattataaagatatgtatattgaaatggatgttgaattactgtctcctgacaaagagcataaagtaggggttaatgaatattcgcaagaaagaaaccgtttgtcatacaaataccgtcgttttgtttcgccagtgacgatgcgtgctaaagcttcaaatcaacttaacattaagatgtcaaaaggagtttatcgttttaaagtaaaaggaatttatggtgaaaactatcaaacattaaaaaaagcttctcaacagctccaaccagttaaagtaaaaaaagaaagaaatggtttcacaattattaaaaagaaaaaagaacatggttatcttgtcttgccaatggtatatgctaaaggaatgcatgcaatggcaaatggaaagcctctaaaggttcaacaaggcaacggtattatgactactattcctgtaaaagagggacaaacaaagataaaattaagttatacccctccttatttttatttattaatcactgtcagttgcattgggatcattttaagcattcttttcactcattacgtaaaaagaaaataa

SEQ ID NO: 3042 - DNA, 2601 bp, Staphylococcus epidermidis
atgagaagaaaagcatgtttcattatattattaattacattatcattaattggtcatagttatattatttttcgcttccatcatgatggtgttctttcaactggcccaaatgatggtatggaacagatgattcctattcaaatgtatctttatcatcaatggactcaagggaacttattttattcaacacatttgggtcttggcggagattttttcactgacttaagttattatttttcaacaaatttaatatttattttaaatgtccctatcatcaaattatgtgaaatattcttttcattgaacacaaatcaaattcttctttggatgtacaacgcactaattgtttcaattattaaatcaactattgctctgttttgcacttatttatttagttattatatttctaaaaataaaataatcggtttattgatttcatttatctttgttatttcacctttgtactttagatttacaatttactggccattctttagtgatactttcatttggttaccactcttattattagggattgaacgtttattaagggattttaaagtaggtttatttatactaactgtaagtctaattctaattaataacttttattttgcatattatttcctcattattggtataggttataccttgattagaattatttacagacatcctaaagatagtttaactcgttggcaagcttctcttacaattatatgtagtgctctgctcgctttaggaaatagtatgtttgtgttctttcatggtgttcaaagttttcttaataatcgtcgacaatcatttacaggacaagtgaattggattgaacatttaaataaagataccaatatatttttcgataattacttgattgttgtgatatttttatctattcaagctcttttgacaatcaaattatacaaacatttttattataaattatttgcattgttattattggcaacaattatttttgcatttctcccatttgttgaccaactatttaatgggttttcagcacctcaaaaacgatggcattttatcttagcttttaatagttcaattttaattgggttatttgtaaaatattttaaaacaattcgaccaaagacttatatttatactaatctgatagctcaaagtgtcatctacataagttcaattagctacaatacttttttaccttggctctctttagttccagtagtgtcagtgattggactattaattttattaataaaagagaaaaaagtacgttattatcttacttacctttatagtatttcaatcgctgctctcagtcttatgattactttcgtattcataaaaaatcaaattttctttcaagatcatatcaatcgtgcgaacaagcgatacattaattcaagtttctatagctcgactatacaaagatcgttagtaaaagaaatgaaccaaactaagaatgacgatcaacgaataaattggcgtgtcgatgaacaagataatacccctatgtatcaaaattttaaaggacttagtatttactctagtatatttcatcacaacattctcgatttctattatgatgccttaaaaattaatttagctgaagaatctgtcagtcgataccagtctactaatgctcggcaaaatatcgagagtctgttttcagtaaaatatttaatgatgaaagattatcaaaattttattccatcttattttaagaaagttaagtcacgtggacaatatattatttataaaaatcaacttccactaccaagtgtaaaagtaacacaaaacatttataatcataaaagtttaaaaaaacctatagatagagaacatgcaatgattaatggtgctattgtgacatcaaaaggtacagcgtatcactcaaaagttaaaaatttgttagaccaaacacgtgtatcaacacaaaatataacacgatattcaaacaatgaactaaccgttaataaagagagcggaataatcaaattacatttacctaagaatataagagacaaatacaaagatttttatctcactatgaatattaaacgaggcgatcctgacagtaattacactgtgagcatcaatcaatatcataatcatcgtctatacaatgattctatatatcgcacgggaataagcaaagtgctttatcgaagtttaccagacaaaaatggtgatattacgattcaactatcaccaaaaggtaagttcaatttggaactgttagaattaaacggtgaaaattatgatacgctaaaacaagcacaccatcatgctaactttaatatgcgttataaagatataaaaaacggggtaaaagttaacttagatcaccattctaaaggacttgcagtcattaatattccatatcgtaaaggtatgcgtgcatacgtggatgaccgacaaagcaatatcaaaaaggtgaattatatgatgacaggtgttccggttaataaaaataataaaacaattacgattcaatatcgaccaccttttctaaaaacgatgttttctatctcaatatttagtatagtggtgagtattgtattcattagattaaagaatataaggaaaagaaagatgaggattcgccatgattaa

SEQ ID NO: 3043 - DNA, 114 bp, Staphylococcus epidermidis
atgaatagaaaaatgatttttatactaaatgatgcacgtgttaaacttaaagtggttggggtagctattataaagtataattatgaagttatagataaaagtttaagaaaataa

SEQ ID NO: 3044 - DNA, 864 bp, Staphylococcus epidermidis
atggcgatacaatggtatccaggtcatatggctaaagccaaaagacaagttagtgaacaactgaaaaaggtagatgtagtttttgaactcgtcgatgcacgtattccatacagttcgagaaaccctatgattgatgatgtcattaaacaaaaacctcgagtagtaattttaaataaaaaagatatgacgaatttaaaagaattagaaaaatgggaaacttattttaaagatgaaggtttctatccggtagctgtagatgcaaaacatggcaagaatcttaaaaatgttgaagttgaagctataaaagcaactcaagaaaaatttgatcgtgaaaaagctaaaggtttaaaacctagagcgataagagctatgattgtaggcattcctaatgtaggaaaatcaacacttatcaataagttagcaaaacgtagtatcgccgaaactggaaataaaccaggagtaacaaaacagcaacaatggattaaagttggaaagtctcttcaattactagatacaccaggtattttatggcctaaattcgaagatgaagaagtcggtaaaaaattaagtttaactggtgcaattaaggatagtatcgttcatttagatgaggtagctatttatggtttgaattttatgattaaacatgatgtttcagctttaaagagacattataatattgatacacatgaagacgctgagatactcgattggtttgatgcaattggaagaagaaggggattgttacaaaaaggaaatgaagtagattatgaatctgtcattgagttgatcatcaatgatatgagaaatgcaaaaattggaacttattgttttgatattttaaaagaaatgaagagtgaatga

SEQ ID NO: 3045 - DNA, 771 bp, Staphylococcus epidermidis
atgtctctaacaattaaagaaatcaaagaaaaactatctcgaattgaaacgttggaagagttacataaacatgaagcaaataatgattcacgtaaaggtgttataaatgcgattaagtctagggaaaaaaatattcttaagcaacaagcattagaagagcactatttatccatgaatcaatacgaaaacaacattatgtcctctaacagggatgcattaatttgtggaattgatgaggtagggcgtgggcccttggctggaccagttgtggcttgtgcagttattttagagaagaatcatcattatattggtttagatgactctaaaaaagtgtctcccaaaaatagagcacgacttaatcaaaatttaaaagaaaatgtctatcaatatgcatatggcatagcgtcctcagttgaaatagatgaattgaacatttatcgggcaactcaattagctatgctacgtgctataaatcaattagatgttacacctacacatttattaatagacgcaatgacactagatattgatattccacaaacctcaattattaaaggtgatgctaaaagtgtgtctatcgcagcagcaagtatcatggctaaagaataccgtgatcaatatatgagacaactatctaaacagtttccagaatatggttttgataaaaatgcaggttatggaactaagcaacatttaaaggctattgatcaagtgggcataatcaatgaacatcgtcaatcatttgaaccaattaaatcaatgatgaaataa

SEQ ID NO: 3046 - DNA, 1167 bp, Staphylococcus epidermidis
atgaatatccacgagtatcaagggaaagaaatatttcgttcaatgggcgttgcagttccagagggacgagtagcatttactgctgaagaagcagtggaaaaagcgaaagaattaaattcagacgtatatgtggttaaagcgcaaattcacgctgggggtagaggtaaagcaggcggcgtgaaaattgctaaatcattatctgaagtcgaaacgtacgcaaatgaactgctaggtaaacaattggtcacacatcaaactgggccagagggcaaagaggtcaaacgtttatatatcgaagaaggatgcgatatccaaaaagaatattatgttggttttgttattgatcgtgctactgataaagtgactttgatggcatcagaagaaggtggaactgaaattgaagaggttgcagctcaaacacctgaaaagattttcaaagaaacaattgatccagtagtaggattatcaccttaccaagcgcgacgtatcgcttttaatattaacattccaaaagaatcagttggaaaagcaactaaatttttattagcactatataatgtctttatcgaaaaagattgttctattgttgaaattaacccacttgttacaactggagacggtcaggtattggctttagatgctaaattaaactttgatgataatgcattatttagacataaagatattttagaattacgagatttagaagaagaagatcctaaggaaatagaagcttctaaatatgatttatcatacatcgctttagatggagatattggttgtatggttaatggcgcaggtttagccatggcaactatggatacaattaatcattttggtggaaatccagccaacttcttagatgtaggtggcggtgctacaaaagaaaaggtaactgaagcatttaaaattattttaggtgatgacaatgttaaaggtatctttgtaaatatttttggtggaattatgaaatgtgatgttattgccgaaggtattgtagcagcggttaaagaagttgaactaacattaccattagttgttcgtttagaaggaactaatgtcgaacgtggtaaagcaatattaaacgaatcaggtttagctattgagccagcagcaactatggctgaaggtgctcaaaaaattgtgaaacttgttaaagaagcataa

SEQ ID NO: 3047 - DNA, 909 bp, Staphylococcus epidermidis
atgagtgtatttattgataaaaatacgaaagtaatggtacaaggtatcacagggtctactgcccttttccatacaaaacaaatgcttgattatgggacacaaattgttgcaggggtaacacctggtaaaggtggacaagttgtagaaggtgttccagtatataacactgttgaagaagctaaaaatgaaacaggagctaatgtatctgttgtatacgtaccagcaccattcgctgctgattcaattattgaagcagctgatgccgatttagacatggttatttgtattactgaacatatacctgttgttgatatggttaaagtaaaaagatatttacaaggtcgtaaaacacgtttagtaggaccaaactgtcctggtgtgataactgccgacgagtgtaaaatcggtattatgccgggatatatccataaaaaaggccatgtcggtgtcgtgtctcgttctggtacattaacgtatgaggcagtgcatcaattaactgaagaaggtatcggtcaaacaactgctgtaggtatcggcggtgatccagtaaatgggactaactttattgatgttttaaaggcgttcaatgaagattctgaaactaaagccgttgtaatgattggagaaattggtggtaccgcagaagaagaagcggcacaatggattaaagaaaatatgaacaaacctgtagtaggttttatcggcggtcagacagcacctccaggtaaacgtatgggtcatgctggagctattatttcaggaggtaagggtacagcatctgaaaagattaaaacattaaacgattgtggtgttgaaactgcagatacaccttctgaaataggaacaacccttattgatgcagctaaaaaagcaggcatttatgaagagttattaactattaaaaaataa

SEQ ID NO: 3048 - DNA, 873 bp, Staphylococcus epidermidis
ttgatacaacagacgatgttaaaactatattgggcaaatttcactacggcacaacttcatcatcttacaagtacatatcctgactttctatcagaaaacgtatttcatcaacatgacatgataaaaaggtggcttacagagcgtaattctgaaaggctatggaacaaatatgaacgtttcaaagaattaaagctgatggacattattaaagaaatgaaaaaagcaaatgttagttttacaacatactttgatgataactacccttctctttgcaaagaaatgtatgattatccttatgtgatattctacaaaggaaatccacagttctttaatcattctcactctttagctgtaattggctcacgtaatgccacacaatatacaagtcaatctttaaactatctttttccttcatttagacaattaaatatggcgattgtttctggattagcgcgcggtgcagatagtgtagcacatcaaaccgcacttaaatacctattaccaactattggcgtacttggatttggccattgttatcattatcctaaagcaaccttaaatttaagaactaaagttgaaaggaatggcttagtgataagtgaatatccaccattttctcctataagtaagcataaatttcctgaaagaaacaggcttataagtggtctgtccagaggggtacttataactgaggctgaagaaagaagtggtagtcaaatcactatcgattgtgctttagagcaaaatagaaatgtttatgttctacctggttcaatgttcaacaaaatgactaaaggtaatttaagaaggataaatgaaggtgctcaagttgttatagatgaaagtagtatattatatgattatctattttag

SEQ ID NO: 3049 - DNA, 2070 bp, Staphylococcus epidermidis
ttggcagataatttagtcattgttgaatcgcctgcaaaagctaaaaccattgaaaaatatttaggcaaaagatataaagttattgcttcaatgggacatgttcgtgacttaccaagaagtcaaatgggtgtcgacactgaagataactatgaaccaaaatatattacaattcgtggcaaaggtcctgtagttaaagatttaaaaaaacatgcgaaaaaagcaaaaaaaatatttttagctagtgaccctgaccgtgaaggtgaagcgattgcttggcatttatcaaaaattttagaattagaagatagcaaagaaaatagagtagtatttaatgaaattacaaaagatgctgttaaagatagttttaagcatcctcgtggtattgaaatggatttagttgacgcgcaacaagcacgtcgtattttagatagactcgttggttataatatttctccagtattatggaagaaagttaaaaaagggctttctgctgggagagttcagtcagttgctttacgtttagtcattgatcgtgaaaatgaaattcgtaattttaaacctgaagagtattggtccattgaaggtgaatttagatacaagaaatctaaatttacagctaaatttctacactataaaaataaaccttataagctaaacaacaaagacgatgttcaaaggattactgaagcattaaatggtgatcaatttgaaatcacaaatgtgaatcgtaaagaaaaaacacgttatcctgctcatccatttactacatcaaccttacaacaagaagctgcacgtaaactaaattttaaagcacgcaagacaatgatgttagcacaacaattatacgaaggtattgacttaaagcgtcaaggtacagtaggtttaattacgtatatgcgtaccgattctactcgtatctcaacttctgcaaaatcagaagcgcagcaatatataaatgataaatatggtgaacagtacgtgtctcagcgtaaatcatcgggtaaacagggcgatcaagatgctcacgaagctattagacctactagtacaatgcgaactcctgatgacatgaaagcttttcttactagagatcaacaccgtctatacaaattaatttgggaaagatttgtagcaagtcagatggctccagctattttggatacagtagctttagatgtaactcaaaacgacattaaatttagagctaatggtcaaactattaaatttaaaggttttatgacactatatgtagaagcaaaagatgataaagagaatgataaagaaaataagcttcctcaactagataaaggagataaggtaactgcgacaaagattgaaccggcacaacactttacacaacctcctcctcgttatactgaggcgcgtttagttaaaacgcttgaggaacttaaaattggaagaccttcaacatatgctccaaccattgatacgattcaaaagcggaactacgtcaagttagaaagtaaacgcttcatcccaactgaattaggagaaattgtttatgagcaagttaaagaatacttcccagaaattattgatgtagaattcactgtaaacatggaaacattacttgataaaattgccgaaggtgacatgaattggcgtaaagtaataggagacttctacaacagttttaaacaagatgttgaacgcgcagaatctgaaatggaaaagattgagattaaagacgagccagctggtgaagattgtgaagtctgtggttctccaatggttattaaaatgggaagatatggtaagtttatggcatgttcgaactttccggactgtcgtaacaccaaagcaattgtcaaaacgattggtgtcacatgtccgaagtgtaatgaaggagatgtcgtagaacgtaaatcaaagaaaaatagaattttctatggttgttctagatatccagaatgtgattttatttcttgggataaacctgttggaagagattgtcctaagtgtcatcattaccttgtgaacaagaaaaaaggtaaaagtagtcaagttgtgtgctccaactgtgattatgaagaagaagttcaaaaatag

SEQ ID NO: 3050 - DNA, 1308 bp, Staphylococcus epidermidis
atgacgcaaaaagtaaacgttgtaggagctggtttagctggctctgaagctgcatatcaattagctcaacgtggaattaaagtgaatttaattgagatgcgtccagttaaacagacaccggcgcaccatacagataaatttgctgaattggtatgttcaaattcattgagaggtaatgcacttacaaatgctgttggtgttcttaaagaggaaatgagacatttagactcgttaattatcacatcagcagataaagcacgtgtgccagcgggtggtgctttagcagtggatagacatgattttgctggctatattacagataccttaagaaaccaccctaacatcactgtattaaatgaagaagttaatcatataccagaaggttatacgattattgcaactggccctctaactactgagcatttagctcaagaaattgttgatattactggtaaagatcaattgtatttttacgatgctgccgcaccaataatagaaaaagattcaattaatatggataaagtatatttgaaatcacgttatgataaaggtgaagcagcgtatcttaattgtcctatgactgaagaagagtttaaccggttttatgatgcagtattagaagctgaagttgcaccagtcaatgagtttgaaaaagaaaaatattttgaagggtgtatgccttttgaagtcatggctgaaagagggcgaaaaactttgttatttggtccgatgaaacctgttggacttgaagatcctaagactgggaaacgcccttatgcagttgttcaattaagacaagatgatgcagctggaacattatataatattgttggctttcaaacacatttaaaatggggtgcgcaaaaagaagtcattcgtttaattccaggattagaaaatgttgatattgtaagatatggtgtgatgcaccgaaatacctttattaattcacctgatgttttaaacgaaaaatatgaattaaaaggacatgataatttatattttgctggacaaatgactggcgttgaaggttatgttgaaagtgctgccagtggattagttgcaggtattaatcttgcgcataaaattttagacaaaggggaagttattttccctagagagacaatgataggtagtatggcttactacatatcacatgccaaaaatgagaagaattttcaacctatgaatgccaattttggtcttttaccatctctcgaaaaacgtattaaagataaaaaagaaagatatgaaacacaagccaaaagagcgttagagtatttagataattacaaacaaacgctgtaa

SEQ ID NO: 3051 - DNA, 891 bp, Staphylococcus epidermidis
ttggataaaatccaagaaacatttttatatatgttaaaggttgaaagaaacttttcagagtatacgttaaaatcttatcatgatgatttagttcaatttaacaactttttagaaagagaacatttacaacttgagacttttgaatataaagatgctagaaactatttggcttttttatattctaatcaattaaaaagaactacggtgtcaagaaagatatcaactttacgtaccttctatgaattttggatgactcaagataattcaattattaatccctttgttcaactagtgcatcctaaaaaagagaagtatttacctcaattcttttatgaagaagaaatggaagcactttttcaaactgtagagcatgataataaaaaaggcatacgagacaaagttattattgaattgttatatgcaacaggaatacgtgtgtctgaattaataaatattaaactaaaagatatagatatgaacttaccaggtgtaaaagttttaggtaaaggaaataaggaaaggtttatcccttttggagagttctgtagacagagtatagaaagatacttagaagaattccaacctaaacaattagccaatcatgattatttaattgtaaatatgaaaggtgatcctatcaccgaaagaggagtaagatatgtacttaatgatgtcgttaaaagaaccgctggcgtcaatgacatacatcctcataaattaagacatacttttgctacacatttattaaatcaaggtgctgatttaaggactgtacaatctttacttggtcacgtcaatttatcgactactggacgttatacacatgtttcgaatcaacaactgagaaaggtgtatttaaacgcacatcctcgagcaaaaaaaggagagtaa

SEQ ID NO: 3052 - DNA, 543 bp, Staphylococcus epidermidis
atggataattctttacacgctacaacaatttatgctgtacgccataatggtgaagcagctatggctggtgatggtcaagtcacattaggtcaacaagttattatgaaacaaactgctagaaaagtaagacgtttatacgaaggaaaagtattggctggttttgcaggtagtgttgctgacgccttcacacttttcgaaaaatttgagacaaagcttcagcaatttagtggtaatttagagcgcgcagctgttgaactagcacaagaatggcgtggagataaacaattacgacaattagaggcgatgcttatcgtaatgaataaagatgccatacttattgttagtggtacaggtgaggttattgcacctgatgatgatttaattgccattgggtcaggtggtaactatgcacttagcgcaggtcgagcactaaaaagacatgcagcacaactttctgctagtgaaatggcatacgaaagtttaaaagttgcagctgatatttgtgtgtttacaaatgacaatataattgtagaaacgctataa

SEQ ID NO: 3053 - DNA, 1404 bp, Staphylococcus epidermidis
atggatacaaatggaattaaattaaccccaaaagacatcgtatctaaattgaatgagtatattgtaggacaaaatgacgcaaaacgtaaggtggctattgcactaagaaatcgttatcgtagaagtcttttaaaagaagaagagaaacaagagattgcgcctaaaaatattttaatgataggtccaacgggagttggtaaaactgaaatagctcgacgcatggcaaaaattgttggagcaccatttattaaagttgaggcaactaaatttacagaagtcggttacgtcggaagagacgttgaaagcatggttagagatttagttgatgttgctgtacgtttagtaaaagacgagaaaaagtcattagttaaagatgaagcaactaagaaagcaaacgacaaattagttaaattacttgttccgagtttaaaaaagaaggcagcacaaggtaacaaccctttggaaaatttattcggtggagcaattccaaacttcggtcaaaatcaagatgaagaggaagaaccgccaactgaagaaattaaaaccaaacgttctgaaataaaaaaacaacttgaacagggcaaacttgaaaatgaaaaagtaagaattaaagtagaacaagatcctgcatcaatgggtatgttagggactaatcaaaatcaacaaattcaagatatgatgaatcaattgatgcccaagaaaaaagtcgaaagagaagtttcggttgaaacagctagaaaaatcttagctgatgattttgcagatgaattaattgaccaagaaactgcgaatcaacaagccttagagcttgcagaacaaatgggtatcatatttattgatgaaatagacaaggttgctactaacaatcaaaatagcggtcaagatgtgtcaagacaaggcgtacaacgagatattcttcctatacttgaaggtagcatgattcagacaaaatatggtactgtaaatactgaacatatgctatttataggtgctggtgcattccacgtatcaaaaccaagtgatttaattcctgaattacaaggtcgatttccaattagagttgaattagaaagtctttcagtagaagatttcgtgagaattctgacagaaccaaaattatcgcttgtcaaacaatatgaagcattgcttcaaactgaagaagttacagtaaatttctcagaagatgccattcaacgattagctgaaattgcatatcaagttaatcaagatactgataatattggtgctcgtagattacacactattctagaaaaaatgcttgaagatttatcatttgaagcaccaagcatgccgaatgctgttgtggatattactccacaatatgtagatgacaaattaaaatcaatctcaacaaataaagatttaagtgcatttattttataa

SEQ ID NO: 3054 - DNA, 771 bp, Staphylococcus epidermidis
atgagcttattatctaaaacaagagaattaaacactttattacaaaaacataaaggtattgcagtagattttaaagatgttgctcaaacaattagtaatgttacagttactaatgtatttattgtgtcgagaagaggtaaaatcttagggtcttgtttgaatgaattattaaaaagtgaacgcattaaagatatgttagaagatcgacatataccgcgtgaatatactgaagagttgatgaatgttaaacaaacagaatcgaatatcgatattgataatgaattaactgtatttccgccagagaatagagaggtatttttaaatagtagaacaactattttcccaattttaggtggtggcgaaagacttggtacgctagtcttaggtcgagttcaagacgacttcaatgaaaatgacttagtattaggagaatatgcagccactgtaattggaatggaaattttacgagaaaaacataatgaagtcgaaaaagaagctagagataaagctgctataacaatggcaatcaactcactttcatattcagaaaaagaagcaattgaacatatatttgaagaacttggtggtacagaaggtttacttatagcttcaaaagtagctgacagagtgggcattacacgatcagtcattgtgaatgctttacgtaaacttgaaagtgctggtgtcatagaatcacgttctcttggaatgaaagggacatttattaaagtaaaaaaagataaattccttgatgaacttgaaaaaaaataa

SEQ ID NO: 3055 - DNA, 789 bp, Staphylococcus epidermidis
atggcagtaatttctatgaaacaattacttgaagccggtgttcacttcggtcaccaaacacgccgttggaacccaaaaatgaaaaaatatatcttcactgaaagaaatggtatttatatcattgatttacaaaaaacagtgaaaaaagttgaagaagcatacaactttgtaaaacaaatctctgaagaaggcggaaaagtcttattcgtaggtacaaaaaaacaagcgcaagaatcagttaaagctgaggcagagcgtgctggtcaattctacgttaaccaaagatggttaggtgggattttaactaactacaaaacaatctcaaaacgaattaaacgtatttctgaaattgaaaaaatggaagaagacggattatttgaagtattacctaaaaaagaagttgttgaacttaaaaaagaatacgaccgtttaattaagttcttaggcggtattcgcgatatgaaatcaatgcctcaagcattattcgttgttgatcctcgtaaagagcgcaacgctattgctgaagctcgcaaactaaatattcctatcgtaggtattgttgacactaactgtgatcctgatgaaattgattacgttatcccagcaaacgatgatgctattcgtgccgttaaattattaactggtaaaatggcagacgctatcttagaaggtcaacaaggtgtatctaatgaagaagtagctgcagaacaaaacatcaatttagatgacaaagaagaatctgaacaagcagaaacaactgaagaaaacacttctgttgaatcaaactaa

SEQ ID NO: 3056 - DNA, 879 bp, Staphylococcus epidermidis
atggcaatttcagcaaaacttgttaaagaattacgtgaaaaaactggcgcaggaatgatggattgtaaaaaagcgctaactgaaactgatggtgacatcgataaagcgattgactacttacgtgaaaaaggtattgcaaaagcagctaaaaaagctgaccgtatcgcagcagaaggacttgtacacgttgaagtaaaagataatgaagctgcaatcgttgagattaattcagaaacagacttcgtagcacgtaacgaaggtttccaagaattagttaaagaaattgctaaccatattttagatagcaaggtagaaacagtagacgctttgatggaatctaaattatctagcggtaaaactgttgatgaaagaatgaaagaagctatctcaacaattggtgaaaaattaagtatccgtcgtttctctatcagaacaaaaactgataatgatgcatttggtgcatatttacacatgggtggacgtattggtgtgttaactgtagtggaaggtactactgatgaagaagctgctaaagacgtagcaatgcacattgcggcaatcaaccctaagtatgtttcttctgaacaagtaagcgaagaagaaatcaatcatgaaagagaagtattaaaacaacaagcattaaacgaaggtaaaccagagaaaatcgttgaaaaaatggttgaaggtcgtttacgtaaatatttacaagaaatttgtgctgtagatcaaaacttcgttaaaaatccagacgaaactgttgaagctttcttaaaagctaaaggtggtaaacttactgatttcgttcgttatgaagttggagaaggtatggaaaaacgtgaagaaaactttgctgaagaagttaaaggacaaatgaaataa

SEQ ID NO: 3057 - DNA, 723 bp, Staphylococcus epidermidis
atggcacaaacttctaaatataaacgtgtagtattaaaattgagtggcgaagctttagcaggtgataaaggattcggcataaatcctatcattatcaaaagcgttgcacagcaagttgctgaagttgccaaaatggattgtgaaattgctgtcattgtcggcggtggaaatatttggagaggcaaaactggtagcgacctaggtatggatcgtagtacggccgattacatggggatgcttgctactgttatgaatgctttggcattacaagacagtttagaacaattagattgtgatacacgtgttttaacttctattgaaatgaaacaagttgctgaaccatatattcgtcgacgtgcaattagacatttggagaaaaaacgtgttgttatatttgccgctggaattggtaatccttacttctcaactgacacaactgctgctttacgtgcggctgaagtagaagcagatgtaattttaatgggtaaaaataatgtagatggtgtttattcagctgatccaaaagttgatgcaaatgcaattaaatatgaacatttgacacatattcaaatgcttcaagaaggtttacaagtgatggattcaacagcttcatcgttctgcatggataataatattccgttaaatgttttctctattatggaagaaggtaatattaagcgtgctgtaatgggtgaaaaaatcggaacattaattacaaaataa

SEQ ID NO: 3058 - DNA, 555 bp, Staphylococcus epidermidis
atgagtgacataatcaaagatacaaagtctagaatgcaaaaatcaattgataacttatctcgtgaacttgctaacattagtgctggtagagcaaactctaatttacttaatggtgttacagttgactactatggtgcacctacaccagtgcaacaattagcaagtatcaatgtgcctgaagcacgtctattagttatttcaccatatgataagtcatcagttgctgatattgaaaaagcaattatcgcggctaatcttggggttaatccaacgagtgatggtgaggttattcgtatctctgtaccagctttaactgaagaaagacgtaaagaattagttaaagaagttaaaaaaattggtgaagatgctaaagtctcaattagaaatattcgtcgtgatattaacgatcagcttaaaaaagacgaaaaaaatggtgacattactgaagacgacttaagaagtcaaactgatgatgtacaaaaagctacagataattcgattaaagaaatagatcaattggttgccgacaaagaaaaagatattatgtcagtatag

SEQ ID NO: 3059 - DNA, 771 bp, Staphylococcus epidermidis
atgtttaaaaagctgaaaaataaaaataaaactgagacaaaccataataatgacttagacatacataatatacctgaacatgtggctattatcatggatggaaatgggcgttgggcaaaaaaacgtaaaatgcctagaattaaaggccattatgaaggtatgcaaacaatcaaaaaaattactcgcgaagcgagtgatataggtattaagtatttaacattatacgcattttcaacagagaattggtctagacctgaaagtgaagttaattacattatgaatcttccagtgaatttccttaaaacatttctaccagaattaattgaaaagaatgttaaaattgaaacaatagggttttatgaaggtttaccacaatctacaattgatgctattgattttgctaaagctaagactcagcacaatactgggttaactcttgtgtttgctataaattatggtggacgagctgagattattcagagtatgaaagcaatatataacgaattacaattaaacggacaaggatctgaagtgattgatgaggcgttaataaagcgtcatttaatgactcatagttatccagatccagacttattaatacgcacttcaggagaacaaagaataagcaatttcttaatatggcaagcttcatatagtgaatttatttttaatgaaaagctatggccagattttgatgaaaaagagttaagagagtgtttgaaaatatatcaatcacgccaaagacgttttggaggattaagtgaggagtaa

SEQ ID NO: 3060 - DNA, 783 bp, Staphylococcus epidermidis
atgaaagtaagaacattaaccgcgattatagccttattaatattcttgcccatcttgctcaaaggtggcttaatattaatgcttttcgcattcttattagctttgatagccttaaaagaactacttaatatgaatatgatcaaatttttatctatacctggtctgattagtgctttagccctaattattatcatgttacctcaagatgcaggtgaatgggttcaagttatccaacttaaaggtttaattgctatgagtttcatagttttaagttatacagtgctatctaaaaacagatttagttttatggatgctgcattttgtttgatgtctgtagcatacgtaggaattggcttcatgtatttttatgagacacgttctgagggcttgagatatattttatttgcatttttaatagtttggctaacagatacgggtgcttatatttttggtcgccttatgggtaaacataagttatggccagtcattagccctaataaaacaattgaaggtttctttggtggtattttatgtagcattttagtaccattagtgatgcaaatgtttgtagatttacatatgaatatttggcttttactattagtcacaattgttttaagtatgtttggtcaattaggtgatttagtagaatctgggtttaaacgtcattttggtgttaaagattcaggacgtatactaccaggacatggtggtatattagatagatttgatagcttcatgtttgtattaccgctattaaatattttactgatacaaacttaa

SEQ ID NO: 3061 - DNA, 1287 bp, Staphylococcus epidermidis
atgagcattttaattacgattatttcatttatcatcgtatttggtgtactcgtaactgttcacgaatatggacacatgttttttgctaagcgagcaggaattatgtgtcctgaatttgcgattggtatgggtcctaaaatttttagttttcgtaaagatgaaacattatatacaattcgtctattaccggtgggtggttatgtcaggatggctggtgatggtcttgaagaaccaccagttcaaccaggtatgaacgtaaaaataaagttaaataaccaagacgaaatcacacatataattctagatgaccaacataaattccaacaaattgaagccatagaagttaagaaatgtgattttaaagatgacctatatattgaaggtatcacttcttatgatgatgaaaggcatcacttcactatagcgaaaaaggcattttttgtcgaaaatggaagccttgttcaaattgctccaagagatagacagtttacacataagaaaccattgccaaagtttttaacattatttgcaggtccgttatttaattttattttagctttagttctatttattggattagcatactaccaaggtacgccaaccaatgtcataggagaagttgtgaagaaatctccagctgatgaagctggattgcacaaaggtgataaaatagttcaggtaggtaatcataaaattaaaaattttgatgatatcaaacatgttcttgaccaaaataaaacggcgaaaacaactgtaaaaattaaaagggatggccaaaacaagtctgtagatctccaacctaaaaaagtagagagaaagataactaaaactaaaactcaaacaacttatcaaattggttttgcccctactacagaacacagcgtttttaaaccaataagctacggtatttataactttttcgataaaggtaagcttatttttacagctgttgttggtatgttagctagtatatttacaggagaattttcatttgatatgttaaatggccctgttggtatttatcacagtgttgattctgttgttaaatctggaattattaatttagtaggatacaccgctttattaagtgttaacttaggaataatgaatttgctacctattccagcgcttgatggtggtcgcatattatttgtactatatgaggctatttttagaaaaccagtgaataaaaaagcggaaacaggaattattgctgtaggcgcactttttgtggttattattatgattttagtcacttggaatgatatacaacggtatttcttataa

SEQ ID NO: 3062 - DNA, 1704 bp, Staphylococcus epidermidis
atgaaacaatctaaagtatttataccaacgatgagagaagtccctgcagaggcggaagcattaagccatcgtttattattaaaagcagggttaattaaacagagtacaagtggtatatatagttacttaccacttgctacacgtgtactaaataatatatctaaaatcatacgtgaagaaatggaaagtatagatgctgtagaaattcttatgccagctttacaacaagcagaattatgggaagagtcaggacgttggagtgcatatggtccagaactaatgcgtttaaaagacagaaacggacgtgaatttgcattaggacctactcatgaggaagtagtcacttctttagtaagagatgaattaaaatcatataaacagttaccccttactttatttcaaattcaatccaaatatagagatgagaaaagaccacgctttggattattaagaggacgcgaatttcttatgaaagatgcatattccttccattcagatgaagcttcattagatgcaacttatcaagatatgtatcaagcatatagtcgcatattcaaacgtgtaggcatcaatgcaagaccggttgtggcagattcaggtgcaatagggggaagtcatacacacgagtttatggcattgagtgaaattggggaagatacaatagtttatagtaatgagagtgactatgcagcgaatattgaaaaggctgaagttgtttatcatccttctcataagcattctgcacttgcggaattgactaaagttgagacgcccaatgttaaaacagctcaagaagttgcagaatatttaaagagaccattagatgaaattgtaaaaactatgatctttaaaatagatggcgaatttattatgtttctagttcgtggacatcatgaattaaatgaagtgaaattaaaatcatatttcggcacggaacatgttgaaatggctactccagatgaaattgttaatcttgtagatgccaatccggggtctcttggtcctatttttgataaagatattaaaatttatgccgataattacttacaagatttaaataactttgttgtaggagctaatgaagatcattatcactatataaatgtcaatattggtagagactttgatgtaacagaatacggtgactttagattcattacacaaggtgagatgttaagtgatggctcgggagtagcacaatttgctgaaggcattgaagtaggacaagttttcaaattagggacaaaatattctgaatcaatgaatgcaacttttctagataatcagggaaaagctcaaccactcattatgggctgttatggtattggagtatcaagaacattaagtgcaattgttgaacaaaacaatgacgagaatggaattatttggccaaaatcagtaacgcctttcgatatccatctaattactatcaatcctaaaaaggatgatcaacgtactttaggtgatcaactttatcaaaaattaatggattcatacgatgttttatatgatgaccgaaaagaacgtgctggtgttaaatttaatgattcagacctaattgggttaccggtacgagttgttgttggtaaaagagctgaagaaggtattgttgaggtaaaacaacgcattaacggtttaagtgaagaagtgcaaattgatgaattagagtattacttacaagaattatttaagaatattaagtaa

SEQ ID NO: 3063 - DNA, 4317 bp, Staphylococcus epidermidis
ttggcaatgacaaatcgagaaaagtttaaagtgcttgccgatcaaataaaaatatcaaatcaactagaacaagatattcttgaacaaggtgaactcactcgtatagatgtttcaaataaaaacagaacatggactttccaaatatcactcccacattttttatctcatgaagattatcttctttttacacatgcaattgaagaagaatttaaagaaatagctacagtagcaattgatttttcaattaaagataccaacaatcaagatgagtttgctttaaaatatttcggacattgtattgatcaaacacgattgtcgccaaaagtgaaaggtcaattgaaacaaaaaaaactcattatgagtggaaatgttttaaaagtcttagtttcaaatgacattgagagaaatcattttgataaggcatgtaatggtagtttggttaaagcatttagacagtgtggctttgaaattgataaagtcgtttttgaaacagattcaacaaatcacgatgatgaccttgcatcgttagaagcacatattcaacaagaagatgaacaaagtgcaagagaagcaactgaaaaattagaaaaaatgaaagcagaaaaagcgaaacaacaagataataatgaaagtacagtggaaaaatgtcagattggaaaaccaattcagattgaaaatataaaaccaattgaatcaattattgaagaagaattcaaagtagctattgaaggtgttatatttgatattaacctaaaagaacttaaaagtggacgtcatatagttgagcttaaagttactgattacacagattcacttgtattaaaaatgtttacaagaaaaaataaagatgacttggaccactttaaggcacttagtgttggtaaatgggttagagctcaaggtcgtattgaagaagatacttttgttagggatcttgtcatgatgatgtcagatattgaagaaattaaaaagacacctaaacaagataaagcagaagataagcgtgtagagtttcatttacatacgtctatgagtcaaatggatggtattcctaatattagtgcatatgttgaacaagctgctaaatgggggcaccaagctttagcagtaacagatcacaacgtagtacaagcttttcctgatgcacataatgctgccgaaaaacatggtattaagatgatttatggtatggaaggtatgctagtagacgatggtgttcctatagcttataaaccaacagaccgtaatttaaaagatgcaacatatgtggtgtttgacgtagagacaacaggtctttctaatcaatatgataaaattattgaattagctgcagtaaaagtgcataacggtgaaattatagataagtttgaacgttttagtaatccacacgaaagattatctgaaaccattatcaatcttacacatatcactgatgatatgttaactgatgctcccgaaattgaagaagtgttaactgaatttaaagagtgggttggagatgctatatttgtagctcataatgcttcatttgatatgggatttattgacacaggatatgaaaggttaggctttggaccttctacaaacggtgtaattgatacacttgagctttcacgtacaattaataccgaatatgggaaacatggtttgaatttccttgccaaaaaatatggtgtcgaattaacgcaacatcatagagcgatttatgatacagaagcaacagcttatatttttataaaaatggttcaacaaatgaaagaactaggtgtgaacaaccatctagaaattaataaaaaattaactaatgaagatgcatataaaagagctcgtccatctcacgttacactcattgttcaaaatcaagaaggtcttaaaaatttatttaaaatagttagtgcttcattagttaagtattattaccgtacgccaagaattccacgttctcttttaaatgaatatcgagaagggatcttgattggtacagcttgtgatgagggtgaattattcacagcagtaatgcagaaggatcagtcggaagtagaaaaaatagcaaagttctatgattttatagaagttcaaccgcctgcgctttatcaagatttaatggatagagaattaatacgagataatgaaacgttaacacaaatttacaagcgattaatagatgctggtaaaagcgctaatatcccagtgattgctactggtaacgcgcattatctatatgaacatgatgctatagccagaaaaattttaattgcatcccaaccagggaatccattaaatcgttcaacattaccagaagctcactttagaaccactgatgaaatgttagatgattttcacttcttaggtgaagaaaaagcatatgaaatcgttgtaacaaatacaaatgagctcgctaataaaattgaaaaagtggttcctataaaagataaactatttacgccaagaatggatggggctaatgaagaaattcgtgagttgagttattctaatgcgaaaaaactatatggtgaagatttaccacaaattgttatagatcgccttgaaaaggaattagatagtattattggtaatggcttttctgttatttacctcatatctcaacgtttggtgaagaaatcgctagatgatggttatttagttggatcgcgtggttcagttggttctagtttcgtagcaacaatgactgaaattacagaagttaatccgcttccaccacactacatttgttcacattgtaagacaagtgagttctttgatgatggttcggttggatctggattcgatttaccagataaaaaatgtcctacttgtggtaatgaattaattaaagaaggacaagatatcccttttgagacattccttggatttaaaggagataaagttccagatattgatttgaactttagtggtgaatatcaacctaacgctcataattacacaaaagtattgtttggtgaagataaagtatttcgtgctggaacaataggtactgttgctgaaaaaacagcttttggtttcgtaaaaggttacttaaatgatcaaggtattcacaaacgtggtgctgaaattgatcggttggttaaaggttgtacaggggtcaaacgtacaactggtcaacatcctggaggaatcattgttgtaccggattacatggatatttatgattttacaccgattcaattcccagcagacgaccaaagtgcagcgtggatgacaacccatttcgacttccattcaatacacgataatgtcttaaaattagatatattaggacatgatgacccaacgatgattcgtatgttacaagacttatcaggaattgaccccaaaactataccagtagatgataaagaaacaatgcaaatatttagtggtcctgagagtttaggtgttacagaagacgaaatattatgtaagacaggtacatttggtgtaccagaatttggtactggatttgtacgtcaaatgcttgaagatactaagccaacgacattctcagaattagttcaaatttcaggtttatctcatggtacggacgtttggttaggtaatgcacaagagttaattcgtcaagggatatgtgacttatctagtgtgataggctgtcgtgatgatatcatggtatatctgatgtatgctggacttgaaccgtcaatggcttttaaaacgatggaatttgtacgtaaaggtcgtggcttaacagatgaaatggttgaagcgatgaaggaaaataacgtgccagattggtatttagattcttgtcgtaaaattaaatatatgttccctaaagctcatgccgctgcttatgtactgatggctgtaagaattgcatactttaaagtacatcatccactatattattatgcagcatactttaccataagagcttccgattttgaccttataacaatgattaaagataaaacgagtattcgtaatacagttaaagatatgtattcacgatatatggatttagggaaaaaagagaaagatgtattaactgtattagaaataatgaatgaaatggcgcatcgaggttttcgattgcaaccgattagtttagaaaaaagccaagcttttgacttcatcattgaaggggatacattgattcctccattcatttcagtgccaggacttggagaaaacgttgcacaaagaattgttgaagcgagagaagagggaccatttttatccaaagaagatttaaataaaaaagccggcttatctcaaaaggttattgactatttagatgaattaggctcattgccagatttacctgacaaggcacaattgtcgatatttgatatgtaa

SEQ ID NO: 3064 - DNA, 468 bp, Staphylococcus epidermidis
atgagtaaaattactgagcaagttgaagcattgattcaaccagttttaaatgatttgaactttgaattagtagacattgagtatgttaaagaaggtaaagaccattttttaaggatttccattgataaagaaggtggcgtagatcttaatgattgtactatagcttcagaaaaaattagtgaagttatggatgaaaatgatccaatacctgaaatgtattatcttgatgttgcatcgccaggggcagaaagaccaataaaaaaagaaaaagatttttataatgctatcaatcaacccatttttgtatctctttatgcaccaattgaaggagataaagaatggttaggtgttttaaaatctgtaaatgatgaatcaattaatatggaagttaaagaaaaggcaaaaacaaaagaaattgaaattccaagaaataaaatagcaaaagcacgtcacgctgtaatgatttaa

SEQ ID NO: 3065 - DNA, 1224 bp, Staphylococcus epidermidis
gtgtcaagtaatgaattattattagctactgaatatttagaaaaggaaaagaaaattcctagagaagttttaattgatgcaattgaagcagctttaattactgcgtacaagaaaaactatgatagtgccagaaatgtaagagtagaattaaatatggacgaaggttcatttagagtgattgcacgtaaagaagtcgtagaagaagtgtttgatgacagagatgaagttgatttaagtactgctttagtcaaaaatcctgcctatgaagtaggagatatttatgaacaagatgtaacaccgaaagacttcggacgtgtaggagctcaagcagctaagcaagctgtgatgcaacgacttagagacgcagaaagagaaattttatatgatgaatttatcgataaagaagaagatattctaacaggtgtgattgaccgtgtagaccatcgctatgtatatgtgaatttaggaagaattgaagctgtgctgtcagaagctgaaagaagtcctaatgagaaatatattcctaatgaacgtatcaaggtgtacgtaaataaagttgaacagactacaaaaggtccacaaatttacgtatcaagaagtcatcctggattactaaaacgcttattcgaacaagaagttccagaaatttatgatggtactgttattgttaaatcagtagcgcgtgaagctggagatcgttctaaaattagcgtgtattctgataatcctgatatagatgctgttggcgcatgtgtaggttctaaaggagcacgagtagaagcggttgttgaagaacttggtggcgaaaaaatcgatatcgtccaatgggatgaagatccgaaagtatttgttcgtaatgctttaagtccatcacaagttttagaagtaattgttgatgaagagaatcaatcaactgtagttgtagttcctgattaccaattatccttagctataggtaaaagagggcaaaacgcacgtttagctgctaaattaacaagttggaagatagatattaaatcagaatctgatgcccgagaagctggaatttatcctgttattgaatcagaagaagttgcagatgaaattgttaattccggtgacgaagatgttgagtttgataatgttaacttggaagagacaaacttaactagtacagaattagctgctgaaactgatgaagataaaaaagataaaacagaagaagataatgacacagaatcatag

SEQ ID NO: 3066 - DNA, 285 bp, Staphylococcus epidermidis
atgagaaagaaaaaaattccaatgagaaaatgtattatatctaatgaaatgcgtccaaaaaaagatatgattcgagtggttattaataaagaaggcgaaatctttgcagatgcgacaggaaaaaaacaagggcgcggtgcatatgtgtctaaagatgtagctttagttgaaaaggctcaacaaagagaagttttagaaaaatattttaacgctactaaagatacacttgatcctgtttataaagaaataataagactgatttatagagaagagatcccaaaataa

SEQ ID NO: 3067 - DNA, 318 bp, Staphylococcus epidermidis
atgactaaaatgaaaatttttaatttgcttggtttagctatgagagctggtaaaatcaaaagtggcgaatcggtcatcttaaatgagcttaaaaagaatcaaataaaacttgtcatattagctagcgatgcatctagtaacactctaaaacaaatgaataataaatgtaatagttaccaagtgccattaaaagtgtttggtactagaaatgaattagggttagcaataggtaaaagcgatagagttaatattggtataacagataatggttttgcaaaaaaattgttatcaatgatagatgaatatggtaaggagtga

SEQ ID NO: 3068 - DNA, 2163 bp, Staphylococcus epidermidis
atgagtaaaaaaagaatttacgaatatgcgaaagaattaaatctaaagagtaaagagattatagatgagttaaaaagtatgaatgttgaagtgtcaaatcatatgcaagctttagaagaagaacaaatcaaagcattagataaaaaatttaaagcctctcaagcgaaagacactaataaacaaaatactcaaaataatcaccaaaaatctaataataaacaaaattctaacgataaagaaaaacaacaaagtaagaataatagtaaaccaacgaagaaaaaagaacaaaacaacaaaggaaaacagcaaaataaaaacaataaaactaataagaatcaaaaaaacaataaaaataaaaagaataataaaaataataaacctcaaaatgaggtagaagaaacaaaagaaatgccctctaaaatcacttatcaagaaggcataactgtcggtgagttagctgaaaagctaaatgtagaatcagctggtattattaaaaaattgttcttactaggtattatggctaatatcaatcaatcattggatgaagaaacattagaattaattgcagatgactatggcgttgaaatagagaaagaagtagtcgttgatgaagaagatttatcaatttattttgatgatgagactgatgattctgatgcaattgaacgtccagcagttgttacaatcatgggccacgtagaccatggtaaaacgactttattagattctattcgtaacactaaagttacagaaggagaggctggcggaatcactcaacatattggtgcttatcaaattgaaaattcaggtaaaaaaattacgttcttagatactcctggacatgctgcatttacgactatgcgtgcacgtggtgctcaagttactgatattacaattttagtcgtggccgctgatgatggtgtgatgcctcaaacaattgaagctataaatcacgctaaagaagcagaagtacctacgattgttgcagtaaacaaaattgataaaccaactgctaaccctgatcgtgttatgcaagaactcactgagtatggattaattccagaagactggggcggtgacacaatctttgtaccactatctgcattgagtggagacggtattgatgatttattagaaatgatcggtttagtagcggaggtacaagaacttaaagctaatcctaataaacaagctgtaggtactgtgattgaggctgaattagataaatcacgaggtccagctgcatctttacttgttcaaaatggtactttaaacgttggagatgcaattgttgtaggtaatacttatggacgtatacgtgcaatggttaatgatttaggaaaaagaattaaatctgccggtccttcaacacctgtagaaattactggtattaacgatgttccacttgcaggtgatcgttttgttgtatttggtgatgaaaaacaagcacgtcgaattggtgaagcacgtcatgaggcaagtgtcatacagcaacgtcaagaaagtaaaaatgtttcattagacaatttatttgagcaaatgaaacaaggtgaaatgaaagatttaaatgtcatcattaaaggtgatgtacaaggttcagttgaagcattggccgcatctctaatgaaaatagatgttgaaggtgtgaatgtacgaattattcatacagctgttggtgctatcaatgaatcagatgttacattagcaaatgcatcaaatggtattattattggttttaatgtacgcccagatgcaggtgcgaaacgtgcggctgaagctgaaaatgtagatatgcgattacacagagttatctataatgttattgaagagatagaatcagctatgaaaggtttacttgacccagaatttgaagagcaagtcattggacaagctgaagtgcgtcaaacatttaaagtttctaaagttggtacaattgctggtagttatgtgactgaaggtaaaatcactcgtaacgctggtgtacgcgtaattagagatggtatcgtgttatttgaaggtgaacttgacacattaaaacgtttcaaagatgatgctaaagaagtagctcaaggctatgaatgtggtattacaattgaaaaatataatgatctcaaagaaggagacattattgaagcgtttgaaatggtagaaattcaaagataa

SEQ ID NO: 3069 - DNA, 351 bp, Staphylococcus epidermidis
atgaataatataagagcagaacgtgtaggagaacaaatgaaacaggaaatcatggacattgttaataataaagttaaagaccctagagttggttttttaacaattactgatgttgaactaaccaatgacctttcacaagcaaaggtatatttaacagtgttagggaatgataaagaagttgataatacgtttaaagctttgcataaagcaactgggtttataaaatctgaacttggttctcgaatgcgcctaagaattatacctgagttaacattcgaatatgatgaatctatcgaatacggtaataagatagaacgcatgattcaagagttacacaaaaatgataaataa

SEQ ID NO: 3070 - DNA, 918 bp, Staphylococcus epidermidis
atgtataatggcatactaccggtatttaaggaacgaggtttaacaagtcacgacgtcgtttttaaattacgtaaaattttaaaaatgaaaaaaattggtcatacaggaacattagatcctgaagttaatggtgtgttaccaatttgtttaggcgatgcgacaaaagtcagtgattatatcatggaaatgggaaaaacttatcacgctatgataacgctaggaaagagtacgactactgaagaccaaactggagatattttagaaactagggctgttgataagaatgatattaatgaagatacgattgaccaagtgttgcagcaatttgaggggcatattcaacaaattccgcctatgtattcttctgttaaagtaaatggaagaaaattatatgaatatgcgagaaataatgaaactgtcgaacgccctaaacgacaagtttttattaaagatatacatagaatatctgaagttactttccaggagcagacatgtcattttgaagttgaagtaacatgtggtaaaggaacttatattagaactttagctacagatattggacttaaacttggttttccagctcatatgtcacgtctaactagaattgcttctggcggttttcaattagaaagtagtttaacgattgatcaaattaaagaattacatgagcatgattcattacataatgaattgtttcctatagaatatggcttaaaaggtctgaaatcattccaagtgaaagattcaaattttaaaaagaaaatctgtaacggtcaaaaatttcataaaaaagtgttaagtcaaaatgttaaagaaccttttatatttgtcgatagtagcactcaaaaagttttagcaatatatatagttcatccagataaaccttatgaaataaaacctaaaaaagtttttaattaa

SEQ ID NO: 3071 - DNA, 972 bp, Staphylococcus epidermidis
atgaaagtgatagaagttacacatcccatacaaagtaatcaattcataactgaaaatgttgctatggcttttggtttcttcgatggtatgcatagaggtcacgacaaggtgtttcaagtgcttgatgaaaaagcaaaagagcatcaacttaaaaaggctgttatgacgtttgatccacacccctcagtcgtattaaaccctgagcgtaaacgtacaacctatcttacaccactttcagataagttagaaatgatagcagaacacggtatagactattgtatcgttatcaatttttcatcaagatttgctaatgtgacatctgacgatttcataaaaaattatattattaataatcatgttaaagaagtgattgcagggtttgatttcacctttggtaaatttggaaaaggaaatatgacggtacttcaggaatcaaaagcttttaatacgactattgtaggaaaacaagagatggattctgaaaaaatttctacaactgcaatacgccaagcgcttacagatggtcatttacagaaagcaaatgacgaattagggtatatatataggattaaaggaactgtagtacaaggtgaaaaacgtggaagaacaattggttttccaacagctaatgtgcaacccagtgatgattatgtactaccaaaaaaaggtgtttacgcagtgagtatggaaattggtccagagagtaaattacatcgtggtgtagctaacgttggagttaaaccaacattccacgatccaactagggctgagttagttattgaagtgaatatatttgattttaatgaaaatatttacggtgaacgtgtgactgtgtattggcatcactttttaagaccagaagttaaatttgatggtatcgatccattagttaaacaaatgaatgaagataaagcgcaggctaaacatttattatctattgatttcgatgatgatatatcatataatatataa

SEQ ID NO: 3072 - DNA, 270 bp, Staphylococcus epidermidis
atggcaatttcacaacaacgtaaagatgaattaattaaagaatatcgtgtgcacgaaactgatactggttcaccagaagtccaaatcgctgtattaactgcagaaattactgcattaaatgagcatttacgtgaacacaagaaagaccaccattcacgtcgtggtttattgaaaatggtaggtcgtcgtcgtcacttattaaactacttacgtagtaaagatattcaacgttaccgtgaattaattaaatcattaggtattcgtcgttaa

SEQ ID NO: 3073 - DNA, 2106 bp, Staphylococcus epidermidis
atgtctcaagagaagaaagtttttaaaactgaatgggctgggcgttctttaactattgagacaggacaattagcaaagcaagctaatggtgctgttttagtgcgttatggagatacagttgtcctatcaactgcaactgcttctaaagaacctagagatggcgattttttcccattaactgtaaattacgaagaaaaaatgtatgctgctggtaaaataccaggaggattcaaaaaaagagaaggtcgccctggtgatgaagcaacgttaacagctcgtctcattgatagacctattcgtccactgtttccaaaaggatatagacatgacgtacaaatcatgaatattgtcttaagtgctgatccagattgctcaccagaaatggcagcaatgattggttcttcgatggcgttaagtgtttcagatattccattccaaggtcccatcgcaggtgtaaatgtaggttatatcgatggcaaatatgtcattaatccttccgtcgctgataaagaaatttctagattagatttagaagttgctggtcataaagatgcggtaaacatggttgaagcaggcgcaagtgaaattactgagagtgagatgcttgaggctattttcttcggacacgaggaaatcaaacgacttgttgcattccaacaagaaatcatcgatcacattcaaccgataaaacaagaatttgtaccggtggaaagagacgaagatttagttgaaaaagtaaaaagtttaactgaagataaaggacttaaggacacggttttaactttcgataagcaacaacgagatgaaaacttagatgctctgaaagaagaagttgttggtcattttctagatgaagaagatcctgaaaatgaaacgcttgttaaagaagtttatgcaattctaaatgacttaattaaagaagaagtaagacgtctaattgcagatgaaaaaatacgacctgatggacgtaaagtagatgaaataagacctcttgaatcagaagttggtttgttaccaagagctcatgggtcaggtttatttactcgtggtcagacacaagcactttcagttttaactttaggcgcacttggagattatcaattaattgatggtttaggacctgaggtagaaaaacgttttatgcatcattataactttcctaatttctctgtaggagaaactggccctgtacgtgcacctggtagacgtgagattgggcatggtgcgcttggtgaaagagcattacgttacattatacctgatactcaagatttcccttatacaattcgtattgtaagtgaagtattagagtctaacggttcatcatctcaagcatcgatttgtggttcaacattagcattaatggatgccggtgtaccaattaaagcgccagtcgcagggattgcaatgggactagtaacgcgtgacgatagctatacaattttaactgatattcaaggaatggaagatgcattaggtgatatggacttcaaagtagcaggtactaaagacggtattactgcgattcaaatggatattaaaattgatggtttaactcgagaagttattgaagaagcactagaacaagcgcgtcaaggacgattagctattatggatcatatgcttcacacgattgaacaaccacgcgaagaattaagtgcttacgcaccaaaagtggtaactatgagtattaatccagataaaattcgagacgtgattggaccaggtggtaagaaaatcaatgaaattatcgacgaaactggagttaaattagatattgaacaagatggtacaatctttataggtgctgtagatcaagcgatgattaaccgtgcaaaagaaattatcgaagatattacacgcgaagcggaagttggacaagtatatcatgctaaagtaaaacgtattgaaaagtatggtgctttcgttgaattgttccctggtaaagacgcgttattacacatttctcaaatttcacaagaaagaattaataaagtagaagatgttcttaaaattggagatacaattgaagtgaaaattactgaaatcgataaacaaggtcgcgttaatgcgtcacataaagtattagagcaatctaaaaattaa

SEQ ID NO: 3074 - DNA, 1674 bp, Staphylococcus epidermidis
ttgagtttaataaagaaaaaaaataaagatattcgtattattccactcggtggagtaggcgaaatcgctaaaaatatgtacatcgttgaagtagacgatgaaatgtttatgttggatgcaggattaatgttcccagaagatgaaatgcttggggtagatatcgttattcctgacattcaatatgtcattgaaaacaaagaaagattaaaaggaatatttcttacacacggtcatgaacatgctataggcgcagtaagttatgtgttagaacaaatcgatgcaccagtttatggttctaaattgacaatcgcacttgttaaagaagcaatgaaggcccgaaatattaaaaagaaagtacgttactatactgtaaaccatgattcaattatgagatttaaaaatgttaacgtgagtttctttaatacgacacatagcattcctgatagcttaggcgtatgtattcatacttcgtatggttctatagtttatactggagagtttaagtttgatcaaagtttgcatggacattatgctccagacttgaaacgtatggcagaaattggtgatgagggtgtgttcgcattaatcagtgattcaacagaagctgaaaagcctggatataacacgcctgaaaatattattgaacatcacatgtatgatgcttttgccaaggttaaaggtagacttattgtatcatgctatgcttcaaacttcgttcgtattcaacaagtgcttaacattgcaagtcaacttaatcgtaaagtgtcatttttaggtcgttcacttgaaagttcgtttaacatagcacgtaaaatgggatactttgatataccaaaagatttattaatacctattaacgaagtggaaaattatcctaaaaatgaagtgattattattgctacaggtatgcaaggtgaaccagtagaagcattaagtcaaatggctcgcaaaaagcataaaattatgaacatagaagaaggagattcaatattcctagcaattactgcttcagctaatatggaggttattattgcagatacattaaatgagttagtgcgtgctggagcacatataattccaaacaacaagaaaattcatgcgtcaagtcatggttgtatggaagaattgaaaatgatgttaaatattatgaaacctgaatattttgtacctgttcaaggtgaatttaaaatgcagattgcacatgccaaattagcagcagaaaccggtgtagcacctgagaaaattttcttagttgaaaaaggcgacgtgattagttataacggtaaagatatgattttaaatgaaaaagttcaatcaggtaatatacttattgatgggattggcgttggtgacgtaggtaatatcgtattaagagacagacatctattagccgaagacggtatttttattgcggttgtgacattagatcctaaaaatcgacgtattgctgcaggacctgaaattcaatcaagaggcttcgtctatgttagagaaagtgaagaacttttgaaagaggctgaagaaaaagtacgtaaaattgtagaggaaggtcttcaagaaaaacgaatagaatggtcagaaatcaagcaaaatatgagagatcaaatcagtaagttactatttgagagtacaaaacgccgtccaatgattattccagtcatatcggagatctaa

SEQ ID NO: 3075 - DNA, 2394 bp, Staphylococcus epidermidis
ttgccacaagcaaaaaaaagaacatcgacgaagagaaagggtaataaaaaaacgaataaaaaaaagcaaaatgaaacgcctttaagatatatattctcaataattgtagtaattcttattatactaggcgcttttcaattaggaatcattggtagaatgattgatagcttttttaattatctttttggtatgagtcgatatttaacttatattttagtacttattgcaacaatttttataacatactctaagcaaatacctagaactcgacgtagtatcggtgcaatagttttacaattagctttgttatttatagcgcaattgtattttcatttttcacataatatcacttctcaaagagagcctgtactgtcctttgtttataaagcttatgaacaaacacattttccaaattttgggggaggcttaataggtttttatttacttaaactatttatacctctcatatctattgtaggtgtaataataattactatcctattactagcttcgagtttcattttattacttaatttaagacatagagatgttacaaaaagtttattcgacaacctcaagtcatcaagtaatcatgcatctgagtcaataaaacaaaaaagagaacaaaataagattaaaaaagaagaaaaagcccaattaaaagaggcaaaaattgaacgaaaaaaacaaaaaaaatcacgtcagaataataatgtcattaaagatgttagtgattttccagagatttctcagtcagacgatattccaatatatggtcataatgagcaagaagataaaagaccaaatactgctaaccaacgtcaaaaacgtgttttggataatgaacaatttcaacaatcattaccaagtaccaaaaatcaatcaataaataataatcagccatctacaaccgctgaaaacaatcaacaacaaagtcaggctgaaggctcaatatctgaagctggtgaagaagccaatattgagtatacggtgccacctttatccttattaaaacagcctactaaacaaaaaactacttcaaaagctgaagtccaacgtaaaggtcaggttttagaatctacactaaaaaactttggagttaatgctaaagtaacacaaattaaaatcggtcctgcagttacgcaatatgaaattcaaccagcgcaaggtgttaaagtaagtaaaatagtcaatctccataatgacattgcattagctttggctgcgaaagatgtacgaatagaagcacctattccaggtcgctctgcggtaggaattgaggttcccaatgataaaatctcacttgtcactctaaaagaagttttagaagataagttcccatctaagtataaattagaagtcggcattggtagagatatttctggtgatccaatatcaattcaattaaatgaaatgcctcacttactcgttgctggttcaacaggaagcggtaaatcagtttgtattaatggtattataacgagtatattactcaacacaaaaccgcacgaagttaaacttatgttaatcgatcctaaaatggtagagttaaatgtttacaatggtattcctcatttacttataccggttgtaacaaacccacataaagcgtctcaagctttagaaaaaattgtttcagaaatggaacgtcgttatgatttgtttcaacattcatcgacacgaaatattgaaggatataaccaatatatacgcaaacagaatgaagaacttgatgaaaaacaacctgagttaccgtatatcgtcgtaatagtggatgaattggctgatttaatgatggttgcaggtaaagaagtagaaaatgctatccaacgtattactcaaatggctagagcagcgggtatacacttaattgtagctactcaaagaccttccgttgatgttattactggtattattaaaaataacattccatcaagaattgcgttcgctgtaagttctcaaactgactctagaacaataattggtgctggtggagctgaaaagctacttggtaaaggtgatatgctatatgttggtaacggagaatctactacaacccgaattcaaggtgcttttttaagtgatcaagaagtgcaagatgttgttaattatgttgtagagcaacagaaagcaaattatgttaaagaaatggaaccagatgcacctgtagataaatcagaaatgaagagtgaggatgctttatatgatgaagcttatttatttgtaatagaaaagcaaaaagctagtacttctttattacaacgacaatttagaatcggttataatcgagcttcaaggctcatggatgatttggaacgtaaccaagttattggtccacaaaaaggaagtaaacctagacaaatattagttgatttagaaaatgacgaggtgtaa

SEQ ID NO: 3076 - DNA, 714 bp, Staphylococcus epidermidis
atgtcggaaatgagtgcaatctatagagtaaaacaatacattttaaatttaatcaaagatggtgaactaaccaatggaagtaaattacctagtaatttgtcaattgcgagagcattaaatgttaaaacagatgatgtttatgatggtatagatgagttgattactgaacaagtagtaacggataattttgaagaggggactagcgtaaaagtaaagccccctttctattacccgttaaataaaattattagtatagggactatgattaaagaagcgggttatgaagcaggaacagaatatctgaatcttgacgagcaacctgcaactattttagatgctgaacatttaggtatagaaacaaaagaacctataacaattattgagagactaaggactgctaatcataagcctgtcgtatattgtttagacaaaatagcaaaaacttatctaacttgtacagattatcaacagagtagtggttcaatgttagaagctattaaagcatctacaaatcatcaaatcatgcatgcagaaatggatttagaagcaattagttacgaaccccatatctctgaagtgcttaatgcttcacctcacgaagggcttatgttacttaaagtagtacattatgacgaaaagcatcaaccaattttgtattctttaaattatattaagagtagtttagttaaattcactattactaaaagtgaataa

SEQ ID NO: 3077 - DNA, 1272 bp, Staphylococcus epidermidis
ttgaagagattcaatcaagataacacaaaagttcgagtcaatgttttgcctaccgataaatttaaaacaacgacaattacctttaaatttatggcaccattaaactataaaacaattacttcacgttcaattttaagtaaagtattagttcgtgcaacacaacaatggcccaccgataaaactttaaataaacagttatcagaattgtatggcgcctatgttaatagttttgtttctaagtttaaagataagcatgttattacaatctcattagaagtagttaatgaaaaattcttaaaagataaaacccctttatttgaaaagggattagatacgttaaaagaaataatttggaatccattaatcaaagatagatgctttgatcatacatatgtagctcaagaaaagtctttacttagcaaaaaacttgaagcaatggaagataataaagcacagtattcatttcttcagttaatgaattatatgtttaaacaagaaccctatcgatatatagcgacaggtcaattagaacaaattccacaagtgacttctgaaagtctatacgatacatatctatccatggtacaaaatgatgattgtgccatatatgttgtaggaaatattaacaaagaggaagtaacgcaactaattctagataagtttgcaattaagcctttctatttagaaaataaagaaagtactgaaatcacaccttcttttgatcaaccgcaatatataattgaaaaagacgatgttgaccaagctaaattgaatttgggatatcgctttccatcttattatgggaaaagtaattactatgcatttatagtattaaatatgatgtttggaggagatccttcctcagtactatttaatgaagtcagagaaaagcaaagtttggcatactctatacattcacaaattgatggtaaaaacggatttttatttgttttaagtggtgtttctgctgagaaatatgagcaagcaaaagatactgtcatcaaagagtttgataagataaaaaatggagattttgattctaataaaattgaattagctaaaaaaatcattatttcccatagacacgaagcatcagatagacctaaaagtataattgaaatactacataatcaattattattaaaccgacagcaaactgatcaagattttataaatgcagttaatcaagtgacgaaaaaagatgttattaaattggcaaatgaagctgttctagatacaatttatgtactaacgaaaggagaccaacactga

SEQ ID NO: 3078 - DNA, 1290 bp, Staphylococcus epidermidis
atgaaaacacatcaatatgaacttatagatgagaaagttttcgaacatgagtttgataatggattgaaattatttatcattcctaagcctggttttcaaaaaacgtatgtgacctacacaacacagtttggttcattggacaatcattttaagcccataggtagtcagcaatttgtaaaagttcctgacggtgtggcacattttttagaacataaattgtttgaaaaagaagatgaagatttatttactgcatttgccgaagagaatgcgcaagctaatgcttttacaagctttgatcgtacgagttatttatttagcgcaacaagtaatattgaaagtaacattaaacgtctcctcaatatggtagaaacaccttattttactgaagaaacagttaataaagaaaaagggattatagctgaggaaattaaaatgtaccaggaacaaccaggatataaattaatgtttaatactttaagggctatgtattccaagcacccgatacgggtggatatcgctggtagtgttgaaagcatttatgaaataacaaaagatgatttatatctatgctatgagacattttatcatccctctaatatggtgttgtttgtggtaggcgatgttagtcctcaatcgataattaaacttgtagaaaagcatgaaaatcaaagaaataaaacttatcaaccacgtattgaacgtgcgcaaattgatgagcctagagagataaatcaacggtttgtttctgagaaaatgaagttacagtcaccacgattgatgctaggttttaaaaatgaaccattagatgaaagtgcaactaaatttgttcaaagagatttggaaatgacatttttctacgaattggtttttggagaggaaacggagttttatcaacaacttttaaataaagatttaatagatgaaacattcggttatcaatttgtattggaaccgagctacagtttttcaattattactagtgcaacacaacagcctgatctatttaaacaattaataatggatgaattaagaaaatataaaggaaaccttaaagatcaagaagcatttgatttgttgaaaaagcaatttattggagaattcatatcaagtttaaattctccagaatatattgctaatcaatatgcaaaactctatttcgagggagtgagtgtatttgatatgcttgatatcgtagaaaatattacgttagagagtgtaaatgaaacttccgaattattcttgaactttgaccaacttgttgatagtcgtttggagatggaaaatagatga

SEQ ID NO: 3079 - DNA, 705 bp, Staphylococcus epidermidis
atgaaagcgctagtcataggtggttctggaacaataggtcgtgccattgtaaaacgactgctatttgaaggttatgaagttttcttacattatcattcagctcaatattctgatttaagtaatcaatttaaaaatagcaaagttacatttattcaatgtgatttaaccaaagatatagagctcgaagattactttggacacattgacgagctagattgtctaatttataccagtgggacagcattatatggcatgttacaagatatgagtgattgtgacatcgataatagttatgcattaaatgtaagacaatttatacgtttgactcgctactttattgatattttaaggcagagtaacaatggacgtatcattgttatttcatcaatttggggagaaactggagctagtttagagacaatctattcagcgatgaaaagtgctcaaattggttttgttaaagcattaagtcaagaattagctttaacttcagtaactgtaaatgctattacaccaggtatggtaaaagggaaaatgagcgatgtatggtcgaaagatgagttatcgaatatagtatcagagttacctcagcaaagaatgattgatccttctgaagtggcacatgcttgtgcatacttgtgtagtactatgtcaaaaagtattacgggtacagtacataaagtgaatggcggatggtatatttaa

SEQ ID NO: 3080 - DNA, 828 bp, Staphylococcus epidermidis
atgacttttgcaaaaaggaaagagtggtacttagaatatgagataactgtaaatcgtgctggcttactcggtgatatttcaagtttgcttggaatgctcggcattagtattgttacaattaatggtgttgatcagggaaaaaggggattgttaattaaaacagatcaactagaaaaggtcgaaaggttcgaacaaattgtaaaagaaattaatgaaatagaaattacaaagttaagagttcctgaattacgagatagactcgctgtacgacacggtagatatattgaacaagatgctgatgataaaaagacttttaaatttgaacgagaagatttaggattacttgttgattttttagctgagttatttaaagtagaaggacataaattaatcggaatacgtggaatgcctagagttggtaaaactgaatctattgtagctggaagtgtttgtgcacataaaagatggttattcataagctcaactttaattaaacaaacagtaaggcgttcactatttaaaggtgaatatgattctaatcacgtatatatcattgatggtgcggtaacagcacgtgaattgaaccctgagcaccaagaattggtgagagaggttatgacgttaccctcaataaaagtagttgaacatccagatttatttgtagagtcgtgcaattataatatggaagattttgactatattattgaattgagagaaaatgaagatcaagagattcgatatgaagaaatgaagaaacatacggttcaaagcaagaataatttagattttggagatccatttggtggagggtttggtttctttgaataa

SEQ ID NO: 3081 - DNA, 393 bp, Staphylococcus epidermidis
gtgaaaacgattggtgaagtgttgaaaagtagacgtgaaagattgggtatgacactaagtgaattagaacaaagaactcagttaaagcgtcaaacgttaatacatatagaaaataatgattttaatgaactagccaagagtgattatactgaaggttttattagaaaatacgctaaagttgtaaatatcgaaccaaatcaacttattgaagcacatcaagatgagattcctgaaacacaatatcaaattgatgatgtgatacaaacattttctaatgggtatgaacccccttaccgacgtcaatctaaggaagcgtttcaattgttgatgtggatgggtttcattattttaatatctttaatcgtttggatactcgcagtattaattatataa

SEQ ID NO: 3082 - DNA, 582 bp, Staphylococcus epidermidis
atgaatataccgaatcaaataacggtatttagagttattttaataccattttttattttatttgctttagttgattttggttttggacaaatttcaattttaggtggaaatcatatcagaattgaaatattaattagtgctatcatatttgtggttgcatcattaagtgattttgctgatggttatcttgcccgtaaatggcaattagttactaatatggggaaattcttagatccacttgcagacaaattattggtcgcgagtgcattaattgttatggtacaacttggttttactaattctgtcgttgctatcataattattgctcgagaatttgccgtcacaggattacgattactacaaattgaacaggggtttgtaagtgctgcaggacaactagggaaaataaaaacagcagtgacaatggttgcaattatatggattttattgggcgatcctttcgtacactatctacgtttcccaattggagtgtggttattatacattggagtattctttactattctttcaggtattgaatatttttataaaggaagagatgtatttaaacattctaaataa

SEQ ID NO: 3083 - DNA, 1146 bp, Staphylococcus epidermidis
ttgatgaatatttcaattgtagctgttggctctgaattattactaggtcaaatagctaatacaaatgggcaatatctttcaaaactttttaatagtattggtaaaagtgtagtagaacatacagttattggtgataaccctcaaaggttagaatatgtaataaagcaatgtctatctagatttgataccattgttttaacaggtggcttagggccaacaaaagatgatttaactaaacatactgtagctaaagtattaggaaaaaatctagtgacggatgaagcatcgttaaactttatcaaaaactattttaaagaacaaggtcaagatatgacctctaataataagcaagcattagtgattgaagatgccatagttttaccaaataaacatggtatggctcctggtatgcttgtagaattaggtaaacaaaaaataattctactaccaggtccaccgaaagaaatgcaacctatggcgaagaatgaattattaccttatcttatggataaagatgaagttattttttctgaattacttagatttgctggtataggagagtcgaaattagaaacactattaattgatcttatagatgagcaaactaatccgacaatcgcacctcttgcaggtacgcatgaagtatatgttagattaacagccaatgctgaaagtaaggaacgatgtcaactgcttattaatcctattcgagatgaaattttaaataggattggtacttattattttgggtcagacgaagttagcattgaagaatcggttataaatagtgcaaaacagaattttgctatttatgacggtgtaactaatggagctttgtttactcgattaaaaaatgctgacaataaaaatctagttaaaggtatgctaccacattctaaccaatttattgatgtgacttctgagtttaataccgttttattcaatgctgctcaatatgtcagggatttgtaccaaacagatttgggtattgtacttttaaataaagataatattgtatatttaggaatttatgatggaaataatttcgatatcgaaacatttaagatgtctcaaagtcgtaatttattgagaagcagaagtcaaaattatgcgatgattagattattaaattggtttaataaatag

SEQ ID NO: 3084 - DNA, 1050 bp, Staphylococcus epidermidis
ttggataatgaacgtcaaaaagctttagatacagtcattaaaaacatggaaaaatcttttggtaaaggtgccgttatgaagttaggcgataataaaggtcgcagagtatcaagtacttcaagtggttctgttacagttgataatgcattaggggttggaggttatcctaaaggaagaattatcgaaatatatggacctgaaagttcaggtaagacgacagtagctttacatgctatcgccgaagtacaaaaaaacggtggtgtagcagcatttatcgatgccgaacatgctctcgatccagtatatgcacaagcattaggtgtagatattgataatttatacttatctcaacctgatcatggtgaacaaggtcttgaaatcgccgaagcttttgttcgtagtggtgctgtggacattgttgttgtcgattcagtagcagcattaacacctaaagctgaaattgaaggtgaaatgggagatactcatgttggtttacaagcaagattaatgtctcaagcattaagaaagttatcaggggctatttctaaatctaatactacagctatatttattaaccaaattcgtgaaaaggtcggtgtgatgttcgggaatcctgaaacaacgcccggtggtagagccctaaaattctatagttctgtacgtttagaggtaagaagagcagagcagttaaaacaaggtcaagatattgtaggtaacagaaccaaaataaaagttgtaaaaaataaagttgcacctccatttagagttgcagaagtagatattatgtatggtcaaggtatctctaaggaaggagagctcattgatttaggtgtagagaatgatatcgttgataaatcaggtgcttggtattcttataatggagatagaatgggccaaggtaaagaaaacgtcaaaaattatcttaaggaaaatccacaaatcaaagaagaaattgaccgtaagttacgtgaaaagttaggtattttcgatggtgatgtggatgaaaatgagaatgaagacgattcaccaaaaactttatttgatgaatag

SEQ ID NO: 3085 - DNA, 1560 bp, Staphylococcus epidermidis
gtgaatttattaagcctcctactcattttgctggggattattctaggcgttgttgtagggtatattgttgcccgaaatttattacaccaaaaacaagttcaagcaagacaaactgccgatgatattgttagctatgctaataaagaagcagacaatattaaaaaagaaaaattacttgaggcaaaagaagagaaccaaattttaaaagaacaagctgagaatgaactgcgtgaaagacgtggtgaacttcaaagacaagaaacccgacttcttcaaaaagaagaaaatttggatcggaaatctgatcttttagataaaaaagatgagattttggaacaaaaagaatcaaaacttgaagaaagacaacaacaagtagatgcaaaagagagtagtgttcaaacattaataatgaagcatgaacaagaattagaacgcatctccggtctcactcaagaagaagctgtgaaagaacagcttcaaagagttgaagaagaactgtcacaagatattgcaatacttgttaaagaaaaagaaaaagaagcgaaagaaaaagttgataagacagctaaagaattacttgctacaactgtacaaagattagcagccgaacatacaactgaatcaactgtttcagtcgtaaatctgcctaacgatgaaatgaaaggtcgtatcataggtagagaaggtagaaatatacgcacattagaaacacttactggcatagatttaattattgatgacacaccagaagcagttattttatcaggttttgacccaattagacgtgaaattgctagaactgcactagttaatttggtttctgatggacgtattcatcctggacgtattgaagatatggtcgaaaaagctagaaaggaagtagacgatatcattagagatgctggagaacaagctacctttgaaataaatgtacacaatatgcatcctgatttagtgaaaattttgggtcgattaaattatcgaactagttatggtcagaatgtacttaaacattcaattgaagttgcccacctttcaggtatgcttgcagcagaattaggagaggatgttactttagctaaacgtgcaggattattacatgatgttggtaaagccattgatcatgaagttgaaggtagtcacgtagaaataggtgttgaattagctaagaaatataatgaaaataacataattattaatgctattcactcacatcatggtgatgttgaaccaacctctatcatttctattttagttgcagcagctgatgcattatcagcagcgcgaccaggtgcacgtaaagagacacttgaaaattatattagaagacttgagagactcgaaacgttatctgaaagttatgatggggtagaaaaagcatttgctatacaagctggtagagagattcgtgtagtcgtctcacctgaagaaattgatgatttaaaatcatatagattggcaagagatattaagaaccaaattgaagaagagttacaatatcctggacatatcaaagtgacagttgttcgagagactagagcaatagaatatgctaaataa

SEQ ID NO: 3086 - DNA, 216 bp, Staphylococcus epidermidis
atgtctattaatattgatcctgaaaaatttgctgaattagttgtaacttcaaatccagccaaatctgatgacgctgaagatatcgctaaagaaagtttaattttatacattaatgcttatcgtttagcagagaaatatgcaaacatcgctacaaattgctatgatacagctgaaattttaaaagaaattaatgaagttgatttacaattaaaataa

SEQ ID NO: 3087 - DNA, 795 bp, Staphylococcus epidermidis
atgagaatattgtttataggtgacatcgttggtaaagtgggcaggaaaatgattactacttatttacctaaaattaaacaaacttatcacccaacagtttctatagtaaacgctgaaaatgccgcacacggtaaaggattaacagaaaaaatttacaaacaacttttgagagaaggcgtggatttcatgactatgggtaatcatacatatggtcaaagagaaatttacgattttattgatgatgctcatcgaatggtgagacctgcaaattttcctgatgaagctccaggaacaggtatgagaataataaaaattaacgatattaaattggctattattaatttacaaggccgttcatttatgcaagacattgatgatccatttaaaaaggctgaccagctaatcgaagaagctcaaaaatctacaccatatatatttgtagattttcatgctgaaactacatctgaaaaaaatgctatgggttggtatttagatggtagagtgagcgctgttgttggtactcacacacatattcaaacttctgatgatcgtatattacctcatggcacaggatatatcacagatgtcgggatgacaggttattacgatggtattttaggtatcaatagagatgaagttattcaacgttttattactagtttgccacaaaggcatgttgttccagatgatgggcgaggcgtattatcaggagttatcatagatttagataaagaaggtaaaacgactcaaataaaaagactgttaataaatgaggaccatcctttccaaatttaa

SEQ ID NO: 3088 - DNA, 1761 bp, Staphylococcus epidermidis
atgaaatcacaaatatcatggaaagtgggcggtcagcaaggcgaaggtattgaatctaccggtgaaatctttgctactgcgatgaatagaaaaggttattttttgtatggatatagacacttttctagtcgtataaaaggtggccatactaataataagataagagtttcaaaatcgcctgtgcatgcgattagtgatgatttggatatactcattgcttttgaccaggaaacgattgaattaaatcatcatgaaatgagagaagatagcattataattgcggatgctaaagcaaaaccccaaaagccagagaactgtgtggctcaattaattgagttaccattcactagcacggcaaaggaacttggaacagcattaatgaagaatatggtggcaattggtgcgacatctgcactgatggatttaaatacatcaacttttgaaactttaatcgataacatgttttcaaaaaaaggtaataaagtcgttgatatgaatatacaagcccttaatatgggttatgatttaatgaagcaacaagttatcaacgttaatggagactttacattagagaatggtagcggtcatcctcatttatatatgataggtaatgacgcaatcggattaggagcaatagcagctggatcaagatttatgtccgcttatccaattacgccagcttctgaaattatggaatacatgattgccaatctacctaaagttgatggtactgttgttcaaactgaagatgaaatagcagcagcaacgatggcgattggagctaactatgctggcgtacgaggctttacagcgagtgcgggtccaggtctttctttaatgatggaatctattggattgtctggtatgactgaaacgccattagtcattattaatactcaaagaggtggtccttctactggcttaccaacaaagcaagaacaatcagatttaatgcaaatgatttatggtacccatggtgatattccgaaaattgtcgttgctcctacagatgctgaagatgcgttttatcttactatggaagcatttaatttagctgaagaataccaatgtccagtcattctgttaagtgatttacaattatcattaggaaaacaaactgttaaaacactcgattataataaaatcgatattcgtcgtggagaaataatacagtcagatatcgagagagctgaagatgataaagcatactttaaaagatatgcattaacagctagtggcgtatcaccacgaccaataccaggtgttaaaggtggtatacatcatgtaacaggtgttgaacataatgaagaagggaagccaagtgaggcgcctatgaatcgtcagaatcagatggaaaaacgaatgcgcaaaactgaaagcttggttatcaataatcctgtgttactcaatgaacatgaagacgaagcagatatactgtatataggatttatatctactaaaggtgctattggagaaggtgcagaaagactagaacgacatggtgtaaaagtgaatacgatgcatattcgacaattacatcctttccctaaagatattgttcaacaagctattaataaagcttcgaaagtaatagttgcagaacataattatcaaggacaattatcaagtattttaaaaatgaacacacaagttaatgataaattagttaatcaaacaaaatacgatgggaaacctttcttaccttatgaaattgaagaaaaaggtttggaaattgctaaagagttaaaggagttggtgtaa

SEQ ID NO: 3089 - DNA, 867 bp, Staphylococcus epidermidis
ttggctacatttaaagattttagaaataatgtgaagccaaactggtgccctggttgcggtgacttttcagttcaagctgctatacaaaaagcgacagcgaatattggtttagaaccagaagatgtagcaatcattacagggattggttgttctggtagactatcaggttatattaattcttatggcgtacactctattcatggacgtgcattgcctctagcacaaggcgttaaaatggcaaacaaagatttaacagttatcgcttctggtggtgatggagacggctatgcaataggaatgggacatactattcatgctcttagacgtaatatgaatatgacgtatattgtcatggacaatcaaatatatggattaactaaaggacaaacatcaccttcctcagctaaaggatttgtaactaaatcaacacctaaaggaaatatagaaaagaatgtagctccattggaattggcactgtcctctggtgcaacttttgtagcacaaggattctcaagtgatataaaggcattaactaaaatgattgaagatgcgattcatcatgatggtttttcttttgttaatgttttctcaccttgtgttacttacaataaagtgaatacttatgactggtttaaagaacatttaacaagtatcgatgatattgagggctatgacatcacagataaacaacttgctatgaaaactgtgctggatcatgagtcactggttaaaggtatcgtttatcaagatacaacaacaccttcttatgaatcgcaaatttcagaactagaacatgaggcgttagctaaaagagatattcatattacagaagaaactttcaacgatttaactgcacaatttttataa

SEQ ID NO: 3090 - DNA, 618 bp, Staphylococcus epidermidis
atggacaaatttaaatctatgacagaattaaaagaattgactaaagaaggaaaagattgggaaatagagtgtgaaaatcgttctagcatagtcactatattagcattacatggcggtggaattgaacctgccacaactgaattagcctatacaattgcacattgtggcgactataactatttttcctttaaaggtatgagaagtaaggggaataatgagttacatgtgacttccacacattatgatgaccaaattgcattagatttagtgagaggtagccaaagaactgtagccatccatggttgtgaaggtaatgaaagtgtggcttatataggaggtagtgatgacagactaattgagttaatcaccgaatctcttgaagatataggaattagcgtgcgagaagcaccacatcatatttctggaactcaagaaaataatattgttaatatgactcaaacccaaggaggagtgcaattagaactgacagctcagttaagaaaggagctatttaaaaatagaaaaagttcacgcaaaaaccgtgaaaataaagataattgggatgatttaatgtacgactttgctgatgcaatgaaaaaagctatagaacgtgcataa

SEQ ID NO: 3091 - DNA, 291 bp, Staphylococcus epidermidis
atgcaagatacattaatgagtattcaaattattccaaaaacaccgaacaacaacgatgttattccatatgttgatgaggcaattaaaattattgatgattcaggtttgcattttagagtgggaccgttagaaacaacagttcaaggtgaaatgagtgaatgtcttattttaattcaaaaattaaatgatagaatggttgaattagaatgtccaagtattattagtcaagttaagttttatcacgtacctgaaggaatagaaattgagacgcttacaggaaaatacgactaa

SEQ ID NO: 3092 - DNA, 1545 bp, Staphylococcus epidermidis
gtgaatgaagagcaaagaaaggctggaacgataaatattctagctgaacgtgatcgtaaagctgagaaagattatagtaaatactttgaacaagtgtatcagccacctagcttaaaagaagctaaaaaaagaggaaaacaagaagttcaatataacagagattttcatatagatgaaaaatacaaaggtatgggtaaaggtcgcacttttttaattaaaacatatggatgtcaaatgaatgcacatgacactgaagttatggcaggaatattaaatgcattaggatatagtgctacttcggatattaatgaagcggatgtgattttaattaatacatgcgccattagagaaaatgctgaaaataaagtctttagtgaaataggaaatttaaaacatttaaaaaaagaacgcccagattgtttaattggggtgtgtggttgcatgtctcaagaagaatcagtcgtaaataaaatattaaaatcttatcaaaatgtagatatggtttttgggacacacaacattcatcatttacctgagattttagaagaggcatatttatctaaagcgatggtagttgaagtatggtctaaagagggagacatcatcgaaaatttacctaaagtgcgtgacggtcacattaaagcttgggttaatattatgtatggttgcgataagttttgtacttattgtattgttccatttactagaggaaaagaacgtagtcgtcgtccagaggacatcattgatgaggttagagaattagcaagagaaggttatcaagaaattaccttattaggtcaaaatgtaaattcatatggtaaagatatcgaaggtctggattatgaattaggtgacttattggaagatatttctaaaattgatatacctcgtgttcgttttacaacaagtcatccttgggactttacagatcgaatgattgaagttatagctaaaggtgggaacatagtaccgcatatccatttgccggtacaatcaggtaataaccaagtattaaagataatggggcgtaaatatacaagagagagttatcttgatttagtttcaagaataaaggaagctatccctaacgtagctctaactactgatatcatagtaggttatccaaatgaaactgaagaacaatttgaagaaacattatcattatatgatgacgttcaatttgagcatgcatacacatatttatattcacaaagagatggaacaccagcagctaaaatgaaggataacgtacctttagaagtgaaaaaagaacgtttgcaaaggcttaataagaaggttggaatatattctcaacaagcaatgagtcagtatgaaggtaagattgttacggtattatgtgaaggttctagtaaaaaagatgagaatgttctagcaggctatactgataaaaataaacttgtgaattttaaaggaccaagagagagcattggtaaactcgttgatgtcaaaattgacgaggcaaaacaatattctttaaatggaacatttatacaagaacatcaacgttcaatggtgacacaataa

SEQ ID NO: 3093 - DNA, 366 bp, Staphylococcus epidermidis
atgtatagtgaaaaagaaatcatacgaaaagtcgaaagtttagcagagaaaattggaaaactagaagttgttcaagattatcataatgtagaaaaacaaattcataataatcaagcaataaaacaaaagatgaatcgtttaaaagcgcaacaaaaacaatcggttaattttcaaaattatggaaaacaaaatgcactcgagcaatctgaagctaaaattcagtatctaaaagatgaaattaatgaattacctattgttgaagaatttcgttcagcacaatatgaggcgaatgatttactacaaatgatggtcaaaacaatggaagatagactcaatgaatataataaaaaagaacacaatgaataa

SEQ ID NO: 3094 - DNA, 495 bp, Staphylococcus epidermidis
atgaatattagaaagttgaccatcacagcattcttaatagctattaatgtcgtgttaagtagtttaattgtcattcctttaggtccaattaaagccgcacccgttcaacattttttaaatgtattatgtgctgtatttgttggaccatggtatggtttagcgcaagcttttatttcttctgtactacgaatttcatttggaactggaagcgcatttgcttttccaggaagtatgataggtgtcttactttccagtctgttttatatgtataggaagcatatttttatggcttcagttggtgaagtattagggactggtgttattggtagtttaatgtgtatacctttagcatggtttttaggacttcaagatttctttattaaaccattaatgcttatgttcatagtatcaagttttattggggctttaattagttatatattgcttattattttgaaaagaagaggtttactagatagatttaacaaaaattaa

SEQ ID NO: 3095 - DNA, 2622 bp, Staphylococcus epidermidis
atggctaacattacaccaatgatgcaacaatatttaaagataaaatctgaatatgatgattgtttgctattttttagactcggagatttctatgaaatgttctttgatgatgctaaagaagcatcaagagtacttgaaataacattgacgaaaagagatgctaaaaaagaaaatcctattccgatgtgtggcgtaccatatcattctgctgataattacattgaaacattgattaataaggggtataaggtcgctatatgtgaacaaatggaagatccaaagcaaacaaaaggaatggttagaagagaagttgtaagaatcatcacaccaggaactgttatggatcaaaatggtatggatgaaaagaaaaataattatattttaagttttatcgaaaatgaagaatttggattatgctattgtgatgtttctacaggagaactcaaagtaactcatttcaaagatacagcaaccttgcttaatgagattacaacaattaatcccaatgaaatcgtcataaagcaagctctatctgaagaattaaaaagacaaatcaacatgataactgagacgattactgttcgcgaagatatatctgatgaagattatgatatgaatcagttgacacatcagttaatgcatgacacaactcaattattgttagattacattcatcacacacaaaagcgagatttatctcatattgaggaagtaattgaatatgctgcagttgattatatgaagatggattattatgcgaagcgaaatttagagctgacagagagcatacgattaaaatcaaaaaaagggactttgttatggttaatggatgagacaaaaacaccgatgggtgctagacgtttaaagcagtggattgatcgtccattaattaataaacaacaaatcaacgacagattaaatattgttgaagagtttatggaccgttttattgaaagagatacattacgtaatcatttaaatcaagtgtatgacatagaacgactagtaggaagagtgagttatggaaacgtaaatgcaagagatttaatacaacttaagcattctatatccgaaatacctcacattaaagcattactcaatgaattgggtgcacaaactaccacgcaatttaaagaattagaacctttagatgacttgttacaaattttagaagaaagtttagttgaagaaccacctatttccatcaaagatggaggattatttaaaaatggcttcaacgcgcaacttgatgaatatttagaagcttcaaaaaatggtaaaacttggcttgcagaattacaagctaaggaacgtgaacgtacaggtattaagtcattgaaaattagttttaataaagtgtttggttattttattgaaattacacgtgcaaacttaaataattttcaacctgaagcgtttggctataatcgaaaacaaacattatctaatgctgaacgatttattacggatgaattaaaagaaaaagaagatataatacttggtgctgaagataaagcagtagagttagaatatgaattatttgttaaattacgagaacacattaaaacgtacactgaacgtttacaaaagcaagcgaaaatcatttcagaacttgattgtttacaaagttttgctgaaattgctcaaaaatataattatgtcaaacctacatttagtgatgataaagttttacatttagaaaactcaagacatcctgttgttgagagagtgatggattataatgattatgtacctaatgattgccatcttgatgatgaaacgtttatttatctcattacgggacctaatatgtcaggtaagtcaacatatatgagacaagttgctataataagtatcatggctcaaatgggagcatatgtaccatgtgattcagcaacattacctatatttgatcaaatttttactaggattggtgcagcagatgatcttgtatcaggtaaaagtacatttatggtagaaatgttagaagctcaaaaagctttaacttatgctactgaaaatagtttaattatctttgacgaaataggaagaggtacatccacttatgatggtcttgcgttagcgcaagcgatgattgaatatgttgctcaaacttcccatgctaagacacttttctcaacacattatcatgaattgacatcacttgatcaaatgcttaagtgtttaaaaaatgtacatgttgctgcaaacgagtatcaaggtgaactgatatttttgcataaagtcaaagatggcgctgtggatgatagctatggtattcaagtggcaaaattagcggatttacctaatgaagtcattgatagagcgcaagttatattaaatgcatttgagcaaaaaccttcgtatcaactctctcatgagaatactgacaatcaacaaacggttccgtcgtataacgattttggtcgaacagaagaagagcaatcagttatagaaacacatacatcaaatcataattatgagcaagcgacctttgatttatttgatggttacaatcaacaaagtgaagttgaatgtcaaattcgagaattgaatctatccaatatgacaccattggaagccttaatcaagctgaatgaattacaaagtcaattaaagtag

SEQ ID NO: 3096 - DNA, 1938 bp, Staphylococcus epidermidis
atggggaaaataaaagaacttgagacgtctctagctaataaaatagctgcgggtgaagtggttgaaagaccaagttccgtagttaaagagctcttagaaaatgcaattgatgcacaagcgacagaaattaatattgaagttgaacagtctggagtttcatcaataagggttgtagataatggcactggtattgctcaggaagatttagggttagtatttcatagacacgcaacgagtaaaatagtcgcagatgatgatttgttccatattcgtactttaggttttagaggagaagctttagctagtatttcatcagtagcaaaggtgacattaaagacctgtactgataatgaaaatggacatgaaatatatgccgaaaatggtaaaattattcatcaaaaacctgcaaaagctaaaaagggtacagatatacaagtggattcattattctacaatacacctgctcgattaaaatatataaaaagtttgtataccgaactgggtaaaattacggacattgtaaatagaatggcgatgagtcatcccgaaattagaatttctttagtttcagatggtaaaaaacttttaagtacgaatggctcaggaagaacaaatgaagtaatggctgaaatttatggaatgaaagtagcaaaggatttagtgcatatttcgggtgatactagtgattatcatcttgaagggtttgtagctaaacctgagcattctagaagtaataaacattacatttctattttcatcaatggtagatacatcaaaaactttgtactcaataaagcaattttagagggatatcacacattgcttacaataggaagatttcctatatgttacattaatatccaaatggatcctattttggtagatgtaaatgttcatccaacaaaattagaggtgagactttctaaagaagatcaactttatgatcttatcgtaaccaaaatcagagaggcttttaaagacaaaatcctcatcccacaaaacgatttaaatcacgcgtccaaaaagaataaggttttagaaacatttgaacaacaaaaaattaatttcgagaagcaacaatcacaaattggagaaacatctgcaccatatgtacatgatcaaaaagataagaatcatgatgtagagtcgcataagaataatttagattcaacttcatcgataaataatgaaagtacggaagtttctaatgaattacacaatcacattgatgatagttacttacaaagtcaaaaagaagtattgtttgatatggaacaaaacacatctaacgaatatgagatatcaaatcagcaatcaaacgatattaaaggaacagtgagtcagacacctcatcgtagggtgccttatatggaaattgtaggtcaagtacacggtacgtatatcattgcacaaaatgaaaatggaatgtttatgattgaccaacatgctgctcaggaaagaattaaatatgaatattttagagaaaaaattggcgaagtgaccaatgaagtgcaaaacttattaataccacttactttccatttctctaaagatgaacaaatgattattgatcagtacaaagatgaattagataaagtaggagtacatcttgaacattttggtgggcatgattatattgtaaatagctatccagtatggtttccgaaagaagaagcggaagaaattattaaagatatgattgaacttgtcttaaaacacaaaagtgttgatgtgaagaaaataagagaagatgcagcaatcatgatgtcttgtaagaaatcaattaaggctaatcactatttaaaaaataatgaaatggcagatttaattgatcaactaagagaagcagaagatccttttacttgtcctcatggtagaccgattattatcaatttttcaaattatgaattagaaaagttatttaaaagagtaatgtag

SEQ ID NO: 3097 - DNA, 534 bp, Staphylococcus epidermidis
atgaaaaagaatattttgccagctattagaaatatgagagatttagaaaagttaattaaaacagactacaaagcatgtgttgtgttagatatgcatataggtcatttgaaaagcattatggagttacttaaaagtcattcgattgaatgttatgtacatatcgatttaatcaaaggactcagtcatgatgaatttgcttgtgagtacattattcaacaatataaacctaaaggtattgtttctacaaaagctaaggtcatcaaaaaagctaaaatgttaaatactttgacgatatttagagtgtttatcatagatagtcaagcattaacaagaagtattgaactcattaaaaaagtagagcctgactatgttgaagttttacctggtgttgcaagtaaagcagtgagtaaaattcaacaagaaacatcagcgtcagtaatagctggtggtcttatcgatgaacaatcggaaattagagaagcaatttccaatggcgctaagtacgtcactacaagttacgagaaactttggtaa

SEQ ID NO: 3098 - DNA, 825 bp, Staphylococcus epidermidis
atgaatgcttatttagcagaatttttaggtactgcaatccttattctttttggtggtggcgtttgtgcaaacgttaacttaaagagaagtgctggtaacggtgcagattggattgttattgcatttggttggggtttggcagtaacaatgggcgtttatgctgttggaacgttttctggtgcacatttaaatccagctgtaacagttgctttagccatggatggtggatttagctgggcgcaagtaccgggctatattgtttgtcaaatgcttggcggtattgttggtggagtttttgtatggttaatgtatttaccacactggaaagttacagaagatccagcagtcaaattaggtgtattttcaacagcaccagccattaaaaattattttgctaactttttaagtgagattatcgggactatggctttaacattaggaattttatttatcggggttaataaaattgctgatggtttaaatccaattattgttggtagtcttatcatagcaattggtttaagcttaggaggtactactggttacgctattaatccagcccgtgacctagcaccacgtattgcacatgctattttgccaattcatggtaaaggtaaatctaactggtcttacgcaattgtacccgttctgggacccatggcaggtggtatgttaggtgcgattgtttacgaagtgttttataaacaaacattcaattttagttgtttcattggtttaattgtacttatattcacacttatacttggcgtgatactaaataagatatctcaaaataaaaacaacgatattgaatcaatttattaa

SEQ ID NO: 3099 - DNA, 1500 bp, Staphylococcus epidermidis
atggaaaaatatattttatcaattgatcaaggaactacgagttcacgtgcgatactttttaataaagaaggagaaattaaaggtgtttctcaaagagaatttaaacaacactttccacatccaggctgggtagaacatgatgctaatgaaatatggacatctgttctatcagttatggctgagttacttaatgaaaacaatattaatgcaaatcaaattgaaggtattggtattacaaaccaacgtgaaacgacagttgtatgggataaaaatacaggtcgtccaatctatcacgctatcgtttggcaatcacgtcagacacaagatatttgtacaaatttaaaggaacagggttatgaagaaacatttagagaaaaaacaggtttacttttagacccgtactttgcgggaactaaagtaaaatggattcttgatcatgttgaaggtgctagagaaaaagctgaaaatggtgatttactcttcggaacaatcgattcatggttagtatggaaattgtcaggacgtactgctcatattacagattacactaatgcaagtcgtacattaatgtttaatatttatgacctaaaatgggatgatgagttgttagaacttttaaatattcctaaacaaatgttacctgaagttaaagaatcaagtgaaatttacgggaaaactatcgactatcacttctttggtcaagaagtacctattgctggtattgccggtgaccaacaagcagcattatttggtcaagcatgttttgaccgtggtgatgtaaaaaatacatacggcacaggtggatttatgctaatgaatactggtgaagaagcagttaagtcagaaagtggcttgttaacaaccattgcatacggtttagatggaaaagttaattatgcacttgaaggttcaattttcgtatctggttctgctatccaatggctacgagatggtttgagaatgattaattctgcgccacaaaccgaaaactatgcttcaagagtagagtcaactgagggtgtttatatggttccagcatttgttggtttaggtacaccttattgggattcagaagcaagaggtgctattttcggattatctcgtggtacggaaaaagaacatttcattcgtgctacattagaatctttgtgctatcaaacaagagatgttatggaagctatgtctaaggactcaggtattgaagttcaaaatttacgcgttgatggtggtgctgtaaaaaataacttcattatgcagttccaagcagatatcgtaaattcatctgttgaaagacctgaaatccaagaaacaacagcacttggtgctgcatatttagctggattagctgttggattctgggatgataaagaggatatccgtgaacgttggaaacttcaaactgagttcaaaccagaaatggatgaagatcaacgtcataaactttatagtggttggaaaaaagctgttaaggcgactcaagtatttaaattagaagattaa

SEQ ID NO: 3100 - DNA, 1674 bp, Staphylococcus epidermidis
atgtcattatctacattgaaaagggatcatattaaaaagaatttaagagacactgaatacgatgttgttatcgtaggtggcggtattacaggtgcaggtattgctttagatgcaagtaatcgtgggatgaaggtagctttagtagagatgcaagactttgcacaaggtacaagttcacgctcaactaaacttgtacacggtggtttaagatatttaaaacaactgcaagtaggggtagttgcagaaacaggtaaagaacgtgctattgtttatgaaaatggtccacatgtgacaacaccagaatggatgcttttacctatgcataaaggtggtacatttggtaaattctcaacttctattggactagctatgtacgatcgtctagctggtgtcaaaaaatccgaacgtaaaaaaatgttatctaagcaagaaacgttaaataaagaacctttagttaaacgtgatggattaaaaggcggtggctactatgtagaataccgtactgatgatgcgcgtttaactattgaagttatgaaaaaagctgctgaaaatggagcagaaatccttaattatacaaaatcagaacacttcacttatgattccaataagaaagtaaatggtattgaagtattggatatgattgatggcgaaacgtatgcgattaaagctaaaaaagttattaatgcttctggtccttgggttgatgaagtgagaagtggcgattatgcacgtaacaataagcaattaagattaactaaaggtgtacacgttgttatagatcaatctaaattcccattaggtcaagcagtttactttgataccgaaaaagacggacgcatgatttttgcgattccacgtgaaggaaaagcttatgtaggaacaactgacacgttttatgataatgaaaaagcaacacctttaacaacacaagaagatagagactacttaattaatgcaattaactatatgttcccaacagttaatgttaaagatgaagatattgaatcaacatgggctggtattcgtccgctaattcttgaaaaaggtaaagatccttctgaaatctcacgtaaagatgaagtttgggaaggtgaatctggattattaactatagcaggcggtaaattaactggttatcgtcatatggcactagaaattgttgatttattagctaaacgtttaaaacaagaatacggattgaaatttgaatcatgtgccacaaaaaatctaaaaatttccggtggtgacgttggcggaagcaaaaactttgaacactttgttgaacaaaaagttgatgcagctaaaggatttggaattgatgaagatgtggcacgtcgcttagcaagtaaatatggttcaaatgttgatcaactatttaatattgctcaaacggcaccatatcatgatagtaaattaccattagaaatttatgttgaattagtttatagtattcaacaagaaatggtttacaaaccaactgacttcttagtacgtcgttctggcaaattatactttaatattcaagatgtgttagattataaaaatgctgtgatagatgttatggcggatatgcttaattatagtgaaactcaaaaagaagcttatactgaagaagtagaagttgcgattgatgaggcacgtacaggtaatgatcaacctgcaactaaagcttaa

SEQ ID NO: 3101 - DNA, 927 bp, Staphylococcus epidermidis
gtgagtcaaagtcattttaaaataacagttgaagatggaacaatgttagaggtgaaaattgataaagcaaaaaagagtactattggtattgttcatcttttccatggcatggctgaacatatggaccgttatcaagagttagttgaggctttaaatacacaaggttatgacgttgttagacataatcaccgtggacatggtaaagaaatagatgagaatgaacgtggtcattttaatagcatgaatcaaattgtagatgatgcttatgaaattattgagacattatatcttgaagagctcaatgtaccctatattatcataggtcattcaatgggctccattattgctagatcatttgttgaaaagtatcctgacattgctcaaggtttaattcttacaggaacaggtatgttccccaagtggaaaggtgtaccaatacgtttagcaatgaagttagttacatttatttttgggaaacgacgtcgactcaagtgggtgaatcaattattgaataaaactttcaataaaaaaatcactcaacctcgaacagatagtgattggatttctacacgtcaggatgaagttgataaatttgtggaagatgaattttgtggattcaaagtatctaatcagctcatttatcaaactttaaagaccatgatgaagacagtagaacgacaacaactaaaaagaatggacaaagaactacctatactatttatttctgggaaagatgatccttttggtgaatatggtaaaggtataaagcatttagctagattatataaaagagtaggtattaaacatataacagtacaactatataaacataagcgtcatgaaatattatttgaagaagattatttgaaaacatggcaacacatgtttgaatggatggaaaagcaaattttgaaaaaacaaaagtga

SEQ ID NO: 3102 - DNA, 999 bp, Staphylococcus epidermidis
atgactgaaatgacaaagccttttttaatcgttattgtaggtccaactgcttcaggtaaaactgagttaagtattgaagttgctaaaaaatttaatggagaaattattagcggagattcaatgcaggtctatcaaggaatggatattggtacagcaaaagttacaactgaagaaatggaaggtataccacattatatgatagatattttgcctccagatgcttccttttctgcatatgaatttaaaaaaagggcagaaaaatatattaaagatattactagaagaggcaaggtgcctattatagcaggaggaacaggactatatatacaatctctcttatacaactatgcttttgaagatgaatccatatctgaagataaaatgaaacaagttaaattaaagttaaaagaacttgagcatctaaataataataagctccacgaatatttagcttcattcgacaaagaatcagccaaggatatacatcctaataacagaaaaagagtgttgcgagcaatagaatattatttgaaaacaaaaaaacttttaagttctcgcaagaaagtgcaacaatttactgaaaattatgatacattattaatagggattgaaatgtcgcgtgaaacattatatttaagaataaataaacgtgttgatattatgttgggccacggattatttaatgaagtgcaacatctcgttgaacaaggttttgaagcgagtcaaagtatgcaagccattgggtataaagagcttgtacccgttattaagggaaatataagcatggaaaatgctgtagagaaattaaaacagcattctcgacaatatgctaaaagacagttgacttggtttaaaaataaaatgaatgttcattggttaaataaagaaaggatgtcacttcaaatgatgttagatgagattacaacccaaataaataaaaggagttctaaccatgattgcaaacgaaaacatccaagaccaagcactagagaactttaa

SEQ ID NO: 3103 - DNA, 240 bp, Staphylococcus epidermidis
atgattgcaaacgaaaacatccaagaccaagcactagagaactttaaatcggaaaaaactgaagtcacaattttctttttaaatggctttcaaatgaaaggtgtcgttgaaaattatgacaaatatgttgtaagtttaaattctcagggtaagcaacatctgatttacaaacatgcgatcagcactttcactgtagataatgaatcgtctgaagcaactgaagtgaatagtgaagaataa

SEQ ID NO: 3104 - DNA, 477 bp, Staphylococcus epidermidis
atggaaagtatttatgattttgttgtacaaaaaaacaatggtgaaagttataaattagagcagtataagggtgacgttatgcttattgtcaacactgctagcgaatgtggttttacacctcaattcgaaggtttacagaagttatatgatgagtataaggatcaaagatttattattttaggatttccatgtaaccaatttggcggtcaagaaccaggatcgggagaagaagctgctcaaaattgcaaaattaactatggtgtgactttccctattcatgaaaaagttgatgttaaaggtgataatcaacatccattatttcactttttaacaaacgctgctaaaggtatgataaacgaaaaaatcaaatggaatttcactaaattcctaatcgaccgtgaaggtaatgtgattaaacgtttctcccctcaaaagaaaccggaacaaattaagactgaaattgaaaaattactataa

SEQ ID NO: 3105 - DNA, 1242 bp, Staphylococcus epidermidis
gtgacacagcatgcgacttataaaacaaaaaataaacgagaaactgctgtattaatcggtgtacatgctcaaacggatcgtcaatttaattttgaatctactatggaagagctcgatgctttatcacaaacttgccaacttaatgttaaaggacaaatcactcaaaatagagagcaatttgaccataaatattatgttggaaaaggaaaaatcgatgaaataaaatctttcatagaattccatgatatagatgttgtcgtaaccaacgatgaattaacgacggcacagtctaaaacgttaaatgataatttgggcattaaaatcatcgatagaacccaattaattttagagatattcgcgttgcgagcgagaagtagagagggaaagctacaagtagaacttgcacaactcgattatttgttaccaagactacatggtcatggtaaaagcctgtctcgtcttggtggtggcataggaacaagaggcccaggtgaaacaaaattagaaatggatcgtcgccatattagaacacgtatgaatgagattaaacatcaattaaaaacggtcgtggatcatcgggaaagatatagaaataaacgtgaacaaaatcaagtttttcaaatcgctttagttggttatacaaatgcaggaaaatcgtcatggtttaatgttttagctaatgaggagacctatgaaaaaaatattttgtttgcaacattagatcccaaaacacgacaaatacaagtgaatgaaggatttaatttaattatttctgatacggtaggatttattcagaaattaccaacgacattggtggctgcgtttaaatctacactagaagaagctaaaggtgcagacgtacttatgcatgtcgtcgatgcaagtcattcggaataccgtactcaaattgacactgtaaatcaaattattaatgatttagatatggaccatattccacaagtagttatttttaataaaaaagacttatgtaacgaacagatggatgtacctgtatctaaatctgcgcatgtttttgtatctagtcgtgatgaaaatgataaacaaaaggtgaaaaatttagtaattcaagaaataaaaaatagtctcagcccatacgaagaaattgtagatagtgctgatgcagatagattatattttcttaaacaacacacgcttgttactgaattaatatttgacgaaacacaagcatcttatcgtatcaaaggatttaaaaaattataa

SEQ ID NO: 3106 - DNA, 1239 bp, Staphylococcus epidermidis
atgcaagattttagcaatttagttgaaaaagttgaaaacacacttattccttactttagaaaaattgaaaagcgtgcattatttaatcaggaaaaggtcttaaatgcttttcaccatgttaaagctagcgaaagtgatttacaggggtctacgggttatggatatgatgattttgggagagaccatttagaacaaatttatgcgcacacatttaaagcagatgacgcacttgtaagacctcaaattatttcaggtactcatgctattactttagctttacaaagtacgttaaaaaacaatgatgaactactttatattacaggtagtccatatgatacacttctagaagtcattggtataaatggcaatggtgttgaaagtcttaaagaatatggtgttcgctataatgaagtcgaattacgtgacggtcgaattgatattcctaaagtcatcactgcaattaatgacaatacaaaagttgtagcaattcaacgatcaaaaggatatgatcaacgtccatcaattacaattaatgaaattgaacaagcaataacatctattaaagaggtttatcccaatatcattatttttgttgataattgttatggagaatttgtagaagataaagaaccgattgaagtaggtgctgatttaatcgccggatcattaattaaaaatccaggtggaggtttagctaaaattggaggatatattgctggtagacaagacttaattgaacgctgtggttatcgtttaacagcaccaggcattggtaaggaagcaggagcctcacttaattctttacaagaaatgtatcaaggattctttctagcgccacatgtggttagccaaagtttaaaaggtgcactgtttactagtttgttattagaaaaaataaacatgaagacctcccctaaatataatgtttatcgtacagacttaattcaaacggttcaatttgagaccaaagagcaaatgatttcattttgccaaagtatacaacacgcttcaccaattaacgcacattttagtccagaacctagctatatgcctggatacgaagatgatgtcatcatggctgcaggtacatttattcagggctcgtctattgaattatccgcagacggacctatacgtccgccttatgaagcatatgttcaaggtggtttaacttatgaacatgtcaaattagctgttacacgtgcggtccaacatatgcaagaaaacaatttactataa

SEQ ID NO: 3107 - DNA, 366 bp, Staphylococcus epidermidis
atgtctaatgattcaatcagacgaaacatggccgttttctctatgagtgtggttagtaaattgacagatttatcaccaagacaaattcgttactatgaaacacatgaacttgtgatgcctgaaagaacagatggaaataagagattattttctatgaacgatttagagaggttgttagaaataaagtctcttatcgaaaagggatttaatattagaggtattaaacaaattatattcgatgagcaagggcatttaactactgatgaacaagagacaagaaagagaatgattgttgacgcaacgcagaaaccacgtagtgaaacattaccaataaatcgcggcgatttatctcgatttattaaatga

SEQ ID NO: 3108 - DNA, 1341 bp, Staphylococcus epidermidis
atgccaaaacgtagttttacaaaagatgatattcgtaaatttgctgaagaagaaaacgtaagatatttaagattacaattcactgatattttagggactattaaaaatgttgaagttccagtaagtcaattagaaaaagtattagataatgaaatgatgtttgatggttcatctattgaaggtttcgttcgtatcgaagaatcagatatgtatttacatcctgatttagatacttgggttattttcccttggactgctggacaaggaaaagttgcacgactaatctgtgatgtatttaaaacagatggtacaccatttgaaggtgatccacgagctaacttgaagcgtgtattaagaagaatggaagatatgggctttactgattttaatctagggcctgaaccagaatttttcttatttaaattagacgaaaaaggcgaacctacattagaattaaacgatgatggtggttatttcgatttagctcctacagatttaggtgaaaattgtcgccgtgacatcgttttagaattagaagatatgggctttgatattgaagcaagccaccatgaagtagcgccaggtcaacatgaaattgactttaaatatgcagatgccgttacagcatgtgataatatccaaacatttaaactagttgttaaaacaattgcacgtaagcataatttacatgcaacatttatgccaaaaccattatttggtgtaaacggtagtggtatgcacttcaacgtatcactatttaaaggaaaagagaatgcgttctttgatcctgaaggtgatttacaattgactgatactgcatatcaatttacagctggtgtccttaaaaacgctagaggattcactgcagtatgtaatccaattgtcaactcatataaacgtcttgtaccaggttacgaagcaccatgttatattgcatggagtggtaaaaaccgttcacctttagtacgtgttccaacatctagaggtctatcaactcgtattgaagtacgctcagttgaccctgcagctaacccgtacatggcattagcagcaatcttagaagcagggttagatggaattgagaataaacttgaggttccagaacctgtaaaccaaaatatctacgaaatgaatcgtgaagaacgagaagcagttggtatccaagacttaccttcaactttatacactgcgttaaaagcaatgcgtgaaaataaatcaattaaaaacgcattaggtaatcatatttacaatcaatttattaactcaaaatcgattgaatgggattactatagaactcaagtatccgaatgggaaagagaacaatatattaagcaatactaa

SEQ ID NO: 3109 - DNA, 183 bp, Staphylococcus epidermidis
atgatgtatgtcactaaaaaattacttggtaaaggaaatgagttaagtattcacaaactaaaacacacacacgctaccttacttctagaaagcaatgtacctatgaaagtaattcaagaacgtttaggtcataaatctgaagccattactagtgacgtttatagtcacgttactaaaaaatga

SEQ ID NO: 3110 - DNA, 240 bp, Staphylococcus epidermidis
atgaagcgatacaagttacttctcaataatattaatttaacaggtgtctattcacatgattattcaaaaatagatatcacatttactcctaacttacctaagtcattattagaatctattgaagcatttaatgccttaaatggtggcgtttctgaacaaactagattaaaaatattgcctattattgataatcctaatgaagaaattaagaaaatggaagatgagcaaagaaagacttga

SEQ ID NO: 3111 - DNA, 1347 bp, Staphylococcus epidermidis
atgcccgatagtttagaatattggctagaacgcgcccagaatgttataaaagttgaatcattagcggatgcacaagcaattgtagaagtagaacgaattatcctacaaatgtacgctgaaatagctaaagaattactagccttttatgcgaaatatgcaacagatactggtttaacaattcaagaggtcatgaaaaaagctgatgaattcgatgtatatgcatttcgaaataaagctaagaaatatgtgaaacgtaaagattttagcgatgaggcaaacaacgcacttaagctttataacttgtctatgaaagtatctagagaaaaactattaaagcaacaattagatttgatagtcaaagactccactttagatattcaagatgaaatagaaaataagttagttgatgcagttgatagagaagttgaaagacaagtacatatacttggggaaaatgtgaaaattgatgacactgaagtaaaagcggttgttaacagtaactttaaaggtgtgaactggtctacaagattatggcaagatatggctgtagttcaaaaagaagtagaaagaacaacgagtaatgtattacttagagggagacatcccaatgagtatataaaggattttaagaaacaaactaacactactacttataatgctagtagattattagttactgaatcagcacgtgtgcaggctgaatcacagaagttaacttatcttaaagatttaggtgaagatggcgaatataaatacgtggccaaaatagacaagaaaacatctaaaatatgtcactctttaaacagtaaagtatttaaagttaaagacatgatatttggagttaatgcaccaccaatgcacccttggtgtagaagtactacagtaccacatgtgggcaattggcgagatagattctttactgagcgtaaaggtaagtatcgagttgaggataaagaattagtaaaagaaaaattacaagaaaaagcaaaaaaagaaatgctcgaaatgatagatgatggtaaaataaagatagaattgaataacgaaaagcaagaacggcatattttaaatacaaaagcatactataataagaaatataattcttctatattgccaagttatattacactggatactaaagagattgaaaaaataactaaaaaagaatttattaattttcctgttttatttgatgatgaggggaaatttagaaataaacaaattattaactacaacaagataataggcaaatcttatgtaaatgatgaatatattgaaacaaaattaggtaaagttcattattctaaaactggttttcacgtggtaccatacattaaaaaggagtaa

SEQ ID NO: 3112 - DNA, 192 bp, Staphylococcus epidermidis
ttgaatttacaatattacttaggaaaaatagtcaaattaactcttaccaataataaagtattagttggaaaagtgacaggttttgatgataaatatgataattttgatggatttaattcaatagaaatagatacaggtagtattttatacgatataacagagaataaaattaaatctattgttttaaactga

SEQ ID NO: 3113 - DNA, 378 bp, Staphylococcus epidermidis
atgcaaactaagaagactaacatgttgaaattaaagttacagtttttcgcagaagaaccaggggacaatgcacaaacatctgaaggtcaagaaaaacaagacacaccggaaaaagtttattcagaagaagagtttaatcaacgactaaattctgaattacaacgtcgtttaaagcaaaaagaagatgaaaaagcagaagcagtcaaagaagctcaaaagctagctaaaatgaataaagatcaacagttacaatatgagaatgaaaagttaactaagcaactcgaagaatataaagtaagagatgctaaatcacagatgaaagctgaagcacgattgatgttaaacaaagaaggcattgatgtgactgaggaaccttga

SEQ ID NO: 3114 - DNA, 189 bp, Staphylococcus epidermidis
atgttagttacttcaaatgcagaagacactaaaaagaatgttgaaactttttctaatcttttaaataaaatagttcaatcaaatgttgaaagagcattaagacaagactcaccagtaagcactcaatcaaataaaatgacaaaagatgaagaatcagattatcttgtttcagggagaaaatgtctataa

SEQ ID NO: 3115 - DNA, 684 bp, Staphylococcus epidermidis
atgcaacaagaacgacaatcgtggtaccaaaaatcttggtttattattctcacattactatttatttttccattaggtctttttctaatgtggaggtatgcgcattggaaaaattggttaaaattgactgtttcatcagtctatattattagtttagttttaacacttttatttcaagttagtctattaaatgagaataaaacaaatcaaatagaacatgcatcaactatgaaagaaaagtctaatataaataatgtaaaaacaactaaaaataaaaatatggaaaaatcaacgcagacagacaaacaaaactctgtgaacttaaagcaaaacacaaaagatcaaaataataatgcaaatgatgaagcagcttctccaactagcgaacaaaatgcagctatagcacaagcaaagtcatatgcaaatacattacctatctctaagaaaagtttatacaaacaattaacttcggaatacggagagaaatatccggcagacgtagcacagtatgctgttgaccatatcagtgtagattataaaatgaatgcactgagattagcaaaaagttacgtaaaaaatataaacatttctaatcaagcgtcatatgatcaactcgtttcagaaaatggagaaggatttactcctgaagaagcgcaatatgcaataaatcatttagataggtaa

SEQ ID NO: 3116 - DNA, 1026 bp, Staphylococcus epidermidis
gtgatttcatttgaaaatgattatttagaaggtgcacatgaaaaagttttaaatcgattagtagagacaaatcgaatacaagctgctggatatggcttcgatgacttttcggcacaagctgcagataaaattagacaacgtattgactgtccagatgctaccattcggtttttagtaggtggtacgcaaaccaatcaagtagttattaactcaatgcttgatagttatgaaggtgttatatccgctgatacaggacatgtggcagtccatgaaggtggtgcgatagaattcagtggacataaagttctaaccataccctcccaagaaggtaagattactgctcaagacgttgagaattatatagaaacttttgaaagtgattttaaaaaagaacacatggtgtatccagggatggtttatatttcacatccaaccgaatatggaactttatacacgaaagaagaattacaatctttatctagagtttgccgtagacatcagattccactatttatggatggtgcacgtttaggctatggccttatgagcaatcaaactaatgtaactatcgaagatgttgcaaaatactgtgatgtgttttacataggaggtactaagattggagcactttgtggtgaagcaatcgtcttcactaaacaaaatgaacctaaaaacttcactacaattataaaacatcatggtgctttattagcaaaaggccgtctaactggtgttcaatttttagaattattcactgatgatttatattttgatataagtcgacatgctattaaaatggctgaaaaggtaaaaaaaggatttatagataaaggatatcaagtctattttgattcaccaaccaatcaacaattttttattttaagcaacgataaaattgaagaactaaaacaaaaggtaaaatttgcagtttgggagaaatacgataatcaacatcgtgtagttcgcttcgcaacaagttgggccacaactgaagaaaatgttaatcaactacttgaactaatataa

SEQ ID NO: 3117 - DNA, 117 bp, Staphylococcus epidermidis
atgaaatcacaagcgttccctccaatgttaaatcgatatttattaatttattcgatgaaaagtgttgatttgctctcaattagaaaagatttcaatcaattaaaagaggagcaataa

SEQ ID NO: 3118 - DNA, 198 bp, Staphylococcus epidermidis
atgcaacaaataaaatttaaaactttaactgaggaaacactggagagcttagagaaaagtgttaattcgtttttaaagtctcaagagggtaatggttacaaattattaaacattactattaaacaaatcgaagaacgtgcatttccgcataatgacgaggactttaatgctattttaacattggtaactgaagcatag

SEQ ID NO: 3119 - DNA, 1473 bp, Staphylococcus epidermidis
atgaattttggatttttgggtactattttaactatattgttagtagttgggtttataactaacgtagtattggcatttgtcatcatcttccttgaacgtgatcgacgtactgccagttcaacttgggcgtggttattcgtattattcgttcttcctgtcattggatttattttgtatctatttttaggacgaacggtttccaagaaaaagatggaaaaaaataacggtgatgaattaaatgcatttgaagatttagttcaagaccaaatcgacagttttgataaacataattatggttatatcaatgatcaagtcattaaacaccgtgatttaatacgtatgttgttaatgaaacaagatgcctttttaacagaaaataataaaatcgatttatttacagatggtcataagctttatgaaaaagtacttgaggatatttacaatgctcaagactatatacatctagagtgctatacctttgaacttgatggattaggtaaaagaatcttagatgcacttgaaactaaacttaaagaaggtttagaagttaaacttttgtatgacgatgttggttctaaaaaggttagattatcaaaatttaaacatttcagagcattaggtggagaagttgaagcatttttcccttcgaaagtacctttaatcaatttcagaatgaataatcgaaatcatagaaagattatcattatagatggacaaattggttacgttggcggttttaatgtcggcgatgattatttaggattaggtaagttaggttactggagagatacacatacacgtgttcaaggtgaaggcatcgatgcactacaattaagatttattttagactggaattcacagtcgcatcgtccacaatttaaatttgatcaaaaatacttccctaaaaaaattggggacaaaggaaacgcggctattcaaatcgcttctagtggacctgcatttgatttacatcaaatagaatatggttatacaaaaatgataatgagcgctaaaaagtctatctatctacaaagcccttactttattccagaccaatcatacattaatgcattaaaaatggctgctaatagcggcgttgaagtcaaccttatgataccgtgtaaacctgatcatccattcgtttattgggctacattttcaaatgcagctgatttattagatagcggagttaatatttacacttatcaaaatggatttattcattctaaaatattaatgattgatgatgaaatttcttcaattggtagtgcaaacatggactttagaagctttgagctgaatttcgaagtgaacgcatttatatatgatgaagatatagctaaacagttacgtcaagcatttgaaaaagatattgagcaatctaaattacttacaaaagaagtatacgacaagcgtccattatcaattaaatttaaagaaggactagcaaaattaatatctccaattttataa

SEQ ID NO: 3120 - DNA, 870 bp, Staphylococcus epidermidis
gtgattgaactacgaaatatttctaaatctttcaagaaacataaagttttagaagatataagtattgatataaaaaataatcgttgtacggcattaatcggtaaaaatggagcaggtaagtcaacattaatagatattatcgttggaaataatcactatgatagtggtcaaatcgctgataaatccaatttgttaaataaacataagatgggaattctttttcaaaaaacagagtttcctaaatacataaaggtttgcgaattattacatttatatcaatccttttatcaaacgtttatttcttttcatcagtttaaagaaatcacacaatttagtgaccgacaaatgaatcagtttgcatgtaatttatcaggtggacagcagaggattttagattttgctttagcattggtaggtaaacctgaactgttaattttagatgagcctacgtcagctatggatgtagaaatgcgtcaacatttttggaatgttatagataaattaaaaatgaataacactacgatactatatacctctcattacattgaagaagttgaaagaatggctgatcaagtaatgatgttagataaaggtaaaatacaattagatgattcacctgaaaatataaaaaggaatcaaagttattctttaattcgaattccttgcaaatatcaagaacttatcaatcaactgaaacataaatacgaaattgaattaataaaaaatagatatgaaataaaaacaactgatgtgagtgatgttttacaattattgaaacaatatcatgtcaatttcaataagattgaaattcttaaaaaatctttattagaagtcatgttttctaatgataagtctaaaggagggaaataa

SEQ ID NO: 3121 - DNA, 732 bp, Staphylococcus epidermidis
gtgatatcaacattttttaaaatagaattaaagattatatttagaaagaaattgtatttagttgtgtccatattcctacctgtcgtgttttatttattatttacttctatattggacatgccagaagaagcaaaacttaagttttataaagagtatatgtatagtatgacagtatttagtctaatgaacttttgtctattgtcatttccattagatttgattgaagagcgaaatcaaggttggtataaacgtttaatggtgaccccattatcatcatttcaatattatttagttaaaattagtaagacaatgtgtcagtttataattgcaattacaattattttttcagtagctcatttttacaaagatgttcacatgactgtttttcaatggatattctctgcattaactttatggattggtgttagtttatttttgactttaggattgattatcgctcaactcaatgatattcaaaaagcaagtagttttgccaatttacttaatattacactagctatattaggaggtttatggtttccagtaaacacgtttcctgattggcttcagtcgatttctaaaaacatgccaacatataatttaaagctacttgctatagatttagcgcaagataaagtggtgaatatagaagcgattggctatctcatagtctatagtataatctttatgagtattgctttattcatgaataagaaaggagatgtatcctaa

SEQ ID NO: 3122 - DNA, 1095 bp, Staphylococcus epidermidis
atggaatcaagaagttggggagcgagaataggggaattaagtactttaatatatttaatatttccgattttagctatatttgttgacaaacgtggtaacttattcacttatttaattgtttgtactatttttataatcagctatgtgacgatgattttattttataaacaccttagtgatagtattttatattcattactggttattcattatttaggaatcttttattttgtctatagtgtcaatcctatgaatagtttgtttttcttctatagtgcattcgccttaccttttatttttaatgttcgtgttgtatcaaaagaatttataacctttttaatagctatgataagttgcttaatactaacttatatatttaatccaacatttgtggttccattaagtgcattttatttggttatattaattgttgctgtaggtaattttaaaaatagagacgaacgaattatgaaagctaaacttgaagaaaagaataagtatattaatgtactaatagctcaacaagagcgtaatagaataagtcaagatcttcatgatacattaggacatgtatttgctagtcttactttgaagtctgaattagctgttaaactcatagatactaatccaaaagaagcaaaaaatgaaatgcaggcaataaatcaactttcaacagaagccttaaataaagtcagactcattattgatgatttgaagatacaatcttttgaagatgaaatttcatcattggaacacttattgcaaaatgctaatctacattttaaatttaacaataaaagtgcggctaaatcattaaatccagcgaaacaatcaatattatctatgatttttagagaagcaattaataatgttattaaacatgcgcatgcgactgaagtaataggtgaattgaaggtacatgagcatcaaatcattttaaaaattaaagataatggtgtgggaatagaaaatgaagatgcttcaaatttgaaaagtattaaagaacgtgtagattatttaaatggtaaattaattgtacaatcaaataatggaacacttattattgttgaaatacctagaggtgatttattatga

SEQ ID NO: 3123 - DNA, 603 bp, Staphylococcus epidermidis
atgatatcgcttgttataactgaggatcaattgatgttaagaaaagctatggtacaactgatagaaatgcatgaagaaatgaatgtaataaaagattttgaaaatggtgtagaggcactcgaatttattgaaaataatgaacccaatgtagccattttagatattgaaattccgggtttaacaggcttggaaatcttatcttatgtaagaaaaaaacaactcaatacaagaataatcatagtgactacatttaaacgtccaggttattttgaaaaagccgtagcaaatgatgttgatgcttatgtactaaaagagcgttcaattgatgatttaattaaaactatttataaagtgacaaagggtgagaaggaatatagcccttcgctcatgacatcattgtttactgaatcgaatccattaactcataaagaacaagttgttttaagagaaataggcaatgggttaagtagcaaagagattgctagcaaattgtatttatcgaacgggactgtgcgtaactatacgagtactattatagacaaaatgaattcagatcatcgttttgaggcatggaaaaaagcaaatgaaaaggggtggatttaa

SEQ ID NO: 3124 - DNA, 189 bp, Staphylococcus epidermidis
atggatacatctaatgaaaataaaataacaatcattgccgttatagtagcaataattgttggtgtcgtactacaaattgtctttaaactacccttaatcgtgagtttagtggggtcagtatttttaggtatgttcgttggttttatcgtctacctaattcaatcatttcgtcgtaaaaaaaagaattaa

SEQ ID NO: 3125 - DNA, 537 bp, Staphylococcus epidermidis
ttgaaatctaagaaaatgtcatcgcttttagtagtagcgatgataggaatacttgtaattattttccagtttgtaaaccattctggaccgtttagtgattcagaatctcaacatcaatcagataattccaatttaaatggtaaagacaaagtatatgtgaaacgagttgtagatggtgatacatttgttgctcaaaaaaatggagaggaaattaaagtcagattaattggtgtagatacgccagagactgttaagcctaatacgccagttcaaccatatggtaaacaagcatctaattatacgaagaagtatctcacgcatcaaaatgtttatttagaatatgataaagaaaaaactgataggtatggtcgtactttggcgtacgtatggttaaaaaatggagatatgtttaacgaatcattggtgaaaaaaggtctagccagagaaaagtatttttctccaaacggaaaatatagggataccttcgtaaacgctcaagatgaggcaaaaaagagaaaattaaatatttggagctag

SEQ ID NO: 3126 - DNA, 114 bp, Staphylococcus epidermidis
atgactaccgaatcgtataaaaacgttaaaattaaaaagaaatatatgacaacattgttgataatagatgatttaataagttggaatataaaattacaacttaagatgctttaa

SEQ ID NO: 3127 - DNA, 165 bp, Staphylococcus epidermidis
ttgcagttaaagaaatttgatgtggaacttgttgatggatttacgaaagttattttgagtttcatccgaatgtcgattcgaaacataattaaagtcaaaatagaaattgcatttgtattaatgctaatgaatataaaaaaagtagttgctcaacaatttaaataa

SEQ ID NO: 3128 - DNA, 873 bp, Staphylococcus epidermidis
atgtctttaacgattatcttatctataataattattattttgattatggctatggttcttaatcaaaaatttatgaaagatagggttgaaacagaagaatatgctagaaatcaattaatctctaaaaattcaattttaagtgaagaaaatttatcattgaaaaaccaaatgttaagtacaaacaatgacgtcggtcaacacgcttttaaaaacgccaagcgtgaattaagaaaaatattaaatagatttaaagaagagggtcgtttacgatcatatacaattgttcctacgagtaatttggctgttaaacatccccttttcgaatatgcacgttcattcgattttattatcattactgatgttggtttgataaatgtagatgttaaaaattggaaccaaaaaacgttttatcattttgatgtaccagatcaacatcttgaagaaggacaaccacaatataataccgaaaaagttgtcggtcattatattagcaatcgatatcatagtcagtttaaaacaacacgttctggtgtctatacttttattgagattttacaggataatcgtgtaatatatgaattttatgaccacgatccatacgataaagccgcaaacaatgcaaaagcattaaaagataaaattgaaaatgattataattttaaaattcaaagtattggcgtcatatactttagtgatggtagcgttaatattattgaaggatccgacgagagtgataaatacgtcgacaccgtatctacaccgatatcacttgaaaaagtaattgaggaagctatcgatttatctaagcaccctcttactgataaacaaatcgaagaaatttctgaaagctttaaacaacatatgaataattaa

SEQ ID NO: 3129 - DNA, 600 bp, Staphylococcus epidermidis
atgtttgttaaagaagaaaaaccagtgaataaaatagtcgaaattttaaggaaaacatcatctcatttattcaaatttcacggcgaggtagcgatgcatctatttctgaatgatgattttatattaccatcgaaaatagatatttgtgttgagcgcaaaaagttattggaaattatcagggtgattcctgaagaatttacgattcactattatgataatcagttatatgaaagattaagagaatctttatctttatcagatgttgaacatgttaaagtctttaaaaacgatacagaagtcatgacaatatttgtttatgatgttgtaaatgatgaatggctatttaggttagatcatcatatacgtttaccaaaaaataatatatattttcattctttaagttggaacgtagattatattaagccagaaatagttcttatgtatgatttaatgagtgaacaaaaatatcatcagtttagtaattataaagctgttattgattctcttagttattatcaattctatattttaaaattggtagtaggtgaacagcgtattaaaaaagctatagtaaatagttccactaaaaagatatcttaa

SEQ ID NO: 3130 - DNA, 1377 bp, Staphylococcus epidermidis
atgaaagttgctaagtttggtggaagttctgtatcaactgcagaacaaattaaaaaggtattaactatagtgaatgaagaccctgaacgtaaaatcattatcgtttcagctccaggcaaaaggcataatgacgacattaaaactactgatttattaattcgtctctatgaaaaagtacttaataaattaaattatgaaagtaaaaaacaagaaattatccaaagatatgctgatatagtagaagaattaggtataggaaatgacattttaataacaattaatgacactttagaggaatacattaaacatctttctgacaaacctaaccgtttatatgatgctttattatcttgtggcgaaaattttaatgctcaattaatagcccagtataataatagtcaaggtattcctactcgttatatttctcctaaagaagctggattaactgtaactgatttaccacagcaagctcaaattttagattccgcatataatgaaatatacaaattgcgtgattatgatgaaaagctaattattcctggttttttcggagtttcaaaacaaaattatatcgttacgtttccacgcggtggttctgacataactggtgctatcatagcacgtggcgtccgagcctcactttatgagaacttcactgatgtatcaggaatatataaagctaatccaaatatcataaataatcctgaactcatagaggaaataacttatagagaaatgcgagagctatcttatgcaggatttggagtttttcacgatgaagctctacaacctttatacaaagatcgaattcccgtagttatcaaaaatactaatcgtccaaatgataaagggacctacattttacatgaccgtgaaatcgattctaaaaatgtcattagtggaattagttgtgataaaggctttactgtgattaatattaaaaaatatttaatgaatagattagttggatttacacgaaagattcttggcgttttagaagaatttaatatatcatttgaccacatgccttctggtattgataacataagtattatcatgcgtacaaatcaaattcaaggtaaagaaagtcaagttcttaatgccatacgcaaacgttgtgaagttgatgaattaagtatcgaccatgatttagcagtactaatgattgttggtgaaggtatgaatcaagttgttggtacagctagtaaaattactcacgccctttcagaatcaaacattaatttaataatgattaaccaaggtgcttctgaaatttcaatgatgtttggaattcatgaagcagatgctgaaaaagcagtattatctacgtacgaattttgttacaacggtgtttgtttaaaaaatttgtgtaaataa

SEQ ID NO: 3131 - DNA, 1281 bp, Staphylococcus epidermidis
atgaaagagttaaatatcgcattacttggtttgggaacagtcggatcaggtgttgtaaagattattgaagagaatagacaacagattaaagacaccatcaataaggatattgtcattaaacatattctagtccgagataaatctaagaaacgtccgttaaatattagtcaatatcatcttacagaagatattaatgacatcttaaatgacaattctattgatatagtcgttgaagttatgggtggtattgaacctactgttgattggttaagaacagcccttaaaaataaaaaacatgtgattacagcaaataaggatttactagctatccatttaaaattattagaagacttagctgaagaaaatggcgtcgctcttaaatttgaagcaagtgtggcaggtggtatccctattgtcaatgctattaataacggactgaatgcaaataatatttctaaatttatgggaatatttaatggaacttctaactttattctctcaaaaatgactcatgaacaaacaacttttaaagatgcgttagaagaagcacaaagattaggatttgctgaagctgatccaacagatgatgtagaaggtgtagatgctgcaagaaaggtagttattacatcttatttatcttttaaccaagtcattaaactgaatgatgttaaatcggtaggaattagtgacattacattagcagacatcaatgcagcaaactcattaaattataaaattaaattaataggtaaaggtacatatgaaaatggatatgtgaatgcttctgtggaaccgacactgatacataagaatcaccaacttgcagctgtagagaacgaatacaatgcaatatatgttataggtgatgctgttggcgatacaatgttttatggtaaaggtgcaggtagtttagcaacaggaagtgcagttgtaagtgatttattaaatgtggcacttttctttgaatcaaacttacacactttaccacctcattttgaattaaagacagaggaaactaaagaaatgatggatggtgcagaaccagtggttattcaagagaaatctaattactatatagtaattagtaacaataataaatctttggagaaagttgaatatgacattaaaaagaaattaccattccataaatcgttgcaacttgttgagagggatcaagatacttatgcaattatcgttactggaatagaaacatctccagaaaaagttctaaatcaatcaggatttaatatcaagaaagtttatcctgtagagggagtttaa

SEQ ID NO: 3132 - DNA, 1065 bp, Staphylococcus epidermidis
atgaaaagatggcaaggattagttaaagaatttaaagaatatttaccagtcaatcaatctacaccagcactaacactcaatgaaggacatacaccacttatttattgtgaaaatctttctcaaaaattagatattgaattatatgttaaatatgaaggagcaaatccgactggctcatttaaagatcgtggtatggttatggctgtaacaaaggcaaaagaacaagggaaaaaagttgttatttgtgcttccactggtaatacttcagcatcagcagctgcttatgctgcaagagctggtttaaaagcaattgtcgtaattcctgaaggtaaaatagcattaggtaaattatcacaagcagttatgtatggtgcagaaattgtttctatagaaggaaacttcgatgaagcactagaaattgtaaaagagattgctgaagaaaatgatgaaattgaattagttaattctgttaatccatttaggattgaaggacaaaagacgggtgcctttgaaattgttgaacagttagatggtcaagcccctgacattttagcaataccagtgggaaatgcaggtaatataactgcttattggcaaggatttgttgaatatcataataaaaagaatacacaattaccacaaatgtttggcttccaagcagaaggagcatctccaattgttcaaaataaaataatcaaaaatccagaaacaatagctacagctatccgaatagggaatcctgctagttggcaaaaagctgttaatgcactagatgaatcaaatggtttaattgatagtgtgacagatgaagaaattttagaagcttatcagttaatgacaacaaatgaaggtgtttttagtgaaccagcgagtaatgcttcaattgcaggtctaatcaaacttcatcgctctggtaagttacctaaaggtaaaaagatagttgcaatattaactgggaatggacttaaagatcctgacacagctatttctctcttagataatcctattcaacctttacctaataataaagaaagtataattagatacatcaaaggggcaatctag

SEQ ID NO: 3133 - DNA, 921 bp, Staphylococcus epidermidis
atggaggaagttttaaaacttaaaatccctgcatcaaccgcgaatctaggtgtaggttttgactcaattggtatggcattggataaatatttgcatatgtctatacgtaagattgaaagatctaattgggaatttctatattatagttcagaactagaaggtttacctaaagatgagaataattatatttatcaaactgctctaaatgttgcgcataaatacaatgttacacttccaagcttgcaaattgaaatgagaagtgatattccattagctagaggactaggttcatctgcctctgcattagtcggtgctctttttattgctaattactttggtaatattcaattatctaaatacgaattgttacaactagcgactgaaattgagggacaccctgataatgtagcacctacaatatatggaggtttgattgcaggtttttataatccaataactaaaataacagatgttgctagaatagaagttccgcacgtagatataattttaactatacctccatatgagcttcgtacagaagactctagaagggtcttacccgatacattttcacataaaggtgctgtgcaaaatagtgccattagtaacactatgatttgtgctctcattcagcataaatataaacttgctggaaagatgatggagcaagatggttttcatgaaccatataggcaacaccttattccagaattcaatcaagtacgtaaactatcacgtcaacatgatgcatatgcaactgttatcagtggagctggacctacaatactcactctttgtccaaaagaaaaaagtggtaaattagttagaacactacgtgagaaaattaataattgtgcttcagaactagtaacaattaatgaaataggtgttaaagatgaagtggtgtacctaaagtcctaa

SEQ ID NO: 3134 - DNA, 807 bp, Staphylococcus epidermidis
atgactcagtataaaatggtagttttagatatggatgatactttaatgaatagtgataataaattatccattgagacaaaatcttacttattagatattcaaaagcgtggttattatgtggtattggcctcaggtagaccaacagaaggtatgttacctactgcgagagaattagagttaaataaatataacagcttcattattagttataatggaggtaaaactataaatatggctaatgaaaatgtagaggtcgatcagcctgtttcaaaggaagatttcgataatattgtagattattgtagagataagaactttttagtacttacttatgataatggatatatcattcacgatagtagtcatgaatatatgaacatagaatcacaacttaccggattacctatgaatcgtgttgctgatttgaaggaatatattaatcatagtgtgcccaaagttatgggtgtggattatgtaggtcatattaccgaagcacgtattgaattggatggttacttcaataatgatattgatgtgacaacgagtaagccttttttcctagagtttatggcaaagaatgtttcgaaggggaacgcaataaaagcactttgtaaaagattacaaatttctctagaagaagttatagtattcggggacagtttgaatgataagtcaatgtttgaagttgctggatattctgtagcaatgggaaatgctagtgatgaactcaagaaaattgctgacgaagtaactttagataataattctaacggtattccttatgcattaaaagaacttttggtttaa

SEQ ID NO: 3135 - DNA, 483 bp, Staphylococcus epidermidis
atgtcatctgacacaaacagtttagcacatacaaaatggaattgtaagtatcacatagtctttgcaccaaaatatagaagacaagtgatatatggaaaaatcaaaagagatattggagttattttacgtcaactatgtgaaagaaaaggcgtagaaattatagaagcagaagcatgtaaagatcatattcatatgttagttagtattccacctaaattaggagtatcatcatttgttggatatttaaaaggtaaaagtagtttaatgatttttgatagacatgctaatttaaaatatagatatggaaatagaaagttttggtgtaaaggattttatgtagatacagtaggtagaaataaaaaggtaattgaaaattacattcgtaatcaattacaagaagatatcgttgcagatcaaatttcaatggaagaatacctagatccctttacaggagaagaaattaaaaaaagacgaaaaaaatag

SEQ ID NO: 3136 - DNA, 315 bp, Staphylococcus epidermidis
atggttggacaaacaaatttattcgatgatgttataaagaaagaggaacgctttgttatagttgttcaagcacttgaagaaaaaaatggtaagctcttaaaacggactttgagagaatatccaagcttagagcacacgcaaatgaatgaccttttctctcatcttaaagaagtatttcttgaagaaccttttgaggtcaatcaatcagcatatagcattactgtttatacaaacctagattatgctgcagatcaagtatatgcacatgttaaacgctataaaggaaaacatgactggacacatactgcgaaatag

SEQ ID NO: 3137 - DNA, 1449 bp, Staphylococcus epidermidis
atggaagataataatatgaaacgtggtctcaattcgagacatatatctatgatagctataggtggcgctataggtactggactttttgtggcaactggaagtgtcatttctcaagctggcccaggaggagctatattagcttatatactaattggtattatgctttattttttaatgtcatcaataggagaattagcaactttctatccggtttctggttcttttagttcatactctaccagatttgttgattcgtcacttggttttacaatgggttggttgtattggggtatgtggtcacttgtaacaagtgtagatatcattgttgcttccaatgtattacaatattgggatgtatttaaagttttaaatccacttacatggagcttaattttcttaactctgttgtttttaattaatattttttctgttaaagcttttggagaaactgagttttggttatcactgatcaaagtcattactataattgtatttattatttttggaattatgatgattttcggtattcttggtggtcatacatatggctttgagaattatactaaaggtcaagcaccttttgtcggtggaatatcaggcatattaagcgttcttttagttgcaggtttttcagttggtggtactgaagtagtcgcagtaacagctggtgaatcaaataatcccgaaaaatcaatgcctaaagctataaaacaggtattttggagaatattactcttttacgtattgtctatagctgtgatagctgccatcattccatatacggatccacttttacttaatgaaaatgagtctgtatcacaaagtccgtttacaattgttttcgataaaatagggatcgcttttgctgcatccgtcatcaacgctgttatcttaacatcattattatcagcagctaactctggtatttatacaacaagtagaatgctattttctttaagtgctgataaacaagcacctaaattctttggaaaactcaatgataaaactaaattacctatgcgtgcattaattacaacatatattattattgtattagtcattgtttatgctaattttaatgctaatgctgtatttaacttattaaatatcataggatctatggttattgtagtttggggatctagtatttggtcacaaattagattaagacaagcaattaaaaaacagggtaaaaatccagataaactgttgccatataaagcacctttttacccagtcggacctattattgtccttttcacattattattcttattattaggtagttcctttggtagtatcgcatctggtgatattttaggtgtcattcgaaactttacaccattatttattctagctatcatctatattgctcataaattaatcaaacggacacattttgtcaaactggaagaaatagatttaactccgcataattacaagaattaa

SEQ ID NO: 3138 - DNA, 1515 bp, Staphylococcus epidermidis
atgtcaaaacaggatggaaaattaactggactttttggtgcgccagtttcggatagagaaaatagtatgacagcaggacaacgtggaccattattaatgcaagacgtttattatttagaacaaatttctcacttcgatagagaagtgattcctgaacgtcgtatgcatgcgaaaggttcaggtgcatttggaacgttcacagttacaaatgacatcacacaatatacaaatgcgaaaatattctcagaagtcggaaaacaaacagagatgtttgcacgtttttctactgtttcaggagaacgtggagcagcagatttagaacgtgatatacgtgggtttgccttgaaattctacactgaagatggaaactgggatttagtaggtaacaatacgccagttttcttctttagagatcctaaactatttattagtttgaatcgtgctgtaaaacgagatccacgtacaaatatgagaagtgcacaaaataactgggacttttggacaggtctaccggaagcattgcatcaagtgacaatattaatgtcagatagaggtatgccaaaaggattccgaaatatgcatggattcggttctcatacgtattctatgtataatgataaaggtgaacgtgtatgggttaaatatcatttccgtacacaacaaggaattgaaaactatactgacgaggaagcggctaaaattgtaggtatggatagagattcttcacagagggatttatataatgctatcgaaaatggagattatccaaaatggaaaatgtacattcaagttatgacagaggagcaagctaaaaatcatccagacaatccttttgatttaacaaaggtatggtataaaaaagactatccactgattgaagtgggagaatttgaattgaatcgtaatcctgagaattattttcttgatgtagagcaggcagcgtttacgcctacaaatattgttcctgggttagattattcaccagataaaatgctacaaggacgtttattctcatatggagatgcccaacgttatcgtttaggagttaatcattggcagattcctgtcaatcaacctaagggagttggagttgagaacttgtgtccatttagtcgtgatggacaaatgcgtttcttagataataaccaaggtggaggcccacattattatcctaataatcaaggtatatatgagtcacagcctgaacacaagaagccaccattcccgacagatggtgatggttatgaatataattatcgccaggatgatgacaattactttgaacagccaggtaaattattcagattacagtctgaagatgcaaaagagcgtatcttcacaaatacagctaatgcaatggatggggtctctaaagatgtcaaagttcgccacattcgccactgctataaagctgatccagaatatgggaaaggtgtagcaaaagctttaggtattgatatcaatcaaatagatttagagacaaatcaagacgaaacatatgaaaactttaaataa

SEQ ID NO: 3139 - DNA, 150 bp, Staphylococcus epidermidis
gtgcgcgtaaatattacattagcttgcacagagtgtggcgatcgtaactatattactactaaaaataaacgtaataatcctgaacgcattgaaatgaaaaaatattgtccaagattaaataaatatacgttacatcgtgaaacaaaataa

SEQ ID NO: 3140 - DNA, 270 bp, Staphylococcus epidermidis
atggcgaagaaatctaaaatagcaaaagaacaaaaaagacaagaattagtaaataaatattacgagttacgtaaagaattaaaagcaaaaggggactatgaagcattaagaaagttgccaagagattcatctccaactagattaactagaagatgtaaagtaactggtagacctagaggtgtgttacgtaaatttgaaatgtctagaattgcatttagagaacatgcgcataaaggtcaaattccaggtgtaaaaaaatctagttggtaa

SEQ ID NO: 3141 - DNA, 849 bp, Staphylococcus epidermidis
atgcaaacagtcatgaatgaagaacttgcacaatggtttgcagaaaacgattatttttatatcatgcatagatttaatgaagaaaatagaattccatttataaaaaaaatgcatcatgcagggttatttgcttctatttctgttggagttaaagaaaacgaatttaattttattgaaaaattagcttcttcatcgctcataccagaatatataacaattgatattgctcatggtcactcaaattcagttataaatatgattaagcatataaaaaaacatttaccaaatagttttgtgatagctggtaatgttgggacgcctgaaggagtaagagaacttgagaatgccggtgcagatgctacaaaagtaggtattggtccaggaagagtatgtattactaaaattaaaactggatttggtacaggaggttggcaactttctgcgttaaacctttgtaataaggcagctagaaaacctattattgcagatggagggttaagaacccacggtgatatagccaaatcaattcgttttggtgccactatggtaatgattggctctttatttgctgcccacgaggaatcaccgggtgaaaccgtcgagctagatggcaaaaaatataaagaatattttggtagtgcctcagaatatcaaaaaggtgaacataagaacgttgaaggtaaaaaaatgtttgtagaacacaaaggatctcttaaagatacccttactgaaatggaacaagatttacagagttctatttcatatgcaggaggaaaggacttgaagtcattaagaacagttgattacgtcatagttagaaattcaatttttaatggtgatagagattag

SEQ ID NO: 3142 - DNA, 942 bp, Staphylococcus epidermidis
atgattaaagctcaaaatgatatacgtcatcaaattaatcgatggattgattctgattcaaatgacgataatactcaattagcgattcctaaaaagcaagaatttgcaatcaacaatatacagatgaatatgactaaaaaagatgttgaagcacaattgggacaacataagcgtatgacttcgagtgtgtatggcacaaattggtacacatattattcaaatgattataatcaatttttgatggtgagttatattaacaatcatgttaatgcactgtatacaaatcaaaatcttatttcatcaaaatctcaaattaagtatgatactcctaaagatgttgttagggaaaaatatgggtccccgattcaagttataaaaaaagggaaagttggttttgatgtaaaaagtaatgaatatgatgttttccataaagaccatatttataccacagtattttatgataagcacagagataatggtgtgaagtcattattacaagttagtgagaaaatggaaaatcgattaagatatcaatatgggaaaccatctaaattacttgcaaagagttttgagttgcaaaattttgacattgtcaatgctgaaagaaaacagcatggcttaaaaacattagattattctaaggatgtttctcatactgcgcgtaagcatagtattgacatggttaagcataattattttgaccatataaatcaaaagaaactttctccttttgatagattaaaaaaagatggaatagaatttaatgctgctggagaaaacttagcatatggacaattgaatagtatctatgcacatgaaggtttgatgaattcaatggggcatagaaagaatattttaaacactcattttgattatttgggcgtaggtgtatatttcaatgatcgaagacaacccttttggaccgaaaattatacaagttaa

SEQ ID NO: 3143 - DNA, 621 bp, Staphylococcus epidermidis
atgagagaactcactaagcgacaaagtgaaatatatgattatattaagaaaattgttcaaacaaaaggttatccaccaagtgttcgagaaattggcgaagctgtcggtttagcttcaagttctacagtacatggacatttatctagattagaagaaaaaggatatataagaagagatcctactaaacctagagctatcgagatagttagtgaacaattagatgaggtaaatgtagaggaaacaatacatgttccggttatcggtaaagttacagccggcgttccaattacagctgtagaaaatatagaagaatattttccactaccagagcacttaacttcaacacataacagcgatatatttattttaaatgtagttggggaaagtatgattgaagctggaatattagatggcgacaaagtaattgtacgaagtcaaactattgctgaaaatggtgatattatagtagctatgactgaagatgaagaagctactgttaaacgcttctataaagaaaaaaatcgttatagactacaacctgaaaatagtactatggagcctatttacttagataatgtcattgtagtaggtaaagtaataggattatatagagaaatgtaa

SEQ ID NO: 3144 - DNA, 234 bp, Staphylococcus epidermidis
atgattttaaaatacaaatataaatttttaacatatatgacaatagtaatagtgtcttgtattattttttcaactttctttttaagcgttaaccaaggtgctcaatcagaacaaacgtacgaaatgactgaccacaagattcatcaacataatcaacaaggaactactcaaaactataaagacaaacaaaatagcgaacagaatgatcagtctgtgttcgcattagttaattaa

SEQ ID NO: 3145 - DNA, 237 bp, Staphylococcus epidermidis
atgagtaaagaaaatttaaatattgatagaataaatgaattagccagaaaaaagaaagaacatggcttaaccaatgaagaggctaaagaacagactaaattaagaagacagtatttagaagaatttagaaaagggtttaagcaacagatagaaaatactaaggtcattgaccctgaaggaaatgatgtgacacctgaaaagttaaaaaagatacaagaagagaaacacaataaataa

SEQ ID NO: 3146 - DNA, 1989 bp, Staphylococcus epidermidis
atgtttaatgaaaaagatcaattagctatagatacgatacgtgctttaagcattgatgcaatcgaaaaagcaaattcaggacaccctggattacctatgggagcagcacctatggcgtatactttatggacgcgccaccttaattttaaccctcaatctaaagatttttttaatagagatagatttattctatcagcaggtcatggttcggctttattgtatagcttattacatgtctctggtagtttagaacttgaagaacttaaacaatttagacaatggggttcgaagacgcctggacatccagaatatagacatactgatggcgtagaagttactactggtccattaggtcaaggttttgccatgtctgtagggatggcgttagcagaaagtcatttagcaggtaaatttaataaggaccaatttgatatagttaatcattacacttatgtattagcgtcagatggtgacttaatggaaggtatctcacatgaagctgcatcttttgcaggtcataatcagttagataaattaattgtcctttatgattcaaatgatatatctttagatggagatttagataaatcattttctgaagatacaaaacagcgtttcgaagcctatggttggaactatattctagttgaaaatggtaacgatttagatgagattgataatgcaatcactcaagctaaatcacaacaaggacctactattatcgaagttaaaactattatcggttttggttctcctaataaagctggttcaaatggagttcatggtgccccacttggtgaagaagaacgtgcacttacatttaaagaatatggattagatcctgaaaaacgttttaatgttcctgaagatgtatacgaaatatttaaatcaacaatgttaaaacgtgcaaatgaaaatgaagaggcttggaataatatgcttaaaaattatagtgaagcctatccggaattagctgaagaatttaaattagcaatgagtggtaagttaccaaataattacgctgatgccttaccagaatatgatttaaatcacagtggtgcttctagagctgattcaggagaaataattcaaaaattaagcgagtttgtaccttcattctttggtggatcagcagacttagcaggttcaaataaatctaacgttaaagaagctaaagattataataaagatactccagaaggtaaaaacgtatggtttggtgtacgtgaatttgcaatgggagcagcaataaacggcatggcagcacatggtggacttcatccatatgcagcaacattctttgtattcagtgattacctaaaaccagctttacgattatcatcaatcatgggactcaattcaacgttcatctttactcatgattcaattgctgtaggtgaagatggccctacacacgaacctattgaacaattagcaggtcttcgtgctattcctaacatgaatgttattcgtccagctgatggtaatgaaacacgtgtagcttgggaagttgcacttgaatcagaacaaacaccaacatcattagtgttaactcgtcaaaatttaccaactttggatgttgataaacaaacagttgaaaatggtgtgagaaaaggtgcatatattgtttttgaaacagaacaacaacttgaatatttattattggcatctggatcagaagttaatttagctgtagaagccgcaaaagaattagagcaacaaggtaaaggtgtacgagttatttctatgccaaactggtacgcatttgaacaacaatcttctgaatataaagaatcaattttaccttctgatgttactaaacgtatagctatcgaaatggcatcaccacttggttggcataaatatgttggaattgaaggtaaagtcattggtataaatagttttggcgctagtgctcctggagatttagtagttgaaaagtatggattcactaaagaaaatattttaaaacaagtccgttcattataa

SEQ ID NO: 3147 - DNA, 228 bp, Staphylococcus epidermidis
atggcaatttgggtagcaattattctaatcgttatagcacttattgcaggtttaattggtggtttcttattagctagaaaatatatgaaagattacttaaagaaaaatccacctatcaatgaggaaatgctacgtatgatgatgatgcaaatgggacaaaaaccatctcaaaagaaaattaatcaaatgatgacaatgatgaataaaaatatgaatcaaaaaatgtaa

SEQ ID NO: 3148 - DNA, 468 bp, Staphylococcus epidermidis
ttgacttatttagtcttttccattgtatttgcatttctaatgggtgctgtcgttatagtgataagaatgaaagcacaacagtttccagtcaatgaaaagaaaattatcttaccaccatttttcatggctaccggtgcattgatgtatgtggtaccatactttcgattaactggtatggaaatgttagaatcattgatattaggtgttttgttttctactgttttaatctggacttctagattcgaagttaaagatgataatatttatatgaaacggtctaaagcatttccaattattttaatatcattgttaataataagaacagttattaaaatatttataagtagcgaaattgatccaggtgaaattgctggtatgttttttttactcgcattttgtatgatagtaccttggagatgtgcaatgctttataaatataaaaaattgcaaaagaatcttattaagtaa

SEQ ID NO: 3149 - DNA, 1125 bp, Staphylococcus epidermidis
atgaaaattgtacataccgctgattggcatctgggtaaaattttaaatggaaaacaattgcttgaagatcaaaaatatattttaactcagtttaaacaacatatggagaaagaacagccagatttaatagtaattgcaggtgatttgtatgatacctcatatccaagtaaagaagcgataggtttacttgaagagactattgaatacctaaatatagaacttaaaattccaataatcatgataagcggtaaccatgatggtagggagagattgaattatggctctaaatggtttgagaataatcaactttacataagaactcaactagaaaatattgatgatccaatagaattgagtggtgttcaatttttcactttacctttcgcaactgtgagtgaagtacaaaattattttaaggataagcaaatagaaacatatcaacaagcattaaacgaatgcttagagcaaatgtctagttccatagataataataaggtgaatatattaattggtcatttaactattgagggcggtaaaacttcagattcggaaagaccattaactattggaacagtagaatcagttgatatgcattcttttcggttgtttgattatgtaatgctcgggcacctacatcatccatttagtataaataactcttttatcaaatatagcggttcgattttgcaatactctttctctgaagtaaatcaatctaaaggatatagagttcttgatattgaaaacaaccaactattaaatgaaaccttcgttcctttaaaacctctaagagaactagaagttattgaaggtgattatgaggatattattcaagaaagaattaaagtaaaaaataaaaataattattttcattttaagttaacgaatgtttctcatattactgatccaatgatgaaactgaaacaaatttatcccaatatattagcactatcgaatgtagtatttgatcatagtgagaattttagccatgttgaaatcaaaaaacaagatgatcagacaattatagaaaatttttataaaaatatgacagatcaacatctgagtcaagttcaatcagacaaaataaagcacttgttaagttttatattggatagggaggggtaa

SEQ ID NO: 3150 - DNA, 3030 bp, Staphylococcus epidermidis
ttgaagcctttacatatagttatggagaactttggcccttttattaaagaaactattgattttgagcaagttgaaactgatcaactctttttaattagtggtaaaactggatctggtaaaacaatgatttttgatgctatagtatacgcattatacggtatggcttcgaccaaaactagaaaagaaggagatttaagaagtcattttgcagacggtaaatcgccaatgtctgtaatttatcaatttaaagttaataatcaaacttttaaaattcatagagaagcgccatttattaaagaggggaatataactaaaacacaagccaagttaaatatatatgaattagttgataatcaatttgaattaagagaaagtaaagtgaatcaaggtaatcaatttatcgtacaattattaggcgttaatgctgaacaatttcgtcaattatttattttgcctcaaggagaatttaaaaagtttcttcagtcaaatagtaaagacaaacaatcgattcttagaacactttttaatagtgagcgatttgatgagattagacatctacttgtagaaaatgtaaagcaagaaaaagtacaaattgaaaatagatacactcaaattgaaaatttatggaatgatatagatacatttaataatgatgaattggccttatataaagaattagagagttctcagacagataaaatgattgaaaaattcccacaatttaatgattatggatgcaaaattctcaagtcatttgaagaagctaagaataaaataactaaggaattagatgatttaaatcataaatataaagtgaatgttgaattaagtgagaatactaaaaaattaaaagcggaaaaaatcaaatttgacgatttgaaaaaagaacaaaattatattgataaattaaagcaagaattaaaaatgattcaggaatctaaagtattaatcacttattttactaggttacaaagtttaaaaaaagataaagatgaattagtgtcacttcatgagcaatcaaaattaaacgaaacaaactatcacaatgaaattaaaggttttcaaaaacaactcgaacatttatcaacacgagaaaatgaaataactcaatttaatcagtatctagaaaaaaaccaagttttcttcaatcaattagataagattattagtagttatcaacaaaaaccggtaattgaagaagaaataaaaagattatacagtgaatataatgatttaataaccaaaaaagaagaattgacgaaagaaatgaacaacaagaacaaagattttgcaattattgaacattacactgaagagatttataagctgaaaaagattatagatgaatctgaaagacaaaaaaaggatgagaaattatttgataaattacaactagataaatcatcttatcttagcaaattaaaagagaagaaagaacagttaaatgaaattgaatcatcaatcaccaatatagatgcgactttaattgatttgaatgacaaaaaggattttgtaaatgaaataaagtccgctatgtcaattggagatacctgtccaatttgtggtaatgaaatacattcattgggagaacatattgattttgaatcaattgctcaaaaaaataataaaataaaacggttagaaagtaagaaggtaaaaattcgtgatgaaataatcaaaatagaaactcgaattgaagaattaaatcatagagaaaatgaattaaattttgagaaacaagaaaagaaggatattagtgagcttcaaaaacagcttaatcatttgaatcaactaaaagacgagcaacaaagcataaataagttagtagaaaattttgagaaacaagaaaaagaaatagttaataaaatacatcagtttgatttagatttgagtcgaaagaacacgcaaaaagaaaaactggaaattcaaattaatgattttgaacgacattcacaattttcatcagtaaatgattttgaaacttattattctcatgctaaaaaacaagttgagacgtatgagtatgagaatgagaaaactaaagataaattgaacgagttgaataataagttaaagatagaaatgaatgatcaaaaacatttaactgagaatttaactcaaacaagtaaggaaataaataatttagaattaaaaatggaaaaagaaatgcaacaacttggttttgagtcttatgatcaagtcaaaagcgctgcagatttaagtgctcaaaaagatgaaatagaaagagaaattaatatttataataagaactatcaaagttatgaaatagagattaacagactcaaagaattggttaagggcaaaaaattattaaatttagaagaattacgacaatctatagaaaaaacaaacttgaaactagatgaaacgaattcacaaatagctacgattagctataaaatagataataactctaacaaatttaataaaataaaaaatataattcagattctcgatgatgaattaaaagtgcaaaaagaaattttcttgctatcagaaatattagctggtaaaaatgattataaattaacactagaaaattatgttttaatttattacttggaaaaaataatttttcaagcgaatcaacgactttcatttatgagtggaaatagatatcaactgattagaagagaggccatttccttagggttaagtggattggaaattgacgtgtttgattttcattcaaataaatcgagacacataagttcactttcaggaggagaaacatttcaagcatcactagctttagctttaggattaagtgaagttgtacaacaagaatcaggtggaatcactttagattctatgtttatagatgaaggatttggcactttagatcaagaaacactcgaaactgcgatagatacattaattaatttaaaatcatctgggcgcatggttggtataatctcacatgtaagcgaacttaagcaacgcatacctttgattttagaagtgacaagtaaccaatacgaaagtcatacacaatttagaaaaaattaa

SEQ ID NO: 3151 - DNA, 351 bp, Staphylococcus epidermidis
atgttaaaagaatttaaagagtttgcactcaaaggcaatgttttagacttagctattgctgtagttatgggagcagcgtttaataaaatagttacatccctagtccaatacatcatcatgccattaattggtaaattatttggttcagttaattttgctgaagattggtctttttgggggattaagtatggacttttcatacaatcaataattgacttcatcataattgcttttgctttatttatctttgttaagatagctaatacagttatgaaaaaagaagagaaagaagaagaagtagaagaaaatactgttttattaacagaaattagagacttgcttaaaaaataa

SEQ ID NO: 3152 - DNA, 1641 bp, Staphylococcus epidermidis
atgaattcttcttcacaagagaagaaaaataaaaagttttcttcggttttcatctatagttcaattattgcagctatagtagtgattatcggtgctgtttggcctgagaaattcgatagcgttactaatacggctaagatgtggattactaataatttgggttggtattaccttattttaacaacagtaattgtattcttctgtgttttcttgattttcagtccaattgggaaacttaaattaggtaaacctaatgacaaaccagaatttaatacaatttcttggttcgcaatgctattcagtgctggtatgggtattggtttagtattctatggtgcagctgaacctatggcacattttgctgctccaccaacagctgatcctgaaacgacaaaggcctacactgagtctttaagatctacatttttccattggggattccatgcttgggcaatttatggcgtggtagctttagcacttgcttattctcaattccgtaaaggtgaacctggattaatttctagaaccttacgtccattattgggagataaagttgaaggaccaataggtactcttattgatgtactttctgtttttgctacattagttggtgtagctgtgtctctaggtatgggcgcacttcaaattaatggtggcttgcattatttatttggtgtgccgaacaacacttttgttcaaggtattattattgttgtcgtaacaattttatttattgctagtgcttggtcaggtttaagcaagggaattcaatatttaagtaatttaaatataggtcttggtacgatattaatgattgtaaccttaattgttggaccaactgttttaatcttaaatatgatgacaagttctacgggtagcttattaaattcattcttatttaacagttttgatactgctgcgttaaacggtcaaaagcgtgattggatgtcaacttggacattatactattggggttggtggctaagttggagtccattcgttggtgtattcatcgcacgtgtatctaaaggacgttctataagagaatttatttcaggtgttttattagtaccggcacttgttagctttatatggttcagtgttttcggcgtattaggcattgaagctggtaaaaaagattcgggtctctttaaaatgtcacctgaaacacagttatttggtgtattcaaccatattccgttaggtattgttttatctatcattgcattattgcttatcgcttctttctttgttacttcagctgactcagcaacattcgtattaggtatgcaaactacatttggatcattaaatccaagtagtctagttaaagtaacctggggagttgcgcaagcacttattgcctttgtactattattagctggtggaggagatggctctaaagccttgaatgctattcaaagtgctgccattataagtgccttcccattctcattcgtcgtcataatgatgatgataagtttctacaaagatgcaaataaggaacgtaaattccttggattaacacttacgccaaataaacatcgcttacaagaatatgttaaatatcaacaagaagattatgaaacagatattcttgaaaaaagagaagttagaagaaataaagaaaaagaagaatag

SEQ ID NO: 3153 - DNA, 2706 bp, Staphylococcus epidermidis
atggcttctaatattaaagaacaagcaaagaaacaattcgaattaaatggccaatcatatacttactatgacttacaaacattagaagaaaaagggctagctaaaatttctaaattaccatactcaattcgcgtattgttagaatctgtgttacgacaagaggatgattttgttataacagatgatcatatcaaagcattaagtaaattcggaaatgcaggtaacgaaggtgaagttccattcaaaccttctagagttattttacaagactttacaggtgtgccagcagtagtagatttggcttctttacgtaaagctatgaatgatgttggtggggatattaataaaatcaacccagaagtacctgtggatttagttatcgaccattcagttcaagttgatagttacgctaatccagaagcattagaacgtaatatgaaattagaatttgaacgtaactatgaacgttatcaatttttaaactgggcaacaaaagcttttgataactataatgcagtacctcctgctacaggtattgtccatcaagtaaacttagagtatttagcaaatgtagtacatgtaagagatgttgatggtgaaaaaacagcatttcctgacactttagtaggtactgattcacatactacaatgattaatggtattggtgttctaggttggggcgttggtggtatcgaagccgaagcaggtatgttaggacaaccatcatatttcccaattcctgaagttatcggagtgcgtttaactcactctttaccacaaggctcaacagctacggatttagctttacgtgtgactgaagaattacgtaaaaaaggtgtagttggaaaatttgttgaattcttcggtccaggtgttcaacatttaccattagcagacagagctacaattgctaacatggctccagaatatggtgcaacgtgtggtttcttcccagtagatgaagaatcattgaaatatatgaaacttacaggccgtgacgaagaacatattgaattggttaaagaatatttacaacaaaaccatatgttctttgatgtagaaaaagaggatcctgaatatacagatgttattgatttagacttatctacagtagaggcatcactttctggtccaaagcgtccacaagacttaattttcttaagtgatatgaaaaaagaatttgaaaaatcagtaactgctcctgctggtaatcaaggacatggacttgatcaaagtgaatttgataaaaaagcagaaattaattttaatgatggatctaaagcaacaatgaaaacaggagatatagcaattgctgctattacctcatgtactaacacttctaatccatatgttatgttaggtgctggtttagttgctaaaaaagctgtagaaaaaggattgaaagtaccagagtttgttaagacgtcacttgctccaggttcaaaagttgttacaggatatttaagagattctggattacaacagtatttagatgatttaggtttcaatcttgttggttatggttgtactacatgtattggtaactcagggccactattacctgaaattgaaaaggcagttgcggatgaagatttattagtaacttcagttttatcaggtaatcgtaattttgaggggcgaatccatccattagtgaaagcaaactatttagcctcaccacaacttgttgtagcttatgcgcttgctggtacagtagatattgatttacaaaatgaaccaattggtaaaggtaaagatggtaaagatgtatatttacaagacatttggccttcaatacaagaagtttctgatactgtagataaagttgttacacctgaactattcttagaagaatataaaaatgtatatcataacaatgaaatgtggaatgaaatagatgtaaccgatgaaccattatatgatttcgatcctaattcaacatatattcaaaatccaacatttttccaaggattatctaaagagccgggtaaaattgaaccacttaaaagtttgagagttatgggtaaatttggtgattctgttacaacagaccatatttctccagcaggtgctatcggtaaagatacaccagcaggaaaatacttattagatcatgatgttgcaattcgcaactttaactcttatggttcccgtcgcggtaaccacgaagttatggtacgtggtacatttgccaatattcgtatcaaaaaccaacttgctccaggtactgaaggcggatttacaacatattggcctaccggagaaataatgcctatatatgatgcagcaatgaaatataaagaagatggaactggcttagttgtcttagctggtaatgactatggaatgggatcttctcgtgactgggctgcaaaaggtaccaatttattaggagttaaaactgtcattgcacaaagctatgaacgtattcatcgctctaacttagttatgatgggtgtactaccgcttcaattccaacaaggagaatctgcagaagcactgggtcttgatggaaaagaagaaatatctgtagatattaatgaagatgtacagccacatgatcttgtaaatgtgactgcaaaaaaagaaaatggtgaaatcattaatttcaaagctattgtacgttttgattcactagtagaattagattattatcgtcatggtggtattttacaaatggtactaagaaataaacttgcgcagtaa

SEQ ID NO: 3154 - DNA, 468 bp, Staphylococcus epidermidis
atgatatacagtttgactgaaattgaagcaagatatcaagaaaccgataaaatgggggttatctatcacggtaactacgcaacatggtttgaagttgcgagaacagactatataagaaagcttggcttcagttatgcctctatggaagaacaaggtgttatttcaccagttgtagatttaaaagtgcaatataaaaaatcaatctactatcctgaaaaggtgacagtaaaaacatgggtggaaaaatattctagattacgttcaacttattgttatgaggtttataatgaaaatggagagttagctactactggttcaacagaacttatctgtattaaagcagatacatttaaacccatacgcttggatagatattttcctgagtggcatgagacttatagtaaagttaaccagttaaataaagaaggtaaagatgctgaggttacgtttggcattaatcatttataa

SEQ ID NO: 3155 - DNA, 297 bp, Staphylococcus epidermidis
atgaatataaaattaactcaaaaggcagtagaatggtttaaaaacgaattggatttacctataagcaataaagttcttcaattttatgtaaaatatggaggagaattccaattaaaacaaggatttagtccagcgttcaccgtagaaaataaagatgctattgatataggttttgaacaaacattctatgaaataaatgtcgttattgcggaaaaagatttatggtattttcaagatgaaaaactaactgtagatgcaatcgatcatgaagatgagatcatctacaaacgaaattaa

SEQ ID NO: 3156 - DNA, 609 bp, Staphylococcus epidermidis
atgatgatcatcgtcatgttaatcttgagttatctgattggtgcattcccaagcgggttaattattggtaaattattttttaaaaaagatataagacaatacggtagtggaaatactggagcaactaacagttttcgtgttcttggaagaccagctggatttatagttacgtttttagatattttcaagggatttattacagtcttttttccactatggttcccagttcatgcggatggtgttataagcaccttctttacaaatggtttaatagtaggattgtttgcaatactcggtcacgtgtatccaatatatctgaaatttaatggcggaaaagcagtagctaccagtgcaggagttgtattaggtgtcaatcctattttacttcttatcttggcaattatcttttttagtgtattaaaaatctttaaatatgtttctttatcaagtatcattgcagcaattagttgtgtgattggttcaatcatcattcatgattatattttacttgctgttagcggaattgtttcaatcatattaataattcgacacaaatctaatatagttagaatttttaaaggagaagaacctaaaattaaatggatgtaa

SEQ ID NO: 3157 - DNA, 2001 bp, Staphylococcus epidermidis
ttggcaatgaataaacaaaataattattcagatgattcaattcaggtacttgaaggactagaagcagttaggaagagacctggtatgtacattggatcaactgataaacgaggattacatcatcttgtatatgaagttgtcgataactccgtcgatgaagtattaaatggttatggtgatgcgattacagtaacaattaatcaggatggtagtatttctatagaagataatggtcgaggtatgccaacaggtatacatgcgtctggcaaacctactgcagaagttatatttactgttttacatgctggaggtaaatttggacaaggaggttataaaacatctggaggtctccatggggtgggtgcttctgtagtaaatgcccttagtgaatggcttgaagttgaaattcatagagatggtaatatctacacacaaaatttcaaaaatggtggtattccagcgacaggtttagtaaaaactggaaaaacaaaaaaaactggtactaaagttacatttaaaccagactcagaaatatttaagtcaacgacgacttttaattttgatattttaagtgagcgtttacaagaatctgcatttttacttaaagatttaaaaattacacttactgatttacgtagtggaaaagaacgagaagaaatttaccattacgaagaaggaattaaagaatttgttagttatgtcaatgaaggtaaagaagtattacatgatgttactacatttgcagggcattccaatggaatagaggtagacgtagcattccaatataatgatcagtactctgagagcatattaagttttgtaaataatgttcgtacaaaggacggaggtactcatgaagttggtttcaaaacggcgatgactcgtgtttttaatgaatatgcacgtcgtataaacgaactgaaagataaagataaaaatttagacggtaatgatatacgcgaaggtttaacagcgataatttcagtacgtataccagaagaacttcttcaatttgaagggcaaacgaaatcaaaacttggcacttcagaagcaaggagtgctgtagactctgttgtttcagaaaaattaccatattacttagaagaaaagggccaattatctaaatcattagttaaaaaagcaattaaagctcaacaagcacgcgaggctgctcgtaaagctagagaagatgcacgctccggaaagaaaaataaacgtaaagatacattgttatcaggtaagttaactcctgcgcaaagtaaaaatactgataaaaacgagttatatctagttgagggtgattcagcgggaggttctgcaaaattgggacgcgaccgtaaattccaagctattttacctcttcgtggaaaggttattaatacagaaaaggcacgtttagaggatatttttaaaaatgaagaaattaatacgattattcatactattggtgctggtgttggtactgactttaaaattgaggatagtaattacaacagaattattatcatgacagatgctgatacggatggtgcacatattcaagtattattgcttacatttttctttaaatatatgaaaccacttgttcaagctggacgtgtctttattgcgttaccgcctttatacaaattagaaaaaggcaaaggtaagaataaaaaagttgagtacgcttggactgatgaagaattagaaaatttacaaaagcaattaggaaaaggtttcatattacagcgttataaaggtcttggtgaaatgaatccagaacaattatgggaaactaccatgaatccagaaactcggacattaattagagttcaagttgaagatgaagttcgttcatcaaaacgtgtcactactttgatgggggataaggttgccccacgaagagagtggattgaaaaacacgttgaatttggtatgcaagaagatcaaagcattttggataataaagaagtccaaatactagagaatgaaaaatatattgaggaggaaacgaattga

SEQ ID NO: 3158 - DNA, 2403 bp, Staphylococcus epidermidis
ttgagtgagataattcaagatttgtcacttgaagatgttattggtgaccgatttggacgttatagtaaatatatcattcaagaacgtgcattacctgatgtacgtgatggtttaaaaccagtacaacgacgtatactattcgcaatgtattcaagtgggaatacgtatgataaaaatttccgtaaaagtgcgaaaactgtcggtgatgtaataggtcaatatcatcctcatggagactcttcagtatatgatgctatggtgcgcttaagtcaagattggaagttacgtcatgttctaattgaaatgcatggtaataatggtagtatcgataacgatcctccagctgctatgcgttacacagaagctaaacttagtcaattatcagaagaactattaagggatattaataaggaaacagtatcatttattccaaactatgatgacacaactttggaaccaatggtattaccagcgagatttcctaatttattaattaatggatctacggggatttcttcaggatatgctactgatatcccgccgcataacctcgccgaagtaatacaaggcacattgaagtatatcgatcaacctgatattacaattaatcaactgatgaaatatatcaaagggcctgactttcctacaggtggtatcattcaaggaatagaaggtataaaaaaagcgtatgagaccggtaaaggaaaggttgtcgtgcgttcacgagtagatgaagagcctttaagaagtggacgtaaacaattaattgtgactgaaattccgtatgaagtgaataaaagtagtttagttaaaagaattgacgaattacgtgccgataaaaaggttgatggtattgtagaagttcgagatgagactgatagaactggattacgaattgcaatcgaattaaaaaaagatgctaatagcgaatcaatcaaaaactatttatataagaattcggatttacaaatttcatataattttaatatggttgctattagtgaaggtcgccctaagttgatgggattacgtgaaattatagaaagttatttaaatcatcaaattgaagtggttacaaatagaacgcgttatgacttagagcaagctgaaaaacgtatgcatattgtggaaggattaatgaaagctttatctatacttgatgaagttattgcattgatacgtaattctaaaaataaaaaagatgctaaagataatttagttgcagagtatgactttactgaagctcaagcagaagctattgtcatgttacagctgtatagattaacaaatactgacattgaagctttgaaaaaagaacatgaagagttagaagctttaataaaagaattaagaaatatcttagataatcatgaggcacttttagcagtaattaaagatgaactaaatgaaattaaaaagaaatttaaagtggatcgactatctacaatcgaagctgaaatttccgaaatcaaaattgataaagaagttatggtgcctagtgaagaagtgattttaagtttgacgcaacatggctatataaaacgtacatctacacgtagttttaacgcaagtggtgtgactgaaatcggtttgaaggacggcgaccgtttattaaaacatgaaagcgtgaatactcaagatactgttcttgtatttacaaataaaggtagatatttgtttatacctgttcataaattagccgatatccgttggaaagagcttggtcaacacatatcacaaattgtgccaatagatgaagatgaagaagtggtaaatgtatacaacgaaaaagattttaaaaatgaagccttttatattatggctacaaaaaacggcatgattaagaaaagtagtgcttcacaatttaaaactactcggtttaataaaccactcataaatatgaaggttaaagacaaagatgaacttattaatgtcgttcgattagagtctgatcagttaattactgttctaacccataaaggcatgtcattaacttattcaactaatgaattatcggatacaggcttaagagcagctggtgttaaatcaattaatcttaaagatgaagactatgttgttatgacagaagatgtgaacgactcagattccataataatggttacacaacgtggtgctatgaagcgtattgattttaatgttcttcaagaagctaaacgcgcacaacgtggaattactttactaaaagaattaaagaaaaaaccgcatcgaattgtggcaggtgcagtagttaaagaaaatcacacgaaatatattgtattctctcaacatcatgaagaatatggtaatatcgatgatgtacacttatctgaacaatatactaatggatcatttattattgatactgatgattttggagaagtagaaagtatgattctagagtaa

(The sequence listing continues in the following parts.)
